United States Patent Application Publication US 2007/0016974 A1 - sequence listing, part 3

SEQ ID NO: 12750 - DNA, 457 bp, Oryza sativa
  Clone ID: uC-osflcyp169d08a1
aacgcaacaagaatgtgaacactataacttagacagcaaaaagatgatccaggttccacatccgttacatcacgacagagtaaaaatagtttctcagtagcacgcgaacataggattgttgatgtgaaacacatgcattcgacaaaagggaaatgaaatacgacaacgaaagcagttctcttagcagtagaccaactagaacatgtaagggtaacggcacaacacatgcggcggccaaaaatttagagcttgtcctcgaaatcggagaggggagtcatctgctccttgagacccttcctcttgcggatatcctgcaccagggttgaagcctgcgagccagcttcaagaggatcagaggtcatcatgtcccaatggtcgaacacacactgggggaaggcctggccagatgtcgcagccctaagctggcttgagaacccaaaggactcgatgacaggga

SEQ ID NO: 12751 - DNA, 470 bp, Oryza sativa
  Clone ID: uC-osflcyp169d09a1
gaaaaccaagtagtccttcaaacatggattaagaagacaatcattgtttgcagttttgcactgtctgcactttgcactactttcagtcaggcacccaaactagcagtaaaagaatacagaatctacagcaggatgcattgcagattaatttgtggtagaagcaattgctggcttatcgtctttctgtacacccagtttatcatgaagagaaatgttatctggaatcattgccgaggcagatttcgcaccagaagtcgtcagtgacatacccttctgaagagattgatcaagactgctgttgctttcagacaaatcaccatcaggtaggcctaggttgccgtgaaatttcttcacatctgggaatgttgggaagcccattatggcatcaccatgaagcatattttgtgaattcagctcatgaagcatatcaaccgtgagacatatgtcaaattcatttgcctggagtaact

SEQ ID NO: 12752 - DNA, 244 bp, Oryza sativa
  Clone ID: uC-osflcyp169d10b1
tttgttaatggcgacgagaacatggctcttgagaagctctgctctggctgaggccctataagccgatatgaactgtaaattggatccccattcgttataagacaacagtgcttgctaatgctcctgttctgccatttaagtgtggctttatgacactcttctaaaaaaaaaaaaaaaaaaaaaaaaaaaaaaaaaaaaaaaaaaaaaaaaaaaaaaggggatgctagtaaaaaaaaaaaaagat

SEQ ID NO: 12753 - DNA, 458 bp, Oryza sativa
  unsure (1)..(458): unsure at all n locations
  Clone ID: uC-osflcyp169e01a1
acgacaaaccacgaacttggatattaaagatgccacaaagaaggttcacataaacaacacaggtcacagcagcgaaagctacaagcaaaccctgcataatcgaaaagcaaatgtttttcaaaaccagacacacaaactgatagatagaagcccacacggacagatcataggatagcagcagtaatcaagcattgccaaggcaccaggcaagaaccctgaacctctctagtactcgtcaccctcatcaccctcgtcaccatcgtcgaactcggagccgacctcctcgtagtccttctccagcgcggcgaggtcctcacgggccttggagaactnccccttcttcatgcccttgccgacgtaccagtggacgaaggcgcgcttggagtacatgaggtcgaacttgatgtcgatgcgggagaacaccttgacgacgcttgtggagttgagatcatgcacac

SEQ ID NO: 12754 - DNA, 329 bp, Oryza sativa
  Clone ID: uC-osflcyp169e02a1
aagtaaaaaaacgggaccccaaaaaaaagcgggggaattccattttttttttattccaacaagaaattttggggggaaatgtccgggggacctactttcctatttaagggctttaattaaattttgaggaacaaccttggccttgggggggggggtatgggggttgaaaccactgccctttttttggggggggaaaataaaaaaaacaaagtttgaaaagaaccccttgccaaggggggcggttttggggggctcctcggggaggccccggagagttttccccgaaaaaagaatttggagccccgaatcattgaacgaaacggggggga

SEQ ID NO: 12755 - DNA, 356 bp, Oryza sativa
  Clone ID: uC-osflcyp169e03a1
ttttgtttttttttttttttttttttttttttttttttttttttttttttttttttttttaatttttaaatttttttttttattttttggaaaaaagaaaaaacataaacaagtataaaaaaaaaaaaaaaaaatttaaaaaaaaaaaaaaaagaaaaaaaaaaaaagaaaaattattaaaaaaaaaaaaaacggaagaaaatgcagtgaccaactaaaaaagcttgctctccattctaaaggaataaaaaacaacaagagacaaaaaaacccaataaaaaaagggcccaaaaaatttcccggccaaaaatctcaaaaagaaaaaattctaaaaccaaaatgccccccaatagaaa

SEQ ID NO: 12756 - DNA, 545 bp, Oryza sativa
  unsure (1)..(545): unsure at all n locations
  Clone ID: uC-osflcyp169e05b1
atttctgtgaaattgtgtgcagcaatcatgtctggtcgcggtaaaggaggtaaaggtctcggcaaaggaggcgctaaacgtcatcgtaaagttctccgagacaacatccaaggaatcaccaagcctgccatccgacgtctggctcgccgaggaggtgtgaaacgtatttcgggtctgatctacgaagagacccgaggcgtgttgaaagacttcctggaaaacgtgatccgtgatgccgtgacgtacaccgagcacgcgaagcgaacgaccgagactgctatggaccgtcttctacgcgctaaaacgactagggtcgcaccctctacgggttcggcgggtgagcgtcgaagacttaaaaccaaagaagcccacgcggaagcggcaattctccgttcgttcttaatctcaacaactcaacaacgcgaaccgtcatcgggacggtattgcccgatccagtgtatagacataatcgtcaatctctctttgtgcgatatgattgactcaatcttncttgtgcaccgatcatttcgaagctcttaatcata

SEQ ID NO: 12757 - DNA, 402 bp, Oryza sativa
  Clone ID: uC-osflcyp169e07a1
aatcgaaatccctatccttgaacataaaattaacttttttggttagtcacaatcaaacacacaaacggggatcacattccaatttttccgtacgatcgccgattaatttgcactccaaactccaaacccatttacatgtccagttggcgcaaagcagagagcactgaacagacaacgatgtacagcactttttgcgcaggtggcagtagcacacccggaaattcgatcagggctgcacttaacgttgcaaagttgcagttttgatcttgcgacccattggcgtcggaagcaggccccatggtggaatcgcagttgggtctcgccgaaaaagaagaagaaggcaccgggcagtcgctcggggacctccgtttccgcctggttttcctcgccgccggcgggcgt

SEQ ID NO: 12758 - DNA, 455 bp, Oryza sativa
  Clone ID: uC-osflcyp169e09a1
caaattcaaaaaccacgatttataaagtgccggagatgaagtacacaaattaacattacatcgagttttaataaaacatcatgcgaaaagccagcaaaaacaaaaggcagcatacagctaatgaagctctactggagtagctcgcaaaaggtccgacttattttcagtagcactctactccatttcttccgaaagagtgaccatcttctactgggtgttgtacatgtgacggatcaggtcaacaacgcgagagctgtatccccattcgttgtcataccaagacacaagcttaacaaagttgtcattgagagcaataccggcctttgcatcaaagatgcttgacctgttgtcaccctggaagtctgtggaaacaaggtcctcctcaacgtaacccagaatacccttgagttttccctcagactcctccttgatagctgccttaatctgatcatagg

SEQ ID NO: 12759 - DNA, 146 bp, Oryza sativa
  Clone ID: uC-osflcyp169e12b1
ctggacgcccgccggcacggttccggacttactggccggatctacccacgcgtgtttttgaccgcgtgcagcaagtgtggatggggtgggtatctaacagttcaatggttgcgtaaaggctccacggagcccaaaaagtttgaagg

SEQ ID NO: 12760 - DNA, 452 bp, Oryza sativa
  Clone ID: uC-osflcyp169f02a1
gaaaaaaaaatgatctgctatactcaaatataatcatgatcgagaaaaaaaaatcatgtacagttacataaacacatacgtacagccagtatacaaacgcaaatgaaaactaaggcacacagcacgcgttcaactctgatcaatatctgatcaacaagcgagttcatgcgtacaccttgcaacatttccactcgtgtatagtgacagccgaaactctttcgccatccaagatatatccaacgaaacccccctacctgtcctctcgacttcctccgatccgctacgggtagctagggtcgttcggattcaagtgaagaagtcgtacttgaccggcgtgccggtgggatcgatccatggctttgcgtgcaggaagttgtcgacggtgaacttggtcgcgtccgccttgctgatcaccttcttgtaccccggccacgcgacgcgccccgcgtgtc

SEQ ID NO: 12761 - DNA, 321 bp, Oryza sativa
  Clone ID: uC-osflcyp169f03a1
tttttgttttttttttttttttttttttttttttttttttttttttttttgaagtttatatttctttgaaacgaacattttttaagcttagcagaaacaaatcagtctactgggaacaacattaaaacacaatcctttcacgagcaagcacaaggttaacaagaaggggatttctaacgggggtggccagatcccaacaaccaagcaacaaagaaccgggcaggttgtgggatgaaatgccattgttcagttaactaaatccgggaggggatttttgatcaagggacaggggccacttaaagccattggcttttttttgaa

SEQ ID NO: 12762 - DNA, 528 bp, Oryza sativa
  unsure (1)..(528): unsure at all n locations
  Clone ID: uC-osflcyp169f05b1
gctgaatctgcagctcgtctagatcctgatctattcacaaactttatgattcctagttggtttgggactgaagtgcaagaacctacaaaatgctgtccttttccattgcctgaaatttattgtgcatcccagagcaaaaagcttgctgcactggaagatattaggaggactattcgggagctgcaaattgatgacaataggaagaaggaattgacaaatgccctccatgcacagttcaaagattggttatatgcttcaggcaacatccgccagctctactgcctgcaaggcgactgaacatgcgatcatctgctttcataaaatggacctgtttactcaaaatattcgaccggtgtcggttgaagctgaccttactcccaggtgcgaaccaataatgtaaaaaaaacatgtacttcatcctatttctgcaaagtagtttgatgtatttctccaattcttttcccatttgctgnggcgtcaagtcgtgggatgtcatctttcttttcatttctggngatacacattttt

SEQ ID NO: 12763 - DNA, 435 bp, Oryza sativa
  Clone ID: uC-osflcyp169f07a1
atatcaaacgctctagaaaagattcatgtgatgaaatacatgatgaaccacgtatgttctcaaggtaaaattaattaatgcagtatagttttaactttgtccatcgatctcaacctgtaactgtgacgacacactggctacagtgccctcgaggtactagcagtatagcagtagctgtagtacgtagcagcagcagcagcaggttcactgtcttgattggattggatcggattagtagacgtagttcttgacgaacatgccctccttggcctcggcggcctcgccgtcgctggtgtacttgccgagctgcgccagcgagttggccttggcgcggaggagcagcgcgtcctgcgccgccttcacgttctccggctgcccgccccacgtcttgaggcacgtgttctgcagcgccctcgcgtacgagaacgacacgtg

SEQ ID NO: 12764 - DNA, 471 bp, Oryza sativa
  Clone ID: uC-osflcyp169f08a1
actaaaatataatgatattaaaaatttcgaactggtcctcagaatttaactagaatttcgaatcatcacgttcaacattatagggatgaattactatagattaaaggaagtacaacatcttaataagtaaaccagtacacaaactcgggtacatggggaagcctagtggttctcccctcaaattcagctgtggatgcagagcgccgtaccttaaagagtgacaaacaagtagcaccttcagcgattcatgaggcttcttagcttccgttgactaatagcctcagcaagcaccacttggtcgcctcgtcaattgccaaaactggcctccaaatagtcttttactctcaggaagatatccgtattgcagtaaaaccaaaatgttagaaaatgcctaagaattatgtcagaattctgcgacataagctgcttgccctggtagagttgtccagtcatcagccaaaaatagatgac

SEQ ID NO: 12765 - DNA, 449 bp, Oryza sativa
  Clone ID: uC-osflcyp169f09a1
aaaaagaaaccgtcattactgcactggggttgccattactccataacagtagtcaaccacaaaattggagccagcggaaattaacatgaaaaagaaatgcagccagcagaaaagtatgtactatttgacttgaaaataatgtctcgcaatgaatagttgaaccctcactgatgtcagctcgatgtagtagtagagtaaagatttagcattcatgatccgatagaaacgtcagatggtttgctcctccttagactcgacaaagtgtccaagtggatctctgcaagggaactggaggtcacaaataaccatcgcatctaagttgttaccgattgccatattaaaattaaatgcgtggtccactccatagcacaaatttcatctggagtcaggcacagaaaataatcatatgggttttatttattgagcactccaatgtgggatcgagagct

SEQ ID NO: 12766 - DNA, 399 bp, Oryza sativa
  Clone ID: uC-osflcyp169g01a1
tttttgttaaaatcttaaggacaatgaagcgaattaattccatacctacttgatgctgccgtgaaaaggtcaagtgttgaatataatgcacagctatctcatgttgcgatcagccaagtcgatccagaaccagagtcacataggaaagaaaagaagggaaatccagacgaacaaacaggcagcctgtgagaactgggaaactacccacgaaattgtcaagtcagtcatcatccttgtaggggtattcctctgtgacttgcttggtaagctgtactggcatattgtaggcatcatccccacgaagcatatcacggacccatgtaaccttggactttatggacaccatttccagtgcacccgtaataacttcacttagcacattggagcactgaagacctt

SEQ ID NO: 12767 - DNA, 443 bp, Oryza sativa
  Clone ID: uC-osflcyp169g02a1
ttttgtttttttttttttttttttttttttttttttttttttttttttttttttttttggaaaaaacaagctttttactcccagtagcacaggcctggtgaatataagcataacatatttttatcccatcctacggatctaatggtctcaaaagggggttttttttttaactaatttttaaaacctaaaagaccgggtccacaccagccaggtatatggaggtataggcaaatatatatatataggggggggggggggtatatatggataagcccgccgccgaaaaataaccgggggacacctgggagggtaacccattgggggggcaggaggatctcgccgggatcggggtgcctgagctagggggctatttcatgggacaccttgccggcctttaatgggggggggctttccgccgggaagcattttcccaggtccggggg

SEQ ID NO: 12768 - DNA, 323 bp, Oryza sativa
  Clone ID: uC-osflcyp169g03a1
ttttgtttttttttttttttttttttttttttttttttttttttttttttttttggtttttgaaccaaaggacctttagaattcatccataggagtaggcatgcatatgctgatatgccaggtttacagatagatcacttgacaattaccgggcatatgccatttatacaatagttaatttgcagcaatgagacgtcgccctgggtggatttactttggaaattctttgatctcaaattaatcatatgtttaatttagggatgacgggtgaacagttgtttttggcgtagaccgccgacaaaaacccgttggggccgggggga

SEQ ID NO: 12769 - DNA, 521 bp, Oryza sativa
  unsure (1)..(521): unsure at all n locations
  Clone ID: uC-osflcyp169g04b1
acttgcagtcattccagtaacaggggacacatttccaactcaaatggcttgcattcttattggaaatcttggcgcatctgtcactgaagttgtaagtgatgctgttgtcacagagttcagtagaacgcagaaggccggtgtactacaatcttacgcgttcataattctggcagctggatctctcttaggaaatttgtctggtggttacgttctgttgagaacacaggaaccaaagactatgttctcagcattctccatcctccttggcctccaactagcactttccttaagtacaaaagagacgcttccaagctctcatagaaactggaacatttgtcatgtcagaacctctctgtctgacaatctccgcaagcaattctcaaacttgaggacagcaatcagcgaggagcaagatcttttaccctcttatgtggataatgacatcatttgcagttgtgcctattctctctgggacaatgnttttgttttcaaacacagtatctgaagcttgattcatcagt

SEQ ID NO: 12770 - DNA, 515 bp, Oryza sativa
  unsure (1)..(515): unsure at all n locations
  Clone ID: uC-osflcyp169g05b1
ccctaacctccgcctcctcctcctccccctcctcccatgcccgcatcgagatcttagccgcgccggagatcgagagggaggagcggcgacgcgggcgcccccgatccctcctcctcgccgccgccgccgccggcggcgccggagcagcagcagccgacgacgacgacgaccgccgcagcagccgatcgggggagggggaggnggagggactctatggaggcggactccgggaagctcttcgtcggcggcatctcgtgggagacggacgaggaccgcctccgcgagtacttcagccggttcgggggaggtcaccgagggccgtcatcatgcgggaccgcaacaccggccgcgcccgtgggttcggtttcgtggtcttcaccgacgcaggcgtcgccgagcgggtcaccatggataagcacatgatcgacgggcgcatggtggtagcgaagaaagctgttcccagggacgaccagagcatcaccagcatgaacaatggcagcagcatagggtcacct

SEQ ID NO: 12771 - DNA, 458 bp, Oryza sativa
  Clone ID: uC-osflcyp169g07a1
gaaataattatccctcaaagtccactgtaaatttagccttcatgccgttcagtcgtagtagtaccacatgtgctcccatacaagaacagaaacaccagcaaaattttgctaaaacacctaggttaacttagactagttagaaattagaaagtacataacacatactagcatcgtcatcaaacaagtgaaaaagtcatcttgcatctttacacctttggtctgccctttttaaagtcagaaaaatcgacatatactcaagcactgaaatacgaatctaaatagttgctgaaggaaacccggtgttgtcctcttttcttttccatgtatttttctgtgttccttttgccgaatgacatctgctttttcaataataggacactcatctggaaagaactggcctcaatagtatccgctcactcaaacgatggaccagaatttcttcctgcaaaccaagactt

SEQ ID NO: 12772 - DNA, 403 bp, Oryza sativa
  Clone ID: uC-osflcyp169g09a1
tttgtttttttttttttttttttttttttttttttttttttttttttttttttttttttttttttttttttttttttttttttttttttttttttttgggaaaaaaaaaaaaaagggggccaaaccccactttttttttttaaaaccccccacaaaggtttgaagggcctggctttaaggggcaaaaaaaaaaaggggtttaattttttggggaaatcccgcttttaaaagggttttttttccccaaaaaaacccaatttaaaaggcttggggggggccctggggtaacccccaaagaaggggtccttaaccggagaaaatttctccccccggggggggagggggggggcaaccagggggggttttgaacttgggaagggaaaaaaggcttttttttcgccac

SEQ ID NO: 12773 - DNA, 424 bp, Oryza sativa
  Clone ID: uC-osflcyp169h01a1
ttttgttataattattctgggacgaaattagaaatagatatgtacatttctctaaggtttactcgttcctctaagataaatggcttgtgatgctttggatctgaagagttagatttttctaacacttgatatgagtataacacatgccgtctcatgattcacgtagttggcttctctgtgcctgactacgagggcccaccatagaaacagtagcagtatcagaagaccatgcctcggtttcttgttctgaagccaaagaagaccataccgtatgcctctcaaaaccctctctctatataaacagggccagagagtccagcactccaaataaaccacctcttcaaacgtgcgtcggctgaccgctttcatccatccaccagtctcgcttcttcgtgtctacggtctacctcggcgagtcggcggc

SEQ ID NO: 12774 - DNA, 141 bp, Oryza sativa
  Clone ID: uC-osflcyp169h02a1
ttttttttttgttttttaaattttgggggggtttattttttttttttttttttttttttttttttctttttcctatcccccacaaaaaaataaaaaaaaaaccaaaaaaaaaacaaccacccaaccaccccccgcgcgaac

SEQ ID NO: 12775 - DNA, 363 bp, Oryza sativa
  Clone ID: uC-osflcyp169h03a1
ttttgttaccaactcactaggtgagtttcactagatagaaagcataccacatgacacagcactgcattcttaattacgtacacaccacaagactggagaggaaggactacatcatcgtacagacgccatagatgtctcaaaacatctttattcttagcacttatttaactaggatgcatttcttcagtctcaggtcttagatcacaaactcagaggaaacacaaagttacagtgacaataactcatcacttgtaactggatcaaactactagcttagcagtactaggcccttccatcttcttggtttcgtcaggaggttgcttgcttcacttgccgcagttgcaggggttgcaggtgcagttg

SEQ ID NO: 12776 - DNA, 350 bp, Oryza sativa
  Clone ID: uC-osflcyp169h08a1
tttgttttttttttttttttggttttttttttttttttttttttttttaacaaaaaacatcatccttatttttcctttaaacgatcaaatttaacttaattttaaggcactttttttttaaacctttcctcctcaccagggagggaggctgctttttttacctcagctggtgatctgcgagattttttttggtggtttccctctgtttcttccgctggggagtgaatgaaggtaggtgttgtttgttgtccccaatgactttgttgcactatttgctctcgacgggcttgcggaggagcaccatgtgcatcggcgtgaagatgccggtctcgcccccgcgggtgaggtgc

SEQ ID NO: 12777 - DNA, 253 bp, Oryza sativa
  Clone ID: uC-osflcyp169h09a1
tttgttttttttttttttttgggtttttttttttttttaaaatttttttgttttttttttgaagacaattaacttgttaaaaacccgatattctggtggaaactactaggtaaaaaacctaggccttccgcgattacaagagaagatcctacaaagcactaatttaagaacggtcctagggttcagggttattggggggggaaaaggaaaaggggaaggcaacgggacctgggtcaaggaacagatttcttag

SEQ ID NO: 12778 - DNA, 389 bp, Oryza sativa
  Clone ID: uC-osflcyp169h11b1
tttgtggagaaggggacgccgatggagtccatcctggacacctgcaaggaagggtacgacagcacggtgtcggcgctgcaggaggtgcagcgctgcatcgacgccaacgacagcaaggcgagcctcatcaccaagatgtcggcggcgaccaccttcaccggcgactgcggcaacgcctacgaggagcgggagctggagcccagcctcgcgctcaaggccaccaagaacaacgtcaaccgcgttgtcaccggcgccctcgccatcgccgccaagctcaagctataattagccaactgatcatcaatcgatatgaatgattgatcaactataaaattacacctagcttatgcatgcgtccgcgcgttatgtgtgtacgcacccatgcctat

SEQ ID NO: 12779 - DNA, 484 bp, Oryza sativa
  Clone ID: uC-osflcyp170a02a1
aaaggaaacacaactcatttgttattgatatatgttggagggatccaataaaaccgatacaagtcacgaaaaatcagactagatgaatccttcgagatcacatgagcaaaagctttcgacgaaagctgtcctatagtcgtggaagcaataacacttgataaagataggaattcagacacgagaggttgcagactataagatgtcatcaaatctccttgaacgccgcgaagagatcaccgttgatgtagtcgttgtccacaagactaaccaagaagtagctcttctggaccttgtctagtatctccctagatgagtcgccctcagggaacaggcaagcccaaccctttgaccaaatttcgaaagcttcgtctttccaaaccataaagctggctgagtcaacgacagttggctggactatttccttgccagggaaaacaccccatgtgaccgcattcacagcgttttggggaaatgttgagatgac

SEQ ID NO: 12780 - DNA, 458 bp, Oryza sativa
  Clone ID: uC-osflcyp170a03a1
gatccctgatcccccccaccgccgccgccgcccgatcgtaccaaatccccactacgcgtcccaattccgggccaattcgaccccccgagcgaccgccatctactcacctcccgatcgattcggatccccaatctagcgggcgcggggcggggcggggaggcgggattgggctagggttttgtgggggattggtgtattggattaggtgatggcggagaagggatgccttaagcgcctccagaaggagttccactcgctctgcaaggagccgtcgccgcagatcgtggttcgcccgctgcccaacgtcatattggagtggtattttgtacttgaaggttgtgctggccacaccatttgaaggtggatattatttactggaaactttaatttccacctgattactcttttaagccttcaagctttcagtatgactccttctagcgtatggtttgtccctc

SEQ ID NO: 12781 - DNA, 679 bp, Oryza sativa
  Clone ID: uC-osflcyp170a05a1
ttccccccttcatttcttccgttaacccttcccctttttttcaccccaaacccccctcccccccccctaaaaccccccaaaatttaacccccctcccagcccccccctcccaaccaaacccccccctttaaacccccccaaaaaccccccaacaaaaaatacccaaaaccacctacccccaaaccccccccccccttttttcacccttccccccccttaccgttttaaacctcccatcccccccttaacccattccatccaccccctaaacaacccccttctaatccccccctcacccttaccccccaacccaccccttctctttctcaaccccccccccaacccccccctcccgccttacccccccctccccctaacccccacagccccccccaacacccattaacaccccccaccttcccccctccccccaagtctcacacaccccccccccccctataaaccccccccccccttcccccccccacaaccccccccccccttttgcacccacccaaccccccccattccaaaaattccaaccccccctcccccaccgaaaccccccccccctttcccccccccccttttccccccccccccctaacaccccccttccccctttactacccccccccctagcccacccttccccccctccccttccccccccctcccc

SEQ ID NO: 12782 - DNA, 409 bp, Oryza sativa
  Clone ID: uC-osflcyp170a07a1
gtatcttattgtatgttattacaagcatgggacacaattattgacatataataaacttatacatatatggattattacgttcatggcatctagcgacaccgtggtagatgactggccagttacacatgacatatgacagagcctataaccatcatccctagttatcccaagtagaaactcacattttccctagtaaaccatgcgtgctaattagttgttatgtatagccactagacgatgacgtacaccgtctatttctccgatcataacttagttgttcattctagccactgggacgatgtcgtctggttttccagccacagctccaacccgaacaacggtgacggccatgctttcggcctgacctgttatcggcgatatcctgcttgtggtcgctgatggcttggga

SEQ ID NO: 12783 - DNA, 362 bp, Oryza sativa
  Clone ID: uC-osflcyp170a09a1
gcaggaacacggattgggcgtgtaattaaacagtgtggggggcgaacagactactacattttctcagcacttatcattaaacagaaaatcacaggtaactctggcaaagcccaaaaagactagcaaaaagtgctggcaacagtgcaaggcaatacctcgagcacactgagatgggttcagcactcaacggatcggcttggctacacgctcaatcttatacttgttcttgatggcatagctggcggatgagcccttggcggcattgatgagctcattagcaaggcactcagcaatggcctcgatgttcctaaagggactcttcctggcgccagtggtgaggacgtagattggctgcttgaccc

SEQ ID NO: 12784 - DNA, 359 bp, Oryza sativa
  Clone ID: uC-osflcyp170a10a1
gtaaaaactgggatgtattgtctctttgtattgactgcggaattttagaatatatcatagaaacagtgtatgattctgtcatcaaaagaaagtaaattttacaggatcggtgattgtcccatcgaggaaaagacgaggaactaaccagtcagttagacagttgtttgctgtgaaaacacacaaatgaagggggaaaaatttacagtgcaacacagggttcccaaacaactcgtggggttattagttgtagactctttatcatgggtaagaccagcctgatctgggattcttgtcttctggggaagggcatctatacacatgctgttgtactaactccgatcgattctgtgaccttgacg

SEQ ID NO: 12785 - DNA, 91 bp, Oryza sativa
  Clone ID: uC-osflcyp170a12a1
ttttcccttttttttttttttttttttgtttttttttaatttttttgggttttttaactttctttttttttttctttaaaatccctacccc

SEQ ID NO: 12786 - DNA, 448 bp, Oryza sativa
  Clone ID: uC-osflcyp170b01a1
ataacaaaaaaccacactttttttttatttccccaaaaataaaaaaaaaccctttaaaaaaaaaacacgagctgaaaaaacccgaactttcttttaaaaatttccaaccccaacatatttcacaacttattaacaaaaaaaacccgctgaagaggggggaaaaaaataaaaacaatttctaaaaaacacggcccacctaaaatgtccacaaccaaattttaaaaaaaaaaatttaccccatttatttcttgtattttaaaaaaaattgcccaaaaaaaaagtgacttttttttttatagggccgaatccccccccccccgaatttttccaaaaataaaaggccacaaaaatttttcaaaatcttgggttttaacaaaaaaaaaaaaacaaaccccccccctcccgttttaaaaaccaaaaaaaaccaaaaaccttccggggccctttt

SEQ ID NO: 12787 - DNA, 431 bp, Oryza sativa
  Clone ID: uC-osflcyp170b02a1
agtatgggaactgttcaactttcataacgacagaggtgattctcaggctgggcaatcaggctagtaaagatcaccgtaaacaagcaaaggggttcaaggactctagataagtctaaaccgtcatataacaacaacaacggcaaataaaaaaacagagaaaggtttgcctcctgcctgttacctctggtttggccaattaccgtcaaaatacatcactggcagcctttaacgtttacacactccaggaaatattatctactggaggattatgggcattatgtacatatcttaaatgaaacgtgacaatccacggtatgctgcaggaagttcagttgggaagcagacaacggcataattaaaggactctcagctgagttagaaaggcagagcacaggtccagaaagagaagctgtggtccactgaccctttgc

SEQ ID NO: 12788 - DNA, 482 bp, Oryza sativa
  unsure (1)..(482): unsure at all n locations
  Clone ID: uC-osflcyp170b03a1
gctggaaaatttgatgaggtatttctcacttatatcatgatatacaaatactaacacatgcgaaaattatcaagcagaaaagttccatacaaattcatccagacaaacaagtgtaaaaaaccttttttttcccatttcccccttgaactatccgtaaataccaccattccaccaaactcccctctgtcttctacgacaaataatcttttcaacccagtaacttataattaattacagagagattagcaaacatataatggtaagaatcagttgtcgtaggtgcggcactcgtcggtctccgggttgtccttgcagtaggcctcgagcgggtcggaggtctccttgagcttgtcgcgcgcgtggctcgccgccgcgctcagctcctccaccttgtcccacgccgncgngcactcgcncgtcgccgtgtcctccgcgcacgcctccttcgccttgtcgatgctctccgacatcttgtccgagat

SEQ ID NO: 12789 - DNA, 342 bp, Oryza sativa
  Clone ID: uC-osflcyp170b06a1
aaacacaacaacaaactggattttttttatctacacatgcatcatatttacataccaagggagaatccgcaggactcattttcctttctttcaggaagcctcagcagtggagaaatgcattttagcagccgattcacgcaaaaagctgcttccacatttggcgtcttgactgctgatgccataatccaatatatcggtctcatgtttgttgagatcgtctggtgctgaattactacttgtggtttcagcatccttgagcctatcaaattcgccaggagcttggagcactgctgaactctggatagcattctggtggtttttcttggacctacccctttgctt

SEQ ID NO: 12790 - DNA, 542 bp, Oryza sativa
  Clone ID: uC-osflcyp170b07a1
caggagccattttcttattccatcataatatgatgaatacaagctcaacaagatgacagcgattgtttcattacacaaatatataaggatgatacgagttacataagcacaactagacagagaaaattgatttggaaaacaaacaaatcgcaataaactatcggctacacgggcagttttgaaacaccagctctgccacaacttatgcacgttcagatcacacttttgctatggtacataagctcaaacttctatcatcgtgatcggtgaaacccactatgtcaccaagcaatctggcgacgcattactcttccatatcctgtgcacgttccgcacgggaccttgatcgtgtctgataaactctccttcctccactattgttgctggcgttcactatatcactcaagaagaaccagcagatcgtgctttgcaaaggccctggcatgccaccaaccaaaggatagcaaggcgtagacctcccggtttccatgtcgaacaccatgccctgatcctaccacgcccaccatccagtacaacagttg

SEQ ID NO: 12791 - DNA, 449 bp, Oryza sativa
  Clone ID: uC-osflcyp170b08a1
gaaccaagtgatccaattggtattcactaattaagcaaaaaaggaaataaaaacaagtacaaaattgtttgacaaaaaaaaaatcgagcacgctagcacgaggacaatgtacgtgtcacactctcctagaccttaatgttgaccaggcgctccgacgccaacgacgcggcgtccaccgtcatggcgcggacggtggcgttcgttcccagggacgggtggctcactgtcaggttgtagtcgccgtgtgggaggtcgagctcgacggcgccgtcggcgccggtcgtcgccgccgtcttgtgcgtcttccactcggcgatcagcttgtcgacgagggtcccaacgggcaggttcttgaagctgttgtccgtcaggcacatcacgtagcaacccttggcgtgccacgccgcccacattatcatcccgttcaccgacgggtgcgcgtacccttc

SEQ ID NO: 12792 - DNA, 428 bp, Oryza sativa
  Clone ID: uC-osflcyp170b09a1
acgtaggtgaggcggagcgcagactttaagttgtatgggagtaaagggaggtcataattacaagaaatgaagtagggataggaagaaaatatatggaaaaaggcatctattcgatctacccaactacgcttcttgaaaatttaaagaaaatggaactcaaccaagaatcgaactactttacatcaacaattgtttgtctatcatcaattctattctgtaccaacatggtgcatggacatgtctgactttgtatcatgatgctgcagccgtatcacccctgtcgtgtaggagcggatgccatcctctgatgatgataactggatgccatggtagtaactaggactacggcgaggccaacacgcacagtctagcgggagctggagcaccttgacagagcaagccttctccaggtttggtgtggcatggag

SEQ ID NO: 12793 - DNA, 295 bp, Oryza sativa
  unsure (1)..(295): unsure at all n locations
  Clone ID: uC-osflcyp170b10a1
tagagcgccccccccctnttttttaacccccnaanccaaaagcccacaacgcccaataaaaaagacgccccccnttacaacccaacccccgcaaaccaacccccaacacncacaaccaaccacacaaacccccnccccgccaaaacaccacccccccaacaccccccaancaccccaaaaaaccagggccaaacccaaccccctccccaaacctccccccccccaaccccaaaccccaaaaccccacaacaaaaccccccaaacccacccccccccaaacacccccaaaaaccca

SEQ ID NO: 12794 - DNA, 317 bp, Oryza sativa
  Clone ID: uC-osflcyp170b11a1
ataggaaaattcggggcctttcatatccacttaaggaatcatctaaagcttgttctggtcctttggggcatgttctaccataatgcgcctaacctgagctacctccttgcccaatgaactggccaagggatgtatcattcattagatagtaatcaaagcagctctaataataactgatatacacaatgggaaagggggttgctctgaaatccatttcccaaacattgcaagacacctttccggatgggactctggtgcagagggtccaccaccctttaccgggacgaaggtcaagtcatttgcatatgggattggga

SEQ ID NO: 12795 - DNA, 484 bp, Oryza sativa
  Clone ID: uC-osflcyp170c01a1
cagagaacaaggtctgggggatatatataattctgggggatttgaatacacataaacgatcaaactgtgaaacggtacaggatctgagataattaggaaactacagagcagcagctacaatattaaccatagcagctgcaggataaacacggtgctaaataggcaggctttgttcttctttcacagcctggatatctggaaggggaccatgacttcagtcatctcctccctcatgataatcttcccaacctggaaaaggtcggagatgcctagctgcgtcgacagatgccttcggcaatcctctgcagcaacaatgcctgaagaataagcttcatgcacggacccagagtgatcgatgcaggcggcctccccagcgaaaaacaggttgcccaccggagcacagaatctttcatacaagtcagctggcttcccacaaggtcgcaggaataagaaccaagcgaattcgggtcggttccccaccttt

SEQ ID NO: 12796 - DNA, 386 bp, Oryza sativa
  Clone ID: uC-osflcyp170c02a1
aatgaacaattgacggaacaaaaacccatttaaaatcccatgttcaaaaagggaaacacccatgggaaaccccatggggacatcgaatttaacattgccccttaaatctcccccaccagccaaggaaacaggccaggaaatttgttccaaaaacttggccaaaaacacttacataaggccccccatgaggcccccgattggagaaaaaattgtttaaaacaatggttccagattctttgccccaatgttttccccaaagacatcgcaggaaaccccccggggatacaaatgccaggcaaactgcctgaaaaacaggggggagtccaaacaaggattcttaatccggatggtcgcccccaaccccctgggcggacccggggatttcc

SEQ ID NO: 12797 - DNA, 545 bp, Oryza sativa
  Clone ID: uC-osflcyp170c03a1
atgaattcctttcttcgagggttatacaaacattttcagcatcctgctgacgcatgcacttgatatacatatgaacaagtatagtttgcattaccacgttcatttcagaacccatcttgatgagatgagcgtgtatctgccttccataatgcaatagtccttggtaccggcaaaggcttaaaagccctgccaaagtgtatttgtcaggcctaatgcatgccagctccatttggcggtaaatatttatcgttgcaactggctgtccatctgctgcataacctgaaagtagggcattccaggaaataaggtttctctcattcatccgaagaaatagtagccgagcgacctcaatgcagccacactttgcgtacatgtcaataagctccgtttccaaaaccacattcatcttgtttatggtcttaatggcatgcccgtgaatttgccttccatactctttatacctctgactgccacagagcttaagaaggttaagcaaattatgcctgttatactttatgtttgcacaacccattttgccggaaaat

SEQ ID NO: 12798 - DNA, 444 bp, Oryza sativa
  Clone ID: uC-osflcyp170c04a1
ggcaaggtatccattgctactagatattagcaacaatccaattctgtacacggcacagcaaaaatagatgtagcacttctgaactttgtcactgatctcatctcatcttcaattcttcatctcaagatcacaaaacaacaatgcagggcgaaacattggagcatcagaatgtacgcttgtttcttgctcagaagagtggcttgtcgaccatggtccgggggaaggcgtaacggaacctggcgttgtaggggagccactcgacggcctgcgctgccttcctccggccgccgccggcgtcgacgcacagccgctggatggcgtcctgggtggcgcgggcgtcggcgttgtcgcgcgcccacgcgaggagctcgtcggcgccggcgaggccggcctcccgggcgtaccgttcgacgaggcgcggcaggaacacctttttggactttc

SEQ ID NO: 12799 - DNA, 422 bp, Oryza sativa
  Clone ID: uC-osflcyp170c05a1
acagtccgaataattttgatgctggggggcaacaaacatacatatattatatgttttggcactcgatatgtgctactcgtaatacagatacggttacatgtaatttcactggatggagcaaaacaaacgcacactggttagtatgacaagcaaacatgaagcatctcgattgttcttcagtttcagctgcagccagctttgaggctagaggatacatactagtaagtaactgaggctttaatcccctttatttattgaacgctgacttgtagtgagactcgtcgattgttgagtatatgtgcccaatgtcagcgaggtaatcaatagctaccttgatcttgggctccggtagcctgaagcgctttacgatttcattaatgggcacaccatgctcgtttttgaaggttggtgggtttgggaaa

SEQ ID NO: 12800 - DNA, 454 bp, Oryza sativa
  unsure (1)..(454): unsure at all n locations
  Clone ID: uC-osflcyp170c06a1
ccataagccattgcattaattagtagcagtacaaaactcggttcgtatgaaacaaccgatcgatcgaactcgacccaatttcacgtacttgatcgaatacaaattaaactgaaaattagcagtacaggtcaaaggtgatggtatactagactggtaatgcgccgtacgtgtcgtcacacattacgcctagccgtgcgtggttattgcgctatccaattccaaacttgtacgtggacggacgagcgcgtcgatcggcgtcgaccttgccaccgggttacttagggacatcgggtggctttggcttcggggcgggcttgggccggggtttctcgggggtcgttgaacttgggttggacttttccttggccgcctttgggcccccggccggggccgccgttgccaccgagcgcgggcggaaggatggcctcnttgacctccatgatggagatggcgt

SEQ ID NO: 12801 - DNA, 526 bp, Oryza sativa
  Clone ID: uC-osflcyp170c07a1
acagtaataatagcaataggatatatttattattattatttgattgctgcagacgcgctggtcatgcactcatgcatgcctgcatggtgcataaacaactggacaagcatagccgcaccacgtagtggtaatagtcctataacaatatttgacatagtagtagtagtactgtagtagctgcgatgtcacaggcaggggccagccaacgcagagcagaaacgactcaacaagcgtcacgtcactagggagcaaataacacacagttccgactcgaaacacaaggtttccatgcagacgcgcccggccatgcttgcatgcccccgaggatcagctgcatcctcgaggtgctgtcatggatggatgccaatgcaaggcaagataggagtaccagcaggctggcacatctgcatttttattggggtatgagattcacaaccaatacgacactactaggaaacagcactaaaaactcttcgagggagatcggctctgttggctttttatttttcaggatagtaagaggatt

SEQ ID NO: 12802 - DNA, 401 bp, Oryza sativa
  Clone ID: uC-osflcyp170c09a1
atctcaagctggtattggggtttttacatcaaagggggttaaacgctgaaagtagggaaacacacggcagtatttacacatggaagatgtttacacacaaacacacttctttgggttgtcgctagcccttgataggagccagcaggctagctgacacgtaccggtctctggtagtactaacagagacagcaagctactaggaacagagtaacaagataagatagcaacatactagataattaattacgtattagataaccacaaggaccagcaaacatggcgtgacagagagatcgaccagcctccgatcaatgggattattcagttcagcgatggctgctcctggtctcgtcgctgtacagccagtcgtagacgggggggagttgggctggaggcggtcg

SEQ ID NO: 12803 - DNA, 307 bp, Oryza sativa
  Clone ID: uC-osflcyp170c10a1
aacaacaattccatttttttttactttaacaataaatatatatttttaattttttaactttttcacttaataaaaactatcttcaaaaattcatctgaaaatctctaaaaaaaattcaaaaccccacaaaaaatttttttcccccccccccaacccctacaaaaattaaaaaaaaaaaaatcccttgtcaaaaacaaaattaaaaaaaaacccccccttttttaaaaaacactaaaaaaaaagggcctgcttccccccgactcaaaaagccaaaaaccaaaaaacttttaaaaaaaccccctcaaaa

SEQ ID NO: 12804 - DNA, 239 bp, Oryza sativa
  Clone ID: uC-osflcyp170c11a1
ggaggggatttatataggctgatctctaataaattcagagtagatctgtcccacattaacaaccacatctgtttcaggcctacagtttggttttatttaaaccaaatgccactcacatcattccctaagaccattctatcaaacatctgtgctttcctgtccatcatacccccaattttccttttctttgcatttgtactacaaaggcccctaaccaccaattccctttactaattaaa

SEQ ID NO: 12805 - DNA, 378 bp, Oryza sativa
  Clone ID: uC-osflcyp170c12a1
ggaaacgaatgagagtcattattgcaaaaacatcatcttcttcttcatcttcttaggggacacaacaccaactcgatcattatctcgtcggactaaacccatcttccccaacccaaagacaacgaactcgctggccacaaatccatccaaccacaattaaccactgctaagctacggtcccccacttcacttgccggggacgaagttggcggtgtacgcccaggctttgttgttgacggggtcggccaggtggtcggcgaggttttcgagggggcccttgtcggggactatggtctggacgaataagccgaacatggagaacatggttaggcggccgttcttgatcttctttaccttgagctccgtgaacgccttggg

SEQ ID NO: 12806 - DNA, 316 bp, Oryza sativa
  unsure (1)..(316): unsure at all n locations
  Clone ID: uC-osflcyp170d01a1
nataatttttttttttttttttttttttttgttttttttatatttttttggtttttaaaatttttttaatttttaataaattttattttatataaaattattatacaataatacaaataaataaaacaaaaatatatctaaaaaaaaaacaaaaaaaaaaaaacaccaataaaaaaaaaacaaacaaaaaaaaaaaaaaaaaaaaaaaaaaaaaaaaaaaaaaataaaaaatataaaaacaaacaccacaaaaaaaaacaaaaaaaacaaactacataaaaaaataaaaaaataaaacacataaaattcacacatt

SEQ ID NO: 12807 - DNA, 517 bp, Oryza sativa
  unsure (1)..(517): unsure at all n locations
  Clone ID: uC-osflcyp170d02a1
aaagcgtgttaatgatgggaaattttaagattcagttgggaagtcgtagtacagagttccgtaacaggcattcattcctgcattgctagagttaaagagacatcccaattttgagtagtgccaagtacagggtatcctttattttgtcctgcccaagtgtagcataagactaaacaaatggttctactgtaatttgtaaggtaatagtgatactacagaattgcagaactgcagattggttttgatacatagagttagctctgcaggtccaacaccttgagaagcgactaaatgatcaatttgctatgcggcgtgctttggagaaagcattaggttataagccttgtgccattcattcatccaatgagagctgcattccaaaggtaaaattttcctccacttttttcctcaattgtatcgcaaatgtttttgaaggctgtgttttcccgttgcttactgaaagcttctgngtctttcttctcatgttgtctcagcctactgaggaactaataaagga

SEQ ID NO: 12808 - DNA, 433 bp, Oryza sativa
  Clone ID: uC-osflcyp170d03a1
tttttttttttttttttttttttttttgtgttttttaaatttttttggggtttttattttaataaaaaaaaaaaaatataaaaaaaaataaaattaacaaaaaagcgataatgggaaaaaaagaatggagaaagggggaaagtcgaaaaggtttgtgggcggttgggaaacaaaaaaaaaaaggagaaaaaaaaaaactaaaaagagaaaaaaaaaaaaaaaggaaaaagggggaaaaaaaaaaaggaaaaaagaaccaaagaaacgggagacaagaggcacataaggacaaaagagaaaaaaatgcgaaaaaaagggaaaaaaaaaaagggaaaggtaaaaaggaaaaaaccaaaaggcaaaaaaaaataaaaggaaaaaaaaccggggaaattaacaatggataaaagaagaaaaaacatctccaaggggg

SEQ ID NO: 12809 - DNA, 146 bp, Oryza sativa
  Clone ID: uC-osflcyp170d05a1
acacactgccacacagggattgagagaagaaccccacggggcggagacaacgcccgtcacaccaacaaacgaagaggaaaaggaggccacacaccaaccctgcaaccccggggacgaaccagccaagaacgaacccccgccagagc

SEQ ID NO: 12810 - DNA, 357 bp, Oryza sativa
  Clone ID: uC-osflcyp170d06a1
ggaaacaatccatacatacatacatacatacatgggatacgtccaggggagctgagctaccagcctaccaacaattacttattattactattattctccccaagcactaatccaatccagggatgaacccaagagcaacaagaagaaaaaaaagaagaagaattttggacaaaaggcctaaagagctagagcagcaagcaaacagaaacaggggaacaggggggaccacttacatggcctttttttggggcaggaaaaattttttgggtaatttcttggcacaaaatttgcaggtgtacatgggattgaccccaactatgacttgggccgcaaacaagcaagcaagcaagcccccct

SEQ ID NO: 12811 - DNA, 540 bp, Oryza sativa
  Clone ID: uC-osflcyp170d07a1
aatcccaaaaatcacatagaacaaatgttccatgatttcacaatcttgaatagtaaaccacactagtcagctctgccagagaaaatgatagcctcttgttagtgacaaaaaatggcaactgtcttcccatgcatccatccatacttattattgcctagcccagcaaagcctatgtaaagaatccactggcatataatacttgtttacaaaaaaaaaaagactaacaatgaccagtacttatttcatggtttcttcttttggagggccttcagcaatcttgtcacttgtttgcgtttgggcgtctttagactctatggcggtggcctgagctctcttacttgcgatttctctttgcattgctatttgatcttgcattactttcgtcatctcctttatttgcttctcttctttctccagttgcatgtccattatgatcttagcattcttatcgattggtttgaaatattcatctatggcggtttcagctttttcaagctgctgattgagggcttgcatctgctgaacatttgacgaactttg

SEQ ID NO: 12812 - DNA, 443 bp, Oryza sativa
  Clone ID: uC-osflcyp170d08a1
agtaggaatctgtgcattctgaggtagatgtttcctcttgagaggaaatgctgatttattacactctgattttctagctagggtactgtaagtactgtaccgtgtggactctgtggtttatgagctgttttaccatgttacaatttgtaatttactggacatgtgtaaagagacctggattactaaaaggttaagaaaaatctacaagccgtggattacatggtggagatgatttatggaggggggaaaaatgaacaaaagaagcatgtgtatttatatatgtattctcaacaggggaacaacaaaaatgaagcctccctgtggatcctcctatctacaagtgcgatcttgtccagcttcgccttgcaccactgcagctgctcgctggtgatcctcggcatccgcaggacccgtgccacgagccgcatgtcgacctgcgagaa

SEQ ID NO: 12813 - DNA, 537 bp, Oryza sativa
  unsure (1)..(537): unsure at all n locations
  Clone ID: uC-osflcyp170d09a1
gaacacaggggtccattcgaatagttactgctatatagcttgctattagtctacaaaccgcataaacaaggtaatagagatacaacacactaaggattacacaagctttacacccccaaaatcgtggcacggcattgcaaacagaacagaattgaaaagcctagttagttttccagaactatacaaccaaactaacggaattatggacaaggtggggagccccaactgaaagaatgaaccattcaaatgctacctacttgccagcttgctagaatacagttatagctctgaaagaattgcaggaatatagtgtgaaagctcagctgtgagcgactgaaagccattgactagttgagtgtggaattcctggtcttcttcccctatcaatctaaaatgcacacggattgcgcgcttgcagacggccatgaattccagcaatgcaccgatgagctgctgcagttcttgagatcggagcctagttgcgggctcaccagatangaatgcagtgcacacacttaatacaccactttttacctg

SEQ ID NO: 12814 - DNA, 394 bp, Oryza sativa
  Clone ID: uC-osflcyp170d10a1
ggggggaaaaaataggtcctattacaaccccaagcatgacgggggcacggtggggaaaaaaaacaaaaaaaccattggcttacgggggcatacccatactttgggggggcccataaggggccccttttttccatttgcaaaaagggaacccccctttgggttttaaaaaaacaaggggaattgggtttaaaaaaggtgggccccgggaaaaaatttgagggaccccccctggaaaaaaaccccaaaggttgtaaacaaaatgggggggggccaaccccccccttttggggcttgggggtggagggggccaccctggttaagggtttcgaaaaaaaatacctttctttttcatggacaaaaaaaacgataccggggaggggcctttcccgggggg

SEQ ID NO: 12815 - DNA, 394 bp, Oryza sativa
  Clone ID: uC-osflcyp170d11a1
gccgctaggtggaggcgccgaaggaggagacgcgggctgttccggccgaggctgtggccgaggaggcggcgcccgccgaggccgaggtggcggagaccaaggaggcggagccagctgcggccgagccggcggcggaggaggtgaaggaggccgagcccgagccggccgagccggaggccgagcctgccaaggaggaggtggcgccagagcccgccgccgccgccgaggcggaggccaaggaggccgagccggcggcgcaggtggccgaggaggtgaaggaggaggaaggcggcgccggcgccggccgccgaggaggtgaaggtggaaggaggctgcgccggtcgcggagccggaggcctagaaggccagcgtgtgagtgcatgccggtgaaggc

SEQ ID NO: 12816 - DNA, 385 bp, Oryza sativa
  Clone ID: uC-osflcyp170e01a1
gaatggaatcagcgccatggggaccgtgtaagccatgagggctagaacaatatgatacagcgatacaagatcacagcatcaaaatacaggacatcacagagaacatggaagtgcatacataatttagatagctggtccaaaccacatactctatgttctcacgacagcacattaacaaaacagagaaactagtctcaaaatcccacagataacttcttatggagatgttcaggtaaaaacagattgataaatccttgagataagatccggtaacgctgctactcaaaacttaaaacaagacaacgctcactgcgtgacttcgagccacttcgagaaggtgtcgaactcagcatagtcactgtctgagaacatgggcttgtaccat

SEQ ID NO: 12817 - DNA, 465 bp, Oryza sativa
  Clone ID: uC-osflcyp170e02a1
caacagatggggccattttagggatgtgataaccgcatatcaaaatatcgatccatgagagtatgtatgtcagttcgaaccacttcactcgcggcagcgaggaagtcgaaaagcttattcacgactcatctagcaaaacttgacgataagcctatctcaagttcttcatacaagcattgacattgcaaagttacaccgagaggtctgaaacaaaagtgcagactgctgatggagacaagccgaattagcttacgcttcatcaagggcaagaacacctgggagggtcttgccttccagcaactccaagctagcaccaccgccggtggagatgtggctcatcttgtcggccagcccagccttctcgaccgcagcaacggagtcaccaccaccgatgatggtcgtggcgccctttggggagtaagatcagccaacttcttggcaattgcatcagtgcctgctgaaact

SEQ ID NO: 12818 - DNA, 475 bp, Oryza sativa
  unsure (1)..(475): unsure at all n locations
  Clone ID: uC-osflcyp170e03a1
ataattaattcacaacaccgtatttcattgatcaggttcagaacctgcacagaaatacacactaccggtacagatctcaccttctctccaatactcgtacatccatccacgcggtccacacgaatacgtacatctatacggtacacgtacgtacatctactgcaccgngtacacacacgcacactctcctgcagagacgcgcatcgtcgtcaacctagctagcttagctgaaggcgatgcgtcgccatggcagcacggcggcggcggcgctcacttgccggggacgaagttggtggcgtaggcccaggcgttgttgttgacggggtcggcgaggtggtcggcgaggttctcgagggggcccttgccggtgacgatggcctggacgaagaagccgaacatggagaacatggcgaggcgggccgtcttgatctccttcaccttgagctccgcgaaggcctccgggtcgtccgcgagg

SEQ ID NO: 12819 - DNA, 491 bp, Oryza sativa
  Clone ID: uC-osflcyp170e04a1
aactggacaggctctccacagtgctaaacaactgaacaacattggttcaaagacatcaagcaggtatacattatgcgggaaccgatcgatgctattgtacagttgggtgtaaattagagccgctaccgactgataccaaccgagtttcagaggattgcgcatcggtttctttgttctgcgggagatattgtcgcctgttggaacctgtttggatcaaaggtgtccaccccatacttttctctcattctttggctccacgcatcgtttcggattggacggtagtcaagggtgggcaccctagggtcagcaacaggttgcttgtttaccaacggctgccgggttgaagaccttggggcaatgtactcgtcatcactggcatagtctgcttgattgcctgactgcactatgagagctacagtgaacagcactgcctcaaatagtacagtttccagtgcaacccactttgcgattcttcaatttttcttcaaaaa

SEQ ID NO: 12820 - DNA, 240 bp, Oryza sativa
  Clone ID: uC-osflcyp170e05a1
actaaatagttacttaatttcattaaattttaattttttacatttacatactcctaatcgggcgccaccagggtaaaaaaaaaaaacgggggcaaacaatttcaaaaaggaacaagaaaaaaactcattttaaacaaaaaaacaaaatatgcccaaaaacaaacaaggggggcgccctccaagggggaaccccctctttaagccccccaaaaaaacaaaaaagtaaacccctacccacaa

SEQ ID NO: 12821 - DNA, 474 bp, Oryza sativa
  Clone ID: uC-osflcyp170e06a1
agacggacggacagacgagcggtatttatgtcctaagattaatgtgcttacagcaagttaggcatgataagagatattatgagcatgatgggtagggtacacgtatgtatgtatgtatgttgctgtgccacaccacaatcataccatacatacaagcaagctaaactgatgcagagcctaataaccggctgtcacccagcaacgtcagttccttggtcgatttgattacacaatgcaaatgcgaatgattcctaaaaggcgtacatcacggacaaggggaggaggatgatgattcgtgggcgggtttcatcttcatcttcaggtgcactttacggcagaggcaccagccggcagctgcccgttgttgacaggggatgacttcttggcggaggcggcggcggaaggccggtggctgtcctggtgagggcctttgtcgcggagttctctactggagcagcaacaacagctttgggt

SEQ ID NO: 12822 - DNA, 460 bp, Oryza sativa
  Clone ID: uC-osflcyp170e07a1
gtaatcaaatttgggattttttttaaaagatggggtaaatttgatcgtaacacattcatgctactatctctggcctattggctgcacgtccagcgcacagagcaacgacagaatgaacttcatacacgtggctatgaacaaatacgcatacctgttccaaggattctcatcgaaaggtaagttggcaacactaagcgtgatctctgaggaactcccattacagtgacacgtcggacaagacaggactcgggactcgccagaagtttccagcctacggagttatacaagctcaaggtgatctaaaacccaaagagaacctacctcggtagcccctatctttctcgaattgttgtcaaaatactggagagatgattgtaacagcgagcagcatcccagttcctgaaccaattgccccgatgaaatcagataggacagttaatgcaccaatgcagacttcacc

SEQ ID NO: 12823 - DNA, 400 bp, Oryza sativa
  Clone ID: uC-osflcyp170e09a1
atatttttttttttttatttacatcaccggttttttttaaatattttgggcgccttttcatttttacacacttatctttctatatcttactttttctccaattacaaaaacacaggggaacacaaaacacactatttcttgcaagcatacaaaaaaaaaactccaacccattttacaaatttcaccccctccccaaaaagggaaaaaaaaaacctccaaccaaacccaaaggggttaccccccccccaagggggatcaacaaaataccccaacccctttaaaaaacaaaggggttttgaaaaaactggccccctttcaaaaaatgtcacccaccgcaccaatggttttggaaaccgggcccaaaaaacaaccccggggcccccagagccccaaaaaccaa

SEQ ID NO: 12824 - DNA, 491 bp, Oryza sativa
  Clone ID: uC-osflcyp170e10a1
aacaacacgtgccgattttacgagaaagggagcaatttactagagagcgacttcacatgggagatggaaatattttacatatgcatactgctaagctagcactaccagattattgagctaagacggcggcgagcaaattacagataggaacaagatgggagttcatcgcggccaaaaagacaatcttttgccacgttgagacaagccgcacacatgcacgtttttttatcacggcatcatgtgttcgatatcaacaactaattatactactagcgtctaagctacggtttgagcacggcgatcaccgtttgtccgtagcggcgaatcggccggtccgagtcaagcgccgccgtcaccgccgccgccgtacttggtgtcgggccttccgccgtccctcgtgtcgctcatggaccgcagtaatggcgactccgaccctactatggaggccttgaaggagcgcttgcagtgagccaatgcgctcttgatgccgt

SEQ ID NO: 12825 - DNA, 370 bp, Oryza sativa
  Clone ID: uC-osflcyp170e11a1
gaagtgataatttaaatgcgtgaatttttatagactctttgatggagtattacaacatgcagcagtggcattaatacgccagtacattaattaagttacacatatgcaggctccattttggtttcttttaatttatcgtattacagaatttctgtagccttgcagatgatcacttggatatcatgtactagtaattaacaataggatgcatacaaaagatggcccaacgacaacagaagatgcgtgcatctgacattgtctggccttatttgttggtagtactccaattaattaacaagagatgatgcattcttgtgccttagtttcttcacatgcttggcttcacgttgagcctattcgcaatcttcac

SEQ ID NO: 12826 - DNA, 468 bp, Oryza sativa
  Clone ID: uC-osflcyp170e12a1
aacaattctgataattgagggttttgtgggcaattttgataacttattacagataacattaagtaaaacacaatgaactgaaaaatgttaaaaacaaaatgattccaaacatatgcattacttcattgtcgagcaataacgaacacatgaaagtatcccctgttttcagagtcttagttttgagctgtcggttgaatcaggcatcaagaggagatgcctgggtgcatcagtcatcatcctcatggtcggccaaatgccaccgaccatccgtgcctttcaccatacctttgttctgcaccacccaccaagacgatggaattgcatactcattcttcagtgcgtcttcgtgtttgttaaccaaagcaatgtctcgatcaatctccagcttgaaccctccgttgctgccctgcgtcccggcaaccccatgcatgtagcacttcatgtcatgccacgttaggggatttccag

SEQ ID NO: 12827 - DNA, 401 bp, Oryza sativa
  Clone ID: uC-osflcyp170f01a1
aataagaatatggagcattttcaaacttgcagctcaaataaaacatcaacaggaatgagatgcaaatgagcaaattgagcacatatttaggttcaaatccaacttattcataaagcatactgctgtcccacaggaaactgtttcataaaactaacatatcatacggactcgatggtccattaaaccagacacaagttgacatcagcaccacaaatacttgacgaacagaggctcgggatgaccaggcacatcggcagctccaccaaactggctgattactgaccaccacggaggcggagcaccaggtggagggtggactccttcttgatgttgtagacggcgagggtgcggccatcctccagctgcttgccagcgaagatcagacgctgctggtctggggg

SEQ ID NO: 12828 - DNA, 240 bp, Oryza sativa
  Clone ID: uC-osflcyp170f02a1
ccacactctttatttttgtcttaacccatgacaaactttttttcctaacaaaaaagggccacaaaatacccccccccccggggggccccccattgtttatttcatcaaccccggcccccttaatccaattttttatgcggggggggcccccccccccaaggggaacaaagccccggcccccttttatggccactggggtaaaagcctctttaaagaactcggcccccggaccccaccccc

SEQ ID NO: 12829 - DNA, 260 bp, Oryza sativa
  Clone ID: uC-osflcyp170f03a1
acatctaatctatgaagtgcaatcttaatatatatctgaacaaccaaaaaggggacaagacactcagttaagtgtcaaacaaacaccatgatgttacaacttacaactgcgaaacattttgaaagaacagacctatatgaacaatctaatcataaaagatttggtggttggggaacaaaccaacaagggtggcttttaaagggagaaccccttagggatttggcagtttcaaaaagaacccggtcctggttcagaatacc

SEQ ID NO: 12830 - DNA, 507 bp, Oryza sativa
  Clone ID: uC-osflcyp170f05a1
agaaggtactagcagcattgggagaattgtctaaaaaccaggtagcagtctagggcacaaagaaccaagaaaatcgacgaggaggatcccaacatatggatcaactacaccataataaatacattcttaaactgctctagaacatattacagatcatcagctatgggaattctcaattctcaggtgggtgagggttagtaggggagggattggtgtgggtgcaccggttacatgtcaaagtttcgccatcgcaacatactgctactcaactacactggtcaacaaggtggtcatacaacaacaacgtaacttcacattttcaccaaccatcatgcacgcatatgctgacgatccatcgtcgttcaggggggaggaaatgggcacttgtcatggaaaatttcaggggggtcgggcggaaactgttttatactcctgcataggagcattgtttttttacatgttctgggactaattcccatatatctgatggatttctttagttcatga

SEQ ID NO: 12831 - DNA, 502 bp, Oryza sativa
  Clone ID: uC-osflcyp170f06a1
gggggggtgacgacaactttaaatattgctcaataaaacactatctggagacaacacacacgagagtcatatccagaggaaaacaatcagcccagacggaccactagcaccaaatgcaaagcaatgggaagaactaattcgaccgctaccaccctagtaaaaaccagagaagagagaggaaggggggacaggaagaaaaacattctagtagaacaggagaagaatccatccatcatggggacagcagcatgaggcatctaaatcgatggtctccaataacatgcggagccatcgatcgatcgatcttcccattttactggccctcgccggcgtcgcccttggaggcttttttcacctcatcaccaccgtcctccgtgaggtcagaggtccagagggtcaagttgtccctcaggagctgcatgatcaaagtgctgtccttgtaagactcctccccgagggtatccaactcggagatggcttcgtcaaacgcctgcttagcaag

SEQ ID NO: 12832 - DNA, 227 bp, Oryza sativa
  Clone ID: uC-osflcyp170f07a1
aatcccaaaaatcacatggggcaaatgttccatgatttcacaatcttgaatagtaaaccacactagtcagctctgccagagaaaatgattgccttttggtagggacaaaaaatgggaactggcttcccatgcattcattcatacttattattggctagcccaaccaaggctatggtaaggaatccactggcttataatactggttaacaaaaaaaaaaggactacca

SEQ ID NO: 12833 - DNA, 306 bp, Oryza sativa
  Clone ID: uC-osflcyp170f08a1
aggtgaaaaccaaacatttttttagccgccggaaaaacccggcattttttgggggcgggcaaaccctggcgggagaatattacaggtttttttcccccccaagaattaaataaaacaccaatccgccaaaaaatgaatttgcaacaaatggggtcaacattatcacaagaagaaagccccatctgcatttgcaaagggaaaaggaaagctggaagcctagcctggtcttttcagggaagccatcacccccaggcctttaaaaagaggcgctcctgcaaacacagggctaaagggtggaacccacgc

SEQ ID NO: 12834 - DNA, 417 bp, Oryza sativa
  Clone ID: uC-osflcyp170f09a1
gggggatctttttctgaatgagtgtggcccctcctcctgcacttacatcacccactgtttcatctcatagcaatcactggctcgcaaaaggacacacactgacacaaactcgaggacggacggacaccattgactgccatactccgatcgatcgaacgaacgaacacggtcttatttcggtagcagatcgatcaaattattagctagagtagaagcagagcagacgcgacgacgatggcaatgcaatgcagctccccctccccggaatctaccaggggaggatcttccagcgctggttgtgacccttgcaccactttcacagcacgatctcggtgccatcgtggatgccgccgtgatccttgtcgccatggaaggcgtccaaagtgaggtagatgttgttcaccatgccgatgcagc

SEQ ID NO: 12835 - DNA, 297 bp, Oryza sativa
  Clone ID: uC-osflcyp170f10a1
agtacaagagtacacacaggcttcttgatatttagagggctctaatagcagggagcccatatatagatgattcttcatattaggagggtacatgaataccatgtgagggctaaaactaaaacaggatatctggacagggatcaacctgagggggggcaggaaaagaaagggtggaacataaccatgaggattgctatgttctttatagaacatcaaagggggcttccaggcgagttgttttgttgaaatggaaggggcataaggattggaggtatatgtgactgcgggttgcaaatt

SEQ ID NO: 12836 - DNA, 492 bp, Oryza sativa
  Clone ID: uC-osflcyp170f11a1
aaccaagggagatgcgtgcctttttttttactatcacttggaacatgagcttccatgtacaatgttcagttcttaattacactgcactagcatctaatacgcacctatcgcgaaagaattttgctcacccagccgacctagtaacaacaccggagaaacattatgttacactcaaatgccctaacgtgagcaactagcggtctagcaccaatgcaaaactatgatgcatccgaagcgtctatgaagtgaggatattcgtatttaagttttttgtcctgaatcaaatgaaaaatatattgtaccactagtttgcatcatatacttgtggattatcatcagctctcactcctgtttgaatctatctcctccatatgatatgcatgtacaggtatacaagagtaacaaactggtctctcttacatttactgctgataacaccagtgatatgagggcctttgtagtatactaatgaacattgccgaatgggcaaat

SEQ ID NO: 12837 - DNA, 311 bp, Oryza sativa
  Clone ID: uC-osflcyp170g01a1
ggggggcaaaaagaaacgagtatattatatctgatcacgatcattcttacaacctttttttgaaaatgtcaagacaacagaagtttttattggttacaattaccaaccaaaaatagggcgcctttacaacactgggtgcactacattactaacactaaatgatccatttggttctagataagtaaaaaagggaaacatggaatgaacaagcccttcaatgggcacccacacacgtttcactacaaaaatactgggcattacctttctactccatagcagaaccattcctgcctggcttattgagacacaag

SEQ ID NO: 12838 - DNA, 413 bp, Oryza sativa
  Clone ID: uC-osflcyp170g02a1
gacgcctcgcgtgatcgcatatagcgggggggaaaacgtcaggccagcctgcgcgacaacgtctagttacagataagagcagaactgcaagtcaaatacactcttttctctccatagtagagtttgagcagcgagcgggcaaacataaattattcaattattaaatgatatgatcactcttgatcatctcaacactataggaacaaaacttcgctaccgcgattttactattttagttgtccacaacttcaatgagggttggttcgtagtcagcaggagcctctaaaccatggaagttcattacggttgcagcaacattggcgagcccaggggtctgaatgtcagaccggaatttcacaccagggtgaagaccgggacctccaatagcaaccgggaccggctgaagagtatgt

SEQ ID NO: 12839 - DNA, 313 bp, Oryza sativa
  Clone ID: uC-osflcyp170g03a1
aaccaggcaaaccacacaaatacccgattggttaatttcactgaaaaaagcccgggtccctcacatcacaaaaattcatcccttgaaccacccaaagtcccccaagccaccagctgtttaattaatcgaaaacccccgggtttaattcagcaataattagcacacacccaaaccacccttttttggggggtttttattggggaccaaataaggggggggacccccccgcgggaaaggttcggttgtttttaaacttaaattgcccaactttcaatcggagcaagaacaactggggcccaacttgcaacccccg

SEQ ID NO: 12840 - DNA, 449 bp, Oryza sativa
  Clone ID: uC-osflcyp170g04a1
gtgctaaacaaaaatataagtgaacttttatgtatcttccagataaccattcaggccatcgactaggggattttacaggcttactttgcgtcttagcctaaacaaaacacctgctattgctacaacacagcaccaaaatctaacctggggggcacaagttcaccattcctgaagagagaggggtgcatgacatgcccaaggattgaagatctgctacatgcagcgcatgtacatatattatacttgacgtatattcacagtggtggcattattctctgacatcttcgtcgtcgtcctcatcctcgtcaacatcctcgccatcatactgtagaaggctgaaatccctggattgcgccttgagcctctcttggatccgctctttgatggcagttcccattgagtggcagccttcttcaaacttctccagaaaaccagcaacccatcgatct

SEQ ID NO: 12841 - DNA, 382 bp, Oryza sativa
  Clone ID: uC-osflcyp170g05a1
atattttctcttttttttttttttttttttgtttttttaatatttttttccctttttaaattttttcttattttcttttcccttaaataatcttacatacattaaaaacaccaaacaaaaaacaacttacctatcttaacaaacaaaaaaaaaaaaaacaaccccccccccacctacataaacaaaaacacctattaccccccaaaaaacacccaccaaccattataacaaaaccaaaaaattcccaaacccccccccatcaaaactaccccccccccccccaacaaaccccccctaaaaaaaaaatccccttctccccccccaccccctcccccttttttttttaccccaacccaagaacttcccaatccacccccccccc

SEQ ID NO: 12842 - DNA, 396 bp, Oryza sativa
  Clone ID: uC-osflcyp170g06a1
ggggactcttttttttctcctgggtttctattccatttcattccgatggatagcaacaagcagttcaaacaccataaccaaagcgaactcaattcatggtaacatcacggacgaagaacacctaacactggatggatggatagagggcttttcgactcgggagagccactggacacgataacgactcgactcgatgataagatgattctgacacggatagctaaggataactggccacgatgggccccaccaatcagttcctccagttcccgccggagtccccgccgaagccgccgccacggttgccaccgtagccgccgccgccgccgccacgggcgccgccgaagccgccgccgccaccgtaagccgccctcacggggcccgtagccgccgccg

SEQ ID NO: 12843 - DNA, 444 bp, Oryza sativa
  Clone ID: uC-osflcyp170g07a1
gtccttcccttttctccgggcgcaagcctcttttttcaccctctcttttcctttccttttctccgtccgcacgccccttttttcaccctatctttttattcaactcctatctcgcctcctctcccctctcctcaaatcctaagcggtggtggcgatgctcccctccccgagatggcgatagttgctactcccccctcctcggtgtgccggcagcgacggcggtttgtcctcctccccaacatggaaccaatgacagttctctccggcatggcgggggtttgatttgtgaatattttgtggggatttttgtgatttgggatgttgatttagtaaccaccacaaggcaatggtttgatttgggatgttgattttggggggattcttgatttcgatttgggattgcatcggatgatttggtgattcatgtattttgtgaattggggg

SEQ ID NO: 12844 - DNA, 438 bp, Oryza sativa
  Clone ID: uC-osflcyp170g09a1
agaagccctaaatttcacaggcggggggtcacattcagttccataaatttttaccagatcggcaaccaaattgccactaaaccatggcaaagggagcttaattgtaacacgaattcctcacaagcgtgcagcgtacaacatttatttagcccaaggccacacttttcgcacataaacaagggaccttaaaacgggatcatcaggaaaaggaaaaaaaagatttaaccctttccagcaccatagagggagagagagaaaccccagcaaatcgaaaaagtttctcactacagcttgtacttggagcgggcgacctcggagtcgttggggaagaagcccatgaggcggccggcggagttctggtaggcgtacatgaaccctcccatgaccccgatgagccctcccgtcaccatcgatggcccgcggatccccggtttgatc

SEQ ID NO: 12845 - DNA, 426 bp, Oryza sativa
  Clone ID: uC-osflcyp170g11a1
ggagtgaacgtctaggaagaacatgttcctaaatacattcataggacagctcctgatcagaatgatgtctacaaattgccagctgaaaaaaaaatgaaattacatccggaagcttagggcagcttttagatcataatcgctaaaaatgtttttgccctgtcatctgcgtcccaacgcctgggattgcaagacttgaacttgaataatctacactctcgaaattcgatttcaatgagagaatcgtggatgcaatacaaaatccctccaatcatgagtgcttcaactcgccgatgcagaaatcttcaatgatctcaaagactctgaagccatgttgagggcaacccaaaaaatccttctgtcgaatcaccaccagcattgtttaggatggcatctccccttggatgttcctccacataagaggtgaca

SEQ ID NO: 12846 - DNA, 394 bp, Oryza sativa
  Clone ID: uC-osflcyp170g12a1
gaaggagctatcttataagtatacggtttttttgtaaggaaattaggcctacagtactgaatacattgtcctttgggagatgaatcaagaaccttgtttcctatatagagcatactatatagcatggcaacctgaccatactaaaagaaaaactgtacggtgtacttgctgattcccgtcggagaaaagttttgagaaactaaatgggttgggcaaagccatggacatggtaattgcaaattgatggtctacaaaatctcttttctacctacagcagaaaaatggatttgagaagtacaaagatccccaaccaaggctcttctaatctttgagaagcgtccaaggggatggggcctgttatatctatattgctccttaataccttacatgccct

SEQ ID NO: 12847 - DNA, 409 bp, Oryza sativa
  Clone ID: uC-osflcyp170h02a1
cttgcgaattttttacttggtaagggtgacagccgctccagttacaccacaaattttgctatagtgaccctgtttatttcacttcccatgggaacaaatcaaattgtctggaaactactaaaatctaaccaaaattgagattcaagcctactacccaaaaattgacggccagtgaccttcccggagaacaagtaactgtaacttagtcatcagtacccgtagccggagttgtccatcgggttggtgacggtcgcaggctcaggctccttgatctcgtcgacgacgacatccgatgtgaggaatgtcttggccaccgacgcagcatgctcaagacaacatctcaccaccttagtggggtcaatgataccagcagccatcaaattctcgtactgtccagttgcagcattgt

SEQ ID NO: 12848 - DNA, 325 bp, Oryza sativa
  unsure (1)..(325): unsure at all n locations
  Clone ID: uC-osflcyp170h03a1
ggacaaataattatttcatattgtaaaaaaatcaagaaaaacaatacaagtcccccccattgtagtgagacacgcctncaacgaccaaaccaatcacccgaatgaattaaggtattcaaatgggctacataccggggaccccaacgcttacccttttgggatataaaattttcttcaggttccagatgccggtggtactttgaaaccgtcgatatatttgacggactttattaccccaccaaagcgggcaacgcttttccttgggccgtcaaggttgaccgcacttggccgggggtgggcccaactttttctggtttttatccct

SEQ ID NO: 12849 - DNA, 341 bp, Oryza sativa
  unsure (1)..(341): unsure at all n locations
  Clone ID: uC-osflcyp170h05a1
cacaannggaagcataggttatcttaaggaaaagggggttcctttacnggacaggaccaaatccttgtacaagacaaaaccggcccacatggaaactagtaaggcaggtcggattacataggagagcacgtgccaggcatggtagggggcaacattgaaccaacaacccttcacaacaataatagaccacggcgatgaacaaaactaggacgactctttatgctcttccacctccgtttactttttctacattaggttctttctcctttggagtctttctcgaacgtcactccagggacaagcttagggacattaatttacatttttctgtagcgtgtacc

SEQ ID NO: 12850 - DNA, 510 bp, Oryza sativa
  unsure (1)..(510): unsure at all n locations
  Clone ID: uC-osflcyp170h06a1
gttagtgtgaagtacgtagggagtatgtaatcactgggtggcttcttccatagccaggtaccataaaacttcaccacagagtggctacttcgtggtccacataattaagaacacctaaaaacacacgtcctcccaaggcaccaagaaggatgacaaatactaatccttctctcccggatgaatcttaaatcatctcgaggagccatcaactcacactcacgtacctcccacacatgaagtaaaacacacaaatcaaaccaagcctttctttcttttactaccactttctgggcctaatcagcggtcaatctctatttcccgccgntgtgtcggcccttccccctcgccggctgggcctgcctggcccgcgcgaacgccttgctgaggaagcgcagccgccggctgttcgtggtgatgacgcccgtggtggacggcgtcttaccgaagacgacctcgtagccgtcgcggtacgagtccatgccgggcaccaggagctgccaagagaggccc

SEQ ID NO: 12851 - DNA, 695 bp, Oryza sativa
  Clone ID: uC-osflcyp170h08a1
tttttttttttttttttttttttttgggttttttttaatttttttggttttttttttttttttaacccaatttttttttgttttccttttatttggttgacaaaccccaaaaccccgttttaacaaaaaaaaaaggggcttttttgaaaaaaaattttgggcctagtgaaaaaaaaactttttttagggcccataaagggttaaaaaaaaaaaaccctgggggggggggagaaccaacgggacccgaagaaggccttctaaaattccacagccccatgcttaaggaattttttttcccaaaaaccctttaagaaagaaaaaaaaaatttttttcaccaacaaccctgggggggaaactcccctgtgaccccccaatttgtaaacggttctgggggagaaaaaaaaaaaaacccccctcccctaaaaaacttaaaaaacttgggggggccctctttttctcaatctttttttcccgcgcttccctggttttttttttccaaaaaacaccttcccatttttaaaagagaaaaaaaggtcttttttttccctattaaaaggggggggggtcaaaacccccccggaaaaaaaaaaagggggggcaaaaaaaaaccccaaaaaaatggtgtgaaaataaaaaaacccccccccaccccttttaaataaaaaaaaggtttgcaccccccccacttgttttt

SEQ ID NO: 12852 - DNA, 383 bp, Oryza sativa
  unsure (1)..(383): unsure at all n locations
  Clone ID: uC-osflcyp170h09a1
aaaaanacacggggagtatatactgatgattccgcccatatagttagattctttataacactttaccacaaaatacaatgggtatagtatttatattacaatattaatggagcgaccgaccagaaggatgaattagccacttttccaagctggacacacatttttggtagataattaattatcacatatggcgaggtttgcatatactccctacatactcataaaaaaagttgttttggacagcgacacagccttcaaaacataactttcatatcttattccttttaaaatatttattaaaacagtgctgtctgctatttttataaaagaatttttcaagacaaatcaatgcaagtaatttttacatttttaaacccaataat

SEQ ID NO: 12853 - DNA, 328 bp, Oryza sativa
  Clone ID: uC-osflcyp170h10a1
ggggaaaaagctgcaagccaatgcatgttttgattaacggcaagatcatgcacattatcccaggaagggggggaagaatttacggggctttaaagaccaaaaaaaaggaaaattctgtctgatctactgaacaaaactcgggggcgccgggtccttcccttcctgaacctacacggggccccgcgccggggccggcactacgggggacggcctccggggggatgagcaacttgaacctgccctcctccttgcacgggtggagcaacttctgggacgggagccctatctcccggagaacgagccggccggccttccggggcccccgggg

SEQ ID NO: 12854 - DNA, 408 bp, Oryza sativa
  Clone ID: uC-osflcyp170h11a1
gtggggggcattggtcccatgcaatcgtttaaagggttcaggggcctttgaatgaaaataccaactatgccgcaaactttaatttttgcttgccaaggtatacatagaagatgacggttcccttacagccgatcacatgaaatcgtactcatccggatcatcaaaattaccctttccagggatgaaatcatcgcctttattctcaatggggagctgctttttttttgccccttgtttttttttgcctgctgcagcttttttctcagccttgatcttttcattagcaattgctgcaatggaggaccatatatctttcggatccgcacctttcaatgatgccatggaaaggcttatgacattcttgggtagacccatatagtggaagcttttctcatagggacccaattt

SEQ ID NO: 12855 - DNA, 337 bp, Oryza sativa
  Clone ID: uC-osflcyp171a03a1
tttgggtttttttttttttttttttttttttttttttttttttttttttttttttttttttttttttttttttcccaaaaaccgggaaaaggtaaaccgccggggaaacaatgggaggcaaaaaagggccggaggccccaaaaaaaaaccccaggaaaaaggaaatgggatttaaaaaacggacaaaaccggaaaaaacgggcccaaaaagccagggttcagggccaggcaacagggggtcaaacccacaaaggtctaaaaacaaacctggtgggggaagggccccaaaaaacacccaaaaacaacgggccagaaaaaaaacgggcggcaaaaaggg

SEQ ID NO: 12856 - DNA, 319 bp, Oryza sativa
  Clone ID: uC-osflcyp171a04a1
ggcaaccaacagcttcacttatttatataaataaataaatagagagattaccaattcaagaatcaagctgcacctaaacacattaggggaactctaccgctaatccagaatatgctaatctatcctgcttaacgaccatgtcgtaatggggttacaagggccataatgccatgcgaagggacatccacaatgccttttccattgagatttaatttgtttggcgcagtagcgtaaggagtacttcctccgtttcatattataagactttttagcattgcccaaatttatatatatggtaatgaatatatatatatatatg

SEQ ID NO: 12857 - DNA, 383 bp, Oryza sativa
  Clone ID: uC-osflcyp171a05a1
agagcaacagaaataataaagcactcatgtacatatgcgcagttcctcagcaatagtaacatattatacttcattactttatctacaaaaatatctcgcattttattcaatggatagcaggtatctcaaattttcaccagcatccatcaaacaatgttctctcatagtatacaccggtcagctatatgcatcagggtactccagttgaacatttttacaattttgagcgccgtatgcattttatcggattgaaagtgccatgctgacgagcaatagaatttatatgcctcccgtttattgatgcagaaggcttgaagtcccagccttctacgttcttggggacgcatacatcgtaaagcatctgacccaacactccatggggg

SEQ ID NO: 12858 - DNA, 289 bp, Oryza sativa
  Clone ID: uC-osflcyp171a06a1
ggccagcattagagaaacaaattagaatcatacaaaaatatcatgtgaacataataagctgtagattctctggtattattaagaacatcatgaggcaagaacacaacatgaatggatctacatactagctagctacacatgactcaatagaaacggaatgagcctcagttcttacaaactctgccagggaggcaatagacacatcttagtggctgactaaccaaatgtgtgcattgacaacacaaatcaatcccagtcctttgccatgatacctaaaattatacaaaaa

SEQ ID NO: 12859 - DNA, 386 bp, Oryza sativa
  Clone ID: uC-osflcyp171a07a1
gggggccaaaccgaagattttttagtaaaaacaccagaaaaataaacttgcagtagggggattggccaagggccaaaccaacaacaggtttacaaccccatacaggatttttttggggggcctaaacccaaaaaaggggggcagggagcccccgcttcattttaagagggaaaaaaaaccgaaggggtgccacacaggattatgcaggggtggtttttccactttcaaaagaaaagccctatttgaacccacccactcaagaaggccacaccaacaagggcacattattgggtcaagaatagaaaaccccagtttcatccttgggggatgaaagggtttttccgggggtcgctccctttgcaatttcccgggcaagggaagcgaaa

SEQ ID NO: 12860 - DNA, 375 bp, Oryza sativa
  Clone ID: uC-osflcyp171a10a1
tttgttttttttttttttgggcgcacatccagataacgattactaccatacatataatcctgagcaaaaacatagacatgaacgtgactgaaaccaaggcacaggcacacgataattttggaagattcaggcatacgatttgcctcgaaatttaagcgacaggatcatgatcccaggcagggtgtttgccacggagtcataggtacgggacatgcatagagaatgataaaacaatgggggttcccagttctgataaacaaggatagcggtagacttccttcttcatccggtgctacagtgcaccaggatcactccttcagtttccaccaaagaggtagcccagggaagatccaccaccaggggcagcatggacct

SEQ ID NO: 12861 - DNA, 188 bp, Oryza sativa
  Clone ID: uC-osflcyp171a11a1
ataaaaaaaataaaaaattatattaaattaaaaaatttaaaaaaaaaaaaaaagaaaaaaaaaaaaaaaaaaaacatttaaaaaaatcccaaaaagacaataaaaaaaaaaagtgggggagaaaaaaaaaaaaaaaatttttgcaaaaaaatcaaaaaaaaaaaaaaaacaaagcttaaaaaaacaaa

SEQ ID NO: 12862 - DNA, 271 bp, Oryza sativa
  Clone ID: uC-osflcyp171a12a1
aaaagtcaaggggccagccttacataaacaaattagaatcatacaaaaatgtcatgtgaacataataagctgtagattttctggtattattaagaacatcttgcggtaggaacacaacatgcatggatctacctactggctagatacccatgactcaatagaaacggtgtgagcctcagttcttacaaactctgccagggaggcaattgacacattttaggggctgactaaccaattgcgtgcattgtcaacacaaatcaatccccgtttt

SEQ ID NO: 12863 - DNA, 281 bp, Oryza sativa
  Clone ID: uC-osflcyp171b01a1
gggggaagggaaaaaaaccttttatttttaaaaaaggggaaaatttttaaatttgaaaaaaaaacttgatatttttaaaagaaaaaaccccttttttaaaaaaacccaagggataatttaaatttaaagaaaaaaattttttcaaaaaaaaaaaaaaatttaaaaaagggggagccctttgggggttaaaaaaatttaatgaaaaaggaacaaaattaaacatcaggggggcccccctggaaaaaaaaaaatgaaaaattggaaaaagggaggggaatttt

SEQ ID NO: 12864 - DNA, 282 bp, Oryza sativa
  Clone ID: uC-osflcyp171b02a1
gggaaaggaaaaaaaaccttttattttaaaaaaaaggaaaaatttttaaatttgaaaaaaaaaatgtattattttaacaagaaaaacccctttttgaaaaaaacccgaaggaaaagttacatttaaaggaaaaaacttgttttaaaaaaaaataaaattttttaaagggaaaagcctttgggggttaaaaaaaattactgaaaaaggaaaaaaataaaaaaaccggggggcaccccgggaaaaaaaaaaattgaaaatttgaacaaggaggggggttttttt

SEQ ID NO: 12865 - DNA, 447 bp, Oryza sativa
  Clone ID: uC-osflcyp171b03a1
gtagtggtatttatgggattgataaaaaatgaacttatttggaactaagcagtatgaattacaaccaagctagtctaaccataaagtgctcgagtaaatagtacacagtacataatgaaactatacgctacatggaaaaatatcgaagttatatatatctatcagactatcaaatatcctcgcttctaccagcagtgaatctcctctgtgctggtgtcgcccttttgctcacaatatgcctgcgctgcccttcgtacggcaggacatcctcgctgtcatcctccctaccgttaccatcctcatgaatcgagtcaaaaattttgctcttgccagtggatctccccagggttgatgctgccctagtgcgcactttggcacgtttgcgctcgccttcgtctggatcagagccatcgtccttccgatcgaaagagtcatcaaaacttctac

SEQ ID NO: 12866 - DNA, 423 bp, Oryza sativa
  Clone ID: uC-osflcyp171b05a1
agacagcaactcaataatctttcgatatttcaccgagggtaatgtatggtaggaaaatcgccagacataacagagccggccagactcaactcaaactcaaccctatgatggtaaactgtttgcgattaacgcctccgcctatgacaatgtttggagataaacgcttccaccaaaaaacgaatgtcggggagtgttctcccctacaagaattattattgttttcaatgttaaaaaggcaaaattcaccagatcccgttagtgcaggaccaggaataaacacttgttcgtcatcattttctgccagtttaggcaccgcccgagccgtacttctttccaaagaagaggatctgcagctggtcatagcctgagagcacaccagcaccagcaatggcacgtaggatgttggcccagcacccttgaaca

SEQ ID NO: 12867 - DNA, 224 bp, Oryza sativa
  Clone ID: uC-osflcyp171b06a1
ttttgtttttttttttttttttgttttttttttttttttttttttttacaccgtttaccttaaacctaaattttcaaaagaaaaaaaagggtccaaaacatatgtaatacggacacaagaaaaaaaggggacatatctggattcccttaaaaaattccaaaaaatttaggtagcgcccactgggggaggaacaacaaaatttttatggcaaggacccggtcccc

SEQ ID NO: 12868 - DNA, 341 bp, Oryza sativa
  Clone ID: uC-osflcyp171b07a1
gttaaggtgatgctgcccgaaaaaaaaaaagatccggtaccgggggaaacccccccagcaaaaacaatacaaaaaaggaaaagcaaagcaaaaaaaaaccaaaccggaacaaaccaaagggagggcaaagacgcccagcgaaaaaaagaagaaaaaaaccccccgggggggggcccgccaagtacggaccgggccccgaagggaagccaaaccacgttaaaataaggggaataaaaatagggggaaaaaaaggccaaagcagaatcccggggaaaaaggaaatcccctcacaataccacacaacaaacaaaccggggggaaaaaattggaaagcccggggg

SEQ ID NO: 12869 - DNA, 380 bp, Oryza sativa
  Clone ID: uC-osflcyp171b08a1
ttttttttttttttttttttttttttttttttttttttttttttttttttttttttttttttttttttttttttttttttttttttttttttttttttttttttttttttttaaatatttttttttaaaaaaggaaaaaaaaaaaaccaaaaaaataaaaaaaaaaagggacaaaaaggaaaaaactttattttttaaaaaaaaaaagtaaaaaagggaaaggaaaaaaacccttaaaaaaaaaaattttgaaagggaaaaaaaaaaaattaaaaatttaaaagggggaataaaaacccttttttggaaaaaaaaaaaaattattggcgccctaaaaataaaaccccccccaaaaaaaaaaattaaaattttgggcttac

SEQ ID NO: 12870 - DNA, 406 bp, Oryza sativa
  Clone ID: uC-osflcyp171b09a1
ttgtttttttttttttttttttttttttttttttttttttttttttttttttttctttttttttttttttttccccgggaaaagggggacaacttcaacatttttgttaaaacgggcaggcttaggatccagggacccagagacgttctaaagctcacatattaggggtttggatcacacagcagggttttaatgaagtccacagaccccatttgggatataaacccccccattttagcataacagtttttaccaatttaacaaatttgggtggcctttgacgggacaagggcttatagcagtttgggaattatttttggggggaaaaccctaagccgggggccttaagctaaaccaggcggggggagaggtcttttttataaacagccttttccttttccttggc

SEQ ID NO: 12871 - DNA, 271 bp, Oryza sativa
  Clone ID: uC-osflcyp171b10a1
ccgtcaagaaaaatagaaaagctaatgattcagttatacaactccattcgttgggatagattagtctacacataacattgttcagaatttcacaaatagggaaaaggggcatttcagtgaaaaacatctggtaatcaaaatttgtgaatcagtctatgccgactaatcaatcatacgatttgctacttcactgtgttatagataatgaggttccagtactagattacgcttggtcagtaggcagcctcctcagcagtttgtacaggccaaa

SEQ ID NO: 12872 - DNA, 432 bp, Oryza sativa
  Clone ID: uC-osflcyp171b11a1
aaaacattgcattgaattctgaacgataaacaccaggaaccggcgtttatttgaggcaagcactgcccaaaatctcgcaaaagtactgaaaccttagacatagtacacatccatggcaaacatggatgccaaatgacaactacagaaaattatcaaattcgaatgcagctgacggcttctcctgctgaagatgcatattttcccctccattacttggatgtgctctctccatcgacagccaatgggacggcgctggccaggctgcggtatttcagagcatagaacatctcaatgtaacggcgagtctcgcgcctctcaaggttgcttacgtacttccagaatccatatacaccagtcaaggtcattaacctctcagagtacagcttccaggtgtacttctcgtaaatcctctgcagacctccctgtgaaata

SEQ ID NO: 12873 - DNA, 471 bp, Oryza sativa
  Clone ID: uC-osflcyp171c01a1
ggaaactctgaatctttatttgaatgaatgagccgaccttgatttaccaaaaaaaaaaatactcactagctgcttgatctgaatgttcaagtgggttgatagtgatggtgaccatgagtccatgaccgtgtcttggctgccacacgtgacacgacagtatcgctctcgtagtcgtaggcgtacgcgtataccaacttggttacaggatactgcttcaactttggctgcctctgccaaataactcttcacatgccaaattgcctatcacccaaccatgtacgtatgatgaactactaacttttcctctcttttttcaataataacttctaactgaccaaacgattgatatgtcaataagccatggacttgttattctggtttctgaagaaaaacatggaccagcttttaaggcctttttggatcgcaggtgccagatggtttcatctgaaaacgaaaggttatcaaatgaat

SEQ ID NO: 12874 - DNA, 508 bp, Oryza sativa
  Clone ID: uC-osflcyp171c02a1
ggaaactctgaatctttatttgaatgaatgagccgaccttgatttaccaaaaaaaaaaatactcactagctgcttgatctgaatgttcaagtgggttgatagtgatggtgaccatgagtccatgaccgtgtcttggctgccacacgtgacacgacagtatcgctctcgtagtcgtaggcgtacgcgtataccaacttggttacaggatactgcttcaactttggctgcctctgccaaataactcttcacatgccaaattgcctatcacccaaccatgtacgtatgatgaactactaacttttcctctcttttttcaataataacttctaactgaccaaacgattgatatgtcaataagccatggacttgttattctggtttctgaagataaacatggaccagctttcaaggcctctttggatcgcaggtgccagatggtttcatctgaaaacgaaaggtaatcaaatgaatcagatctgggtgggcctgttaaactacagaacagaac

SEQ ID NO: 12875 - DNA, 387 bp, Oryza sativa
  Clone ID: uC-osflcyp171c03a1
aaaaaaacgcttaaacttttttaacccgggttaaaaaaaggggaaaaaaaaaaattggggcgaaagcaaggccaaatggaagaattggggttaggggggggctttcggggccaaaaaaaataaaaatttggccagggaaaaaaaaggaccccgggcccccccccccaagcccttaaaaaaaaaaccgggggtccggggcggaaaaaaaattttttttgaaggggggcccccccccaaaaattggcccccccggggaaaattttttggggccaaaaccccaaaaaatccggaagagacaaccaaaattttggccaattcccccttttatggggaaccgtgaaaaaaaagcctttaaaattggagggggtgaaaaaaatcccccccaaa

SEQ ID NO: 12876 - DNA, 480 bp, Oryza sativa
  Clone ID: uC-osflcyp171c04a1
atgaacagcatttaactaacaaattaaactagaaataacattaagtttccataggaggtttactggctggacggacatacatgtataaaccagttccaagttccagccattttgcaactaatgcaaaacctatatgagaaagacctatagaattaccgggttcacaggagacgcttccaccatggaagcagagggatgaccatggtgaactttaaaagcttaaggtgctctttctttaaacgctacaagtttattcttcagtactctcagtagtaccaattcgagccgtcattcttctgctggccctgcattgcgccggggtattcgacggcacctgacatgttgaaaccagagccgaacctgaactccgatgcaccattgatgtcgcccatctggttaccgaatggagtatcgtcgcggatgaagaactgctgctgtgccggggtggtctgctgcggttgctgcatcatgccattgaca

SEQ ID NO: 12877 - DNA, 350 bp, Oryza sativa
  Clone ID: uC-osflcyp171c05a1
gaaactgaaatatactgtttgaattccgacaaatggatgtccgaaacaagcaattaactaagcacacatattaccaaaccttttagctgcgtatataaaaaagctatggttttcaactgaaatcaagcttgctgagctgaacatcatcagatcatagcctaggggcgaagcaggggggggaggccaccgacatcgagtgacaggccctcgtaaggggccaacatggccatgtacagacaaaaagccatttcatcttgctcctactgtacggcagcgaaagacgggaagccgaggccacagttgatgcccagtgaatctgtcaagatggaacacacaaccgggttcggaag

SEQ ID NO: 12878 - DNA, 431 bp, Oryza sativa
  Clone ID: uC-osflcyp171c06a1
cttcagtaacagaatttaccaccagatgcctgcgaccgacaaatacaacacagcgttttctacatagtaatctttccttctcattcaaaaacctgcaacaccgcaacagtcataagggcaaatgcaccctcgttcaattcattgcagatttggggaatatttacagcactctgcagtttgcactagcaccgcccatgccaaccagaaacatgaatatgaatagtagcaccatcatgaactgataataatcaattcgcgcttactactacgaatagcacctgaggaattcatacatacactactagctctttcgagctgcaaaacggtactgctagtgctatagttaaacagcctcagcccttgttcaacacatggaggtcatgtaatgtcatgcagtgcaatacatttagccagcagcaggaggtccctag

SEQ ID NO: 12879 - DNA, 427 bp, Oryza sativa
  Clone ID: uC-osflcyp171c07a1
gaacatagaaacagtaccgagaaaggaactgtagaaactttattccagatttatcatttattacccatccctaggacggtaacattcttgtgatgaaaatacatatgcccatgcttaaggtaactggatacaaggaacttcacatcacgtcgaaaaggaaatattacaatacaggcatgaacgacacggggaaaaaaaggcttgaagtaactccggtagactcatcagaattacagcgtgcagtactgaacaagtagtaagattttgcaggaaacagttcatagatatacatgactggaatagatccggataccggatgaccagattcaccggtagttgcggtaaagtgggctgtacatgcagctctctgcatacttaaccaggtcctttggccgagggcgcctgcttgccaaaccaagttcatatg

SEQ ID NO: 12880 - DNA, 391 bp, Oryza sativa
  Clone ID: uC-osflcyp171c09a1
agggaaaaagagatgaaatatgacgtaaggatgaaaatgtgtaaagtaatacaacaagccgtgtacaaaatgagtagagggtatcagtatatcactactcaatcctaccgtgaagggtcgttactagatcgtgcgcatcgtccaggagcttccaaatgtccagctgcccagccatgctgttacactcccttatgatctcatccatgctgctatagctctctattatcagtttccttttctgcagcacgctggccgcaattgcatatagtagcaagtcatcagttggaggggctcctaaccgcagtttccccaacgatgattttgcaatttcagcacggtttgctgcctgatcggcccacataaccttccatagacagagggtctgcttaaa

SEQ ID NO: 12881 - DNA, 473 bp, Oryza sativa
  unsure (1)..(473): unsure at all n locations
  Clone ID: uC-osflcyp171c10a1
gataataattccatctgtttcatcgcttggaatgaattgtatgggaaaaaaaaatcaatgcaaatcaagagataacgaaacatatgattctggagttcaattgaccagaatttgcaagagcactacatccatatcggctattgttcttatctagtaggctgtatgattcttgaattcgccaagaaaaagatcacctcctcctacatcacctgagcatgtcgccattgtcaatgaacgggccactgaacgccggcgaggcgctgaagttgctcccggcctcgctgaacatggcgctgtgcccgtacggcagcggccggtccggcagctccgggatgtccatgtccccctccagcatcttcaccgcctcggtgatggtcggccggagcgccaccatgacgtgcgcgcacaggatcccgacgagcacgaaccttttcatggcgccgncccgggggcctgccgcagtcgacagcgcg

SEQ ID NO: 12882 - DNA, 490 bp, Oryza sativa
  Clone ID: uC-osflcyp171c11a1
agatacaatctgcagatggaatttagttaggatccctgattttagcagtgtggtcttgcaggaaaaaaagtacaagattttccttcgcaaaaagaagatatatatggctcagtttgaactagtgctgcttgatcaacgggagccacagaaaatggcagaagaaaacaaaatcttcaaaacgccagttttgatctcattgtctgcagatggtatgcttcattccgtataatctcgatcctaacataattttcacaaaattcttcccctcgaaagtgttgcttgtcacagagctgaacacaaagctcctgagggccaggatgaacaacatagttttgcttcatttacatgcttcacagcaagaccaattaaccatgatcctacactaacatcatcatgtgcatatgtccggagaacagacctgtttatagagatgaattgagctacagcctttgagatgacaaacatttcaccagaagcttggcggaagtac

SEQ ID NO: 12883 - DNA, 212 bp, Oryza sativa
  Clone ID: uC-osflcyp171c12a1
aacaaaaaaaaacttttgagctttggggggcttaggggctgaattagggcccaattaaaaataggaaaaaggggaaaaaattaaatctttaaaaaaaaaaaattggatacaaattttatggtttcgaggggaaaaaattttttttcgggggcaaaaaaaggcccccccctttttagcgaggcccggttgttaaaatcgggcccccctccaag

SEQ ID NO: 12884 - DNA, 325 bp, Oryza sativa
  Clone ID: uC-osflcyp171d01a1
aaaaaacccaacggaggaataatttttttttttggaaaaaaaaaaggggggcaattaaaagttaaaaaaaccccttttttttaaaaaaaaaggggcctttttttaaaaaatttgggggggaaaaaaaaaaagaacctttgggggggaatcgccaaaggaaacttaatgggggggaaaaatttcccctgggttttaaaaaaaaacccggccaggatttttaatttcaaaatccccgggggaaaaacaggggggggagggcatccaactttggttggggggccccccaaaaaaaaaggggtttcctaaaacaaagaaggttgggggg

SEQ ID NO: 12885 - DNA, 376 bp, Oryza sativa
  Clone ID: uC-osflcyp171d02a1
tttttttttttttttttttttttttttttttttttttttttttttttttttttttttttttttttttttttttttttttttttttttttttaaaaaaaaaaagggaggaaaaattttttttttaggaaaaaaaaaaggggggcaattaaaagttaaaaaaaccccttttttttaaaaaaaaagggggctttttttaaaaaatttgggggggaaaaaaaaaaaaaacctttgggggggaatcgacaaaggaaacttaatgggggagaaaaatttccccggggaataaaaaaaaaacccggccaggatttttagttttaaaacccccgggggaaaaaaagggggggaagggaaaccaattttggttggggggcccccc

SEQ ID NO: 12886 - DNA, 239 bp, Oryza sativa
  Clone ID: uC-osflcyp171d03a1
acaaagtgtgcaagtgtaaattaacctttggacacttgtctatgacacgatcttactcgtctcctcctttttatcaaaaaacaatgaaagaaatgaatctcaccacaagaagaagaaggagaaaaaaagcgaatcaaaaacagaagagctctcctatctaccatcagcatcatcaagatccccagccatggtgtcagggctctggcaagaagtcgcgcgcccgttccagcgtgttggtg

SEQ ID NO: 12887 - DNA, 449 bp, Oryza sativa
  Clone ID: uC-osflcyp171d05a1
ggaacaaatataattttcatcaagaaaattcgagttcaacaattagataattatatttaaaaaataacatagataacaaagagtaattgctatattagtctgtcttcctagtagatggcatcccaacacattattgtctgaaataaggggtaccatcagaacagtaagaacacacttgcatagattcaaaacctcaagctgcttttcatctgtcaaaatagttggaattatgctgaaaggttaaagattttttccaatgcatctgacagcaaaacattcttataagacatggcaattcagagcaaatggcttcctattagtttatacagtttaaactgtgatagtgacttatatccagaaatcatctgcttataacacatgatactgattttgactgcaatttagtcctagttcctgcactaaccaatttaggcatcccatggagaatg

SEQ ID NO: 12888 - DNA, 464 bp, Oryza sativa
  Clone ID: uC-osflcyp171d06a1
gcacctcagatgaacaaaatatggttatccaccaaagttgaacatgaggctagacaagttctataaaatgtactcacggtcaggcggaggccgtaagtggaagcggagtggaagcacaagttgctatacgtgacgaagaggccctttccgcctccatctccatatgaccatctcccctcccaatctgccgccatattcccctcggcgtctcccttttgtctttgcttcaccgtgcctcctagtggcgaattagggatggagacaggtagaagcattggagtcaccagcacgaaaggaggcagaggtgttgaccttccccattgcgaggaatagggagcaaagaagatggaaggacaccagatctgcagcttctgtcggagatggataggaggaggtcatggtagtgccactgaagatggggaagagaagacatcgatggggatggcgaggaaacgacagtgggg

SEQ ID NO: 12889 - DNA, 413 bp, Oryza sativa
  Clone ID: uC-osflcyp171d07a1
aaaaaaaatatataaaaaaaaaaaaaaaaaaaaaaaaaaaaaaaaaaaaaaaaaaggaaaaaaaaaaaaaaaaaaaaaaaaaaaaaaaaaaaaggaaaaaaaaaaaaaaaaaaaaaaaaaaaaaacaaggatacaaaaagaaaaaaaaaggggggggataaaaaaaaaattagaagtgaataaaaaaaacaaaaaagaaaaaaaaaaaaccaccaaaacaaaaaaaaaacaacttaaagtaaaaaaaaaaaaaaaccacgaaaaaaaaaggaaccaaaacaatttttaacaaaaacaaatagaaaaaaaatcaaaaaaccaaaggaaaaaaaaaattttcaaaaaaaaaaatgaggaaatgaaaaaaaggaaggaaaaacctaattaaaaaaaaaaaaaaaaaaacttaaaaa

SEQ ID NO: 12890 - DNA, 359 bp, Oryza sativa
  Clone ID: uC-osflcyp171d08a1
gggctacaaacaagcgcgagtcttttcttaatcaaatggcagtcgtcctgccgcttcattacattacattacattcctaaacttgctacagaaaacaaaatagctttctcacacgaatccttaataacaaagataaattattttagcacacgatgtagcttattataatttgagcaagcagagcccagtaaacgggcccataaaaccataacagaagccccgggttgatcagcccagcatgacgggcctatcgaagatccagctgaaacgggccatggcgggctcgatgcgggccgccctccggtgggccagctcctccatcctccggatcttgggcgccaacccgcacaggtacttct

SEQ ID NO: 12891 - DNA, 382 bp, Oryza sativa
  Clone ID: uC-osflcyp171d09a1
aaacaaggggaaaaaaaaattattttctgatttatctatatagccttcagttcaaagtttgatacttatactggaaaaggggaaatggacccagaacacgaatcaaccggaatttaagttcagttccagcacaattccaggcatccgcccgtttggctgatgtctacgtactgcaaaaatggcgctcatgtctgctagaccactaccaaattaggcccagaaaaaaaaaaccaagccttaagccttgaacattcacaggacaaaggctgcaaatggtccaagcaaactgatgcaaccatgcaaattttaggcacagttacactggggaaagaaggcatacatgtcaaggcaacatggcatgccattattacgccagttcact

SEQ ID NO: 12892 - DNA, 471 bp, Oryza sativa
  Clone ID: uC-osflcyp171d10a1
gccggaatgaccgaaggaggtcattcaatgtaattaagataggaagaaaaagttacaagaaaaattttacatcgatagctggctgtcgaggaaggatgtgcaccagagcacacgccccgaaccatgtgccaaccgtccgaacacacactacagagagggaagccaagcaccgaaccggccatcgctatgcgagaccgatcgccaccgagctaacgacaccactacgacacgaagactctaaaatgacgccctcacgagggtcgcgacgccaaaagacgccgtcgtcatctatccaaagactggacaaggttttcacccagagctccttgccgagggaggagggatacctcaacagtgccctcaagagggttactacgtccgaaggcgaagtcactgttggcccaaagaattgggctaagctttcgctcggaaccccctgccaccgtggtacatcacccaatccgaatccac

SEQ ID NO: 12893 - DNA, 481 bp, Oryza sativa
  Clone ID: uC-osflcyp171d11a1
ccttaaaaatcttaattctattattgcgggtgtatatatataattacagatcacaaaccctttttcagttttcgacccagtcctacatgaaacaatcaaccaaaatcaccacttgaagcttgtagatcactttcagataattccatcaagaatgagatcaatgacatacacggccattttcctaacttatcatacaatttttcttttctcctttttcaggcaaactgctctccttcacacggtttgcagagctagcattcgctccatccagtcgatgatgtctgtggcgatctcatcacgctcaggctcaaagagcagatcgtgcaagaacccatcatacagcctcagatccttgtgcctcgatgaggcctcgttgtagaggtcctgtgaagccagggggtcggtcacccggtctgcggttccatggaggaccatgaatgggacggtgacctttttcagttgtgcagcaggtaggaggaga

SEQ ID NO: 12894 - DNA, 462 bp, Oryza sativa
  Clone ID: uC-osflcyp171e01a1
aaaaacggtgagggtatattcctcattttccccgaataagagggtatattcttttttatgattacttttaagtgcatcctacatgatgctgcacttgactcagttttaacacggaatttatgcaacatccgtgttggtcttcccaaatactgtatcatcagaaaatatcggagtagtcgtgcagggcgctgtcatcttggcagcaaaaccaatcgcagctagtacaatagtacaagactacaacttggatttgctttgcataggcaggcttcccatggccctggccttctcccggagcaagaacttctgcgtcttccccgtcgacgtcttgggcaggtcgccgaacaccaccgtcctcggcgccatgtaacgcggcagccgcgcacggcagaacgcgatgatctcgtgcgccgtcgcgcttgccccgtcctttagcgtgacgaacgcccacgccgttttgcc

SEQ ID NO: 12895 - DNA, 455 bp, Oryza sativa
  Clone ID: uC-osflcyp171e02a1
aaaaacggtgagggtatattcctcattttccccgaataagagggtatattcttttttatgattacttttaagtgcatcctacatgatgctgcacttgactcagttttaacacggaatttatgcaacatccgtgttggtcttcccaaatactgtatcatcagaaaatatcggagtagtcgtgcagggcgctgtcatcttggcagcaaaaccaatcgcagctagtacaatagtacaagactacaacttggatttgctttgcataggcaggcttcccatggccctggccttctcccggagcaagaacttctgcgtcttccccgtcgacgtcttgggcaggtcgccgaacaccaccgtccttggcgccatgtaacgcggcagccgcgcacggcagaacgcgatgatctcgtgcgccgtcgcgcttgccccgtccttcagcgtgacgaacgcgcacgccg

SEQ ID NO: 12896 - DNA, 439 bp, Oryza sativa
  Clone ID: uC-osflcyp171e03a1
ccatgaattacttcatgcataaaccgcacgacataatggaatggacggggaacaacaaaccgaattagatacagaacaaaacgtaaaatacggtagcaaattattcactccctacaatgctccctccatctgatggaaatggaagtcatcagatcggaggcccagaagggaatcctgcgttccagcaattattcgtcaggcgatggactaaaaaggcagagaaacaagaggctggctgattacaatttttcgacagagtttcatctcatgaagagagatatactgctcactcaggccttgagctggagcttcttgattgtgtcgatgtgcttcgctgggttgaggcccttggggcaggcgtgtgtgcagttcttgatggtgtggcagcggtacagcttgaactcgtcgttgatggaatccaggcgctccttaatgaact

SEQ ID NO: 12897 - DNA, 502 bp, Oryza sativa
  Clone ID: uC-osflcyp171e04a1
aacaagaactgagaattacttggagcgatataagaaagaaccacagcactttacaattacttgagcacgatctacattacaaccacactaacgtaaattataggtatggagtccttgtacgtatatcatatatggttgcaggcttgcagcaagatcttgtatattaacattgcagagttgcacaccaaccacatcatatcgacagtttactacacaagacactcccaacacacaaatctacagacaggtcatatatgtaccaagcaccaacaagggccaaaccaagtcaaggactcaagattcatgcatatgttgtgatgtgagatgccaacactcccaagtcaggttccagggtgatatggtggttcatttctagttctgcttcttatcttttgctggacccctaagtatcttgctgagaacctttgcgtcgagaacagagaactgcctgctgagttccacatgcgcctttccagcaaaatgatcaaccttgtcctgatac

SEQ ID NO: 12898 - DNA, 273 bp, Oryza sativa
  Clone ID: uC-osflcyp171e05a1
caaggacaaacgcaccacctttttttcaacgactcaaacgctaattatacaaacgggggacaagttcatagcccatagggtccaaaaaagctagtcataacatgtttattggtacagagcttaggggcaaaccttcaagaaaaaagccccagtttgcgggaccggttacaccttaaaaacaggactaaattcttgccacctccggacccggtaaatttaaggggggaggtatcccaggcccggaccaaggagggcttcccttcgtggcgggat

SEQ ID NO: 12899 - DNA, 329 bp, Oryza sativa
  Clone ID: uC-osflcyp171e06a1
aaagcaactgacattgagtcatttctgaattctgagtgctaatgctgggagaagcacaaaagcaactgacattgagtcatttctgaattctgagtgctaatgctgggaggagcacaaaacaactgacaccctctcatcagtgggagttcattcagacaggcatgagagaaaccacagatacatctagcagcgcatgaggaaatgcaaagctagcaagcaggaggttcagccaaattggcagtgctcagcagcctacttctcctgctggaggttggggtggctgggctgcaccctgaaggtgaacggcatcgaggccgcgaagtcccttg

SEQ ID NO: 12900 - DNA, 328 bp, Oryza sativa
  Clone ID: uC-osflcyp171e07a1
ttgtttttttttttttttgcacacacatatatattattatttatatacactactaagtagaaaagaatgccacagacacggtaataaaaatggcagtagatacataagaaataatttaattacactagctagcagtggcacatctgaaaaaacaacgtgaaataaaagggaaaaaaagcaagcagaaagctagctcatcactttattccagaaacggtacagtgtagtgactcgctcgctccttcctttggcgaaataatgtcgtcaatgccttaatcgtgcaggaacaagggcttggtcttcggggatcgccgtcactgggcgggcg

SEQ ID NO: 12901 - DNA, 471 bp, Oryza sativa
  Clone ID: uC-osflcyp171e09a1
ttgttttttttttttttttttttttttttttttttttttttttttttttttttttttttttttttttttttggaaaaaggggaaagcttttttctaagaccacctaaccctggccccggattaacccaagaccccccaagggggcctgaccaaattggttaaagcccccccccttattgccaagccacccggtttatcattcccagggctttttgggcccatgtccaaaaagccccaacccaaccttgggcgatccaagcaagcaaccatttccatttggcatcccctcacttcccctttccatcccttcccgcccccacggggttggcggcaatgtatttgcccccggttataaacctttccttttccccccccccagcccccggggcggccggcccataaaacttttgggccccggttaaccccccggggggccccaaggacattcccccccccccgttttttatcccc

SEQ ID NO: 12902 - DNA, 437 bp, Oryza sativa
  Clone ID: uC-osflcyp171e10a1
gaccgaaagaaagagcagtcaacaacatagattaaaacataatggccatggattcacgatgttcatagccatatacaggtagcaacgacagaaaactagaacggaaaaaaaaaagcagttcttgagtctaatagatggctgccatacatagacaggggatagggaacaggtccaatcaccaaagagtttcaggatgcagccttttgcatttaagctaaacataacgatttgctacccccaaggtgccatgcaggtgcctcccaatctccaatagtatttattccttttttttccctgtgtacatgctccgactagaagacttcgaattcctcaatagaaatcgctaacgggcatgtcattaaagctccagaggtccatgttgttgacaacatcctgtgatccatccaggttgagaaggctatcaattgagtcaccag

SEQ ID NO: 12903 - DNA, 243 bp, Oryza sativa
  Clone ID: uC-osflcyp171e11a1
ttttttttttttttttttttttttttttattttttattttttttttttttttttttttatttttaaatattttttttatgggttaaaaaaggggatagaaacaaaaaaatagaaaaaaaagaaaaaaaaaacgaaaaaaaaaaaacaaaaaaaaaaaaaaaaagaaaaaaaaaaaaaaaaaaaagggaaaatgaaaaaggaacaccaacaaaaaaaaagcaaagaaaaaaaattaagggaagg

SEQ ID NO: 12904 - DNA, 464 bp, Oryza sativa
  Clone ID: uC-osflcyp171e12a1
aaaaagtcaatggtgtcaaacatttcgaaacggagggagtataagttcagaaatgcaatgtttgacatattacagtactagcaaacatctcacaatcgcacaccgacatcaccttacagatctagctcttacaggtggccatgcctacgcgaggactcaaattttcaccttattttcagcacgatttccctccgggttaccctcgaaacgtccaatcctgaaatacccaagctccactccggcctccgccgccgtcttggcctcgccgtccatggccatctcggcgaggatcctcccgactgcaggtcccatcttgaagccatggccggagaacccggcgccgacaaccacatccttttcaaactccccaccaacgaagtcgatgatgaaatcctcatcaggggtcatggagtacatgcacgactgccggatgaccggcccaccggcggtgtcgacgtggccgg

SEQ ID NO: 12905 - DNA, 522 bp, Oryza sativa
  Clone ID: uC-osflcyp171f01a1
ccatgtaaacagaccacatgcatataatacagaccattcaaaagattggtaatagtaaaaatacaagttcgtgaatggcgataatacttaaagctacctccaaatagcgtgtagcattgcgtagcaaaccaagcatataacttaggacaaacattcagttgcagcttcacatcatcgctgcttatcataactgcaataacagcgcagatggagcataaactaagtatatttcgtagttctagcttatatataatatcagaatcaccaactgtgaaccatccacaggatggtcgggggactactgatcagaatctactcctttgaggtgtggatagcagacacggtggagaccatagaatccacgccacatttgttgcggacgttggagcccctgcagatcttgtagtacccatgctctccccagttctcgccccaagagttcttgatgatccagtaggccttatcctttaagcggattggagcaaaaccagatgcgccgtagccaacgagaagaacaccgtg

SEQ ID NO: 12906 - DNA, 456 bp, Oryza sativa
  Clone ID: uC-osflcyp171f02a1
ccatgtaaacagaccacatgcatataatacagaccattcaaaagattggtaatagtaaaaatacaagttcgtgaatggcgataatacttaaagctacctccaaatagcgtgtagcattgcgtagcaaaccaagcatataacttaggacaaacattcagttgcagcttcacatcatcgctgcttatcataactgcaataacagcgcagatggagcataaactaagtatatttcgtagttctagcttatatataatatcagaatcaccaactgtgaaccatccacaggatggtcgggggactactgatcagaatctactcctttgaggtgtggatagcagacacggtggagaccatagaatccacgccacatttgttgcggacgttggagcccctgcagatcttgtagtacccatgctttccccagtttttgccccaggagttcttgatgatccagta

SEQ ID NO: 12907 - DNA, 352 bp, Oryza sativa
  Clone ID: uC-osflcyp171f03a1
caaaaaaaccattgggccttttccccccaaagggaaaagggcccaacccctttttttttcgccccccaaacccggccaaaaaaaaaagaaaaaaaaaaaccccccggggggcccaaattaaataaattgggccctaactaaaaaattaacccccccaaaattcaaaaggcccgtttttaaaatggggccccaaatttttataccctccgggggaaaaaattggttacaccgggaaaaaaaacggatttgggggggggggaaaaattggaaacccgggcccccatgttttggggggaaaaaaattatttataccttaaggcccaaattttgtcacaaaatttggggggggggg

SEQ ID NO: 12908 - DNA, 432 bp, Oryza sativa
  Clone ID: uC-osflcyp171f05a1
aagaattaagatctccatcacataaaaacatacagtgactgagtactggattacacgattgagttgttcagggttcagataggaaaaacatcttggggactagagatagagggaatcgacagatgcgcagcagtagcgcgcgggaaacaggacatcacgattgcgttgcatgtcgtcggctgcgcagcggcggcgcggggcttaagacctgctcttgaatgggatcgccctgatgatcacctggtggtagatggcagccagggcagcgccaacgaagggaccaacccagaagatccaatggtcattccaggcatggtccttgttgtagatgatggcagcgccaaggctcctggctgggttgatgccagtaccggtgatggggatggtggccaggtggaccaggaacaccgcaaaaccaattggcagtggggc

SEQ ID NO: 12909 - DNA, 324 bp, Oryza sativa
  Clone ID: uC-osflcyp171f06a1
aaggccagaagagcgtgcaaatcccatggaacaagaatcagttgatacatcggacttaaaaatttgagttccattgtaagtcccgctataacacccaccccgtaggacaccaaatctgaaacgtgcccttatatctcgaattgaaagaaaaccccttggcagaaaaattaaaaagggaaagccgattttaacaacacattggtacagtaggatataaacctaaacgtacgttcacgcagatgatcctcacgaagtatggggaatcacaaatccatccctagcgaaccttttctgaactttggggtcggaatttgataaccaatg

SEQ ID NO: 12910 - DNA, 325 bp, Oryza sativa
  Clone ID: uC-osflcyp171f07a1
aaaaaaaaaaaaaaattaattaaaaaaaaaaaaaaaaaaaaaaaaaaatttttttttttaaaaaaaaaaaaaaattttttcaaaaaaaaaaaaaaaaaaaaaaaaaaaaatttcatggggagaaaaaaaaaacacacacaaaagagggaaaaaatttttaaataaaaaaaaaacggggaaaaaaaaaaaaagaaaaaaaaagaaaaaaaattttttaacggggagaaaaagacaaacaataaaaaaaaaaaaaaaaaaactttttaaaaaccctcggggggggggggagaaaaaaaattttttaaaaaaaaaccccgaaagggga

SEQ ID NO: 12911 - DNA, 508 bp, Oryza sativa
  Clone ID: uC-osflcyp171f08a1
aagctgcaggtggacgcgtggttcggcacccgccgcaccatggccgccatccgcaccgccatctcccacgtccagaacctcatcaccggcgtcaccaagggctaccgctacaagatgcgcttcgtctacgctcacttccccatcaacgcctccatcaccaactccaacaccgccatcgagatcaggaacttcttgggcgagaagaaggtgaggaaggttgacatgctcgagggggtgaccatcttgcggtcggagaaggtgaaggacgagctcgtcctcgacggcaacgacatcgagctcgtctctcgctcagcagccctcatcaaccagaaatgccacgtgaagaacaaggatatcaggaagttcttggatggtatctacgtgagcgacaagggtaccatcacagaggatgcgtaaactcctatcttcacctagtatcatgaagtgctgtttcttgtcttccgtgtctgatcatcccttgagttgcaattttctgagagactgaatt

SEQ ID NO: 12912 - DNA, 516 bp, Oryza sativa
  Clone ID: uC-osflcyp171f09a1
agcatccaaataatctgcccacagagattctgctctgctgtgtttgcactagcttaccgatttgagtcgatacagtaaggtaaaagagtcgcacaagcacttgaagggtacaagcctgggttccgcaccagaggatataaccaatatttgaaaggaacattctaaatggacaagaaattagaaacctactagagttattacaggactgggttacacagatagtcacacgattcagctccttggagcacagctggccaagtgagtcttgaagttctccagctctgcaagaacttcatcttctggacggtatatcaggtcactcatgcgccatatctgcaatgttccacctccaccagtactctcaccatcatcagacacactcacaatagtccaaggatccgaagaattccagtggaagtctacaatcttatccctatgaccagcatgttgaaagaaaagcccagcaagtgcgctgggatttttcttatttccaaccttctcatgatcccacacatt

SEQ ID NO: 12913 - DNA, 386 bp, Oryza sativa
  Clone ID: uC-osflcyp171f10a1
aggtcaatagtatgggatcatactgcttggcacagaatttgtcatgtcaaatggagtatatggtaaactacaagaggcaagtctagtgtacaaaaattaatgaaagggatacagttgagaaatgcccaggcaagtgctttcttgcaaaagccagatgcatctacaataacagcatccaacagcaggcatctctccgtccaaacatatcctttcgtgtatatatacaggacatttcctataactcaaatgctaacttaaagaaccaagtgatggatcttttgcttcaagaactcatacaatgaatgtcttctttaacactttcttgcctcttttcctgttcgtgctcaaagcattaagaatttctgcatcctcgtcgttcgaaagaa

SEQ ID NO: 12914 - DNA, 514 bp, Oryza sativa
  Clone ID: uC-osflcyp171f11a1
acataatagctaaagcagagataacagtgttcaaacccaataatcatctaaatgaaataaatggctgcaataaagaaaagtaaacctaacagttcacaatattgtggtggcgaacatagggcaaagaaagcagcatcgttatccaaaacttgttaaagatcttttttcaattaagaaatcacagaaaacaattttataatgcccaaaatcgtgcgagtttacatttcctacataacaaacattatgtcaaaaaatgcatataagacagaattatgcggtgtttgtatatgattgcattgcatggaaaggaaacatggtgagatgaaaattgacaataccattctctaggcaccaacataagaggaaaaagaaggcatatttgcaaaaaagtactaatgtctacaggataaaggttattcaagaaaaaaactatcatgcggaattttattttgggagacaaaaggatagcataggaggtaaattgcaaagcattggtaaatcatgcatagcaatg

SEQ ID NO: 12915 - DNA, 372 bp, Oryza sativa
  Clone ID: uC-osflcyp171g01a1
tttgttttttttttttttttggtttttttttttttttttttttttttttttttgggtttttttttttttttttttttttttttttttttttttttttttggggaaaaactggccaatcctgggggaaaaaaaaaacagcacatgggctactatgtttgaaaaaaaaaaaaaaggggatgggtgggggccccctggatatgcacggggatacaaacaggggaaaaaaaaaaaacttctatttggggggggggaaaaaaaaaaacaaaacttaaattgacgacaacaccttttttcggggaaccaacaagaccacccgacccctaaaacccagggtttgttttattttccacctaacggggggaaccgggcctg

SEQ ID NO: 12916 - DNA, 484 bp, Oryza sativa
  Clone ID: uC-osflcyp171g03a1
agaagaaatcgtgcacattgcaacgattaattaagcacgcacaattgcacaatacatgaacacggatcgcctccttgaaagaaaaaacaacaaggaaaaaaaaactagaaaaaagaaagaaagaagaagaaattaacagcggcttaatcagaagaaacgaaccaatcaatgtacatctctcgcgatccaatccatgtctcgtctctataatctgtgtgtatatagctcatcatccatggcggctaccatggcttgaggtcgttctcgaggccctggtcccagtcgatgcccttctcgccgggctcgaggaagacgcccttggggtgcggcagcttgcgcgcgagcccgttgagtatctggtggaacgcgtcgccgggcctcgccggctggtggaacagcacggcctgcttcatcgccggggacgccagcagccgctgcttccggatgacctcgtcgagcgggacggacgccaggatggtgtcca

SEQ ID NO: 12917 - DNA, 394 bp, Oryza sativa
  Clone ID: uC-osflcyp171g04a1
gatgggggaatgacaatttcctttatttataggggacttatttattgggctagcactgtgccaaattcatgtgcgagcacactacaagatcgtttatgctcttcatgaagcataacaaagaacccaaaaaaatgtgaataaactttacccaacatttcagagaataaattatccctcaacactaaacaaatattacagtcatcaataaacgctgtgctagctcagacctcagtttctaaaaggaagcataccagtatgaatatatttcaaagcacgaagcatctgataaagaaagaactgatgatgttctttggttaagtcatcatttgccttgatgacttggtggagatcggtatccatcagcttaaagacaacatatatgtccttgaagtcc

SEQ ID NO: 12918 - DNA, 399 bp, Oryza sativa
  Clone ID: uC-osflcyp171g06a1
tttgggtatctggaacagaatggtttattgcaggaataacgcctaacttcagctcaagtctaatgagtcctgttgatctagcttcatcatgcattagaaggagtctaggacaagctctaatgctcaccatgtctctcgctaagattgtatcatcatcaaagctggctttatccttttgcatggatgcatgcaaaaacatatatcacatgtgtcacaagtcacagcattgaattgtaacctgcaaatgaacaacttattcctgccatgcatgttgatgccaacgcgccacgtatatatgcttaagagatcattgcatcctgcctccgtggaaggacgacgaccccggcttaatctcggcctccaaggtgccatgcatgtcgctgccgccaccgccatggt

SEQ ID NO: 12919 - DNA, 396 bp, Oryza sativa
  Clone ID: uC-osflcyp171g07a1
acaccaatcatcccaagcaaagaaatgataactgacagagtgattgtttagacatgcttcaaacataaaaaaacacgcgcaaagccacaatttattatcagtgttgaagcgacatcatactatcatggagacggataacaaatagtgtccatgagacgaacgatgaaacgactgagcaggagcatcttttattcacgcagagtactatggctggcaagtgatagcagcaatcgatggccccgtagaagataacgcaccggaagcttaatcattgtactcctggcggcgatggtggtggtgcttctgataacgctgcttcttttcatcatcagagtcattgtcatcatgtttcttgcggccgtagcctccctggtattcgtttcccccgccatagct

SEQ ID NO: 12920 - DNA, 486 bp, Oryza sativa
  Clone ID: uC-osflcyp171g09a1
gcattgctcaattagccacaggagtctttgaattctccattctgcctttcaataaagacaatacaccatttctacaagaaaaaatcatatagaaacgaaacaacataagcaaagtgccgtgctttctaattgcacccgccaagatggtacactcaaatacaagttgcaaaaaccaaaatccagaatgcacataacagtaagaattcaaaaagagtacgcgctaacagagctaaaccaccatattctgaagggctgactgtactgaagaagccccaagtcatgagcagaaggttaagctatgcgacatcttgtatcctagcctccatatatcatgttgcattggtctatccggtcatgctttcttttgttaggcctggagaaaaagcaaaagtggacccaggtcttctttggcttcattggctctgactttggagttctcttggaagcattagacatgtattgaacgacagcctgagctccctttaa

SEQ ID NO: 12921 - DNA, 413 bp, Oryza sativa
  Clone ID: uC-osflcyp171g10a1
tttttttttttttttttttttttttttttttttttttttttttttttttttttttttttttttttttttttttttttttttttttttttttttttaaaggtaaaaaataaaaaaaaaaataaaaaaacccggggggaagggaaaaaaaaaatttaaacccaaaaaaaaagggggctaaaaaacccaaattttaaaagggaaagaattttactttaagtggaaatttaatgggattgggaaggggaaaaaacaaaaggcggaggccaaaattgggcacccccaaggggggggaaattttttttttgagccccaaaattttttaaagggaatgggaaacttaaattgggggcagccccccccttttttggctttttcggaaaaaaaaaaaaaaaaggcttttgggttgggggggg

SEQ ID NO: 12922 - DNA, 356 bp, Oryza sativa
  Clone ID: uC-osflcyp171g11a1
caaaggattaaagcaataccatatatcaagagcaactggtaaatgcatgcataacatgcaacataatgaagaaaaacttcagttcgcacagacaaaggttcttgagatgctgatctcaattctcaactataaaatagcagctaaatagcacggtagatcttcagatgccaactctccaggttcatagtgacaaggcattttagacctcatagatccatgggtgctggttgctcctccactcggcgatgccctcagggaaccacagagcaatctccttcctggcgttctcgaccgagtcgcttccgtggatgacattcctgccaatgtcgacagcgaagtcgccacggatggtgccc

SEQ ID NO: 12923 - DNA, 58 bp, Oryza sativa
  Clone ID: uC-osflcyp171h02a1
tttggggttttatattttttgtgcgtatatttttttttatttttataatttataattt

SEQ ID NO: 12924 - DNA, 224 bp, Oryza sativa
  Clone ID: uC-osflcyp171h03a1
tttttggtttttggttcagtgccttttaaaatattaacttaaaatttgttcactgtttccccgtttgttacatatgataaaggataccaaagcgggacacacatactgaacaaaagcacggaggcaaaatatgaatagcacagggggctaactatgtaaatcacaaaccccagctgcggcggcaaaagatgcaaaggggtcagcgggggtgccggccccagaca

SEQ ID NO: 12925 - DNA, 410 bp, Oryza sativa
  Clone ID: uC-osflcyp171h05a1
atgcatgggaagataagtacaattattatatattctagtagtaattacaagattgtagcaattgcttaattatcccctttttatatgcgaattattactacaagtagctgtacacctgaaccatgcagctagccacaagcatggcactgtacgtagtaccaaaaaaaacacaggcatgaaaattaagtaagaaaaaggtcaaattaattcgtactggaaatacataaaaccactggtggcaggcatatatgcaagattactccgatcctcactcgatcagttgagctgagcttttaattatatagcttcttcatcagggctgtgcttgtagaatgtagatcgatcaattaagcaagcaattatatatggaaggaggagaattaattaaggatgatatgatttgttggatg

SEQ ID NO: 12926 - DNA, 425 bp, Oryza sativa
  Clone ID: uC-osflcyp171h06a1
ttttggttttttttttttttttttttttttttttttttttttttttttttttttttttttttttttggtttttttttttttttttttttttttttttttattttttttttttttttggaaaaaaaaaaccaaaattaaggggaaaaaaaaaaattttttttggccaaaggggcacactagtattaaaaggggaaaaaataaaaccgtaaaaaaaaaaaaaaaaaaatgggggggataaattgtactctcatttaaattgacaaaaaaattaagggaaaataaaaaaaagtggcccttaaactttatagaaaaaaaagggaaaagttttttttttttttgaaaaaaaaaacttttacggaaaaaaaaaaggagtaaaaacatgcaacccgagaaaataaatctaaaattcccccaatacatcaggg

SEQ ID NO: 12927 - DNA, 290 bp, Oryza sativa
  Clone ID: uC-osflcyp171h08a1
tttttttttttttttttttttttttttttttttttttttttttttttttttttttttttttttttttttttttttttttttttttttttttttttttttttttattttaataataaaaaaaaaaaaaaaaaaaaaaaaaaaaaaaaaaaaaaaaaaaaaaaaaaaaaaaaaaaaaaaaaaaaaaaaaaaaaaaaaaaaaaaaatttttttttaaaaaaaaaggaggaaatataaaaaaaaaaaaaataaaaaatattttaaaaaaaaaaaaaaaaaataaaattttatat

SEQ ID NO: 12928 - DNA, 352 bp, Oryza sativa
  Clone ID: uC-osflcyp171h09a1
tggggtttttaaatttttggggttaatatttttttttttttttttttttttttttttttttttttttttttttttttttttaaagaaggggggggccgggcaaaaaaggaaaaaccggaccgggaaagcaaaccaacccaaaataaaggaaggggaaaaaaagcagggcaaaagaaaaaaaaaggccaaatccggaaaaaaaaaaaatttttgggttccaaaaaaaaaaaaaaaaccaaaaggaaaaagaaaaaaaaaaaccaaggggccccaaaaaataaaaaaacaaaaaaaaaatagataaggggaggggcccgcccccccccccaaaaaaaaaaaaaacaagcccgcc

SEQ ID NO: 12929 - DNA, 424 bp, Oryza sativa
  Clone ID: uC-osflcyp171h10a1
ttggttttaaaacattccataactcatacgtgcgagcaatgcataagcaactggcacgaggtcatcataccaacgttacgtggggatgcagtcaatgtgtttaacaatgtgcgcttctaccaaacaagacctacgagtctactacacacgccacaccatgcgcaggaattacagcaagtaaccccagcacgctctccaagtcattgtttatttcccgcacatttttgtattggatagtcatcaacggattgagtaaaattctatagaagtcaaatccttccatacaaagtcacgacctgtacactgggactgcacgcaagcttcagaagtcgtaagctttgccatgaatgcagagggaaacggtactttacatagcactcagccaggagtacagctgcactaaagatgacaacttgtcatgcac

SEQ ID NO: 12930 - DNA, 474 bp, Oryza sativa
  Clone ID: uC-osflcyp171h11a1
gtatatgtcacctagagggatgaataggtatttccaaaaatttcttaaacttacaaacagcttagaactaactggatagtccggtaccactgcagacaatctgactatagagcagtcggatagtccgactgcatcagaacaatccaatcagagcatcgccagagaaaaactataagtgacctggaaaatagaaatagaaatgaaaaaataatggtggtggtggcaggatgtagcgtgggttgatcgtttagaagcacgaaagctccttgaggcagccggtggcagtgcccttggcattcttgcagacggccatggtcttgttgtttttgccagagtactcgaccttgatgtcattcaaggtgacgccggtgcacggcagcttgtcggagcagaggaggctaacagcctcgggcgtggaggaggtgccggttatgttcttgaaggtgatgtccttgatggtgaccctggagttgc

SEQ ID NO: 12931 - DNA, 328 bp, Oryza sativa
  Clone ID: uC-osflcyp172a01a1
ttttttttaattaattttctagcccatacaaaagcaagtttcagaatacagtttccaacatgttccatacaaaagaacgaaacatgaatacaaaatgttccatccaccatccaactacacaagtcccagccgactacgaagttcctacaggaagtgtcaagtttctgcaccaaaaaaattccacctagcagccactactaagtttcggcgttcatcttgccagcagtcaggaaaaaaattccaccaagcagccaccgcacttccggcctgcattctgccagctgccagcaactagtgccaaaaaatcctgtttttcagcaaccaacgc

SEQ ID NO: 12932 - DNA, 408 bp, Oryza sativa
  Clone ID: uC-osflcyp172a02a1
agctgctccaggcactcctccccaatcaccgtctggtggagcagcacgtggttgagcacgctgccgaggcagtacttggtgtcggcgtccctcgccgccacctccaccgcctccgagatggcgatcccgaggctgcccgggctcgccgggtcgcgttccaggatcctcctccccgactccgtcgccgccgacggcgacgggtgcaccgtggcgccccacgtctccatcatcagccgccggtacggcttctggtcgtacgacgcgcgcacctgccacacctcgcaggtgagcccgaacaggctgctcgcgaacgacagcgcgctgccccactgcccggcgccggtctccgtcaccacgctcctcaccccggcggcggcgttgtaccacgcctgcggcaccgccgtgttc

SEQ ID NO: 12933 - DNA, 90 bp, Oryza sativa
  Clone ID: uC-osflcyp172a03a1
aattaaattaatttaaattaaattgtattaaatataaaaaaaattaaataaaaaaaaattaaataaaataagaataaaaaaagttttttt

SEQ ID NO: 12934 - DNA, 404 bp, Oryza sativa
  Clone ID: uC-osflcyp172a04a1
agcctcttggccttggcccagatagaagccaacatgttttaacgggttatacggtttgcttctgttgcaacagttcccaagattaacttgcatacagcattgcattacactgatactactacattctactgcaagagtaatttcatctcatctcaccaggataattacagtacaagattatttggaacgacagtagtattaaccaactcgttctcgctacaacaatccaatacaattgaatacagaggttccagctgtttaaatacgacatggcgaaaacaacagttgaatgcatgtccagtcccagcagctgtttgtccggaatgctaagatgtaacacggcaaaacgaacaacaaatgaattcttcaaaaatgggcgctacactgctactacaacatgggca

SEQ ID NO: 12935 - DNA, 418 bp, Oryza sativa
  Clone ID: uC-osflcyp172a05a1
gtgcaacaccggataaataaataccagctcgatgatacaaatagtttaagcataaccatagaagtaacacagcagtgttaaaaaagagccaacaaattcatggcagcaacatgtaacaccacacatcaaaagttttcaacccatcaggcacgcaggaaacgtccacattccacagacaagctaacactagcatgcattggcctaattcagactcttatgaagagactcaggctgaagcatgatagactcatgatcctctctactcgatcagatcgtcatcgtcatctgggagaggttgtgctgctgcagccgcaagctcagcctcatgctgttgctgcattgccaggtcaatgggaacttccggaggtttaagagcaacagcttcaacgaaatgcaagttcgggtcaccagcaagctt

SEQ ID NO: 12936 - DNA, 400 bp, Oryza sativa
  Clone ID: uC-osflcyp172a06a1
ttttggttttttaaatttattggttttttattttttaaattattttatatttttttttttttttttttttattttttatggggacccgggggaccacccggaaaaaagggaccggaaccaggggggaaacaaaattaccaaaaagggggggaaaaaaaaggggggggaaaaaagggaaaaaggtgatcccggggaaaaaaagaaacccgaaaaaaatgcaaaaaaaaaaaaggggggaaaaaaaaaagggaaaagcgggggggcccaaaagggggggccaaccaaaaaaaaggggggagcccaaaaagcgcatttccaaaacggaaaaccgggcggcccaagaaaaaaaaagaaaagccaaacccccggggggggggggtcccggaaaggggcccaaggg

SEQ ID NO: 12937 - DNA, 290 bp, Oryza sativa
  Clone ID: uC-osflcyp172a07a1
gggccaacaagagcccaaatttttttttaattaaaggaactagcccccgggggtactgggaaccaatcaccaaaagctggaaaattttggcatcccccccaaaaaaaaagggggaaattgggggcaccaccaacgaacccagggatgcaactggagctaaaaaaaaagggggggggaatggaaatatcttgcaaaaatagctcgctttgagttggggcaaatgggggaccccattttgaatcaaatgttggccggccgggaaaagaaagatgatgtaaaaggggtttttt

SEQ ID NO: 12938 - DNA, 387 bp, Oryza sativa
  Clone ID: uC-osflcyp172a09a1
gtatgaagaagggcgaacatgcagattgataaactgacgcgtggtggacaagaatgaccgatttgtgacggcctgacactggtcatgtcgtcggcagatagccatgttcccacgtcgcacctgcttccggcggaagtggaggtaggtatgggccgtcctatcagaaggtcattcggacggcaaccattacaaatctccgcccatttatgaaggaaaggcgggcgaagttttagaaaaaagaggatgggtccccaccaaaaagggaaataggtagaagtggtgcatgtggtatccccttgagatataaaaggaggaccttgcccacttgcgggagaaaaaaaagaaaaagaggggaggagaagatcccacgagaggaaaaaaggagga

SEQ ID NO: 12939 - DNA, 391 bp, Oryza sativa
  Clone ID: uC-osflcyp172a10a1
atatcaccaaccaacttttatccgcatttcaacttaaaaagagcatgccttaagacatgtaacaggttccaaaggtaatataaatatgcttagttgggtactattgtgcaactagacagccaacagatcgaacatcaacaaaggaaaatgaagacgagatggaatagagagggcgttacaatatacattagaaaagagctcataggcttcttttgacagcccggtctgaaccaggtcgaagtaaatagaccaaacacgagagcaggacgcctggacgagcatgctgttctaaccaaaccacaaacgtgggaactcggggtcgtggtgggggttcctttagatcgatccatggactcttcgaaatgtctagacacacctggacttggatatg

SEQ ID NO: 12940 - DNA, 418 bp, Oryza sativa
  Clone ID: uC-osflcyp172a11a1
gatacgcagactagtactattgtttgtaaattagtgcacaataacgtctcatcgaaataggaattcttatacagctatcttttgacgctacacggaagttcgacgctgggaaagtttgactacaaatggactcaacatatgacaacacaacatagcaagttttaacaaacttggcgcattccagcaagtaggatctctcagccatggttgaaggactggtaaaccggaacctgagaaatcatatgcccaagattgtcatagcaatgggggtatatcattgctggagttggccactgtgggtagacagcagttccagaagaggagcccatagataaatcgggttggccaaagtacacagaaggttggtttcttgacatattagcagactgcataaaaccaacaccatactgcataaact

SEQ ID NO: 12941 - DNA, 368 bp, Oryza sativa
  Clone ID: uC-osflcyp172b01a1
cttgaattagttcatcataatcaaattcctaatccatgctatccagtccctaacaacaaagaaagcaagaagtcaaaccacctgacaaagagtacatcagtgcaaatttgcttgtgctgccttctgaaacctaaagatcatcccattaacacggaatcgtcgctgccgtgtttggggtactgtacaactaaagtctagctacaagcgctggggcaagctttgatatgctgttcacaacaatgttctgttccccgtgaaaaggcaaaaacgatttaattttagctttgccaaacatcagtcagatagccatcgagcccattcaatggccacttgggtccacatcttggagagacccttatcacatcctc

SEQ ID NO: 12942 - DNA, 256 bp, Oryza sativa
  Clone ID: uC-osflcyp172b02a1
ctcaactaggaaaaaaaacgggaaaagttggggggaataaggggagaggccaggatattggtaaaagggggggtaataaaaaggagggggcaaaaaagaaggtaaaggggtttataggggaaaaaagtttggcggtgaaaaatacaaaaaaaatttgaaggcggaaaaaaaaaaaaaaaaatttgggggaactaaaggaggggggtaaacaaaaaaaaacgtaaaactctaaatggcggtttgagggctgaaaaat

SEQ ID NO: 12943 - DNA, 352 bp, Oryza sativa
  Clone ID: uC-osflcyp172b03a1
tttttgtaacacaagaaaaagataaattgccacacttttacagccaagatactctacagtttatgagtttagtgagcctctccacgattaattattgtacataattatacatatcgaacaacataaacaaacaaacaaacaaatttacatgaacatactgtaattaattattatacagcccacacagcacacaacacaaacaccatggattaattacaaacacatcgatcagcctcgtgtttaattttattccgatttccgaggcaaggaaaggagcagaggtagtagcaagcaaggaaattaagcagcagagatgatcgtgatctacgccggccggcgggcggccattaca

SEQ ID NO: 12944 - DNA, 155 bp, Oryza sativa
  Clone ID: uC-osflcyp172b05a1
attaaaaaaaaaaaaaaattgaaatataaaaaataaaaaaaaaaaaaaaaaaaattaaaaaaataaataaaaaaaataaaaaattttttttaaactaaaaatttttaaattaaattttaaaaaatttaaaaaaaaaaaaaaattttttttaaaat

SEQ ID NO: 12945 - DNA, 388 bp, Oryza sativa
  Clone ID: uC-osflcyp172b07a1
aaccaaaacataggaggtttcatttcttcttctcaaagtagtgtagcatctttccttctttcaccattacataagcttaagcaataacagataacaaatcctcctcctcctctaggtaaaatattcaaacacaatacccttataagtacttattattaggaaagtagcgtgcatgggcataaatggcagcggggggcaggttaagaatcacaatgctgagcagcgaggaaacaaaacaccataatgggacagagcaaaagcctccgaaagggagcttttaggcagaaggcttctcccacttgaggggcttcaccacctcccaggtgaagtctgggtcgtcccttccgaagtgaccgtaagccgccgtcttgaggtagcgtccgttgcc

SEQ ID NO: 12946 - DNA, 337 bp, Oryza sativa
  Clone ID: uC-osflcyp172b08a1
atagaagaaaagggccttcacattccatcagaaaaggagttgacatggaacttttcaagcagttcaaaaggaggggtatgctcaaagggacggggcaaaactttgcccatcaagcatgaactggaggggggatgccacgctcatctgaggcgggggctcagctggttgcttggcattcttaaccacatcattggaatcgacaagggcatctaatacattgggggtagcggcgaatgcctccaacttatgcagccccaaggcatttacatcactaggtagcctcacatcctgaccaccctgggttttcttcttctccacttcattctctgggggcaac

SEQ ID NO: 12947 - DNA, 366 bp, Oryza sativa
  Clone ID: uC-osflcyp172b09a1
aggaagtcataagaatatgtgcgacgcaattgctcgaatcacttatgttttgtacggttcagtgcattgtacagacggcaagtaggttctccaatcttattagtgctttcgacaattttttccacgataagaaatgaaataatggtactataagggtctcgtctgtcaaacggacggagcagactgcgaaacagggctgctctttgtaagaaccgaactctgctgttggagggatgagtgcacacgctcgacgcgctccagatacagggaggtctgcatttctatgagacgggatatcgccctacggaatgcaaacatttcttcttggccagacaaaattgccactaggcctgtaggagaaggcgc

SEQ ID NO: 12948 - DNA, 361 bp, Oryza sativa
  Clone ID: uC-osflcyp172b10a1
ggagggaacagccaatattcaaaactggctaaatgggagaaaaaaccatgaaaattttgccaatcgggtatacccaagaaacttttcttaatggctaaatactggaaccaaaaatttaaaaaagtagggaaggggacctatactaaagggggaactcaaggctccactttcagagttaacacgtttagctaaagggggcactaagccactaactaaacatctactgaatttagtatgcactgttttaatcaggcatactaaaaatgtatggaaccgagggacaaatttgaaatctgtcatgataagaaggctagaggctgggaactaacccaacagggtattcaaggatttgatctttctc

SEQ ID NO: 12949 - DNA, 393 bp, Oryza sativa
  Clone ID: uC-osflcyp172b11a1
gcggtataaaacatagaaacttcagggaatttttgtctgtttcaaacctagatgccgctgttaaaaattacacataaatattctctatactcgaatcggcactgacaatccaagctacctgaaattcactgtgtgtactaatttgaagtctgaactctgaagcgacctcgatttccctgaatacaaaactctcagcaggaacaaccgcctgctttctgttcttcttgggcttctgcccctgaaggtatttgcccggaggcagcaggccgtaggtttatgtccaccatgtcttcctgctttgccgatgagagcgccttcattccaggcagcgatgcagcgatcttgcgaaacagtggcttgatgttgaatccagcttttgcgctggtttccatg

SEQ ID NO: 12950 - DNA, 296 bp, Oryza sativa
  Clone ID: uC-osflcyp172c03a1
gggaaaaaaggaagggggaatttttttaaaaagccgggcccccattaggggaaggggcaggagtacaaggagggagccccctgcggaaaggggatccatccaagtttggtggggaacccaccaacattgtacgaaaaacccccacactgaaaaaagcaaatgagggtttatttagggggtaaaaaaaaagggaggggctgcctaaaaaaaaagtggggactaaaggaaggaaaataagggctggatcaaaggttttatccacaggagcagcttccaaaccagaaaaccttattgca

SEQ ID NO: 12951 - DNA, 359 bp, Oryza sativa
  Clone ID: uC-osflcyp172c04a1
aaacaagctaattttataattaattcacaacaccatatttcattgatcaggttcagaacctgcacagaaatacacactaccggtacagatctcaccttctctccaatactcgtacatccatccacgcggtccacacgaatacgtacatctatacggtacacgtacgtacatctactgcaccgtgtacacacacgcacactttcctgcagagacgcgcatcgtcgtcaacctagctagcttagctgaaggcgaagcgtcgccatggcagcacggcggcggcggcgctcacttgccggggacgaagttggtggcgtaggcccaggcgttgatgatgacggggccggcgaggtgggtcggca

SEQ ID NO: 12952 - DNA, 398 bp, Oryza sativa
  Clone ID: uC-osflcyp172c05a1
acagaaatcttctgacagtactaatccatttatctgaaagatttgcgtggtacaaaaaaacacacacacacaaacttgatacatcggcatgcaacattagttgcagctcaagcttctccctcaacatgacaataacagaggaagatataactaagaaaaataaaattttacagacaaatcgacgacgacacagtcacatcactaggggaatgcagagaccgtggagggaagaacacgattcttaaacctcctttcctcctcttctgacaccgcctttcgcaacacccggacgcacatttcccgccatataattaacccgaggctaattataaatctgtaattaccaatttaccgcaactctgcactgcagcttcttgcaggagatgtggagagagctg

SEQ ID NO: 12953 - DNA, 361 bp, Oryza sativa
  Clone ID: uC-osflcyp172c06a1
agcgagaccagtgaatgaaaaaggcatattaaatagcaaacagtcgatcttatcaaaggatgatataggccttgaagtttcgtaacactacctaccgctctcaagatagcataaccaaggaggagggttcatcctatcaatgcgccctcaacattaaaatttaacccacaagttccatccccaccacaacgtttcgtgattccactagttcgtcagctccatgatggcagtgacaatgtcaccgttagcagccttcagcgccttcaccgccctcgatctcgacacggtggcctgtgtcatcaccagttcaatgtccttcggctcgacgccagactcatcgacctcctcgtcatcctgagct

SEQ ID NO: 12954 - DNA, 382 bp, Oryza sativa
  Clone ID: uC-osflcyp172c07a1
aatatatgaaactgaataaaaaccatgattttgacatgtatttcctgctaacagactaaatacaaagcccaagttaaaaggtacagtccattgtgaaagtttgtacatatgtgatctatattttccatcatctttatagtcactaactaaatatcctcagagtttatattctcttctatgaccccgatgcaagatccaactgacttcccagaggacattgcctccgcgagctgtgatctggcctttttatggcgacgcagtgcaggtacagtattcagcacagcccatctcacctgtgaatcagctttcttctgggtgaaacctagacctttgagcaatccatctagttgcccaatgtcagctagtcctccttcagcatatc

SEQ ID NO: 12955 - DNA, 381 bp, Oryza sativa
  Clone ID: uC-osflcyp172c08a1
ccaacctctgcaacatgccatttctcaaaggtacacatgaaaactgaaagcagttcatcaaaatgaaaattgtagaaatataacttacggttacctgccccacttttctatacattgacatccattatgtgtatcatcagctttcatgttgcttggatgatttagtaaacatcatatatgctattctagctccattttggatttgtgggacaaaaaatagaatatggtattcgacaattcaatccttcaatggttcacaaagataaggcaaacaatcaaactaatccactctaacattggctcattatgatcaacatcaaaagtttcatgttggacttgctatacagctattcgtctcaccattatttttctcatgtgtca

SEQ ID NO: 12956 - DNA, 385 bp, Oryza sativa
  Clone ID: uC-osflcyp172c09a1
catccacataaaatctgcatatatgatgaagcagtcataaatccaattacacacactgcctcatataaaaaaactagcattgcacacgccactgcagtgaacacactgttgcatatccaaaactaaaattccacacgccactgcagtgaagtaaggagtccaatcacagagaatcctatattacaaaaggataaactcattttctatgttagttcatcatgttcagtactgatgaggagaaagcttgctgaactcctgcttctgcattctgatgttatgccctttcctggcattcccatctgcaatgagaacatcatctatccatgagacaatattggaggctaaactttccagcacccttgagtagcttacaagtattgcctgc

SEQ ID NO: 12957 - DNA, 202 bp, Oryza sativa
  Clone ID: uC-osflcyp172c11a1
tgggttttttttgatttgtgatggtttttaatattatttaattttttttttaatttttttcgagacacaggtaaaaaaaataaaacttggaaaggacaaaacgaaagggaaaaaagaaaccataaacagttatatccctaaacatgacaataagcagacaaacaaaaagggtgaatcaatcaaaagatgtaacaggacaaaa

SEQ ID NO: 12958 - DNA, 296 bp, Oryza sativa
  Clone ID: uC-osflcyp172c12a1
tttttttttttttttttttttttttttttttttttttttttttttttttttttttttttattaaataaaaaaaaaaaaaaaaaaaaaaaaaaaaaaaaaaaaaaaaaagaaaaaaaaaaaagggaaaaaaaaaaaaaaaaaaaaaaaaaaaaaaaaaaaaaaaaaagaaagaaaaaaaaaaaaaaaaaaaatggaaaaaaagagagagaaaaaatactcaaaaaaaaaaaaaaaaaagggggaggaaaaaaagcagggggaagagagtaaaataaaagggaaaaaaatggggggat

SEQ ID NO: 12959 - DNA, 384 bp, Oryza sativa
  Clone ID: uC-osflcyp172d01a1
agcaccatcaaaatcatcagaaaatagcaattgatgaagcattatttacatctaggcaatgaggctccgaaagttgcataactaatatcttttcaacttagccaaaaacaaaaaacatgcataaggatcctcttccatagttccagagtaccgataagctcattggcaaatctaatcattaattaatgaaaatgaagtagaaagtaccaggcaaatgttatgcctcagaactgtcaaaaacttgataggcatcacgatgtttaaattaagattcctaagcctttcaacaaattcaccacctagattgcatagccgccaaaccctgagaccttccaaaccctgatagttccatcagtgtagccagcgaagagggtgctgccatca

SEQ ID NO: 12960 - DNA, 392 bp, Oryza sativa
  Clone ID: uC-osflcyp172d02a1
ggtacaaacatcatacattcatacgggccaaatctttcaataccactataactggtgtacataaagtatttcatcagaagtgcagttcaactgctgaataagcaggtacagagctgaatatcgatggtttacaaattccctctccagcttatccagagtaggatcttatcagatacttctgagctgatatctcagcgttatcagaggacagctgaagtaaaagcttgagatatcaagtatcatgatgtctatgtacaaagccatgtttaagatctatcaattacataatactagcacactttgccgtacaccaacctacctatggtttcttagcacattgtacgagttctcatcaaccaaaagctgacgcggtgcaaatcatgatgcagaat

SEQ ID NO: 12961 - DNA, 387 bp, Oryza sativa
  Clone ID: uC-osflcyp172d03a1
gaaagaaatagaaaactttatttcacgaataaacatattggaggtagatcgatcactggattacatatgtgatttatactacatatttttttcgaacaaacatatcctgagagtctaaataggacctggtctcataagatttttttttcctctccaccaccgccaagcaccaattaaaacacctagctgacagaccaagctatctgtaccaatgtaccatacagtgatcgttcaacactggctactgttatcactactagctagtgccacccatgaacatatatggaataagagacaacgatgaccacacttccacacaattaagggcggcgacgacattcttcgcgcggaaccaacttgggatagatgagaatacagtactacaat

SEQ ID NO: 12962 - DNA, 403 bp, Oryza sativa
  Clone ID: uC-osflcyp172d04a1
aatcatcaactgcagttcaatatagtattctgttatacacacgatcagtacaacgtaggtaacccaatgactggaagaggaaaagaaaaaaaaatcctatttgcaatttgcacatctcttgcaaacctcaaaaaggctctagaactaagtcaataacctagaaacaaatgaatcttcgctgattctgctaaaattttctaaactagtttgatatgaactaatgtctaaccattctggactttaaagaataaataaaaatataggaggggataaaaaaacccaaggcatagaagctgggtctaggcatgccaggtttcatattttgccgcatttgcttacatcgacctgtatcagtaatattgcaaacgaggaatctccgtatctcgctaattgggcaatagta

SEQ ID NO: 12963 - DNA, 352 bp, Oryza sativa
  Clone ID: uC-osflcyp172d05a1
ggcagaatatcaaagatggtcgggctttctttataactttaaacagggacccaaggggtttccggttatacatacatacatacataattccctcactaaggagactataaacaatcccaatttaagccacacacacaacacaaattcttcattcttaacaccccccgggggaacgggccacgaggctcacaagacggggtagcttggcagcagcgcgatgcccaacagcccggaccccaagccggcgacgtcgcgctgcatgaggatgtacccggggttgccccactccgccccccacgaggtcttaacgaaccagtacttttggccgcctttcgccgggccgccgccgtcc

SEQ ID NO: 12964 - DNA, 391 bp, Oryza sativa
  Clone ID: uC-osflcyp172d07a1
aaacggagcagaggcggcagagctacaattgaagatgaaatcacgcgatactacaaagaaataacgaaactcatgtcatttacaggttcgaagtttgcaactctttgtggaagaggcaatgccaacactaatttattcatgtgttgatcggtgctgatttcaggagcagccggtggtaaagataagtgctcgatagcacatcacaagcattgacaaaagggtcaaggcgcattctttgcagatcacaagtcactggtatttgttcaatgcttgctatcttcttcctcgcagaatttcgagtatttcgcgtcatccatcagtgaattgagctcacctgaatcactaaccttgaccttgatgatccacccactctcgtatggacttgtattaa

SEQ ID NO: 12965 - DNA, 407 bp, Oryza sativa
  Clone ID: uC-osflcyp172d08a1
gtctggtgcgacacctgcctcgccggcttcgagacccccgcctccacctacatcgccggagcgaaggtaaaggttgagtgcagatcgaaatccactggcgccaagacatgcagcttcgagggccagactgaccacactggcacctacaacatccctgtcaacgatgagcatgagcacgagctctgcgagtctgtccttgtgagcagcccggacgcaaagtgtggcaagattgttgctggacgggagagggctcctgtcttcctcaccaacaacaatggtgtgacatctaatgttcggttggcgaacgctctgggcttccagaaggatgctcctcttgctgcgtgcgcacaaatcctcaagatgtacgaggaagtggacgaccgcgtttgaaggatgtgagttatgta

SEQ ID NO: 12966 - DNA, 406 bp, Oryza sativa
  Clone ID: uC-osflcyp172d09a1
cggcgtcgcccgccccttcggcgacgccgtcgtcgacggcatcgacttcttcatcgaccagggcgccacggagcactacgacgagctggcgcggcggctgtacgcgcacaacaaggactacaaggggaggctcggggtgatgctgacggcgacggcgaggtgcgtgttcccggaccagcggctgcaggcggcgctgtccacggggctcttctcgcggatccacgtcaaggtgttcggcgacgggcggtgcgcgtcgaggagggaggagctggagaagtggatggcggcgtacccgcagagccgcgtcctcgtcggcgtcgtcgcgtcgccggaggctgacagggacggctacgtgtcgcacaaggatctctactacgacgtgctgcagttcatcaacaagctgccc

SEQ ID NO: 12967 - DNA, 128 bp, Oryza sativa
  Clone ID: uC-osflcyp172d10a1
ttttttttttttttttttttttttttttttttttttttttttttttttatttttattttatttattaattttataatttttttttttaatttaaataaaataaaaaagaatataaaataatgtggaag

SEQ ID NO: 12968 - DNA, 398 bp, Oryza sativa
  Clone ID: uC-osflcyp172d11a1
ggcagaaatgaccctaaaacaactaatcgtggtaagtaaatacaatgaacaagttcgtacagaccacgaattagtttgaaagtcgccagattccatcaatattcagcaaaacctaattacttcatattttcggtgtcttgatcttgcctttcttttctttaccaagatctgtacgatccctctaaaactaccatgccacaggaactacggggtgaaaaaggaacagatcattacacaaaatctcccaactggcgtgataatctgttgtccagcaaaacacaccaagaccactccagcgactggtagattggcagctctccacttcatacggcaaaagaatcctgaacatgatcataaaaagggcatcagaagacgacgagcagcgagaagagcatgta

SEQ ID NO: 12969 - DNA, 402 bp, Oryza sativa
  Clone ID: uC-osflcyp172d12a1
aaagaatcacttagcaccaccaaaatttatatttagtcttatctgtgagggactaaacagagttcaaaacaagtgagtccagcaggttatatacactcatcttcagaaagaactaaccaaaattcgtataaaatggtaatgaattagtcttgaaatattatgttagcatcagttgcaatggcagatcgacggagtttgacatccacaaacattttagcacggctataaaaatatgttatccagcttggccactacgcccaatggatggttaacacttctcaaagctgggattgcaagaacatggctccataacaaagctcattaaccccacagaaagaaagctcaccaaggaaccttctatttgtcctcaagctctggaaggtctaaacattaaatgttgag

SEQ ID NO: 12970 - DNA, 394 bp, Oryza sativa
  Clone ID: uC-osflcyp172e01a1
agaggaaagatcgtcagcatccggctttgtaagaaatcccaaacatcacagaggttcattacaagacaaagctaaagcaaaacttaaaaagaaaccgtcattactgcactggggttgccattactccataacagtagtcaaccacaaaattggagccagcggaaattaacatgaaaaagaaatgcagccagcagaaaagtatgtactatttgacttgaaaataatgtctcgcaatgaatagttgaaccctcactgatgtcagctcgatgtagtagtagagtaaagatttagcattcatgatccgatagaaacgtcagatggtttgctcctccttagactcgacaaagtgtccaagtggatctctgcaagggaactggaggtcacaaataaccat

SEQ ID NO: 12971 - DNA, 94 bp, Oryza sativa
  Clone ID: uC-osflcyp172e03a1
ttttttttatttttttttttttttttttttttttattttttataaattattttttatattatattattataatagagaactaaaataagaacag

SEQ ID NO: 12972 - DNA, 245 bp, Oryza sativa
  Clone ID: uC-osflcyp172e04a1
aaaggttaaaaaaaaaaaccaaaaatttacggggggttaaaaaaaagaaaaaaatatttccaaaaaaaaaactggaaaaaagggttaaaaaaaacaaaaaaattttagtcccctgggaaaaacgggaaggaacaaagctttgggggtaaaaggtgaattccccaaaaaaaaaattccttttaaaaacctcccaaaaaaacccattttttttagggaaggaggtttttaagggaaaaaccccaaaa

SEQ ID NO: 12973 - DNA, 397 bp, Oryza sativa
  Clone ID: uC-osflcyp172e05a1
ttttgtttttttttttttttttttttttttgttttttttttttttttttttttttttttttaccggaggctaaagactttagaatttattatttcctaagaagaaacatggtttaggtacaggtaactttgggggggggacaaaaaacccccaggttatatatacactggaggggggcatacacatttcaaaggcatattaggggcttccttggtgggccaaaaaacaaaccttagaactggtttcaaaattcagactaaggaactcccaagcaaattgggaagttgaaaagaaagggcgaaccctttcaaaaccatttacagggtctggggacgaagaatttaagggtgaaccatttagaacgggatcctatccgggggggcgggccccaattggg

SEQ ID NO: 12974 - DNA, 400 bp, Oryza sativa
  Clone ID: uC-osflcyp172e06a1
gtatgaaaatcatctgtgctcaaatttaagaacgtaaaagtgaagttctagatgtgcatgtagccgacatacatcatttacagaaaatgaaccgtacaagtataaaaccaaaatctagtctgaaattctgaatcgtatgtattttcagtgtcctacactagattacaaagatgcaacacagcaatccctcgacgtagaagtgttatgtaggatcatgaaagtgcatcagcaacagatgaaatagcgtcccttgtcgcatcacaaataatgaaactcgagaccatcaaattcttttctccagcaaacgaactagatctgctcaagtggtgtaaattggacgctgctcctgttcttagaagccccgtagcccacaaaaacggatatacagaatgctactacc

SEQ ID NO: 12975 - DNA, 375 bp, Oryza sativa
  Clone ID: uC-osflcyp172e07a1
attggtcacaaatgcattctgacatatcatcatgtaactattgttcacccatcaagtagcagtattcctatatagcagttatccatcagctcaaatagctattacataagagttcaagtacatagcaataattacataatttagatgtaactaaggttcttgtaggtgtattgaggtcccaaaaacaaaacaaatcatcttttttatgggtcttggaggttcttgattttttttacagcacctttgctagccctttttatggttgcctgctcgctggttagtctttgctgtcttcttggggaccttcttttgtagctgtacattattaacacctggaacattttcttcaccagctaagggcatatttcgaggatc

SEQ ID NO: 12976 - DNA, 252 bp, Oryza sativa
  Clone ID: uC-osflcyp172e08a1
aaaaccaaaaaaaaaaattctaaaaaaaaaaaaaaaaataatggttttttttttggttttttaaaaaaaattgtttaattggccccaaccgaaaataaagtggaaaaataaaaaaacaagtttgtttactggtttgttgggaaaaaaactggcctttattggcaaaaaacccccaaaaaaagcaggaattgtgtaaacaaaaaaatggggggggggtaattttgaattttcccgcgtgagggtttggtaaaa

SEQ ID NO: 12977 - DNA, 379 bp, Oryza sativa
  Clone ID: uC-osflcyp172e09a1
ttttttttttttttttttttttttttttttttttttttttttttttttttttttttttttttttttttttttaaaatatttttttttttttttttttttttaaaccaaaaaaaaaccctttaatccaaaaaaaaccaaattattggggggccaaaaagaaagtttttaaaaacaaaaggggaaacccccctaaaaatttttggggggtaacactaaaagggaaaaaaatttcccgggcgggaaaatccaattttccgggggggaaattggcccggttgaaaaaccctatttgggaaaaaaaaaattttcccggcggggcggaaggcccccaggggaaaaatgattattccgggggggaaatataaacccccgcgggggt

SEQ ID NO: 12978 - DNA, 398 bp, Oryza sativa
  Clone ID: uC-osflcyp172e11a1
gatacgcagactagtactattgtttgtaaattagtgcacaataacgtctcatcgaaataggaattcttatacagctatcttttgacgctacacggaagttcgacgctgggaaagtttgactacaaatggactcaacatatgacaacacaacatagcaagttttaacaaacttggcgcattccagcaagtaggatctctcagccatggttgaaggactggtaaaccggaacctgagaaatcatatgcccaagattgtcatagcaatgggggtatatcattgctggagttggccactgtgggtagacagcagttccagaagaggagcccatagataaatcgggttggccaaagtacacagaaggttggtttcttgacatattagcagactgcataaaacc

SEQ ID NO: 12979 - DNA, 244 bp, Oryza sativa
  Clone ID: uC-osflcyp172e12a1
aaaaaaaaaaaaaatttttaaaaaaaagataaaatataaaaaaaaaaaaatttttttttaaaaaaaggtgggggaaaaaaataaaaaaaaaaaaggggtttttaattaaaagggggggggaaaaaaaaatcttgaaagggttttttttgaggggggttttattaaacaaaaaaagttgttggaaaaattaaaagttctttgaaaaaaaaattatttgctggggggatccttaaaaaggggggga

SEQ ID NO: 12980 - DNA, 405 bp, Oryza sativa
  Clone ID: uC-osflcyp172f01a1
acgtgaacaatggcttttgcattcaccaactcgtgagataaatatacaggcttatacaaaaggacggctgccaacaacgtggacctcgcggacaaaatatacaaccgggcccacactggggtaacattttgacaacaaaagaaatttgccgttacaagaaccactccctcagcaatctagaatctaaccaagctgagaggtggagccaaaatggcgcggaaataattatctacctggcattgagactacaattagctcaaagtttggggaaatgaagaaaccgctacccgcgccgcttccacagcacgaacacctgtacaggaactttacaaaggggtaagaattttctgcaaaagctaccagcctaatttcaacatcatcctggtcctgaatttgaaggatgag

SEQ ID NO: 12981 - DNA, 402 bp, Oryza sativa
  Clone ID: uC-osflcyp172f02a1
gatgtaatcccgtatgccacctttggttcccaatcacaaattcacaataacgaagaacacaccattgacgggcgaacgaacgatcgtgtcaaggcaaaaagggcagcagcagattggacctaaatgctcaatcaagtaggatttacatgagagtcgctgcggaaatcgcctactacacccaggaagctgtttttgttttgggcatagcaatccactcactccagcatgtgtcatttgaggaagctcagcttgtctgaagggcctcgaccttacccctggccttctcgctgtcgtcgacaatgagcttctttcggagggcgagcagctcctctcctgcaccacagatgtaggccgcggttctcctgcctgagagagttgccccttccatgctgtcaatgtagt

SEQ ID NO: 12982 - DNA, 332 bp, Oryza sativa
  Clone ID: uC-osflcyp172f03a1
ggatccaaacagcacatatattattatagcagaggggtgtcacagttcaaagggcttttaagcgaaacgggcagaataattcaatttccaaggctggtagatctggattacaatttggcgggacacagctcaaaagcacagccaaaagcagatgaaccatcatcggttcatttatcagtggccagaacacaccgaaggcagccaccttcatgcagcaggtcaaacgccttgttgatgtcagccaggttcatgctgggagtaacgtactcgtccaccttgatttccttggtcaagtactttttaacgagccatggaacttggcttcggctttt

SEQ ID NO: 12983 - DNA, 392 bp, Oryza sativa
  Clone ID: uC-osflcyp172f04a1
gaacaataattcccaattccaattcaatcgcacattaagtggttcacaaatcatctcaatggtaattaagtttgtaagatatgctatcacaatcaatggtatatttatgatttacaagacaataaacatcattgatctactgagtggcttgcccctgtcatcctgtgaggctcgcatgtatttgcaatgaggaaaaacacaacctgagaatggattacaccaaaacctgtccatgcatttggacttgagctagaaccgggaagttgttaacagttggctattggtaaagttagcatatggagaatcgggtctggccttcccaatcttctttgccctagaatgtgtatctttacgtcctatattctcctttggtgttagatcatgcacctttc

SEQ ID NO: 12984 - DNA, 388 bp, Oryza sativa
  Clone ID: uC-osflcyp172f07a1
caagaaaccaagattaccattcacagtttttagtagcatccagcactacaggaaactagtctattctaactgaaatattaacttaactttttatacattcagaacgaagttagctatactgaaaggtgaaacatcctatagcagtcaagtcacatagaatctggctagcataaacagcaatcataaacacattttactctattgtacattgtgaactacacggatatgaaggatttttgtaattaaaccataaaaacacaatggcttattcagcctgttggaaggaaaaaattctgcagcatcgacaagcatcacttctggctgctatcctcagacccatcatgctggcttgtagcaccgccatttggtacagcacctgccccttttg

SEQ ID NO: 12985 - DNA, 149 bp, Oryza sativa
  Clone ID: uC-osflcyp172f08a1
gttaaaataaaattaaaaagttaaagaggataaaaggttaaaaaaaaaatgttaaaagaagaaaaaaaaggaaaaagataaaagcaaataattaaaaataaaaataaaagggggaaaaaaactaaaaatgggaaaaaaaatgtgaaaaa

SEQ ID NO: 12986 - DNA, 378 bp, Oryza sativa
  Clone ID: uC-osflcyp172f09a1
aaaaagctaatacgcctcgcatttgagaacaaagggattactagtctgtcagtttctttcaccacattcctaatatctgctgcatttttacatgaaaaattactttaagtgctttattgaattattactgatcaaacaaacaatatatatacgtttacacttattattgtttttctactgagctggccttggcactctcaaggcctcagccagtatgtagcagcatcagatggcatgatctgcagtgtcgccattatcaggagcagtgatgaagcaatcacttgatcaggatgcacctgattggtgagccctcggatccaaccagcctcagaggtaagcaatgcagcatgtagattccagccttgacatcgtctagct

SEQ ID NO: 12987 - DNA, 329 bp, Oryza sativa
  Clone ID: uC-osflcyp172f10a1
ggcccatggaagggaaaattaaaaaacttaaaagaaaaagacttttggggggggtataaaaaaagggagaagggggataaaaaccccaggccataaataaaggtacaaaaagggggggtcaatttggggttttttaaaataatgggataaaaaaatttttggagccttggaaaagaacactgggatataagggcctagaaataaaaaatggggggcaaacaaaaaaggggccaacgccaacagaagaggggggcatttgaaatgggggggccttattggggggggggcctccaattaataaaaaagggggggggcattttggggcctaa

SEQ ID NO: 12988 - DNA, 389 bp, Oryza sativa
  Clone ID: uC-osflcyp172f11a1
agattgaatagtgcttccatacatttcactatttcagtcgaagttccgcaaagtctcatttttagaacaaaagaattctgaaagattctcaaaggaactgaacgaaatcctataaaaatcttccagtccaaaaaaaaaaaaatcccatcactctttcaatcggagttgcaatgtttcgctcagcacagtaacttgtaagcaagcaaacagaacatcaatagccaagactttagcatacggaaccagtacgcactcctgatacacgcgatagcatacaaacaagcatcaaattttaaggtgcggaggtagctatggtgatgcaactgcgatgatgttcaggcaaacatattagggtaacgatgggcaggggatacgaggtaccattgccc

SEQ ID NO: 12989 - DNA, 271 bp, Oryza sativa
  Clone ID: uC-osflcyp172f12a1
aaaaaaaatgaataagggaaaaatgggggaaaaaaagggggagcaaaaaattaaagggaaaacccaaaactaaaaaaaggggaaaaaaaaaaagggaataaacgaaggtaaaaaaaaacccttttagagaaaacccccaattatggggaaaaagggggggaaaaaaaaaaggccaaaaaaatacccaaacccccggaaaaatataaaaaaaaaaaaacccggaattaaaaaaaaacggtgtgggggggttttaaaaagaaaattgggggtg

SEQ ID NO: 12990 - DNA, 408 bp, Oryza sativa
  Clone ID: uC-osflcyp172g01a1
agaaagatgtctataaaatccagttgcacagcattcacgaacatgaaacagttaaacagataaataacacaaataaaagaggaagtaaatttgcaacaaagttctcagatccaagtacttgtgattacatagcaattgtactcggaaacctaaggttcacacccatatggcagatacaactcaggctgctacagttgcagcttctgatgttgcagcttccggtggactgtcggtgtatgcacgcctggcatactccctagcaccctctttatcaacaatcttgattatgaagttttgaggagcaacgaccaacctgagccgaatttctttaatgcacttgtcaacaagatcaacagcttcctcgacttgacatgtctggacgatataacttgtccatcaacgagagac

SEQ ID NO: 12991 - DNA, 399 bp, Oryza sativa
  Clone ID: uC-osflcyp172g03a1
gacaaatcttcagccagaatatattatactgaaagcatcctagtccacaggaaggaagcacacgaggttcagaaggcgacatctatcagccaggctaccgaatactgatggtggctgcttttcatagccaagcaaaaaaagttcagaattgccactggaatatacagtagatgtattacaacaacacacggacaaggcagtgaatgtccccccctcctgaatcttgggaggatctgaatttctagtacagatttgatcagcttgtaaactgtttactgttatagacagctttggatcagaacactgaacacctaactccacacctttgacaattcagctgggggtgttcatttggctctctcctgcaagaattagtatctgggatatatacaaggaagc

SEQ ID NO: 12992 - DNA, 392 bp, Oryza sativa
  Clone ID: uC-osflcyp172g04a1
gattcagaaccgttttattcaacactattgttcctgtacaaggatctgaaacagaaaactgatgcacacatacaagccatggcgacgactgcagtttatgctcgctatttgtaacagctaacataacataaatggtgaatcttgatcctatgcctaattcccccccaatagtggggtgcaccttatggagtgaacctagtaagcttcagtgacaggctcagtcgaggaaaatcatgaattctctagatctaattctgctcaagtgtatggtggaatgtcttcgagattattggcctaacgtcctccacaccaacaagtgtctccaggaatgggagtaactcgaccaattcctggtctgaggggtcatcaaaccagctctttattggtatacc

SEQ ID NO: 12993 - DNA, 406 bp, Oryza sativa
  Clone ID: uC-osflcyp172g05a1
gtggttgagcgcccgccacagcggcgtctccccgccgagcccgaacaccaggaagttgcacggcgcccgccgcttcaccaccgccgcgatggcgcgcacgtcgccgcccggcatgctcgccgtcgagttcccccccgccgacgcgtactgcaccagcgcgtcgaacacgtaccccggcaacccacccccacctccacccgcaccgtcaccccgcgccgacactgcgagcgtcgccgcctgcgcctccgccgccgccagcctcctcgcggcgacgggcggcggcgggtggtcgcgcgcggcgcacagcatcgtgccgagcgacacgcaggcgaacccggccaagaacagcaccacccacattcggcggcgggagccaaggaccggcatcgccggtgacgcggcgcca

SEQ ID NO: 12994 - DNA, 394 bp, Oryza sativa
  Clone ID: uC-osflcyp172g06a1
gcatcagaaactgatcatgaacaaccatcataagaaactcaaatttgactcctattacaccgaatcaactcaatgtggaaaactcaaaagtaagtgctattacaccctaccaaacttcaaatcggtcaaaagaatcgacgacgacaagcaccatcaggtgctctagtatgtatgcagtacacgtatacgtatatgtatgggtacacaaaaaaaattaaaaatgaaaactcctctaatggcagctaacgctcgcgccaagatttgaataaaaattttattgcttaattcgatcgatcgtcttcctcctcggtgggctcgcgctcgatcagcggtagcagcggtaggccggggtgtacatgcagctctcggcgtacttgacgaggtcgtcggggcg

SEQ ID NO: 12995 - DNA, 390 bp, Oryza sativa
  Clone ID: uC-osflcyp172g07a1
cttgcaagttactattggatatattatgtaggagtgtaagggatgccaaaagtttgaatcaaggcatttaacaaaattccatcccaccctgagccatcccaagactcgcacacggaagaaaaacatccagcattaataaggaatataaagttcttcctaaaacactggtaaatatagcagggtcgatcagttgccatttacaataacatagtaacaagttttaagcaacaagcgaagcctgatcaccacaatgtcaccaccaccattttggccaaagccccaacttaccaacagagccacatacctttgtgcaccaccgtggcataggtatatcaaacgagacaaggcgaccaacaaggtaaaagagcattagagaccaggcgtgcccac

SEQ ID NO: 12996 - DNA, 405 bp, Oryza sativa
  Clone ID: uC-osflcyp172g08a1
aaacgtgcaaaatatgatgatcgaaccaaccatcattatcgcaaaattatccaaaacaggcacgaaaacttcatcaccatgatggtttatgcaacgccttgatacagatcaaagtcatggagtgagaggggaaaagagtttgtgtagtccaacatgaaggtggggaattattgccttgctcttagcatcacagtagaacaaagttttgacagcaaacaaaaagcacacatgaattttatcggagtggctaatgctgagctgaaacagcaggagctccctcagccttctcctttgccgcctcctccctacgacgaatagcagctcttaacttacgttgctcctccttggagattctggtcctgggctggaactccttggagtggtggaggcactcgaggtagtcct

SEQ ID NO: 12997 - DNA, 221 bp, Oryza sativa
  Clone ID: uC-osflcyp172g09a1
tttgtttttttaatttttttttttttattttttatttttttatttttatttttattttttttaaaaaagatattattaaataaaaataatgaaattttaagaaaaaacaacaaaccgaaaaaaaaaataaaaagtcaacaacaaaataaataagtcaaaacaaagaaaaactgcacaaagaaaattagaatttaacacaagctgagacagaggaaaccaaa

SEQ ID NO: 12998 - DNA, 146 bp, Oryza sativa
  Clone ID: uC-osflcyp172g11a1
tgggttttttaaattttttggtttttttttttttttttttttttttttttttatttttaggacaaaaaatcaaggtaaggggataaacacaaaagcaaaagctattagacaaaacgaaacagcaaaacgaccaagaaagggaaaca

SEQ ID NO: 12999 - DNA, 388 bp, Oryza sativa
  Clone ID: uC-osflcyp172g12a1
tttgtttttttttttttttttttttttttttttttttttttgcgattcactccacatccatataataaacacatcagggctgggacaatatacatttggacaacaggcaacactacaacagggctcacggatcaggaagaacattattttgggtcacatctcatctgttcctcccttttattcaggcaggcataacataccatacttaagacagaagagttacagcgacattctccttttataggtggcatatactggagctaaggacgtcgaacatgggtgtcgcatatggccgcccgaatctaggaagcaatcggaatggccctattcggcattattttcatcttctttggtttcgcgactggcttggtttctgatttatcctttt

SEQ ID NO: 13000 - DNA, 325 bp, Oryza sativa
  Clone ID: uC-osflcyp172h01a1
aaacaatggcaattcctctactttttatttgcatggttacttcaactgcttgccctataaacagcctggggggtgtgttcttcagtaatgggatccattatatacaggggtatataactacccagggggacaacatggatctgttggatggctactacttttacataacataaccactttatgcactgacaagcaggttggatcattagaacaacaatctggaattccagtcccccagggataaaaaacttcttgggagcggttgaatgctttgatccatttgcgtaagtgaatgaaagaaagggcttaatttttcttgccaggg

SEQ ID NO: 13001 - DNA, 385 bp, Oryza sativa
  Clone ID: uC-osflcyp172h02a1
gctctaaaactcagctttggaaagaaagaaaaaggtaatgtacaacaatcccccgtcccattccatgtgctaaacacgcactttacccatttgagagtatgactgatctatctttactgtatctgcatcaatcatggttgctgcaggcatacattgctgctgacacaaagtagaatgcctgagccaaaatcgtcagaatgaatcaagaattagagaatgtgattctgtccaaatgaagatgcatctgaatctgtacaaattgaatcaaaacagcttgctgaattcggtttcctgggcccgttcaccaagcccagggaagaacggttccctttcgagcatagtctgcaacgagtccattaacctcaccagagacgcccacaagaac

SEQ ID NO: 13002 - DNA, 289 bp, Oryza sativa
  Clone ID: uC-osflcyp172h03a1
tttttggttttttaaattttattttttttatttttgtttttttttttttaagggaaaaattttttttgaaacaaaaggggaacatgaacttccttaaaaagcgccctccttaataaaaacatcacagaaaaatcatatattaactcggggaagcagaactatagggggggacgaaaggtgagagcgctaaataaataaatccaaagggggaatttacgaagcaaggaggcatttgggggttttaaattgccttaaaaaaaggcctaattgacctaaaaaaacggggagg

SEQ ID NO: 13003 - DNA, 356 bp, Oryza sativa
  Clone ID: uC-osflcyp172h04a1
gttcttgatgtccacgtcgagcggcgcctccaggcagttgagcgccatgccctcgcggtcggcagccgacggctcggggagcttctggccggacttgatcttgacgatgccggaggcaggctggctggacacgagcttgacggcgtcggactcggcgaggtcccatgcgcggccgacgaactccgtggagaagccggtgaagatgccggtggcaccggtgagctgcatgtttgtgaattggccggccttgtgcgccttcgatgtgtcgccgaggaagaggatgacgagcttgattggggactccgggaggttatgccaccatgttaccacgccaaaggggagtggcagggagtctc

SEQ ID NO: 13004 - DNA, 373 bp, Oryza sativa
  Clone ID: uC-osflcyp172h05a1
acataagaatgatcggctaattcgaccaaactgttcaaatacaatgttgagagaattgcttttacatgcataaacaaatttggccaaaaaaaagaaatatactgaaagcagcacaatactgtttgccatgttaccgcctacatcgaaaatgtatctagtctacagcaatacactaacaaatgccctgcatggcatggcaccaacgttctgcaactccagcagtggttccatatagcagtggacaagtctgcagtagcagcacacggcgtatgctcctgcacctccatgagaagggtaaagaagaggaaaagactccaaaacacaaaggaaactcttaactcgataaaatctcaacccagttattaactttgag

SEQ ID NO: 13005 - DNA, 371 bp, Oryza sativa
  Clone ID: uC-osflcyp172h07a1
aatggatggattacctatttatatttctataaacaactcagggtaccctgcttacaaattgttcatgcaatctctccactaacaagacgcttctctctctatagtccaaatcccccaaatccgctcaccccagccaccaatatcaatcagaaacagggcgtggtgcctagcaagaatacatcacggcgctcgttcatggatatatactaatcagcgtgattagtatttaggaggtgctggaggtaaccggtttggagtgcgtcggctgccggagttggcaccggaggtcacgtcgccgttttcatagcgccctctgcgtccatcagcgcttcttgaccttgattcgctggctgagctgggtcccgtggatg

SEQ ID NO: 13006 - DNA, 348 bp, Oryza sativa
  Clone ID: uC-osflcyp172h08a1
ttttttttttttttttttttttttttttttttttttttttttttttttttttttttttttttttttttttttttttttttttttttttttttttttttttttttatattatataggaaagagaaaaaaatttttggggggggaatagggtcccaaaaaaaaaaaatcctggataaaagagagaaaaaattatgtaaaaaaaaaagactttataataaaaaaaggggaaataaaaaaaaaggggtataaaaaaaaaaaagtgaaaacgcaaaaaaccctgtagggtgaaaaaaaaaaaaaaaatttagaaaaaaaaaatttgggaaaaaaaaaatttttttatgggagg

SEQ ID NO: 13007 - DNA, 409 bp, Oryza sativa
  Clone ID: uC-osflcyp172h09a1
gtggtgtgatttctcagggctggcctaactggggactgaccaaaactcttccagcctgattgtgttgtacattatggagatctatcaggcaatttcaaagttaacacaatatcacagatttcctctttgactgaatatccagtatgaatagaccaaaatgcccctacctacactgctctccaaacatgtgggaattatcaagaagacaaagcaaaaggggacatttttctgatcatgccaccaggaggagcaccaccaagatcgccgaggcggcggcggccacggaacgcggcggcccgatcggagcgaagttgggtaggtaggggtaggagtccggcggcggcatcttgcactcgtcgccgttgaagtagatcttgcgcgggaacgcccagccctggcttgaggtgaa

SEQ ID NO: 13008 - DNA, 396 bp, Oryza sativa
  Clone ID: uC-osflcyp172h10a1
tttgtttgttcatgaaggattttgcatttggtgcaaggtaatacaaatgttcttcacattggctagtcaaaattttctattagatatcacagtagatggacgctacgctgacaacagttgatagggcatgtaataagatgcaagatgaaatagtacatccacctagcatgtgttatagcacaacaatgtttggaatctgttaaaataactgctcacttaatgctcgcattaggaacagaagatctacatggaccagcagatgtagtgaagggtacccctcggtatgttgcaattccatttccatcagtgtgaagatccggtgtgatcttgtcgagctgtttcttcttcggattaagaacatcttctggcttcccatcaaaccctgcaaatgaaata

SEQ ID NO: 13009 - DNA, 387 bp, Oryza sativa
  Clone ID: uC-osflcyp172h11a1
ttggttttgtaataattaggtgtgcattgcagagcacacacaggttcctaagagcgctatgaactagtactactagtaaaataggctgcacaagtctgcaaaagcagagtgcatactctgttcttccaaccttatacttgctcatccttcatgatatttaccatgtgagaaccaactctcatacaaatccttagtcctcgctcaggttagcaaactttgtcatcgccatacggccacccaatctatcacataaagggagggtatgctagggcgatgagatgaggtcaagtgtctcctcaaagctcggtgcctgctgcggcattctcatcgagaaggctctcctcattggactggggctttggcttcaaatcaataaattgatttgag

SEQ ID NO: 13010 - DNA, 402 bp, Oryza sativa
  Clone ID: uC-osflcyp172h12a1
ttgttttttagttaaggatgcacatagctatatttatagtcattggaactggaacactgatggatgaaatcctgcaccgatgactaccatcccactaatggtgccagtcaacctaagggtaaaccactgacactcagaacttcagctaatgtagctaattattcatcacacagagaaacacgtaatatcacatagttttcacatgattgagcaaacgttaggatcttccgtcatttgtagtggatagtactctacatagtccaactccggtgcattataggtagggtgcttattgtaatcaggtaccgatgcacctttctttccagccagctgggtcttctctttcttaactgactccaccaaccaagatcttggcgaggccacattttttgcgcaggagag

SEQ ID NO: 13011 - DNA, 515 bp, Oryza sativa
  Clone ID: uC-osflcyp173a01a1
tttgtttttttttttttttttgtggaaccagcaaatcaaggctgaaaataattacactagaaacttattttaatggctttacatgtcgctacatacttaaatcaatcaaagttgctaccaaagccatgttccctaaacagagggttccgggctttcaaacattcttaatcttctatacattgataaaaagtatacataaaaagaaaacctattaagatggaaatgttgaattctcttaagaaaggcataaaaaatgcagggtaataaccttttcttgtcatgtcctacttggtttcaacctatattgctagcaaaattttcacgctatctataacctcaggaagcagaatagctcagaatcactagcaattgtatacttacagataatcgaaattcatattgtgaggttttcttggatggctcggaatgatccacagatgttaccacccatgtctgggaatgacgtacatcctgggcagggtttcaccttgcccctacggtcaacacttacaggg

SEQ ID NO: 13012 - DNA, 534 bp, Oryza sativa
  Clone ID: uC-osflcyp173a03a1
tttgtttgatcaacaaccatgactgacatactcacattttagatttcaccagaataatgaagttatcgaacaaatattctgtacaacaatcctgagaagtacatcacctgaacatacatgtatcacgtgccgtcaaaacttcaacagcaccacaacatctcattgttacaaatcttaccaatacctaagtgacaggacactggagaagcctcttcttcttcttctcaagtccccttcaaatgctagcaattcccatccaccttcaaacacagcatcatacagaacctgatactacaaggaacatttgccctgctgttgctagcatagacccaagcaaagctccagcaacaacctgggttggagtatggcctaagagttcacgcaatggtcttgtttcagacaagggatgttcagaaggaagttcgcagactatttgattcaacacctctgcttgctttccagcatgtaatctgataccagaagcatcgtacataaccacacttgcgaatattgctgctgtcgcaaatagggcac

SEQ ID NO: 13013 - DNA, 352 bp, Oryza sativa
  Clone ID: uC-osflcyp173a04a1
tttgtttttttttttttttaatgaattcccgcttaattaataaacaccagccttaataataaagtaataaattaactaatggctcgttctttccagtcattttgccttagctgtggaggatggccgggctacagtacgggccgttgagccagccgtcagtgatctgcttgtaagctgcctcggtgaggtggatgccgtcccagctaagatgcgacgccgggttggagcacgctgatgcgcctgacatcccacacctcgcgttgttgttgtagttgaacttgccgccgcctgacccggagcacgttttgaacaccgggctaaatccgtagttgccggggttgcggaccatgtc

SEQ ID NO: 13014 - DNA, 468 bp, Oryza sativa
  Clone ID: uC-osflcyp173a05a1
ttttgttacataatagctaaagcagagataacagtgttcaaacccaataatcatctaaatgaaataaatggctgcaataaagaaaagtaaacctaacagttcacaatattgtggtggcgaacatagggcaaagaaagcagcatcgttatccaaaacttgttaaagatcttttttcaattaagaaatcacagaaaacaattttataatgcccaaaatcgtgcgagtttacatttcctacataacaaacattatgtcaaaaaatgcatataagacagaattatgcggtgtttgtatatgattgcattgcatggaaaggaaacatggtgagatgaaaattgacaataccattctctaggcaccaacataagaggaaaaagaaggcatatttgcaaaaaagtactaatgtctacaggataaagggtattcaagaaaaaaactatcatgcggaattttattttgggagacaaa

SEQ ID NO: 13015 - DNA, 446 bp, Oryza sativa
  unsure (1)..(446): unsure at all n locations
  Clone ID: uC-osflcyp173a06a1
gaggttggatccttttagggggccgccttaaacgctggcaaaggcaagtgacggggcggcggaggagggccggcgcggatcccgggctagagacggcggcggccggagtatagcaattccggcgaccggctgcaagccaccgcgactcctccctaatcctgcgttgcctgtcccgtggacgccgacgaggtccatcgcctcctccctaccacgccccccatcgacgaggtccagtgcttcctccctaactcgcgccgccttgcctcatcgccatcttgtggccgccggcgaggttcagcacctcctacctatgcatgcaccaccttgccccaccgccgatgtcgccgtgtggctgccggcgacggcgacgacgcctcgccctcggcatctctcgtgactttttgagaagagagagagtaagaggagaaaaaatgaaaggaacnaag

SEQ ID NO: 13016 - DNA, 415 bp, Oryza sativa
  Clone ID: uC-osflcyp173a07a1
ttgttttttttttttttttgggttttttttttttttggtttttatttttttttttttatgttgtttttttaaagggaaaaaatgtgggcgaaacaaaaggagagcataggccccctaaaaaaaaacccccggaaagaaaaggatcacaggataaggaaaattttaccccgggaaccaggggcacaagggggcgacaaaaagggggggcattaaaaaaaggaccccaagggggcaattaacaaggcagggaggcataaggggaaaaaaacctgcttgaaaaagggccccctcctacaaaataaacgggggggggggtagggcggggcctggggggcggccccgacgcggggggtctgggggccaatgaggggcgggaagggccagacgggcaccttaaccctgggggagggccttt

SEQ ID NO: 13017 - DNA, 494 bp, Oryza sativa
  Clone ID: uC-osflcyp173a08a1
ttggttgttaaacaaccatgggtgacatacttacattttagatttgaccagaatggtgcaggtatcgaacaaataggctgtacaacaatgctgcgaagtccatcacctgagcatgcatgtatgacgggccgggaaaacttaaacaggaccacaacatatgattgcaacaaatctgaccaagacctaagtgacaggacactggagaagcctctacttatttttttcaagtccccttgaaatgctagcaaggcccatccaccttgaaacacaggattattacagggcctgatactggcaggaacatttgccctgctgttgctagcatatgatcaaggaaagctccagccccaacctgggttggggtatgggctaaggagtcaggcactggtattgtttagacaagggatgtcagaaggagtttcgagactatttgattcacacctttgcttgttttcagcatgtaatctgatccagaagcatcgtacataccacac

SEQ ID NO: 13018 - DNA, 448 bp, Oryza sativa
  Clone ID: uC-osflcyp173a09a1
ttggttgtttaacaaccatgggtgacatacttacattttagattttaccagaataatgaagttattgaacaaatatgccgaacaacaatgctgagaagttcaccacctgcacatgcatgtatcacgtgccgtcaaaactaaaacagcaccacaacatcttattgttacaaatcttaccaatacctaagtgacaggacactggagaagcctcttcttcttcttctcaagacccctacaaatgctagcaattcccatgcagcttgaaacacagtatcatacagaacctgatactacaaggaacatttgccctgctgttgctagcatagacccaagcaaagctccagcaacaacctgggttggagtatggcctaagagttcacgcaatggtcttgtttcagacaagggatgttcagatggaaggtcgcagactatttgattcaacaccggt

SEQ ID NO: 13019 - DNA, 371 bp, Oryza sativa
  Clone ID: uC-osflcyp173a11a1
tttggttttttgtttgaaacgaggcaacaactggatccatgcattttgtgctgcaaaagaatggtttttgccgtgctccacaatccctaggagggcagggagaagactattcagtgaggtaatatgtggttctgtacaaatgaattcgccgacttggccagttttggtgaagtttgtgacgtggttcacacagatatttacaaccatgcacaaacataccgatgtgagggcttttacagtctaaacagggtcactgcttctaggaattattcttacaggaaggccgactggcgtggggtcattagtatcagatgggccatgtccagcatcttaatccttctgcgggagatcagcaaaaggaagattcaacc

SEQ ID NO: 13020 - DNA, 93 bp, Oryza sativa
  Clone ID: uC-osflcyp173a12a1
aagggggcaacaactaaagccaaccaatatccccggcaaaagaaaggggcagccccagaatacacaaaacctaggacggcagggagaaaacca

SEQ ID NO: 13021 - DNA, 473 bp, Oryza sativa
  Clone ID: uC-osflcyp173b01a1
ggaagggcaaagcagcattaaggcaaatgcaaggtttttaagatacaacacgaatacactctgaacataaactgcccttatttagggcattatgatgcattacagtatccccccattttggggttcccttttgggggtcctctaccaaaatacataaatggcaaaacatacacattttcaagattacggacggcacattacaaacaggcccacgttttagaggccttcaagtcccaggtccttgcagggggcaaccaacagcttgcgctcaacgaacatgagaacatagggaaccaccttccacaacatacaagagcgatatgtcctaaagccttaaagcaaccaccttttcaacagttcagacgccttttttctcacaaaggtctagcagtgataaggtctcagctttggagagctcaagacgaaactttggaccatcgtaatggtgcagcactggtctgaaagcatccttt

SEQ ID NO: 13022 - DNA, 474 bp, Oryza sativa
  Clone ID: uC-osflcyp173b02a1
aggctgaacaacatatacctggatgataagtagtcattacaggtgtttttttttacagaatggttctgaaaatcataatcttttacatgtatgatgtattccatttttacaggattctttaccccctataaacccccacctgctaaacttaattatattacatttcatgctatacccccctcttctgtaccaaatgcaactacagctaacaatttccatgctttctgaggcatgttattctggcactacaaattacaaatgctccccccaggcaaatcttgcctccatgtatttttggtattttgagcatcttaggccacaaaatcatgcattagaggcgacggttcgaaccgttgcctttgatctatttggttcgtggattcgtagtccgaagaggaagctgcagcgacaccgagagaagcggtggagttgtaaatttcttcttcagcaccggcgaaacctggctgatgagtg

SEQ ID NO: 13023 - DNA, 453 bp, Oryza sativa
  Clone ID: uC-osflcyp173b03a1
tttgtttttttttttttttttttttttttgatcactttcagcctttggaaagctgacgctgaggcaattatgtagggaaaaatggtttcatcaagttgtgctagtgtcggcataaaagactgcaatagtgctagttccgtatcaaaggtgccgcactgacactgaggatgagggtgtatgtacatgcatggggagctcttttggtcaatcacacaagagagatgatgacactactagtaagcatatgcctgaacaagcacacacacatacatacaggtggtatgacatgcatgctgtcagttcagcagcacaagagatgccggagagaacaacagctgcgttttagcttctaccacttgcagttgcctggctaccaccaccatcagagagggggcctcttggttgtttgccgttgttctgtggggtcaggttgtctggtgcagctctctttgg

SEQ ID NO: 13024 - DNA, 501 bp, Oryza sativa
  Clone ID: uC-osflcyp173b04a1
tttgttttacatgcttactgctgagcgaattcaatcaataaaagaaataacaatcaacgaacgtgacggatttctgtacagccgccactcgctaccgaaagcctattggcatgtcctacacaaaaactcttctattatctacagtcatgcacatgcacgactaaaccgtacatacacgatttacagagttacatctagcagagattggttttgaccatctttatggctctcgttgtgtatcgtttggcatatctatagtctcctgttgaggctcggatgatgttttcgtacgagtatctccatgttgaaaattctgggatgaatcagcccgatcaaatttcggagtcaacgtcttaaccacgttagacctctttatcagaaggcccagtgcagaagatgatgctgctcgaacaactgcatctggtgattggctcagtctaccgaccaaaatagcaaacacctgggagaagtaggagcgaggaacccgtgatcatctaaaag

SEQ ID NO: 13025 - DNA, 428 bp, Oryza sativa
  Clone ID: uC-osflcyp173b05a1
tttgtttacacaatcaggtccattgtacttctttcatcaaccaaccagataacattgttttacacaatctgaacgaacgaagcaaatattcgggtacgcggaaagaggagaacgtcgcgcgtctcaccgcagcctgcatgaaagcaatggacctcaccgccgttgctcgccggagatccacactcacttgccggggacgaagttggtggcgtaggcccatgcgttgttgttgacggggtcggcgaggtggtcggccaggttctccagtggccccttgccggtgacgatggcctggacgaagaacccgaacatggagaacatggcgaggcggccgttcttgatctccttcaccttgagctcggcgaacgcctcggggtcgtcggcgaggccgagcgggtcgaagctgctcgcggggtagagcgggtcga

SEQ ID NO: 13026 - DNA, 395 bp, Oryza sativa
  Clone ID: uC-osflcyp173b07a1
aagggggggataaaaacggcccaattttaaaggccaagccggacctgcccttttaaggatttttagcccaaccaagggaagggttgacccaaaaccaaatttagcccaaaggcttattatttaacccaaaatttttattcaaaaatccaaacggggggaaaatccatgcccctaaaaaccaatcactttttaaacattcattatttttaccaggtcgggaccaaaggtttttttaaggcctaattaacttaaaaggcgcccgcattcctaggaagcggcttatgggcgggcgggcccatgaaggggcccttataaaccagcccagccaaaggcccccctattaggggccccaccccatagatccagggggcggcccattcccccgcggcgagggc

SEQ ID NO: 13027 - DNA, 397 bp, Oryza sativa
  Clone ID: uC-osflcyp173b08a1
accatcagagaataaaagtttttcataaataagatgggtaatttcaagaaaacccataacccataggggacatacaaaagggggggatttctcaaccgggggataacaattgagaaaactattgggtttactacagaacgccaaattggaacgctggatgcaataatatgtcaagattggcaggttcaccgagaatttttggcgtcatcagaaaatttaagctttgccggggcatggaatacttccatattcaaggccatgcttagggtcttctattttttgctgacagggcttttaatttcccggttgcacacctttacacttactttaacaacaaaaataaccggcatgtatgatggaactataataatgggatgggcaatctgacgaccacatg

SEQ ID NO: 13028 - DNA, 450 bp, Oryza sativa
  Clone ID: uC-osflcyp173b09a1
ttgttttaataaaaatggcgggagatacataagaaataatttaattacactagctagcagtggcacatctgaaaaaacaacgtgaaataaaagggaaaaaaagcaagcagaaagctagctcatcactttattccagaaacggtacagtgtagtgactcgctcgctcctccctctggcgaaataatgtcgtcaatgcctcaatcgtgcagcagcaagtgctcggtctccggtgatcgccgtcactggtcggtcgctggcggtatgtgcggcggcttgtgcttcttcggaggtgcttcaggttttggctcaggcttaggcttaggttttggttcaggctttggctctgggtatggtttaggctccggttttggttcgggctcaggctctggattaggttcaggcttgggctctggtgttggctccggctgtggcttgggctctggctttggt

SEQ ID NO: 13029 - DNA, 390 bp, Oryza sativa
  Clone ID: uC-osflcyp173b10a1
ttggtttttttgttttttgttgtgtttttttttttttttttttgttatttcatttttgtttcgacactgtttttctgtcagtcgtcacttgtttccctaagcctgggggaaaaggcggcacaaaaactcggggatgggggaaggccaaggcccgggcggccaaaccgggcatacacaacccacagaggggcgggtaccaaataccgggggggggcagctaaaaagaccccgtggggcctcgaaaggcacacaaaggggctcctcaaaaggcacgggggatgcccgaaaacgaggacctccatggtgaaaaaagggggagggggccccccgaacaaaggtgggagaaaaccccttaaacccgggggaccccatgaccaaaagggggggggc

SEQ ID NO: 13030 - DNA, 83 bp, Oryza sativa
  Clone ID: uC-osflcyp173b11a1
tttttttcctcgtggaattcgtgcaatgatggcgattgccctgaacattgtgaaatgctttggaattttattattttctattc

SEQ ID NO: 13031 - DNA, 460 bp, Oryza sativa
  Clone ID: uC-osflcyp173b12a1
cttgccttccgcatcatccacactggttgaggcggccacattacccacatctttcaccgcctcaggctcaggctcaggatcgtcgacaggaggtggctggtcctgaaactctgcgaggatcttgtctacgtcctgatcatcgacggtaaagcctcccttctttttcttcttctgggatttctttcctaaggcatcatctgcatcaggggcaggcacctcttccaccggctcagcctcttcggtgggaggagaagtatcgtcgatctcggcgaggagcttgccaatgtcctcattgtccacagtaaagccgcccttctttttcttcttcttctgaggctttttggaagctgcagctgcagcagcctcgtcgtcgtctgcctgatcagcagcggcagctgagggcggcggtgcaggcttatctaggtcgaggtcgtcgtgttccagagggactgagctagct

SEQ ID NO: 13032 - DNA, 353 bp, Oryza sativa
  Clone ID: uC-osflcyp173c01a1
aaaaaaaccacccacaagagttccttggtgggggggattatacctaatttaaaaagctacttccaattgtatttcattcataagggccctctaaaatttggaatctattgaaagggatatggcacatttgggggaagtttataggacacggaccattggggactatgaccattggggggggcacacaaaggttggctcccgcttgaacttgggttgagccaatttggcactatattttttacgagactttgggatcataattttgcgagcgctttttttgtgggccttaactgtacagggggtgtgctttggagcaagcttatttttcttagggtccagctttaaaaatttag

SEQ ID NO: 13033 - DNA, 524 bp, Oryza sativa
  Clone ID: uC-osflcyp173c03a1
gtcaaagttcagatgagattatatgattctctgtcatgattaattcatacatcagaaaatgaacaattgaataatataaattctaaacaataatggagtgtagtccatcccaatatgatgcactcccatcagacaacagtggacttgctaaattgtcctgcgcatttcacaccctgtaatttttttcccttctttctctctatacaaaggcataataaattattactactattatatggcttacaggaaattacactaacagctatcaggaactaaaaagcacatgtaacctacaacactttgatgtgatcatcaagcacaaaaactccgcagttgacaattccaatcagctctgctgaatctgaaattaataattcgctaactggactagacttgtagccaaatagcaacagcaagggtgcccagataaataagtaggctaagctccagtctgttctggttgacaccattttgtgccgatgtcgcagcaggtctctctggaatattaacagatttattgcatg

SEQ ID NO: 13034 - DNA, 367 bp, Oryza sativa
  Clone ID: uC-osflcyp173c04a1
tttgttttttgcttccaaggaggatagattaacatcatatcactggtcagaaagacaagattccatgaaggttcacacaggcctcaggtgctactccccactctcccctcagtatttacatttcacacattatgtacagtcatccaacagttgccatgcgcccaaatttgcctgcaccgccaacagatgatcctatctcatccttgcacctccctgcagcgctcacatccattctgctaccaccattgccacctgcaccaccacgaccctttcctctgcgtggactagcacacttcctgcagatgaacttctcagggacatcatcaaaatcactaatccctgaacacctggtgtgttgccaaactcc

SEQ ID NO: 13035 - DNA, 472 bp, Oryza sativa
  Clone ID: uC-osflcyp173c05a1
tttgtttttttttttttttttgttttttttttttttttttttttttttttttttttttttttttttttttttttttttttttttttttttttggggaatctttaaatcttagaaaaaaaccccccacaaaggccaaaaaaaaaaaaagggcccaccctgaaagaacgaaatgggcccttaaaaaaaaaaaacaggtttgggggcccaaaaaaaaaaaaaggggccaaaaaaaattttgaacaacccccaaaaaaccgggggggggaaaaaaaaaaaaaaatttaagaaacccaaaaaaaaatttttttggagggggaaccccaagaataagggggggggggggcactggttcccgaaaaacccctgggcgccggggagaacccaaaagccccccatttttttaaagggcaagggaaacccggggtaaaaattgatcgggttggggggggtttccaaaaattgggcccggggg

SEQ ID NO: 13036 - DNA, 477 bp, Oryza sativa
  Clone ID: uC-osflcyp173c06a1
ttggttttttttttttttttgtttttttttttttttttttttttttttttttttaaaagagtatcaactggttttttacatgggttacattatagtacaagtccacaatcaacaggggatgcagggctccatccaaaaagacatcccaatgcaccaccaccattgacggcctactccgatccaaaaaaagagaggaagggggggtggacgaaaagacttttaatcttcctccatgggcagccatgggtaacactccaacacctgaagaactccggatttgggggggaaggcccggaaaatggtggcgtggccggggtcggcaagatgggcaaaaaggttgcagagggggccgcttccccgggactttgccgggaaccaaactcccatgacggccagcatggggagccccccgatctggatctgggtggaggggaactccttgatctttttgggggagccggtgccccaaccgagggg

SEQ ID NO: 13037 - DNA, 488 bp, Oryza sativa
  Clone ID: uC-osflcyp173c07a1
tttgtttttttttttttttttttttttttttttttttttttttttttttttttttgggcggtcaaatgcattcaatggatataggggcgaccccataatggtgcacaagcaagggggatgggcaaaaccaggaaatttggggcccctcccaacgacaataacgccttcctcctggtggccaccctaacaggtcaccaggacactccacatttttgcatccggcattttaataaaaggggacgggggcaatggcagccgggacaccggcaacgggagggcaccttttgggggcaccggcaccggaaaaatcggggtcagccgcattggcaggtccatcggcgacgggggacaccacgggggcaaacggcgtaggggggatggacaccttgtcgccaccagcaggcgcggaggtagccacggtggtcgttggcgcggcaactggtccggccttccttggtgccaatgcgacggggggtgcctttgcaggg

SEQ ID NO: 13038 - DNA, 499 bp, Oryza sativa
  Clone ID: uC-osflcyp173c08a1
tggtgtttttgtagagaagcgccacatgcaaaagtatatattccagtgtataatatccaggggaaggcaaagcctacacaaaccaaccacagaaccacattctcaccaggtcacctaaacttttaaacaagtctttgtgggagatatccaggtagtatatatattgggaatcctcacccagagtttaccatgtagaagattgagatgtactgtacacaggaatggtcatcagtaccatataacggacgattggtgattactattactggatgcaatgtaacacttaggatacaatagtacattacagagctagctaaatgcgaagccacaataccggcagtcgacgacgatcataaataaagcttacacaacagagccaacatgcagaccattcggactgaccagagatgagggttcttgaagctgctcgggtgtgccatgcatcacatatgccgaacagctagattgtagcaaccaacatgcaaggataaggcatgga

SEQ ID NO: 13039 - DNA, 363 bp, Oryza sativa
  Clone ID: uC-osflcyp173c09a1
tttgttttttttttttttttgtttttttttgttttttttgtttgatttatttattcttttgataatgtacatttgttttttttaaacaaaaaagacaacgggaaaaaatttcatcccaaaaagatgcaccccgattagacaaaaggggtcttgtttgggggtagggtccccccccaccccgggggtttaacaggggtcccgcccatgaactcagggggggggcattatcactgctattaaaaggggtacaggggattacactaacggcttttatgaagggaaaagggggcgggacctggaacaatttggtgggaccagctaatacaagggctgcgcacttgacaaaaacaacaagggccgggg

SEQ ID NO: 13040 - DNA, 344 bp, Oryza sativa
  Clone ID: uC-osflcyp173c11a1
tttgttttttttttttttttgggggtaaataaagtgatttttatgttgtttacaggatgagaattaagcgattgataaaaagaactggtagaaagaaaaaaacaatactgggaagaaaacgccgccggagggccaaaagaaaaaaaaagggggcccttgaaagatccaattgggcctttaaaaaaaaaaaagaggctttggggccgtaaaaaaaaaaaagggggcaacaataaggttggacaaaggaggcgaaacagggggggggaaaaaaaaaaaaaacccgcgggagccaccaaggaaatttgatccacggggggatgccaaggatacaagggggggggggg

SEQ ID NO: 13041 - DNA, 396 bp, Oryza sativa
  Clone ID: uC-osflcyp173c12a1
aaaaaaaaaaaataaaaaaaaaaatatatgcaaaaaaaaaacacaggggggtttaccaaaatccgacaacctggaaaatagtacaaccaccggtacaacattacacaatcacgcacattctaatacaacagatttaacttattatgggcaggaaaaaacccctataaatttttctttacaaaaggcaataacaatatatggagcaacgaataaagggcccaacacaacacaacatttttttaaaaaaaacaacgctacaccatacggggggcaaatccgggccagacactttgccttttccttgggggcccacaggaaaccattggcaggtgggccaagccgttatcactcaggcagcagcaaggggttaaggtgctgctgttgcaggtgctgttg

SEQ ID NO: 13042 - DNA, 444 bp, Oryza sativa
  Clone ID: uC-osflcyp173d01a1
tttggttttttattctctgggctttcttacttttatcggtttcttttttttatcgtttaatacaattcagaggggcacgttctacataacctgcaccggtaactggtcgacactcacccaaacggggccccggaaacactactgtaggctcctgacgtgcacgagcacgacaaattacaccgcgatccgaatcagcagactaagggggcgacgatcgcgctgggggccacgaactcaaggacatataaaactgcaagtagcttatcgcgcacggggaaagtgcgcctgccggagagggggtggccccacgacacgtgcacggatttccaaagcgacggccctttcgggggagggatgaactcgaccaggatgccgaagccgaggaagaggacaacctctaaaaagctgaccagcgccgcggaggccccgtttgtgagggggggg

SEQ ID NO: 13043 - DNA, 333 bp, Oryza sativa
  Clone ID: uC-osflcyp173d02a1
aaaaaatatattaaaaaatttttattaaaaaaaaaaaaaaaaattgagaaaaaaaaaaaaaaaaataaattgtgaggggatggaaaaaaaaaaaaacaaattggttttttaaaaaaaaaaagaagaccaaatttatggaaaaaaaaatttgggggtgaaaggaaaagaagaagaattagaaaaaaaaatggggttaacaaaaaccgaggaaaagggggataaaaatacatgaggagggaattcccaccaacccaaaaattatttatgttgaaaaaaccgctgttggttttaaaaagtttttttttggaaaccttgtttttaaaaaattaaaaa

SEQ ID NO: 13044 - DNA, 458 bp, Oryza sativa
  Clone ID: uC-osflcyp173d03a1
tttgttttttttttttttttttttttttttttttttttttttttttttttttttttttttttttttttttttttaaccaaaaaaaacccattttatttttttaaaaaggccatcgccaagaaactaaaaaagggaaacaaagggtgcaactaaaccccgaccacgagactttttcgggggcccgggcccctaataaatttaactggaaacccccacaagccaaagttgggggcagatttgaacactcacacaatttttgaaaaaaatacccaggggttgccccgacccatccttgggggggtttatttattatgaaccccatggcgaccctgggttccaacttggtaaaaaagggagatggcccgagagatggcccgcccgcggcaaggaaagggtagctaggggtaggggcaggcgagggtggccttttagaacaagggggcctgtttatggggggg

SEQ ID NO: 13045 - DNA, 450 bp, Oryza sativa
  Clone ID: uC-osflcyp173d04a1
tttgtttttttttaacttatcaagaataggtaattttaccagaacccaaatacagaaaatcatgtacagtcagtcagtactgccctgtccgtatattggtacacacatgggaaactcttgtacaaaatggaccctgctctggcatccttaagtaacacaggacgtacatgctaataaacccagcaaattctttcttacaaaaaccaaatcagtactccaacacgacacactaaccagaacatcttgaacgtacagtgcaaatctgatcgatgcatgtagtgcacggttcatgcaattggcacatataaatctcttggcaatttcttgtatgtctggccatgcatatctcgatcgatcttagtaccagtgatgggtgatggtgtgtgtcacgaaaagtcacacgtcgatgccgccctgcgcgacgctatcatccggggggctaatggtgat

SEQ ID NO: 13046 - DNA, 420 bp, Oryza sativa
  unsure (1)..(420): unsure at all n locations
  Clone ID: uC-osflcyp173d05a1
tttgtttttttttttttttttttttttttttttttttttttttttttttttttttttttttttttgggaaaaaacagaggaccaggataggacttttaaactttttggggcaaccataaggcagcctaaacaggttgtttaagactcccaactaccaagaccggcgacccgggaaaaaaaaggcaaaagatagacaccctggggggttgggactaagggggttatgacctgggactccacccaggaggggggaaactaagaacaggggggggcccccgggccatgcgaaaaaggggtgtccaaagaagaaaaacatgttggccaccaaatccttgggcagcgccgggaagctcctgaaggcggaagcgccggccccgggggggggtgccnaaaacccccacgcccgggaagacggggggg

SEQ ID NO: 13047 - DNA, 379 bp, Oryza sativa
  Clone ID: uC-osflcyp173d07a1
gggcaaaaacaggattataatttttaagttagcccgaagaaaatcaaggtggccaagatgctctactcaaggcaagggagaaggggactaagttaacccatttatgttaaaattgccggggatcattaacaacatgaatttgggaaattcatatcaaacttgaatggccatgtttttgagagacagccattgccattggtccgagggcaccgaaggggtcaccaaacggattggaagatccagcctggggggcagggaactgatgctgctgctgctgctgttgggggaatatctgattttggtgataatgggcctgaaaatacatgttatggggatgttgatgatcctggaaatgatgaggctggtagaattgttgctg

SEQ ID NO: 13048 - DNA, 388 bp, Oryza sativa
  Clone ID: uC-osflcyp173d08a1
ttgtttttttttttttttttggttttttttttttttttttttttttttttttttggttaatttttttttttttaaccaaagtaaacccaaataatttcttgtagaacaacatgccctaaaaactaaaaagggcaaacaaagttgggaaacaaacccctgcaaaaaagagcctgggctcggcccccggcaccatatggagtctattggggacccccccaatgcccaagttggggggagaccggcacccgcccccggttttgggaaaaattaaaggcggggtttgcccctttggaacaatccgggggtttttttattatcaaacccgggccccccttgggtccccggttgctaaaaaagggaggatgccggggagggggccccccggcat

SEQ ID NO: 13049 - DNA, 415 bp, Oryza sativa
  Clone ID: uC-osflcyp173d09a1
ttgttttttcaaggaagaacgaacgagattaggcaaccaatttagacaactctgctccagtccaacaggattgagccaccgccgccatcgccttcaagttgccagaccttagcttcttcagaaggatacatcggtaaatatgtgaatctcacctacccgctaatttttttcctctctcactcgcaacaccacacatttgtatacaggtcacattacacggcccattttggtccataataccgaggattagccttgatttgcctggccgggcgcacagtctcgctggactcccttggctagatcagctttaacggaagcccgtaggaaactggttcttgcgcattatgggtgatccctcctggcacaggataagtgctcttgacacaaaacaaatgtacctggctcccggaccaca

SEQ ID NO: 13050 - DNA, 452 bp, Oryza sativa
  Clone ID: uC-osflcyp173d10a1
gggggcagatcaagactgctaaatcatgcattacccacaaaataaaagatgctaccagaagacataaaggagcaatccatatgataacttataaagcaaaataaaagatccgggcaaacaaaatacccaatccacgcgcattgcctaaatgcctagttcaactaccaataaaactaaaactccaataaaccaagtaaccaagtcgttttcaattttagatagataagataactgagatatggatcaaaaattggtgccgtcgatatgcttaggaggaaacgacgccgtgattcagcgacagagaagcaagctgctgttcaggcgtcgagttcgtttggatctgctgggccgtgcgaaggacctccatggcttcagcaaccttggccttgagagcctctggagactcgagcaggtgcagcacctcaatctggtccatatccagcagcatgcca

SEQ ID NO: 13051 - DNA, 383 bp, Oryza sativa
  Clone ID: uC-osflcyp173d11a1
tttgttttttttttttttttggtttttttttttttttttttttttttttttttttttttttttttgggaaaaaacaggggccccggaagggacttttaaactttttggggcaaccataagggagccttaacaggttgtttaggactaccaactcccaagaccggcgacaggggaaaaaaaaggcaaaagatcgacaacctggggggttgggactaaaggggttatgccctgggtctccccgccggaggggggaaactcagaaccggggggggcccccggaccatgccaaaaaagggttgccttaagagaggaaacggcgtcgaactaggcgttgcgcagcgccgggaagctcctgaaggcggaagcccccgccccgggggggg

SEQ ID NO: 13052 - DNA, 367 bp, Oryza sativa
  Clone ID: uC-osflcyp173d12a1
tttggtttttgcttccaagggggatagattaacatcatatcactggtcagaaagacaagattccatgaaggttcacacaggcctcaggtgctactccccactctcccctcagtatttacatttcacacattatgtacagtcatccaacagttgccatgcgcccaaatttgcctgcaccgccaacagatgatcctatctcatccttgcacctccctgcagcgctcacatccattctgctaccaccattggcaccttcaccaccacgaccctttcctttgcgtggactagcacacttcctgcagatgaacttctcagggacatcatcaaaatcactaatccctgaacacctggtgtgttgccaaactcc

SEQ ID NO: 13053 - DNA, 430 bp, Oryza sativa
  Clone ID: uC-osflcyp173e01a1
tttgttttttgttagtttaaaggattattgttaatttttgattgatgaggttgattcaaccggtttattttattattcttactatcttcctttggaggataaaatatacttgagttctgactagcggggcaacaagtaaaaaatgaatttccaaacagaaagaaggttgaatcaaaatagccacgcaccctggagcccaaaacgatccaagggggggtgcagtaataggggggggtatggacttcagccatgaaagaaaaggcaaccccaggagcacgctgggagaaaactggcaagtgggcaaggggaccccaaagatcgtccacaccaaacagaaatgcattctggtcctggggtggactgatgaaattccaggacggtttttagaggagtttcgggaactgtgtcattgccatgaagagaacattac

SEQ ID NO: 13054 - DNA, 312 bp, Oryza sativa
  Clone ID: uC-osflcyp173e03a1
gggatccaacaagtaaagctggtgactgttttttggagttacatgaaatggttcactgaatggtttttggttgaacctgaaaaaaagtgacactggtgaaagattagagggcttggtgaagcagttacatgtccaattttattggtgttcagctgcgctatacttatggttgttaggtgctgatcgatcttctttgacctgagggctgtgaaaacacctgctttttgtttcagaacacggaccttaatctggggggccttgtaattttcctgaaaaactgtttgcactggaaaaattgccatctgggcagtt

SEQ ID NO: 13055 - DNA, 478 bp, Oryza sativa
  Clone ID: uC-osflcyp173e05a1
tttgtttttttttttttttttttttttttttttttttttttttttttttttttttttttttttttttttttttttttttttttttttttttttttttttttttttttttattggggggggggaaaaaaaaatattaaaaaaaaaaaaaggggggtttttaaaaaaaaaaaaaaaccccggggtaaaggggggaaaaaaaaaaaccaaaaaaaaagggttttttggaaaaggggaaaaaaaaaaaaaaaaagggggggggaaaaagggaaaaataagggaaaaaaaaaaggccaaagggggttttttgggaaaaaaaaaaaaaaaaaatggggaaaggggaattttttaactggaaaattttttttgggaaaaaaaaaaaaaaaaaaggggggggggggaggggtaaaaattttttgaagagagggggtttttttggttggaaggaaaatttttgggggggtattttttgggggggggg

SEQ ID NO: 13056 - DNA, 527 bp, Oryza sativa
  Clone ID: uC-osflcyp173e06a1
tttgtttttgtaggagcagcataacacacatagaatttccacattagaagcttacgtagaataagttactcccaaataaacacgctacaaaaataaggtccagatatttctttgatatattctcttgcactgacagacaaaagccggtcccagagcgacaggtctattttaagaggaaaagcttggtttcaactgatccttttcacttctaggtggaacacaccaacttagaacaccctgattggtttccccatggtgctcttgatgtaaaggcacctcacattctgccagttctttttcaaaagggacacgaggaagttgacgctcatttggatgttttgctggatctgcttctcctccattgacaagttacccacagcaacacccatgcacagaaccttcttcagctggaacttgactgtagcttttcgctcgttgaccttggattcaagagactcctggtgagtaaccaatgtagggaacttgccctgcttgttgagaccaggaccaaggagacgaggaatctg

SEQ ID NO: 13057 - DNA, 449 bp, Oryza sativa
  Clone ID: uC-osflcyp173e08a1
ttgttttgtcaataaatgcattagcttgatttcatagatttgatacaagtaaaaatggccccaaaactaacaaaccacacactcacgctttagaagtttgtaactaatcaatacagaaaaaaggcaatatctgactattcttcgacatcttcctcagtatcttgcaacaaagctcctcgcactctcgccctccgagatacagaggctatcctcttcgtggctttagctggaggaactttgataggtgaaactactggtgtttgctgctgtgctggaacaataacctgatcagagccctgagtcacatcagacacacttggaacctgattggccaccagctttggctttgttgcctttcttttgtctagaaaagaaagagcttcgagttgcttttgcattatttcattcttttccttttcagatgatagagtctccatcagctttgacgc

SEQ ID NO: 13058 - DNA, 413 bp, Oryza sativa
  Clone ID: uC-osflcyp173e09a1
tttgtttttttttttttttttgttttttttttttttttggatccaacaagtaaagctgatgactgttttttggagttacatgaaatgggtcactgaatgtttcttggctgaacatgaaataaaatgacactggtgaaagactagagggcagggtgaagcagtaacatgtccaattttattgtagtttagttgcgctaatttatggctgttaggtgctgatcgatctcctttgtcgggagggctttgaaaacaccagcatttttttttacaacaccgaccttaatctgggggggcttgaaattttcctgaaaaactgattgcaatgcaaaaattgcaatctggacagttttctcgtaggaaaactgggggaaatcctcattttttttccagaaaattattgcttcctgctcctt

SEQ ID NO: 13059 - DNA, 395 bp, Oryza sativa
  Clone ID: uC-osflcyp173e11a1
tttggtttttttttttttttggttttttattttttttttttttttttttttttttttttttttattttatttttcaaataaactttttttttaaataaatgttatatatttttttgggggaggcaaaagcactgacagacaaaaaaaaaagggggggtttaaaaaaaaaaaaagaggaaaagcttggtttcaactgatccaaaaaacaaaaaaaaggggcacaccaaccaagagcacacagaaaggaaaacccatggtgctcttgatgaaaaaacaccggaaaaataaaaggcttattgggaaatggcccccaagaaaaaagaaactaatctggaagaagtgctggatctgtttctactccatttcccagaaaaaaaaaaaaaaccccagggggg

SEQ ID NO: 13060 - DNA, 488 bp, Oryza sativa
  Clone ID: uC-osflcyp173e12a1
tttgtttttttttaacttatcaagaataggtaattttaccagaacccaaatacagaaaatcatgtacagtcagtcagtactgccctgtccgtatattggtacacacatgggaaactcttgtacaaaatggaccctgctctggcatccttaagtaacacaggacgtacatgctaataaacccagcaaattctttcttacaaaaaccaaatcagtactccaacacgacacactaaccagaacatcttgaacgtacagtgcaaatctgatcgatgcatgtagtgcacggttcatgcaattggcacatataaatctcttggcaatttcttgtatgtctggccatgcatatctcgatcgatcttagtaccagtgatgggtgatggtgtgtgtcacgaaaagtcacacgtcgatgccgccctgcgcgacgctatcatccggggggctaatggtgatccagaggagagagactgtgatggagatgaggcccgccc

SEQ ID NO: 13061 - DNA, 531 bp, Oryza sativa
  Clone ID: uC-osflcyp173f01a1
tttgttttttttacaaggttagcagcctacaatgatcattacatcagagcctacaacgatcattacatcagacagcacctgttctctactccttgctattccagagcctgtatgtcagaaactacagccctacatcagaggacgacctaggtcacctatccataattacaacacatgtaaatacagatagatacaggagatacatagattagaacggccgttaatctatgtaaagtctcctcaaaacagacacccaaggctcaatcagagtcactgtcatgctcaaggaaacgatactcccttgggccaccaagccttagtactatggtcccggcatttttcttatgccactcaacgcctttcttctccacaagcttggcaaccgcgcgcttatttttcccttccctgtgccttctacaccacaaccagtaattactctaagaaaggtggttggcatgcacacacaaatcatcatgtgaaccttgagaagccttatggcttgttaacatgttgcccatgcaggtcaatagt

SEQ ID NO: 13062 - DNA, 440 bp, Oryza sativa
  Clone ID: uC-osflcyp173f02a1
tttgtttttttttagcctacagaatcaatgtattcatgagaatatcaacagcgtcagctgcaagtacatctatctataaagcaccataaatagcagcaaactattacaaaactgctaccatacgaaaactatgttagatggcatagtaaataacaagatgttaaacaactccaaagtgaaaaccacgtcaaaacgagtatgaaactgctgcagcagcacgaccaatgagtgagttgggcaggctttgcctcttgccatgcttccaaccaagtgtgctttgcattccatgcacccacagacaggcctaggtgttacagcaacagccaggtgccgcttaatggcaacataatgcaggaggacgggagatccatggagaaacacaagtcttgtagatcaagagctctaatcaggatacagtggccactgggcacagatgattc

SEQ ID NO: 13063 - DNA, 461 bp, Oryza sativa
  Clone ID: uC-osflcyp173f03a1
aaaacgtaactgtttgagcaaataccacgaaatgttcaggcgctaagatacggcaataccgatacatccagcatagcaaaaatggcgaagagcacagagtcagataaagctatagagaactagggctccaggagatgggggccgaatgacaaccatggcgcttagtcgacctcctccatcttgctctcgccggcgtcgtcctccagcggcggcatgtcggcgtcagcctcagcagactcgtcctcgtcgatgctcaggccgagcttgagcatccggtggatcctggtgccgaaggtgttggggtcctcaaggctgaagccggaggtcaggagggcagtctggaagagcagcatcaccaggtccttcacagacttggcgttcttgtcagcatcggcacgcttgcggagctcgtccatgatggaattctccgggttgatctccatggtcttcttgctcgacat

SEQ ID NO: 13064 - DNA, 498 bp, Oryza sativa
  unsure (1)..(498): unsure at all n locations
  Clone ID: uC-osflcyp173f04a1
tcgccgcggcggaggtccggcgaggcgtgcgggggctcagatccgagtgcggctgcgtgtgcgggtgcgccgtctcggcctcccggcgcgccatctcggcgagctggtggccgagcgcctcccccttgagtcgccgcccgccgccggccaccaccacctcgggcgggtcgcatggcacgtagaggtcgcgcagcacggggtcgacggcgagcatggagtagtcgagcgccgagaagaacgcgtcgtcggcctcctcctcctcgccgccgcagccgccggggaggtcgagcccccacgacgcggcgagctcggcggcggcggggcacccggagaacccctcgacgggcacccgcaaggccgcgccgtcgtcgccgccgcacccggtgtcgcagtccgcgcacaggaacgccggcgccgaggcggaagcgacgcgcgcggcggccggcctggcggtgcangcggtgcatagcggtgcgcggacgtgcttccccgagagcg

SEQ ID NO: 13065 - DNA, 478 bp, Oryza sativa
  unsure (1)..(478): unsure at all n locations
  Clone ID: uC-osflcyp173f05a1
cacacaaagtactcatccaaatgctgatgaatattttcttctgggttcataatagatagattcatagatagatcagacagtgcaaatccatggcttgtctctcaaaccgacccaacgaaacaaaaagattaaaccactccaagactcccatcccattacatagaacgacgacgacgactaaccgatagatccatagctttcctaacgagatctacgactactaataagatagaactgatcacccgctgctcggtgattcattggagggaggggggagcaaaacgcatcatgggagggagctggatctgacgccgcgagcagcgcctagtaggtcttgctggggcactcgcgagcgatgtggccggtctcgcctcagatgtagcacccgacgacgtcggcgccaccaccaccgtcgnggtagccgccgtcaccaccaccgtagccaccgtcgccgactactccctgggagcagtccctg

SEQ ID NO: 13066 - DNA, 445 bp, Oryza sativa
  Clone ID: uC-osflcyp173f07a1
ggtattcatgggtctatgcattgattaacacaaaaacagagagaaaagatgaacggtgcaatcttatacagacaagacaacggaggtggttgccacctaggagtaagctttcaaaattaaactgcaatgctaattcatagcagaacctatgttaacaaaacatccggtataggtatgggtgcccaccagcagtttcagactctcaggctcttcagtaataaggagaaaatatcaccatatgatccttgcaggctgcaaatttccttaacctcgcatctacttctggccaccaggtttagattgttgctgtatctgctgaagtagggttgctgccaattgcaatgttgcttgaaggcgcttttgagggtctccgtgatggtcttcctgagcagacggttgctggctagtctgtggtccagagggaagtgcaagttgcgctcgtaga

SEQ ID NO: 13067 - DNA, 365 bp, Oryza sativa
  Clone ID: uC-osflcyp173f08a1
caggcaaatgcatgcacagttttacagaagcaaagcaacgggttcccaaaggtccacacttacagtacgttcaacgtacaactgatccaagcaaatgaaacaggtttgatgatgcactgatgcgagaaactaaacggttggatcggagtcggagacgaggcgatcatggacaagcggcgggggcggcgatgagcttagtagtcggtggtggggagctgatcgtggttgtgggagatgaagaggacctcgtacttgaccccgcggaggccaccgccgatgagggggccaacccagtacacccactgggactcccaggaccagctgacgagggccgggccgatggagacggccggcttaatggaggc

SEQ ID NO: 13068 - DNA, 437 bp, Oryza sativa
  Clone ID: uC-osflcyp173f09a1
gccaggccaaacgacgattgtgaatttgtgattgatgaggttgatccaaccggtttatttcattattcttactatctccctttggaggataaaaatactgagtctgactacggtacaattttcatcttgaatttccaatcagaatttagttttaatcaaattagccacgtagtctgcagcccaaaacgatccagcttccgtgcagtaatagccgtgtgtatggccttcagtttcgacagacaaggcatccccaggagcacgctttgagatctctttcaagtgtgcaagcggaccccagggatcgtccacaccaaacagaaatgcaatctggtcctgttttgcactgatgaaattccagtccggttcttcagagagcttcgtgaactctgtcattgccatgaagagaacattacgcatcgtatggtaccataagagat

SEQ ID NO: 13069 - DNA, 326 bp, Oryza sativa
  Clone ID: uC-osflcyp173f10a1
ttggtttttttaaaatgcatggtcccttgtcccacttatacaggcaatggtgggtattgagtctgaactattccgtgctccaagaatgaatagacggggtacatgaacttagcagtagtaatgcgaaactcggatgggagccaactcgtgacggggaaccgatggacacggtaggaattgcgaagcgggacttacgaagagcatcatactaataggagacgacccgagctgggcagctgacttgttctagcagacgccgctggcctccttgagggccagcacggtccatcttgcagagggagaccacattgggctgcctctccaac

SEQ ID NO: 13070 - DNA, 512 bp, Oryza sativa
  unsure (1)..(512): unsure at all n locations
  Clone ID: uC-osflcyp173f11a1
gcattcggtatatatactgttcccattcactcttcttgataagatgtggtacataaaaaatccaacaggttcagatatcgcgagagatgcccgctctccaactcttcatatagttatgtctatctagctaaatacccaaggagataaaaaaaatgaaaggaaaagaaacaatcaaaactgagatgcagctgagagttaagttctcagccctgactaaagctcagatgaaccaaaactgtgactttcaaatatggagcttattgagctcagaactcgccgttgcagcattgcttgtgtcactggtgttcgtgcgagcttcaggttcttcttttctaggcgaggccgagaggatctgaacagcaggttgagctgctccagcactagagttcaccacatttggcctcgctgagcatacagggatagttgttctgattgtaactgaggcagctaaccaaggaggccgttgctggtataacgaactcngcaaatttaccggcatttcttgtccaaat

SEQ ID NO: 13071 - DNA, 504 bp, Oryza sativa
  Clone ID: uC-osflcyp173f12a1
gtcgccgccatcgccggcgctgccgccgttcttgcaagcgagctctacagtcggaggtgccgtcggttggcgacgagggtccgggagctggaggcctcgcttgccgccgccacggagaaggccgccgccgagcgccgcggtagggttcgggcgcagcagtcgctaaggaaggctctgagcgagcaagagctcagctcggatgagaagaagaagctgagccaatcccccaagtcgttccccatggcttcgatcggtgtcgtgcagtcatgcttctccactaggaatgggacgccgaggcagcctttggtggtgccacttgccagagcaaccgtgatgcttgatccagcccgtgtccctgcggaagcgcttgagggacttgccgattactcgcactgctggatcctttatgtgttccatctgaacactgaccttgataaaatgtggaatgaccctgctaggtccaagctaaaagcaaatgtgagagtacctaggttgcaagggggc

SEQ ID NO: 13072 - DNA, 393 bp, Oryza sativa
  Clone ID: uC-osflcyp173g01a1
tttggttgtaaacaatttgacttgaattctaattttgcacatgggcaagcccgagttaaaaagaaccaatgaacactttatgcacgacccatagcaaatcctgaaagatgccgacacgatccgaagcaacctaatcgattacacatttacagggtggatactgaagactaagaacagctatctcatgtcattcacagaagacaggagagggggggtcggactgggttattgctcaggcacaaagctctttttacagaggcttccctcattcagggaatgaggaattgaggatcgaagtcctgggatatgcagactcagttcttagaatcctaggctatcttgaaaaggaactggggcaactaggccatgcggggaagattcatcagcagatct

SEQ ID NO: 13073 - DNA, 383 bp, Oryza sativa
  Clone ID: uC-osflcyp173g03a1
tttgtttttttttttttggttaatacaacatctgggcgcggtggacttgtgaacatggacagtgagaatcgcacttcattatggttatgaagaggaagaagaacaagtgcgacacaggaaagagttcaccaatttaccctctctgccacccaaatgtgagctattcatgatttacggtattagtcgaccttggtgcagtactcgctcggatgcttggcatatggagccggcgggcctattgactccggcgcggcctatcttggtgatggcgggtacaatggcgtactaaaaggccggatggttggctgtaaagtttttatcagtggaacgcgagcgggactaagtcataaggacctgctacgaggttaggggggccttgggct

SEQ ID NO: 13074 - DNA, 473 bp, Oryza sativa
  Clone ID: uC-osflcyp173g04a1
tttgtttttttttttttttttgttttttttttttttttttttttttttttttttttttttttttttttttaaacaaaaacatcgaccgggggggaacgaacttttttcctttttttttgggggccatcccagaaattcccgccccaatagcaggggggaaaaagggggccaaaaagaataggggggtttttataacagcggcaccctcagcagttaaagggggggggatgggaaaaaaaaaagggttgattggatttaggggggggggtcgggcccggcaacaatcttggggatctcgccggggatcttggcctggccctggcggttgtaaaccatgggggggttcttccggggctcgatggggttgccgggggccctcctcatgggccccatcctgggggggagctctttggcgggcgactcccggagcgcgcgggggaactggcttttgagggaaaacgggaggagcccct

SEQ ID NO: 13075 - DNA, 417 bp, Oryza sativa
  Clone ID: uC-osflcyp173g05a1
tttgtttttttttttttttttgttttttttttttttttttttttttttttttttttttttttttaaaaaaaaaattttaaattaatttaaaaaaaaaaaaaaaaaaaaaaaaaaaaaaaaaaaaaaaaaaaaaaaaggaatgaaaaaaaaaaattaaaaaaaaaaaagacaaaaaaaaaaaaaaaaatgaacataaaacgctaaaaggaaaatgaaaaaaataattgaaaaaaggatgataaaaaaacaaaaaaggggccctacacgggccaaacaatgaacaaagaaggggccatcaaattaacaaaaaaaaaagctaaaaaaaaaaaagttcaatgaacaaagaactaggaggggatctggcaaagaaaaatgggaaaaaaaccaaaaaagggaaaaaaaaaagggggaattcgg

SEQ ID NO: 13076 - DNA, 487 bp, Oryza sativa
  Clone ID: uC-osflcyp173g06a1
aagtcacaaggttgtaagtaacattagatgaatgaagatgtacatttttcatgtttttggacagatatgcttagattctgccttttacggatacatccatgctattttgcaagccatgtaactgatttataattaatgcagcctctccggtggttccatgacgatcatcgcattactcgttatcatcatcagccaggtcgaactgcttgagcagcgcgccgcagatgggcagtgggatgtccttgaggtagccgagtgggttggctaagcgcaggttgtcacagatgccgacattcctggtgagcaaaacacgggcacgatccctttcggcctcgatttcagagcagtttgcaagggggctgtggacgaggacaacctcgcagatgtcctcctcatggctgtccttgagctcaatcttgtatgtcccggtctcatcagtcacaccgtcaatcgcacgctcgaccttgcggtgccaagtgcttgcact

SEQ ID NO: 13077 - DNA, 423 bp, Oryza sativa
  Clone ID: uC-osflcyp173g07a1
tttgtttttcccatacaataatttagtgaccatacaatactttgtatagataatctttctgataggaagagcattgctacagaccaaaggatgaactgccccgaaagggcatagcatgagtacaacagacccattatatataacgttaaataacaaatacataaatgaccgtcttcccattttactgccaaatgatgccttcgaaggctcatagatgaaggaagggttatattggcctcagtcctcagaagtacttttccatgaacccgagttaaatataatagaggtgaccaacatcagttaaaagaaacacatgtagtagagggaataaactttatgcaatgtaaattatgaagtaatgctcacggaatcagtgtcagctaaaaaaatgtgtggttatgtattaatgtgatctaaattaga

SEQ ID NO: 13078 - DNA, 412 bp, Oryza sativa
  Clone ID: uC-osflcyp173g08a1
ttgtttttagtaaaaaggtaaactcttcataataatattattaagacattatagctgatgtcttttgatcacactgcgatcaaattatgcatcataggcagtacaactccgcgtcaggaaaaagtagaggagatatatttcttgttattacttaatacagcattcacatatatcgaaccatccggtacgtacgtagtagtactccacgcgttcacatcgatgatcggggacgatatcctcaggtagtacttatgcaaaagcgttggcgtaaactgacgaactgaacggacggacggtcggatttagggctcccataagtccaagttgccggagacgaagtcgtagtggccgccgacgagcttgagggtgccgttggcgatccccttcttgacgaacgggtaggtcttgaggt

SEQ ID NO: 13079 - DNA, 503 bp, Oryza sativa
  Clone ID: uC-osflcyp173g09a1
gacactatagaagtactttcgagcgtggattggcccccgtcctaaggttggattctttttagggggcggcctttttttttttgttttttttttttttttggatacatcaactgtgcgcggtggacttgtgaacatggacagtgagaatcgaagatcattatggagaagaagaggaagaagaagaagagagacacagagaagaattcaccaatttaccctttttaccacccaaatgtgagctatactgctctacgttattagttgaccttggtgcagactcgccggatcttggcgttggagccggcggccgttttgacgccgacgcggccgagcttggtgatggcggtgaccaaggcgtttaagaaggcggtctggttggcggcgaaagagttgacggtggcgcgcgagcggtggtcggcgaagagcacctggtcggaggcgaggaggcccttgagctgctgcagcgtctggaagtagccattgttgaacttgttgggcgagac

SEQ ID NO: 13080 - DNA, 439 bp, Oryza sativa
  Clone ID: uC-osflcyp173g11a1
tttggtatatttttattttttgggtttgatctcattgtttgtttttcttttctctttttcaattgcaaggtttgtcgcaaatgcttgtgaaatccagtgatcaagggtgccatgcatgcaacataaaaagcccaagatgaggattgaaacattgaagcactggaccaaaccagatccagtgaaaggcattagttgcctccttgatcggctcaagcggagcggacacattatgctgcgacaggcctgtacaaaaccgacctattgacgccttttttctcacatactgcccctagccttacagagaaggactacccacatgatgcctgacaaaacatgctgagctaaataacggtcccggaacccgtgtaagagcattttctctgcagccagcaggggatgaacagacaggaccaggcggaagcaagggcggctaacccat

SEQ ID NO: 13081 - DNA, 519 bp, Oryza sativa
  Clone ID: uC-osflcyp173g12a1
ttgtttttagactaacagtagctcatatattactgcaaaacacgacaactgggagcgattccagaagacgagaaattaacagaactcaaggttgatatataccattattacaaaatcaggagactttttcaatctaaggttttagggacaaactgatcattgcttgaagaaatacattgtttggtgccttagttggccttaaatcagttcagccaaaatcagaaaaagatagcaagttggaactgcagaacagaggaaaccagcagcaggcatttgtccatcttgattattttcagtgtacagatgggtgcctaacacgtctctcaagaaactaccatgaacttaaaataaatcgaagtagacaactgtttccttggccatgattatcaggagaatcttgaagtatatgaaaacccacttcctggtgatatcgtgatggacatagtccagaaggatctccttgtagaacatgtagacttgatggaaaactgatgcgaccagaaaagacgtactgatgct

SEQ ID NO: 13082 - DNA, 449 bp, Oryza sativa
  Clone ID: uC-osflcyp173h01a1
ttttgttttttttttttttttggtttttttttttttttttttttttttttttttttttttttttttttttttttttttaaacaaaaactggcaaaacagcggcgggggggggccagaaaatttaatttccacccaaaaccaaggggggggcaatccccgggggggggaaaaaaatctattcccaaggggaaaaaccccggataaaaccggggccaaaataccgggttaccccgggtccccctttttgggccccaggggggggaaaaacgccaaaaaaatgggaaagaaaaaaggggccaaccggggggtggtgggcacaaaagccccttttttggggggcccccccttttccggggatatcccctggggggggccaatttgcttttttttttttacccctgtaaaagccggctttccttttaaaacggggccccccggggccttttttt

SEQ ID NO: 13083 - DNA, 523 bp, Oryza sativa
  unsure (1)..(523): unsure at all n locations
  Clone ID: uC-osflcyp173h02a1
tttggtttttttattttttggggttttttttttttttttttttttttattttttttttttttntntgggaggagaaaaacttcctttaattccaaagtgcttttcaaattttaaaaaaagggggccccctggaagttttggggaatgccacacgcaacccttgggtttatgcaagcttttggggggccttgaaattgccccttgacccggcaaagaataacctaatttattccccccggtggggaaaaaccccccctatggggaaaataccctgggggcccaaaggaccaggggtttacaaaaaaatctgcccgaatggggcccccccaaggtggatgggtttttaaaacaaaccctggctggtggggaaaccccggaaaccctgccaaggttggggggttttttttccccggttggctaggggcgaaccccctaacatttggtaaggggggggggggtttttcgggcccagttgttttgttttaaaaaaggggtggattgcccccccccccccccccttttt

SEQ ID NO: 13084 - DNA, 360 bp, Oryza sativa
  Clone ID: uC-osflcyp173h03a1
tttggttttttttttttttttggttttttatttttttttttttttttttgttttttttttttttttttattaagtggaataaaaacaaaagtccggggttttgggcctaaaacagaaaaaagggggggccctttagggcaagacaaccaagcttgggggggaaaaaaaaagaaagcctgtgaagagcacctggggggggggttttatggtgacatggggaaaaaatggaatgaacccgggggggaattacaaaaaatgtctttaaaatccgcccccaaacccagggatcagggcttaaggaaataacaccccccaggggggaagtttcaaaatcaaaaacatgtacggacgtggagggct

SEQ ID NO: 13085 - DNA, 431 bp, Oryza sativa
  Clone ID: uC-osflcyp173h04a1
tttggttttttttttttttttgtttttttttttttttttttttttttttaaacaagctaattttataattaattcacaacaccatatttcattgatcaggttcagaacctgcacagaaatacacactaccggtacagatctcaccttttttccaatactgggacatccatccacgcgggccacacgaatacgtacatttatacgggacacgtacgtacatttactgcaccgggtacacacacgcacacttttttgcagagacccgcattggcgtcaacctagctagcttagctgaaggcgatgcgtctccatggcagcacggcggggggggcgctcacttgccggggacaaaattggtggcgtaggcccaggcgttgttgttgacggggtcggcgaggtggtccgcgaggttcttgagggggcccttgccg

SEQ ID NO: 13086 - DNA, 505 bp, Oryza sativa
  Clone ID: uC-osflcyp173h05a1
tttgtttttttttttttttttgttttttttttttttttttttttttttttttttttttttttttttttttttttttttttttttttttttttttttttttttttttaggaaaaaaaaggaaaaaagcccccttttttttaaaaaatttaaaaaaaaatttttaaaatggcccaaaagggggtaaaaaaaaaaaaaagggggggaaaaaacaaaaaaaaaaaattttaaaaaaaggaaaacccccaatttaaaggggggaaaagggaaacggaaaaaaaaaatcaaacccaaatttttttaaaggggggggtcaaaaagggggggaaaaaatttcaaattggaaggtttgagggttttaaacccttgggaccctaaaaggggggccggggaaaaaaaaaggtggagttttttggggagaaaaacaattttgtaaacggtaaaaataatttttgggggggttaaaaaccctctcggtattaagggaatttttataaaaccgggtctt

SEQ ID NO: 13087 - DNA, 451 bp, Oryza sativa
  Clone ID: uC-osflcyp173h07a1
tttgttttttttttttttttggttttttttttttttttttttttttttttttttttttttttttttttttttttttttttttttttttttgggggccccaaaaaaaaaaaggcctttaacaacccaccccacccgtttggaaaatggtacacactggcctttggggcagacttttaatttggggaaataaggggagggcttatccccctgggggggggccccgccaaaaaaaaaaaaggggaaaaagaaaaaaaaaggggggtgaaacaaaaaaaaatttgggggggggttggggggaattacagtttaaattgggcattttttaaaaatggggaagaccgtttaaaatgacccccattggccccggaacatacccctggacatagggggaaaaaacggaaaaaaaaaaaaacttttttacttgacccttttaggatcctgaaggaaacgg

SEQ ID NO: 13088 - DNA, 431 bp, Oryza sativa
  Clone ID: uC-osflcyp173h08a1
tttgttttttttttttttttggtttttttttttttttttttttttttttttttttttttttttttgggaagaagaaaaactactattaattccaagggtctatacaaaaataagaaaaaggggccgccctggaaggtctggggaatgcatcatgcaatcctggggtctatgcaagcttttgaaggaccttaaaattaccccatgacccggcaaagaataacttaattcattacccccggtggcaaaataccccctctatatggaaaatcccccgggggaccaagggaacaggggtttacaaaaaaacatgccgaatgggggctcctccaaggtgcatggctttttaaaacaaacactgcctggggggaaaacccaggaaaccctgcaaaggttgggggggtttttttcccctggctgcccagggcagaact

SEQ ID NO: 13089 - DNA, 386 bp, Oryza sativa
  Clone ID: uC-osflcyp173h09a1
gcggagtccggcaagatcaccttcccgtcctcgctcaagcagccagggccaagggagttcccaatgcaatgtttcattaagcggaataagaagaactctacgttctacctctaccttggtttgacaaatgcaactgtggataaagggaagttcctcatggctgctagaaggtttagacgtggtccccataccgagtacatcgtatcccttgatgctgatgacctttcacaaggaagcaatgcatacatggggaaactgagatctgatttttgggggacaaacttcaaaatatatgatagcaagccaccatatgatggcgctaaagcatcaagtagtcgatccagtcggcgttttggaagtagaaggataagtccccaagtgtcagc

SEQ ID NO: 13090 - DNA, 360 bp, Oryza sativa
  Clone ID: uC-osflcyp173h10a1
ttgggttttttatttttttggggttttttattcattcttttccttggtagaacaagctgatttgataaataaatcacaacaccataatctatgggtccggtctagaaccggcacgaaaaaacccactgccggtacagggctgaccctcatggcaaaactagggcatacacccaggcgggccacacggatcctcccatctatacgggccacggacgaacatcaaggggaccggggacacacacggacactttattggagagacccgcatggccgctaacctagctaggttagctggaggcgatgcgatggcatggcagcacggagggggcggtccatacttgccggggacaaaagtggggg

SEQ ID NO: 13091 - DNA, 433 bp, Oryza sativa
  Clone ID: uC-osflcyp173h11a1
ttggttttttaacaaactggggacttaatttttaaagattccacaaagaaggttcacataaacaacacatgtcacagtatagaaagcttcaagcaaaccctgcataagcgaaaagcaaaagtttaccacaaccagacacacaaactgaaaaaaagaagcccacacggacagaccaaaggatagcagcaaaaaacaagcggggcccaggcaccaggcaagaaccctgaacccccctagaaccccccacccctcaacaccctagtaaccaacccccgaactaagagccgacctccccatagcccttctccagcgcggccaggacctcgcgggccctggagaattccccacctgcatgccctaaaccaccaaccaatggaccaaggggcgcttggagaaaacgaggtcgaactcgatgccgatgcggaagaacacc

SEQ ID NO: 13092 - DNA, 357 bp, Oryza sativa
  Clone ID: uC-osflcyp173h12a1
ttggtttttttattttttggggttttaacattaagaacttttcttgaaaattttgttatttgtttcgtaaaaaaaaaaaagcaaacgagacggagcggacttccacccttttttcactcggggcttaaaacgaagttacactgccaaataacccgggaaaaaaagggaaaagaaaaaaggggaggggggtatttaacaccgggaccctctaaacctaaaggcagggggttgggaacaaaaaatggggttattggaattaggggggggaggacggccccggcccaatatccgggggccccccggggatatgggcctggcccctgcgggtggaccccctggggggggtttccccgggct

SEQ ID NO: 13093 - DNA, 313 bp, Oryza sativa
  Clone ID: uC-osflcyp174a01a1
tttggttttttttttttttttttttttttttttttttttttttttttttttttttttttttttttaattttaatttttaaaaaaataaaaaaaaaaaaaaaaaaaaaaaaaaaaaaaaaaaaaaaaaaaaaaaaaaaaaaaaaaaaaaaaaaaaaaaaaaaaaaaaaaggaaaaaaaaaaaaaaaatggaaaaaaaaaaaaaaaaaagaatataaaaaataaagaggaaaaaggagaaatatttttcaaaaaaaaaagttaaaaatatatggggaaaatatatatatatgagaaaataaggtaaattgaaaaa

SEQ ID NO: 13094 - DNA, 386 bp, Oryza sativa
  Clone ID: uC-osflcyp174a03a1
ttttggtttttttttttttggtgtttttttttttttttttttttttttttttttgttcgaaatttacgcaaaacatatacttttttattattcaatgagaaaagcaatgagcgcaatggtgctttcttatcacgtggggggggaacgccaagaaacaaagggcaggggacaaaggggaaaaaaaagggttccgccaaagggggcaacgaaggggaccccaaagggaacggaaaaaccgctcgaccagggggaagggatcaagcagcgaccaagcaacggccccctccacgggggcaacacccattatagcccttagcagcgaaaggaggtgcctgtggaaggattccaccctaaaaaaaaacaacaaggggggggggggaggaaag

SEQ ID NO: 13095 - DNA, 366 bp, Oryza sativa
  Clone ID: uC-osflcyp174a04a1
ttttgtttttttttttttttttgtttttttttttttttttttttttttactttttaagaatttgaaatttagcgaataccattaattttttgaagggcggaaaatacatggagaaaaaacagcggaatgggaatacgggcgcaacattgaggaataaacccccccccaagactttatgggaagggaattttcttggtgaaaaaaaaacatggacattggaagggaccaaaaaagggaaattaaagatcaaaacacggagatcgaacaaggggctcggggggggaacgagccccccttttgcagggaaaaaagcaagaaaaatttttcaaagaaaaaaacgggctggatggcaaacgggttcgggct

SEQ ID NO: 13096 - DNA, 438 bp, Oryza sativa
  Clone ID: uC-osflcyp174a05a1
ttttggttttttttttttttttgttttctccacgggccagaccacaacattcctgttacatgaacagaacggagtacagccaaaccgccaaatgttttggaaaacttggtactactagcaatgtagcaattgcatatttgcatagacacaatggtgtttttgaaagcagcacacgtttggtcgtaatcgccaaatcaggggaatcacgccgtccatcatcaccgtcagttggggatcaacccaagtgccttgccgtacgcgacgaggtcgtcgtacatttcgtccaggttcttgtacttgaactcgaacccttcgccgatgagcttcgccgacaagagcgagatggtcggcttctaggggtgatgctcttcgatgcaatcgcatctgacgttgtactgggggtacttggcagccaggaagccggcgatctcggtgacc

SEQ ID NO: 13097 - DNA, 500 bp, Oryza sativa
  Clone ID: uC-osflcyp174a06a1
ttttgtttttttttttttttttttggggctcaaaacgaacaagccgatcaatcttattactgctaaattcagagcacaaaagatagcctggattttagactacttaatcatgcgacagtgcacacgcttgtctgtatacaaatctccattattactttaaaacttatacaagtcatgtaaaacctgcaagtacacataaatgtcaccatactcatctcacatcaatacaacataagttcactctgttgcatctcacatcagcttctcaccagactcatcgacactgttatcaacttaaaagacaacagattttgtgagggcagatggacaggtaattgcattctaccccagctagataacctagatttttttccatatagagaacctcatatcttagaaccaatatataggatgcagtctcggttgctcactgatcatgatcaaagctgcactttgcggtcataaacccagctgaaaggaataacaggcgcttgcttagc

SEQ ID NO: 13098 - DNA, 494 bp, Oryza sativa
  Clone ID: uC-osflcyp174a07a1
tttgttttttttttttaggtataaacagatttatgtgtagattgcatcaagcccacatgggagggatagattacaattacaacctacacatccaccaaaaaaaggcaatgaagatacaccaatacaggcacaactgctcttcatgattgactggtccctaactctaagacgcctacagcatttcctcggtaacacaggggtaacatgtacatcatcactgaagctacaacagtatttcacagtaccagctactatgtttttgttacccacgtccatcaccacttatcatcaagaagctacctcctatcaagggttgatcacatttcactttccttttcgcttcttttggaatccaatgcaacttgggcaataccacttccccttcggatgctctttcacgccgacgcacccaaagtgataccattcgatcttgcaatcattattgtcgcatgcgaccatctctccgtagctgacttggttgcagaggcaatatg

SEQ ID NO: 13099 - DNA, 491 bp, Oryza sativa
  Clone ID: uC-osflcyp174a08a1
aacaaaagccatactctctgtattaaagatccaacaggttcagagaacacgcaagctcagaactacacatcaccaaaattggagcaagtttgggggtacatatccgctcatacagtggaggatttatttctcgattctacgagctttttaactagagttcgaccgggaagtcaattacggatagaaatgagcatcctgtcttcacaaaacccatgcacacaacagtgggcatgaaccgcatgatattcaccatcaagtttagtagggctccacgggtgcgcggaacttggcaccagcgtagacagcagccgcaccaagctcctcctcaatcctaagaagctggttgtatttggcaaggcgctctgatcggcagggtgctccagtcttgatctgacccgtggccaaaccaacagccaaatcagcaatgaaggtatcctcagtctcaccactcctgtggctggtcatcacaccccagccagcacgctttgaca

SEQ ID NO: 13100 - DNA, 450 bp, Oryza sativa
  unsure (1)..(450): unsure at all n locations
  Clone ID: uC-osflcyp174a09a1
gggatgaaagcagaggtagattatattaagaagcctggcacgcatgaggagatggagcaggagtacatgatgagatcaccatgatgatagatgatccatccaagctagctagggatccatccaacattgatcgacacacgcacacactgacaacgacgacgacggttttatttaggcgtcagagcaaaaggcaaggcctgcctacatataagctgggtactaatgcaagcaaattaaggcctcgatcaaagctctgatcgacagtagcagcatccatacgataaatcctcatgcagccgggcgacgacgacgatagattcagttgcaggagcagcaggagcagccgctgcagctggtgccacacttgcaggtgttgcagccgcagccgccgttctcgccgctctccaccgccatctncattcctccagagctcgccttgttggatggagc

SEQ ID NO: 13101 - DNA, 442 bp, Oryza sativa
  Clone ID: uC-osflcyp174a11a1
tttgtttttttttttttttttgtttgttttttttttggaacagctgaaatactgagttgccttacattatatgctacgaatataattaaaatgttcaccgcaaaagaatgtaattggaatatatccgtataaataacatcccatagtatgggtaacaacgacccctaaaacaaatgactaaaataacgggtgtcacaaaagaagaaaaaaattcacaatttacgctgctgggctggttttttcgcaggcaaaataaggcttaacagttccatcgtattagcagttagcgccagcactgaagtagctaataaacaggggcataacttaaataaaaaaggttttcatttacacaaaaagaagatcccattttagccccccttaggtatttacacaagggggggtagaccttgattgattgaagtttatcttccgaacggggccg

SEQ ID NO: 13102 - DNA, 302 bp, Oryza sativa
  Clone ID: uC-osflcyp174a12a1
ttttgttttttttttttttttttttttttggaaaaccgttaaaaatatttttgatgcaaaccagttcgggctagtaacagtattacagggtgcctgatagtagcacatttcaggctttatttaattatttttttatcactctctggacactgaacagggaacactatactaccacaagaggcagcagctcacacagtgaaaaccgaaaagatgttacgggggtttatggtacgagtgtaagtggcgtgaaatccacttgtaggctaaaataaaccgcaaatccacttataaattaaaataag

SEQ ID NO: 13103 - DNA, 524 bp, Oryza sativa
  Clone ID: uC-osflcyp174b01a1
gaagataaacgagcttcattgatatggaaatacatatacatatgtactcaaactttagaaaaataaaatgtaagaaactatctagatgaaggttcaccaactatactttttcccacaaatattatatacgtaatatactcaaaatcgtctggatatatacctctgcagcaacatgcagacatggcatacggaatgctttattttgttgatgacatatttcacaaaataaccatagaaaattaattattggcttccccaaatgcagacttgatctctcttttgaaaaaaaaggaatcatagagaggttaagaattatttcaaaaaaacacacacacaaccatatattcgaaatcgtgttcacatatagctccacaacaatgttttggaaggacacatgtatgccttattttaccactggcttattaccacaaaataaccacaagaaattaattgtttgcttgcttacgcgtagcgtgtctttttcaagacaaaattattttaaggttaatattatcatgcaccca

SEQ ID NO: 13104 - DNA, 388 bp, Oryza sativa
  Clone ID: uC-osflcyp174b02a1
aaaaaaccccctattatttttaaggaaatgaatttcacggtgacaatcccttaaaaccgaaagcggcaaaaaatttaaaatcaaaattttttgaaccaaaattgaaaaccccatcatgggcccaggggggggagcaaaccccaaaaaccggtagactttttggtcactccaaaaacctagctttattttttaaaataaaaaaacatttttttcccccccctgggggcaaagggggctagacaaccgaagaattccatgccggcttaagccacttggatcttttatttgaaaagaggggtggccttccaaatataggggaaaacccctttggccacaagcttttgggcaaaatcgggggggacaccgggggggaaggggcccctgaggg

SEQ ID NO: 13105 - DNA, 395 bp, Oryza sativa
  Clone ID: uC-osflcyp174b03a1
ttttgttttttttttttttttttttttttttttttttttttttttttttttttttttttttttttttttttatttttttttttaaaaaaaaaaataaaaaaaaaaaaagggaaaaaaaaaaaaaaaaagaaaaaaaaaaaggccaaaaaaaaaaaaaaagggaaaaaaaaaaagggaaaaaaaaaaaaaaaaggggaaaacggggggccaaaaaaaaaaaaaaagggaaaagggaaaaaaaacttgggaaaaaaaaaaaaaaaaaacggggaaagaaacccgggaaaaaacccccgaagggggaaaaaaaaaaaaacccaaaaaaaattccctggggggggggaaacgggaaaaccaaattatcctcccaaaaaaaaggaaaaacccctgggggg

SEQ ID NO: 13106 - DNA, 444 bp, Oryza sativa
  Clone ID: uC-osflcyp174b04a1
ttttgtttttttttttttttttttttttttttttttttttttttttttttttttttttttttttttttttttttttttttttttttttttttttttaaacccaaaaaaaaaaaacccttaaaaaaaaaattttgggttaaaaaaaaaaaccgggagaaaaaaaaaaaaaggggtccaaaaaaatgggggggcaggggtttatttaaaccaaaggtcaggcccattggggggggccattaaaaggcaaaaaccccccccatttaaatccccccgaaaaaagggtttcaaaaacgggtggggccaaaaaaaaaaaaggggggggaaaaggggaatccccttggaaaccggggggtgaacgggcccaaaccggggggcgccgggaaatttggggttgaaggcccaaaggggggggggggggtccggggcaaacccccccaggagggg

SEQ ID NO: 13107 - DNA, 424 bp, Oryza sativa
  Clone ID: uC-osflcyp174b05a1
aaggtagacaaacatttcacacatcattactatggtatgagtaactagtacaccttaaacagcaaaattcatgcaacataaatttgtagagatgacacaaaatccatacaataggtgcaatggcactgcaggctagtaaattcaagagttgcctactcttgcaaggagatgcgtctaaagatggcctggaaagtctgacctccatttcttgcaaccttctgaccttcttcagtggcggtagacagtagcttgacaactgggtctgcttttgtctcttcctctgggatagcttcgaacagcgggtgtttctccaggcatgaccgcatccattctccgagctcctccacatctgtgattgtatatatgattcctcccactttcatcacataagcatactcatctagcagctgcatgctgatcaccc

SEQ ID NO: 13108 - DNA, 474 bp, Oryza sativa
  Clone ID: uC-osflcyp174b07a1
gtcctgaatttttgctagtatatgcatataagtagatactactccactacagtacagaggagaggattgacattgactagctagtccacttaaccgtctccttactactatcagaagaagctaatttaattaagtggagtaaaagcaaaatgaggggtgggctgggctcattggtcgtcgttgtcgtcggtgacgaacttgccggttccggggttgatggcggcgaagaagaagaagaggatgttgaagaggaggagcggctcgatctcgttgatggggacgccggtctcgatgttgagctgcgccagcgcgcccttcccggtgatgatctcgccgatgagggagaaggcgatccccagctgcgcgaggcgacccacgaagagctcgttcgccttggtgaacccgaacagcgggccaccctcgctgagccccagcgccgcgcggaacccctttcccggggggatcacggcgcgc

SEQ ID NO: 13109 - DNA, 515 bp, Oryza sativa
  unsure (1)..(515): unsure at all n locations
  Clone ID: uC-osflcyp174b08a1
agaagggaagggaccataaccagcaataggcatagctgcacaatgtcgaagtctggaaacttactaacaccacaccacatactaaacagcagtccattaaacctaacttaaaagctaaaagggtttggttaaaggatactcctaccagcagataatccatgacacaggcagcatgccaagggcaggtacataggttccatacatgttcctaattatgagaagcaaaagtactagtagttcccccaggccgatcaccggatttctcaacgtcggcgagcatttgatcgagaggcggcacgatcagcagaaaaacatggagctcctcactttctcatggaggcgaggcagctcaggcaccggtacacttccgacagacgtatgacctccttggctggacgacgcgtccgacatatcttcgaacttgaggaatgtgcccacctgagcagcagcaagatgggcatnagcaaatcgagcaacaactgatatggctgttgtgcttctctgatacacataag

SEQ ID NO: 13110 - DNA, 530 bp, Oryza sativa
  Clone ID: uC-osflcyp174b09a1
tttgttttttttatcgaagccgtttcgtttgcttttattccattcgattcgattcaattcgttcatctcaacatgcacatcgtccaagctaactccttaccggaatactctctatagaaagtagaaaccaactttggattcctttctgctgcccctcaggccctcgcatacataaaaagaaacagccttttctagagagcgtcgttgccttgttcaaaggttgcaccaatgccgctctacaagactacaactcatccttgaaatttgtaccggaactcctctcccccctcaaattagttgaagctgtgctctgatccttctctgttttcgttgctgacgaatccggccgcttcagtttgaaagggatgctagcgtgcttcttgataaacttgtacatctccaccaccgtacggtccccctcaaaagtaataggctcaaaacttttctttcctgctggataaaagaggatcgttgggaatccatcaagctttgcacgtggatgctcattggcagtgccatccattttagct

SEQ ID NO: 13111 - DNA, 451 bp, Oryza sativa
  Clone ID: uC-osflcyp174b10a1
tttgtttttttttttttttttttttttttttttttttttttttttttttttttttttttttttttttttttttttttttttttgggaaaccctttcgaaaacatgttttatcggagggggggcccccccccccccgggggcccagggggttacaaaccctaattaagctgggcttaagcaaaaaaggaaggcgcctggtcctagctccaggctacaagacggtacggtggccccgcccccgggtggtaacccggggggtcaagggggcccttgaattgggcgcccttcctccgggtaagcccctccgggaacccgaccttaaaccgggtccctaaggttcccgggggggcgggcttgggggcgaatggaaagcccttcggcgggacccccaagttggacccgggggaccccacgggggccccggagcacctcgccctggggcccgggggga

SEQ ID NO: 13112 - DNA, 496 bp, Oryza sativa
  unsure (1)..(496): unsure at all n locations
  Clone ID: uC-osflcyp174b11a1
caatgcacagctgcactggaactgctctttctttctcaaccaaaagataaaaggtttggtagccactgccagatggcccagatcacattagcaaatatttatctttacatcaacacgaggcacagccgacagaattcaggccagcgcacatgctgacgttaattagcatttcactagctccacacccaaaacacactaatggaaattctgctactacatccagatacatgatgatggtcaagcatttcataaaagaaaaaggaaacttgagctcaagaatcactctgatgatacccccaacatctttgctatcaatatccanataatgagggtgtctactgtttgctctatgaaaactgagctgcatcagaaaaaccaagctctccaagctagcagaaagcttgcagaaggcaaagaaccaaggccataattctctgcattctcagtcaaacagagtaattgatagtcaacatagcttgtatagattctacttgta

SEQ ID NO: 13113 - DNA, 372 bp, Oryza sativa
  Clone ID: uC-osflcyp174b12a1
tttgttttaacaaaacagagaaactagtctcaaaatcccacagataacttcttatggagatgttcaggtaaaaacagattgataaatccttgagataagatccggtaacgctgctactcaaaacttaaaacaagacaacgctcactgcgtcactccgagccacttcgagaagttgtcgaactcagcatagtcactgtctgagatcatggtcttgtaccatgcctttcctgcagccttaaccttagcagcctcctccgggctaagcttggtcctcttggagtcaagcttctccttcctggccttgatgcgggcagcctcagcaagggtggccatcttgcgtgcagtgccgaagttggggttgagcttgagcac

SEQ ID NO: 13114 - DNA, 467 bp, Oryza sativa
  Clone ID: uC-osflcyp174c01a1
gcatgccttccaagttgaaggcttttaaacagctgttgggtatcttggatttgtggagcagaattatcccgctgcaaatgatcattgatcagacacctcatttttcatctatatctacatattttgctaaattaactagcatccagatatcaaaagacatgttcacattgccagcaccactgctgtaccagtatacatgcatgtaccaggtaaaacttttctctgcagaatcttgcaccaaaacgaaccaacacatgttgtatctaactatagtatcaacggtaatcggcgttcatcggtttggaacctgaggcaagtatcagatttgcaagagggaacagggcaacaggctgccaccggcatggccactgccattaaacagcattggtaggattgagtggctttcctcgccccatggtaaatcctcttgtgccatctggcatacgaggacccaggggtggctttga

SEQ ID NO: 13115 - DNA, 518 bp, Oryza sativa
  Clone ID: uC-osflcyp174c03a1
ttttgtttttttttttttttttttacgacaaaccacgaacttggatattaaagatgccacaaagaaggttcacataaacaacacaggtcacagcagcgaaagctacaagcaaaccctgcataatcgaaaagcaaatgtttttcaaaaccagacacacaaactgatagatagaagcccacacggacagatcataggatagcagcggtaatcaagcattgccaaggcaccaggcaagaaccctgaacctttctagtactcgtcaccctcatcaccctcgtcaccatcgtcgaactcggagccgacctcctcgtagtccttctccagcgcggcgaggtcctcgcgggcctcggagaactccccctcctccatgccctcgccgacgtaccagtggacgaaggcgcgcttggagtacatgaggtcgaacttgatgtcgatgcgggagaacacctcgacgacgctggtggagttgggatcatgcacacggccctctgcaccttggccaggtctccccccgggac

SEQ ID NO: 13116 - DNA, 463 bp, Oryza sativa
  Clone ID: uC-osflcyp174c04a1
gtcgcgtcggcggcggtgagcgcgggcgccgggaagatgacggcgtcggcgccggggttgtagaaggaggcgatggacatgcggttgccgtcggggcgcgtgaggacgcggtgcatgacgctcttgtacctgccgttggtgatcacctccagctggtcgccgatgttggcgacgatggcgtggcgcatgggcggcacgtccacccactccccgtccttgagcagctggaggccgctcacctggtcgtcctggaacagcaggatgatgccaccggcgtcggtgtgggcgcggaggccgtcgacgagatcggggcgcgggcacggcgggtagctgctcaccttggtgccgaacgttgggccgttcgacccggcgaaggccttcttcaggtaacccttcttcaggcccagattctcgcacagcaggtccagcaccctctccgagagctttcgatctccgacgcaaa

SEQ ID NO: 13117 - DNA, 499 bp, Oryza sativa
  Clone ID: uC-osflcyp174c05a1
ctcgtgtaaaatataacttcgattaggatatccgtagcatttaatttcatacaatgtcatgctggtgaataacaataacaaataacaaatgacaacatgaatagcctatatctcggctatagctcaatgcttgctgaactatgtattgcctctcgtgcctactacatttgctccacagatgtgaactactaccagccaatggtcaatcgacattgcagaaataaagttacaaacaaaaacaactgctcttttctgcaacgtccaatcttattcagcagctcggtagaaatgaattgcagtatgccacatgcttatattcgatctgtttgtatgatcctatcaatccttaaggattcagtggctcatcttcatcaaccatctcttgtgcttttgtcgatgatttgtgtaggtcagaaacaaccattagccgtctctgcaggattgccgccatgaagaggaagatagaacacatgccaaacatgacagtgataggggatgc

SEQ ID NO: 13118 - DNA, 482 bp, Oryza sativa
  Clone ID: uC-osflcyp174c06a1
ttttgttttttactttttttggaacattgccgtaatctaataatcaattacatttctacaagagaacatatgtacaacttacaccccacataaccagacctcagaaaagatggatatgaacattcctatttacattcttcaagccaccagacaaatcctccaactctcactattttcttgccatttcatatgtacactcaagaatacagaataaacaggagcattagccttctcataatctatattagctgtacaacaagaacgccattgatgtcatcttgtcagccactacactggaacagcatgaaggaggctatgtcagttcaatgtatgtccctcattgatttccactgggtaaaaatggtcaaagtttccccttaagcacatggctgaaggcgtgatgttgaaatagatttcatccaattgtcaaatgaaacataaatagcagtccaatcaaacttctgttctcgatttactgcata

SEQ ID NO: 13119 - DNA, 469 bp, Oryza sativa
  Clone ID: uC-osflcyp174c07a1
aaatacgacagctactcttgtctgcgaatacaactgtagatggagtaggaattataattacggccaagagaagattttcaagtctaaaatcatgaacatctttcaggtagtcatctacttctcgtgatgctactgtaaggttcacaagattaatccccgcttgataaaacagacaaaaaaataggataggtgacacacgagtataacgctctcggtgaaaaaccggagcagagtagtagtagtaatacagcagccgtgattttatttagaagactaagtatatcaattaagagggtagttaaccttaaaccccgcaagaaacccgcgccaccctcacttggccttgccgttgacggcggtctccttgccgttggccgctgctgcggcggcggggaccttgcccttgccatcgtcctccttggcgaaggcgtcgacggggtggtcctcccgaggccggtgggggtcttga

SEQ ID NO: 13120 - DNA, 405 bp, Oryza sativa
  Clone ID: uC-osflcyp174c08a1
catcagaaatcaaccactctcaactcaggtgaacaactgacacaaaacacttaggtagttggaagaccataacatcaagaactctccttgaaaattttgtaatttgatccgcaacgattcagatgcagatgaaacactgttgattcccactcagattacacacaatacaaatacaccgacaaactgccttaaaaaccaccaaattgattcaaaagtaaaacgggtatgagggatcttcccaccgagactgactaaacctaaccacagacaattggatccactggacccagattattcaaaaacagatggctatgacggcatcgtcctcgcaaccgaagggaacttgcagctatggatatcctcacttcgcgctggcgagctgggtgcggatgagcttggcggccc

SEQ ID NO: 13121 - DNA, 225 bp, Oryza sativa
  Clone ID: uC-osflcyp174c09a1
tttgttttttttttttttttttttttttttttttttttttttttattttattttttttatttttatatattttttatttattttttttatttttaaaaaaaaaaaaataattgaaaattttgtttttttatctttatggaaagggaaaaaaaaggaaaaagggggggatttcaactcaggagggcacacagaaactaaaatcgcgcgacaaaaaagaaataaaaa

SEQ ID NO: 13122 - DNA, 424 bp, Oryza sativa
  Clone ID: uC-osflcyp174c11a1
tttgttttttttttttttggatcgagtcatatacataaaaagctatatacattatagactcgtatacaattacactgccacggtaatatctgaacaagaaaacatagccaggtagaccctggctccctggatctcaatgctgtcgtcgaaggattggccggttgaattgttgtacagggtgaaaaagacccacagatccgtgccaagctgcgtaaccgcaacggggactgcgacctttttacgtggactcgtccctgcagtggggaatatcacacgatcttttcccccgtaaagcagctcaatgtccctacatgttggctaaggccaacaagctgatgtgcacgagatccaaaagtctagcaatctaacctaagtggccagaatctgaagattcacaaagcaacacacgatgtcgaagcttttt

SEQ ID NO: 13123 - DNA, 402 bp, Oryza sativa
  Clone ID: uC-osflcyp174c12a1
tttgtttttttttttttgggggcgagtcatatacataaaaagctatatacattatagactcgaatacaattacactgccacggtaatatttgaacaagaaaacatagacaggtagaccctggctccctggatctcaatgctagccgtgaaggatatggccggttgaattgttgtacagggtgaaaaagacccacagatccgggccaagctgagtaaccgtaacggaaactgagacctttttacgtggactcacccctgcagtgtggaatattacacgattttttgccccggaaagcagataaatggccttacatgttggctaaggccaagaagctgatgggcacgagatccaaatgtctagcagtctaacgtaaggggccagacattgaagatttacaaagc

SEQ ID NO: 13124 - DNA, 488 bp, Oryza sativa
  Clone ID: uC-osflcyp174d01a1
acagcacaaaaagcctagttttactgggagtactaattttacaaacagaatgctagtccaagtccagtatattatatataatgtacactacactgctcaaacctgataaaatgtctaaattaacagcaacaaaaacaccagctcccttctgataaaaggaataacaaattctgtatggacagatctatgctgaatttgcactgctgaagtccatgagcaaccacacctaggtgcattattacccacattttctatgttacaggaaggggctaggttaagcaacacaagggcttcacacctttactgtacaaaacattcataacaataagagcctttggcgctgagactatccccagcactcaatgagacaaactgttgcgacaaaattctctaacctggccactaaattcccccaacagacttgtctgctcatgatgcagttgagccagcagaaagaggaccatctctcagctgctgaagacagaact

SEQ ID NO: 13125 - DNA, 410 bp, Oryza sativa
  Clone ID: uC-osflcyp174d02a1
aagcacgaataataaatatgatttaggaaacgacttaaataacagaacagtcagggagaacagactaccagactgaaacggacttcacagggggggggacatatgagttcaactgggcacaacagccctaaaaaggccattcatacttcgttggggggagaggggtgacttgatggttatttaggggataacgtcgttgggtttcgacacgtccaccagtttggctggctttagcccatggggtacttttgtgtccaggagcgagcgggggattaatacttggccctatcagtcttggacatgggagcaatttccggcaccaacggatcattggggttcgggtccgtcagcagggaacaaattgacagggggacctttgatatggtaagggcaggactccactgttcctt

SEQ ID NO: 13126 - DNA, 463 bp, Oryza sativa
  Clone ID: uC-osflcyp174d03a1
ttttgttttttttttagctccaataacttgggactgcaagagagcagacagtcctgcgagctccaataacctggtaatgaatcctgacgaacagaccaagtaccagtcaacatcgacttgttgctgttacatcctgcctaggtggtgtacattacacaagaaattcaagagagcagacagtcctgcagctcctcccttccctgctaggctgttactcctctatggtcacctgtgcttgatttcatcatctgccttgatctcagaaaccatgtctgtcttcctgggaggattgctacagtccctgtctctgctcttccgggcggcctgatccgggccatcttggggatgatacttctgctcggcaagaaacgagagcgccgcgacgacgtcgctgatcatcggcctgttgctggcatcctcctgcaagcacatggaggcgatcgcgagagcttggtaagcccct

SEQ ID NO: 13127 - DNA, 390 bp, Oryza sativa
  Clone ID: uC-osflcyp174d04a1
ttttgtttttttttttttttttttttttttttttttttttttttttttttttttttttttttttaataatttttatattaattttttttaatagataaattattatttaacaaaaaaaagaagaagggaaaaaaaaaaaaagggggcccaaaaaaaaagggagtcaaaaatgcggaaaaaaaaaaaaaaacgcccttccttgctaggcaaaaaaaaagggaaaaaaacccccccatggggaaaaaccccaaaaggaaagggggagccaccccaaattttatggaaagggggcgacaaaatttaaaattgccctgcaaaaaagggggggcaaaaaaaacccgggggaaaaaaatttaattccaaaagaaacgttggggaagggaccacccc

SEQ ID NO: 13128 - DNA, 395 bp, Oryza sativa
  Clone ID: uC-osflcyp174d05a1
gcacggacaattgcaacttgcaagcaccaagtaaaataccaaaaatagtttgcatcatacagcacaacaatttacagaagaaactacaagcaaggttaagtagacaacttacaggaacttacacaacttacgcttaaaatctaacataattggtacaaataaaaacaaaaaaaaagagggtgacacataggtataagtaatccccttctcgcaacttagaccattacccttgtggtttagagaatgggaccttacaagtaaaagtgatgtgattgtaggggtcggatattcatattgggttcatcttttgctcagttccgatttttgctcttgtcagtggctcttggagcaaggcccactgcatctgaccccttcataatcctcagcctcctaca

SEQ ID NO: 13129 - DNA, 483 bp, Oryza sativa
  Clone ID: uC-osflcyp174d07a1
tcgcgatctagaacgtgagcggcagcaagtgttcactgcgttcttcttctcgatttatctttcttggtttcttgatctgtagcttattagcggccatgtgcggcggagcaatcatctccgggttcatcccgccgtcggccgctgcggcggcggcggctgcggcggccaagaagcagcagggcaggagggtcacggccgacgtgctgtggccggggatgctgcggaaggggaaggcggcggcggcggaggaggactttgaggccgacttccgcgagttcgagcgtggcatgagcgacgacgaggcggaggggggcggcggctaggaggaggaggacgacgacgacgtggtcgtggtggtccccccgccggcggcggcgaggttcgtcgtccgtgccgcggccaaggcggcgcccccaactgcagatgggatgttgactacaaagcttggccaacatgatggacctactgctagatcagcaaagc

SEQ ID NO: 13130 - DNA, 430 bp, Oryza sativa
  Clone ID: uC-osflcyp174d08a1
tttgttttttttttttttttttttttttttttccgagaaccaccgtatatatgctggtaattaaatgacttcgaacagaagtttatagccacaagagcctacgaagaattccaatttacttcaagaagatcttttgcatgaccctccttagggcccattcatccgtaagaattgaaccatgagaagcattattgagcttgatcgacttgaatcgccccttttgtccgggctgccgacgcatttcctcgtcgaacgccaacatgctaaccaggtggatggaatcatttccgtcaccatacactatttctggcggttcatcggcgaagttaccatcccagtatacgaattgccggggggtcctcttccccactgcattgatgcacgtcagcggcaccatgggcgcctcgatgtagtttatctcggcgatcgt

SEQ ID NO: 13131 - DNA, 499 bp, Oryza sativa
  Clone ID: uC-osflcyp174d09a1
caataatcaatagtatgatcatatatatgcatcatagcgtgacatgcgatcgacttttacatgggtaaaaggggaggaaaaaaaaaagaagaaaaacaaatcaacctcagattacaattgcatcccgtgatgctgtcgctagtgtacacttaaaattacacagaatgacgtcgcctatcattctctccttccattagcctttcctctccagaacccaattcaatctgcaacgaagctcagggagatggtgaaccaaccatgcagggacgcacgcctaaacaaactgtgcatatacatccactgactagttctggccatcatcatcttcatcttcatcttcatctcgccaagaaatacgacaagaattgaaaagaggctattggcaatgcagctactatgatccactctcactttggttactgaatggcaacctgtctactcccctctaaatggcgtctctccacaaccgataccggataccaagcttgtcatatgatac

SEQ ID NO: 13132 - DNA, 477 bp, Oryza sativa
  Clone ID: uC-osflcyp174d10a1
tttgttttttttttttttttttttttttttttttttttttttttttttttttgttaacccacacaacccaaaccatccgggctgctaaaaatccaagggaaaacaagggccggtactttaaatgaccggtccagggtctccgccaaacgtatgctaagcagaaacataatctgaaactaaattccaatggggggcaaaaataaggggtagtccaagggggctactcccgccccaagccaaacaaggggattggggaccctatccttccctgggaacccccggtaaacagcttcctgggctgattggagccctctcgtctttgatcgaggccgcagtgttaagcagcaagccccccaaggggaccagcggatggggtggggaaggaccgccacggctgaaccgggggcgggggtggctccggttgcgacaggaacaccggcggagggggttggacccaggggatgtggcggctagggc

SEQ ID NO: 13133 - DNA, 509 bp, Oryza sativa
  Clone ID: uC-osflcyp174d11a1
ggcggcggcggcagagggaggtggcggcgaggacgagcggcgggcgcgggcgctgtcgtcgtcgtcgtcgtcgctgcggcagcgcgcgatgagcgcgtcgtcgaagctgctccggacgtcgctgagcaggagcagcaagggggcggcggcgcggcagcggagcagcaaggtgatgtcggtgtcgatcgaggacgtgcgcgacgcggaggagatgaagtcggtggacgcgttccggcagacgctggtgctggaggagctcctcccggcgcgccacgacgactaccacatgatgctccgcttcctccgcgcccgcaagttcgacatcgacaagagcaagcagatgtggagcgacatgctgcaatggcgcaaggagttcggatctgacaccatcctcgacgacttccagttcgaggagatggaccaggtgctcgagcactacccgcagggccaccatggcgtcgaccgcgacggctcgcccgtctacatcgagaagcttggggcgatcgaca

SEQ ID NO: 13134 - DNA, 520 bp, Oryza sativa
  Clone ID: uC-osflcyp174d12a1
gatccgtaattccgtatgctggaaaaacattcatgagactgcataacaatgccaagagtgttttgttgctgaattacactatggactaaaaaggacagatacttatacagaaagtagccatggccagtctttgatcaaaggagatgatgaacaatgttttaaaaaccatggcagatgaaattactcagatactatatctcttcttgccaacagaacatctctctttctgatacggtgaccacatagcataatccagctaaaacttattctgatactttgcaactgaatcatcaaccttgagcaactgggcagaacccatgcataattgcagcagaccaaactttgtccatatcaagcaccttgtcaccacattcatgctcattccatccctccaacgcatgaagaattcccgcgattcgccatgcgctcataaccctccttggcagccaattctcgcatgaatgcacattcttgagcgtttttggtacagccattgcaggagttgcgagtagcttgagct

SEQ ID NO: 13135 - DNA, 466 bp, Oryza sativa
  Clone ID: uC-osflcyp174e01a1
acactgaaatgtagtgcctcgttaaataaagtgctcatcaatcctcattatacaagaagattggatggatgtcatgaaacagaaaaggggcataacccttgatattgtacataatgctttttcattattacaataaataaataatttaggagagtatggtgactgtactactaactaaatctcttgacacaatcacactgttctcagggagagggaaaaaagagctaatacattttttatcaacagttaagctcactcttgctggaatggatgtaatcttcgggtgatccgagtaaccatattaacaaataacgttcaccctccgagtcaatcaagaaaccggtataccggacaaaaaatagacaagatattacacaaataataatcaatcagttaaaagggcgttatcttgatagggtttagtggtagcctttttctccagggagagtcacagactcacagttca

SEQ ID NO: 13136 - DNA, 484 bp, Oryza sativa
  Clone ID: uC-osflcyp174e03a1
agtggtaatggatcagctgcctatattatacacataattatttgtaccaatttatacaaatttacatgatatgttaataggataggtgcacagacctgagatggctataacaatcatcactgctcctgaagttctccaagcatgcccaacaaatgtgactgccacatttacactcgacatggttgcaaccatcagctttctcgattgtaaagtggcaagaagggcataccttcacattctccttccccttgcgccattcaagcagagttgcatcagggtcttccttgtattctttgtatgcctcacaggatatgaaaggatgatattcaagatgacacttgttgcagatctccacaaagcaagccccacagacaaaaggtttgctttcagcatctgcagcagccacttggtaaatggatgggcaatcaggagtaggacagaaacgatattttcctgcattagaagcaacaaatgctctcaagga

SEQ ID NO: 13137 - DNA, 501 bp, Oryza sativa
  Clone ID: uC-osflcyp174e04a1
ttttgttttaagtaaattaacatttgcaaaacttacgaacgactgggcaacataaaatatctgattgctcttatagcgagatcaaagctgtcgaaggagagacccgtttggcccagagtcgagcattgcacagataaaaaaagaaagaacggagcaaaacagagttactcacaataattaactaagaatgcatcgccatatccaaaagctgttcagatgaaagttccaaaccacaggtaaaccacagcgttcctcccccacaactctcacttaatttctaccagaagcaacgacgatacgacagatcaagccacagccaaaagagacgatggcagaaagaacatcgtgagcggcaaccatggagcagtttagtcgacctcctcgatcttggggcctgcgccgctgccgcccgccggcgcgtcctcgtccatgcctccggccatgtcggcgccggggccctggtacatcttgggcgatgatcgggtgcagatgccctccagc

SEQ ID NO: 13138 - DNA, 381 bp, Oryza sativa
  Clone ID: uC-osflcyp174e05a1
agggtgtatgtaagatctccattaagattcaccttttagttaatataatctcagcaagttacagtgtaataccattataccactactatattatcttgccgcacataaatgcggtaattcccagtcaacagttaactgctggttcagcagaaatataaaccaaagaagaacagcaaaaagtaatctctgcaattaaattagcccaaaaaggaaggaaaaaaaatcaaatattcttccccacatcaaaatgccacgcgccgctactaatttatgtacattcccgcgtttcttccgatgatgccactgcagctagtgttactgatcagcggctctacatgtttttactaattaacaagagaccgtcttgatcttttcaaggga

SEQ ID NO: 13139 - DNA, 429 bp, Oryza sativa
  Clone ID: uC-osflcyp174e06a1
tttggtttttttttttttttttttttttttttttttttttttttttttttttttttttttttccccggaaaatcagaggctcaaaattaatagggtttttaagcattttacaacttacaggggggggcaaatttacaagcccaacttttttaaagtaagctgtagggggaaagggacccatttttaacaacgggaaaaatttgggttttggaaggaaaccttttgaacaaattaatggggaaataaattgggggggtcgtttccgcccgatctaaaaaaaacgggccgtttgataccaaaagggggtttggcatccaattgaccgggatgacctttttggggatggggcttttgccggactcgggggggaccccaatggagaagggggccttgaggggggggggggtttccatcctccaaagggggccc

SEQ ID NO: 13140 - DNA, 455 bp, Oryza sativa
  Clone ID: uC-osflcyp174e07a1
aacaaaaagattagtttgaaacaaatgaaagaatacagtgtgtgttccccgtccacccagttacatacatacatcccaaggagttcatcttctccttttttcaagagaactcagaactgcttggtacaaaccagtactagttacatgatcagtagcaatggcgttgaattgcaggtattgcagatgaaaccacctttgttcttttccccctctagaataaagatggagaaggaagaaaaaaaaagaaatcaatagtaattacctcccagcattaattggcattggtaagaagagattagatgctgattagattaataatcaagctgatctctactccagtgtcgtcgttgatctctagtgtccgtcgagttcggttatgtacagcgtgcaagaaagcggcggcgccggtcatcttgtccgactccggcgatggtgccgatcatcttgtgcgtgtg

SEQ ID NO: 13141 - DNA, 471 bp, Oryza sativa
  Clone ID: uC-osflcyp174e08a1
tttgtttcttttttttttttttttttttcttttttttttttttttttttttttttttttttttttttttgggaagaggcctacaggggggtattttttttaccaaatgcagaaaaaataattccctaaaacccttgtaacaaacatttgggctttctgggacaaaaaaccgggggggttctttttttttacaaggaaaaaaaggggccactaattacaggttttcctgggtaaaaaaactcgatgagactggagttaagttcattcatgggaaacggaatccagggggaaagaacccgaaatcaagggggaaaggggatcaaacaagggcgagtttggatccatgcaccctgacacaatgcaaaggttggagggaacaccccacttttgggaggaactgcccattttgcaacttgggaagacaacggtttcgtctgggaagaagggtatgtcgaatgccccttttttggta

SEQ ID NO: 13142 - DNA, 382 bp, Oryza sativa
  Clone ID: uC-osflcyp174e09a1
tttgtttttgttgcggtaacagaaaatttacttctttaaaccatcttacagaaattgaaacagataacacaaatcagacaaggtaatcctccgccaactttaagataaccatctcaggaaaatgtctacaacagtcccaactgtagcatttttttttacagcgataacagttacggtaacaaacccactgggtagagcaaagcctccacaggaacaaacccaccccccaccagtgcttttgtcattccccactcttatgtcaaagacaaagatatgtcgatacagcagcttctaaaatagctcctctttgtcacaaaattcaaaaatcaaattcgccggtagccttgttgaatagaacatctcggccatttaaatgcatgat

SEQ ID NO: 13143 - DNA, 343 bp, Oryza sativa
  Clone ID: uC-osflcyp174e11a1
aacagaaggaaacattaccacatccatgttattacaaacctcaacaggaaacagggctgatagcctgatagtttcggggcaaatggacctttaaaaaaacaacacttggaactgacaggtgcaatactggtttttaaaaacaaccccccccacatatttgacatttaaagggcaagagcatggcaccgggtggaagggttcaagacgtttaactaaactttggggggaactttgagctccatgtatgtttgaacaaccttgagggctttgggggcttccatgaggggctttttgggcattaagaagcatttaccaaggttggtcacaaaacatttaggggaac

SEQ ID NO: 13144 - DNA, 416 bp, Oryza sativa
  Clone ID: uC-osflcyp174e12a1
tttgttttttttttttttttttttttttttttttttttaaagtaccgtgtaacattaaccgttactattacaggttgccatttgatggcaccaggtttattggacaaccatgtcgacgatcacttaacactgatgaacatattacacaggtaatgggcgtctctacacgaagatacagcctggggatagcccatctgcttagggcttaacattggggataaatataaaacatctttggaaaaggaaaggggtttctgaaataaaaggggcaaccagatttggattggggactcccagggtcaccagaaagggggcactcttaagccattgagggtgaaaggaactagcacaaaaatcccaggaagagggcatgcaatcaatccagggttatatttgggggccaaagcaacaaagaa

SEQ ID NO: 13145 - DNA, 398 bp, Oryza sativa
  Clone ID: uC-osflcyp174f01a1
ttttgttttttttttttttttttttttttggttacaatcaggctcggcgacctgaattatttatattgatcttttattacgaacctggctgctcaaagttacaaaaacataatatccacaacatcttacacggggctctcaaagcacaatagatatactaaaggaaacagttggaatattgtagttgccggggataaaatagtccaaacagataccctattgtgccaggaaaatagtccaggttcccccaaaaagctacattattgatcggttcaaactacaggatcatataagctgggtaaataaatcaagaaagaattgacgtatcacaattataatatacaccgaaccattcgctggttttttgtttgccaaagtagtaattactccaaaacact

SEQ ID NO: 13146 - DNA, 415 bp, Oryza sativa
  Clone ID: uC-osflcyp174f02a1
agggaaacacacggcagtatttacacatggaagatgtttacacacaaacacacttctttgggttgtcgctagcccttgataggagccagcaggctagctgacacgtaccggtctctggtagtactaacagagacagcaagctactaggaacagagtaacaagataagatagcaacatactagataattaattacgtattagataaccacaaggaccagcaaacatggcgtgacagagagatcgaccagcctccgatcaatgggattattcagttcagcgatggctgctcctggtctcgtcgctgtacagccagtcgtagaccgtgggggagttgggctgggggcggtcgaagaggttggcgccgaggctcttggtggcgaggttgctcccccggtggaacacgcttcttcacacg

SEQ ID NO: 13147 - DNA, 161 bp, Oryza sativa
  Clone ID: uC-osflcyp174f03a1
ttttgtttttttttttttttttttttttttttttttttttttttttttttttttttttttaaaaaatttaatattttaaataaataaaaaaaaaaaatattgtaaaaaatattaagaaaaacgcaaaaaaaaaaatggtctaaaaaaaataaaaaggggga

SEQ ID NO: 13148 - DNA, 508 bp, Oryza sativa
  Clone ID: uC-osflcyp174f04a1
ttttgttttaatagaaaaacggatggtatatagatctaacaacattattcagttgaagttccacattaaatttcacaaccctcttcagccaaaattatgataggaacgatcttcggagtacactggtaaaagcaaaaacagacagaaaattatggttcatataagataggaaaattgctaagacgaaaggaggcgcagccgacatgagtaaattgttcatcttgatgcgaagctaataggcgaaggagggttcgctgggcctgaagctcctgtaaatggaggctgcaactgggataagacccaacagcgcgatctggacctgctccgaggtgcttgtcctgacagtgatctggccacttagtttgttattcaatccaagacgaaccaccatcttcgagccccttccaatcgagaactgggactgcaaattcgcaccgagagcaaggtctcggcgccacttcatcaaagaaagacccaggttgacagggactggccaatcggataatct

SEQ ID NO: 13149 - DNA, 477 bp, Oryza sativa
  Clone ID: uC-osflcyp174f05a1
ttttgtttttttttttttttttttttttttttttttttttttttttttttttttttttttttttttttttttttttttttttttttgggggtaaaaccaaaacgggatttaaaagaccgcccaaaaacagggtttgggaaaaattttcccctcattaaaacacacccctacttttagctgcaagggggccctggaaaaattgggaaacggaacaacaattttgaggcaaacttcacccccccaggaaaacaacccctttttttttttccaaaccaaattccaaattcaaaagatcttcaaattttaaatccgaagggatcggaaccacccaaaaggggccttgaacttgccggccccgccggcgttttaaccccctccccggaaaggtgtttaacgggtgcctcccctgggaccgggtcctcccggtcccggtcccctgggcggggtgccccagcctccgggaccccccccgaaggg

SEQ ID NO: 13150 - DNA, 418 bp, Oryza sativa
  Clone ID: uC-osflcyp174f08a1
caattcagaaacagataataatattccagggggctcctactcaaagttttccaatgggaaacggaaaacaaaacgcatataatctgaataacatgtaaccagcagcagttaatttcagctaatgataataccagataaaggggaatgaaaagcttcagatcagagcaaagcgggcagcagcaagcataaacctaggccttttggttgtaaacctaggggaggccgcacttgccgaaataggggcaatcgaaggggttggccatgaaggggcccgccccgaaatcgttgttggggcactccttcctgagcctggggaccttgccgggggcgtcgcccaccttgaaaaactggagcacggggggcttaaccttcttgggcttgggcttgatcttttggggcttggagacgtttttttttt

SEQ ID NO: 13151 - DNA, 403 bp, Oryza sativa
  Clone ID: uC-osflcyp174f09a1
gctaatctccaagaccaagacgcctatatatgccgctgcgagaaatattgataaaaacatacgcactgcatgctctccccattctccccatgaccagtgtacatacagacaccatgtacgctagtacacacgtatacgtacatgaaaaggcagagtgtgcgcagtacatgcagtacgtgtcgttgtagccttgcacgctcgcctgcagccagaagcagcctacaaacctagcgcggccggccggcgcggcacgtgtgcgtccacgccatcgatcagttttctttgatggtggcagccaggtcgaggcagttgctgacgaggcggttgacgtggcgctgcgccccgggtatgggcgacgtgaggtccgggaactcgtcgaaggcttccccgcagtccgtggaaa

SEQ ID NO: 13152 - DNA, 486 bp, Oryza sativa
  unsure (1)..(486): unsure at all n locations
  Clone ID: uC-osflcyp174f10a1
tttgttttttttttttttttttttttttttttttttttttttttttttttttttttttttttttttttttttttttttttttttttttttttggggaaaaacccttttaaaaaaattgggccaaaaaaaagggaaaaagggccagaggggggggaaaagcccccaaaaggggaaagggggggggaattgggggaatgggaagggaacaaaaacggggggggaaacccccccgggggggaaacaagggtatgggatttgccaaaagtcacaccagccggggggggtttttccttgggggaaaaaaaaaaaagggggggccccatttttgggggaacctaaccgggggcccggggaaccctttaaaatttnaatttaaaaggggcagccccaaaaatttggcggtgccggggccggggttttttttttgggggggctgcaggtggtgcccgggccgggcgggggcccgggtaaacaccccggggaggg

SEQ ID NO: 13153 - DNA, 523 bp, Oryza sativa
  Clone ID: uC-osflcyp174f11a1
gttcgacagtggagttaccttcaatcccactgaaagacaaatcttttttattccagcttttcaagtgttcgtcaagcaattttctctaacgttgcactattttcatggcaagtgtgtaacagggacctataaaaataggccatatcattattgctgatattattcttaaaatttgaagtgttgatatatttattgcgacaaatgctgttaaactacgtgcattgcacgtgcacaattactagttgtaaaaaaaaggacgacaaaatccaatacaacttcggcgcatcaccacccttttgttcttctcttcggcgagttctctcgacaagaggtaacttgattcgatgacttgtactatcggggctattatgtccctttagatgtttagcccttttatcatgaccatctgctattatatgtcttagttaatctagtcttagtatctcgatttagccctattggccagttctccctttagggttctcgccgatatcagctaaattgttttgctagattatattag

SEQ ID NO: 13154 - DNA, 178 bp, Oryza sativa
  Clone ID: uC-osflcyp174f12a1
tttgttttttttttttttttttttttatttttttttttagaaatgataatgttaaagtttttataaatacaaacgcaaagattaagtttcatactgaaaggcataacttgggctcaaatgcgggtaaatgctactctttaaaaaaagcaaaaaacgggcgcaaaagaagaaaaaacaa

SEQ ID NO: 13155 - DNA, 354 bp, Oryza sativa
  Clone ID: uC-osflcyp174g01a1
ttttgttttttttttttgtttggtttttttttttttttttttttttttttttttttttttttttttttttttttttttttttttttttttttttaaaaaaaaccccccccaaagccccatttttttttgggggggggggggcccttattcttttgggggggcgggaaacaaaaggggcccaagggcccaacggaaaacccccggggcggggcctttttttttccccgcggggtccttgggggggcaggggattccaacaatggggggcccggtggaaaaaacccccccgggggctaaaaaatccccccccgggcggtaaaggggggggggctttaggaaaccgcgtttttttag

SEQ ID NO: 13156 - DNA, 492 bp, Oryza sativa
  Clone ID: uC-osflcyp174g03a1
ttttgttttctgtggtttgcagttttccacgtaagtatattccaactttccaatagatgtacgtcaaccctttgctttctctgcagctgcagagttgcaggtttgatgaatgcagcttatctacaaaattcccatcagagggaacacagttacagaagaacttggggaagtacagactgcaaatccacaaggatcttctttagaaccgtatatgtaaagggcttcatggattggccactatatgggtgttatcctcaatcgtgaatctgcaaggtcagatatcaatatatcaaatgcagattgcctcattgcagattgctgtggattgttcaggttccaggttagcccagtcaccagtcttcactgacattagcccgctgtagttacatcagatagtaacaagctgtcaagctcctccaccatttcggaactcagtcggtggtaaggcatcggaaatggcatcaaaacaactcttgctgcctacctttcagc

SEQ ID NO: 13157 - DNA, 481 bp, Oryza sativa
  Clone ID: uC-osflcyp174g04a1
ttttgtttttttttttttttttttttttaggagagacacatagacactggatgctttatttctcattaaaatggaggatttgcaccatttccaaaggaaatcagcagcagctttcctttgtcccaaacagctttgtatggaaaaactcacacagctaagtcaacaaatccttaggtcagtacagaaataacaacagccatcattcacacgacgaaaggccacaatccttagctcagcagaaaatagggttcaggagtcaggactatccagcttatcactttcacattaagtagggtaactgtatatgcttagacaactgacacttttcagcttgcggtagcaccaaccaaccacacaatgtttttcttggagtagtgaacaacgttgagtgaattgaatctttctcatcaagcagccaaaatgcctaatccatcatttcattggcttggggccatgccttgacacctttgaatggaattgg

SEQ ID NO: 13158 - DNA, 505 bp, Oryza sativa
  Clone ID: uC-osflcyp174g05a1
tttgtttttttttttttttttttttttttttttttttttttttttttttttaattttttttttttttcaagagggaaaacttttgcgggtcaattccaacgggggggagtaaaaggacaggcattttcccagaaacgggtgggatgagagaaacgaagccccaaaaccattttttaacagccatcagggggggccgacctcctgctcgagcttgcccacccacccccagggcccggggaccacctccctggccggcccctgcagcggggggaccccggggggcggggccccctgcagcgagcccagcagtttgggctaccccttggcgcgggtgggcattgtcttgggcgccttgaaatccccgggggcgtaaaacttgcccttgaacaccgtgcccacaaagacggtgggctcctcgaggggctcctccttttggaaggcccgggagggcttgagcgccgcggggacctccttggtgtgggcgaacagccccccttcatcccct

SEQ ID NO: 13159 - DNA, 455 bp, Oryza sativa
  Clone ID: uC-osflcyp174g06a1
ttttgttttatttggacaaaaaacactagttgactaaacatttataatgctagaagtgcctcaaacaatcgccagtttcagacacatcgaagtaattagtcgacacaaaagaaactgagtttgcaaagcagggtaagagtatacatgcgatagactccaaaacagacagcaaatagcgttatgctcgtactagactctacatatcatttgttctagcagtgttgttctactggtaattcctccctggctcatccctcttataggccggcgcaccggcattgtagttatcgctgccttgctggtaactagggttgcctccttggccttggtagcctggtgcaccaccagcaaagacagggttgccggcttgataaggaggtgggttgccggcttgataaggaggtgggttgccaccatggtaacctggccctcctccctggtatccagggttgttg

SEQ ID NO: 13160 - DNA, 353 bp, Oryza sativa
  Clone ID: uC-osflcyp174g07a1
tttgtttggcaaagaaaaacaaagaggaaatggcctacatcacccgaccgagaagggggggaagatagttttactttacacaaggaaacaacaaagaagaaggcaaaaaaaaaaaaaagaaagatcaagagaaacatggaacaagaaaagatgtacatatccactgatcaaactcagctcaaaaatctgctagcattggtacagggagaagctcctgttcttccacagtgagctcagagtccttcctagcttcctcgatttagacttgcacagctgttttgagtcgcggcggcacaccatggtggccgttacgggtttttcccgcctgttgttgatgctgctgctgctgctgc

SEQ ID NO: 13161 - DNA, 421 bp, Oryza sativa
  Clone ID: uC-osflcyp174g08a1
ttttgtttttttttttttttttgtttttttttttttttttttttagtacaattacaggagataggtgctctgttaggctctacaggcaataaggcagcttacgggttagaaatttcagattaagcggatctacaaaccctaacaaggcaacaaaacacagcgggaacacgagtaacacgaccacaaaagcccaaccaccaccaggtggcttaaccacaccttacaatggtacacacacgacactcaccatagataagggttattacaaactcaggcggcatataaaattgtgggaacacccaaaggcacaaagcgttgcacaaagtgcggcacaaacccacagcctatttgtgggggcccgaatttgccacaaatacacagtggggcagtggcacaaaatcacaaggccaaaagaaacggg

SEQ ID NO: 13162 - DNA, 369 bp, Oryza sativa
  Clone ID: uC-osflcyp174g09a1
ttttgtttttttttttttttttgtttttttttttttttttttttttttttttttttttttttttttaatttttaataaataaaattaaataaatttaaaaaaaaaaaaaaaaaaaaaaaaaaaaggaaaaaaaaaaaaaaagaaaaaaaaaaaaggaaaactaaagaaaaaaaaaaaaaacctaaagtacaacaggaaaaaaaaaaaaaaacgggagggtgaaaaacaaaaaccaaaaaattgaaaagaaaaacccggggcccaaaaagaagaaaacaaattaaatccgggggcaaacaaggggaaacggggggggacccggaaaattccgaacggaacaaaaaaagcgcccaaataaaccaaggggaa

SEQ ID NO: 13163 - DNA, 438 bp, Oryza sativa
  Clone ID: uC-osflcyp174g11a1
tttgtttaaatcaaactgttgtttatcatagtaaatcttcccggagaatcagatgctcagaattcatagtgttcttcagcatcttacaacttacaagatggcgcagatatacaagcgcaactatcttaaagtaagctgtaggaggaaatggaaccatttctaacaacgggaaaaatataggttatagaaggaaaccatttgaacaaattaatagggaaataaattaggaggatcgtttccgtccgatctcaatagaactggacgtttgatacgtagatggcgtctggcatccagttgaccgggatgacgtctttggcgatgaggctcttgccggactcggtggtgacgcgaatggagaagggtgccttgagtggcctgcggtgtccatcctccagatggcgccccacgacagcttcatgggccttcacgctggcaatc

SEQ ID NO: 13164 - DNA, 469 bp, Oryza sativa
  Clone ID: uC-osflcyp174g12a1
tttgttttttttattttttttgtttttttttttttttttttttttttttttttttttttttttttttttttttttttttttttttattttttttttttttttttatttttttatttttttttttgaaaaaaaaaaaaaaaacattttaaaaaaggggggggaaaaaaaaaaggggaaaaaaaacggaaaaaaactaaaaaaacacattaatttgggaaaaaaaaaaaaaaagggcccccttaaaaattttttaaaaggaaaaaaaccaaaaaggtaaaaaacccgggggggggtaaaaagggattttttcaaaggggaaaaaaaaaaagttggggaccaaattggggcaaaaacctaaatttcccaaaaggggggggaaaggcccaaaaaccccaaggggggcccaagaaaaaaaaacgaaaaaaaaatcccgggggggggggcccccttcctaaaggggggggacaaa

SEQ ID NO: 13165 - DNA, 356 bp, Oryza sativa
  Clone ID: uC-osflcyp174h02a1
ttttgttttttttagcagaaggcaaaggaaatttcccgcaaatacttattcatatgttttgacaacatttctcccgacgcatgctcattgtggcagacgcagctgaccacctagagcttttagttcaccattattatttagaccaagcatacgtcccaagatcagaacacatgcttacaagcgaaaatactaatagcctggctggctgcttcacagaataaccaaacgacaacctcaacagataaaaatgccacggaatgaaaacaaagcagcgaatcgtcaccagaagtcccatcttactcatcaaacactccatcattctcctccaacgcatcctcttcccaggggagaagatt

SEQ ID NO: 13166 - DNA, 464 bp, Oryza sativa
  Clone ID: uC-osflcyp174h03a1
ttttgtttttttaattttttggggttttatttttttttttttttcttttttttattttttgacttcatttttttttactcttgctttttgtggcccccccccctttccacctggaggaccaaaaggggaatggataaaaggccaaggttaaaaacctagaaaaaaacaaacacttaaatgcccccttacaaaaaccccgggggccccaaacaaaaaaccaccatttttcaaccccaaaaattataaatggaaggggatgaaaaaaaacccaagaagcggcaccagaaaaaccccttaaatttttaaacactcccaaaaaaaaaaaaaaggggagcccttttgggggcaaaccaaagttaagttaaaagtcctttcctcgaggggggggattatataaaaaccggaaaacgccccggacggggtttggggaacccaccttggccgggacaaggtttattgggggg

SEQ ID NO: 13167 - DNA, 515 bp, Oryza sativa
  Clone ID: uC-osflcyp174h04a1
ttttgttttttttttttttttttttttgtctttttttttgagcaccatgattataccccgtaaattatatacagaaacacgtatacacaaacacttgcaccctaacattgacggaaaaacactgttagcaaaacacatttttaaagctgcaaaattagaaccggcaaaatggtcccaagtgcttgaccttcaggccttggcactcaggctcaattttaacctctctttatggaccgggctttaaggaaagtgcattgttaaaacattaacgggaaacctttgaccacagaattttgaaaccaggaatgtcaaaccttgctggacttagcttggaacacgctatgttgaaaacgctattgttgaagcttttgggataccatttacgaggtaccacttaccatgcaagactgagcctggaaattcgcgacttgtgaacaaacagactggcaaaaactgacagggaaaaattgggaagggacatttggggggaaatgtaaaggggccaacgataatgg

SEQ ID NO: 13168 - DNA, 450 bp, Oryza sativa
  Clone ID: uC-osflcyp174h05a1
ttttgttttttttttttttaggatcaaaacatttctattaccacaactttttaaggatggaattgagtagcaatactttcaccccaaaatacagtttagcgacaatatcttagaaaagccgcttgctttgccgccatggctggcaagctgagcagagcagctaacacaaagaacacgagatcactataaaccaaacggcaacgaacgaagaaaatacagggtcttttttgtctgaagatacacgaagcggttcgttttcttttatttttagtctcctctcctcctcgatgatgggtgtatggcaatggcaatggcgatgggatcttggcttagttgatgggaaggggctcgccgttccactccttgaggcagtcgagcatggggtcgatgagcttgccctggctgatgccgaggaacaccttgttgcactcctcgccgggggacttgagc

SEQ ID NO: 13169 - DNA, 366 bp, Oryza sativa
  Clone ID: uC-osflcyp174h07a1
ttggttgatgaggaaatgagggggtttcactcatccgccactattttattcagattattggcaacatgttcatataccaggcatcggttttggctgtccgacaatcgggttacaccgcataatccccaaaattttaattccctttggggaaacagaccccttacaacaccggcctactagggatcactgaaaaggattgggtgggtcccttaaggaaaagctgcttacaccctttattcatacaacaacttttgaggaatagcactactacttctgtgggcctctaaaagcatttttacccagtagaacgtgagcttctttttatatcgagcaaagaattagagcactgaattatgagcaccaacc

SEQ ID NO: 13170 - DNA, 363 bp, Oryza sativa
  Clone ID: uC-osflcyp174h08a1
tttgttttttttttttttttggtttttttttttttttgggactaatggaattcacaatttaataacaggaagcaaaaatgcagtttcagatccagccgaactgaagacaacagagagcttgaacgctcgatcagccaacctgtaagatatggggggccatatacacacattttactttacaagagcgtcctaccctcctaatggttgtttagcaaaggtacaacatgaaggcgttgccttggagcatacaaaaaaacagtaagacatggcaacgggatagatgttatccggccgcaaagtggagttgagtttctttgtttcttctgaatgttgggattgcttagctacagagatttggtatgc

SEQ ID NO: 13171 - DNA, 412 bp, Oryza sativa
  Clone ID: uC-osflcyp174h09a1
tttgttttacagtactgtattggattattccagtctctgacttgatgaattttgacttacacttcaaccactgggctaattaattaattaattaagctagcaaccctgaagaagaccttataatgggagtaataattaaccaatgaagaaacagaaacaggaaagctagccccctgtataccgaatcaatcaccatgtactatgtacatgccactatacacacacactgacatgccacccgatgcaattgcaccatctttctgctgctgcctcgtcgtcgttcagtccaggccagggtccccccaaccacggtctcatcgccgcctttctcgagtcctcatctcctctgtctaatccaatccaatccacttaagacacttcttttaattatctttgagtcaactccggcggc

SEQ ID NO: 13172 - DNA, 326 bp, Oryza sativa
  Clone ID: uC-osflcyp174h10a1
tttgttttttttttttttttggttttatttttttttttttttttttttttttttttttttattttattttttttgttatataattaaataattaatttagaaaaaataaaaaaaaagacaccagggtagaaaaaaaagacgaaaaaagaaacagaaaaaggaacacaaagaacgacgaaaacagaataaaaaaaaatggtccaagcaaagaaaaaaaaagacaaaaactgactgaaaaaacgaggaaaaggccccaaaataatggagttagggggcacttatacaagaaaaaagagggaacgaaaaggcaatggcaaagggaaacc

SEQ ID NO: 13173 - DNA, 516 bp, Oryza sativa
  Clone ID: uC-osflcyp174h11a1
tttgtttttttttttttttatagggagaatgcaatgttccattccattaatcaaattgggcatcaaaaaggcacaacaaggcatatcacatactccacacttactacatgctttaccccaataatctctctttgattgttgattcctacctgcgctatatacaacacatcaagaatataacctccctcgcctccactggcatacaagcaaaataccagtactagtatgttgttctgacaatactaccgtcagtaattcaatacactattcagccagttatggcacaaaacttttggagctcattctctaggactggagatattgctctaagataaattcaacaccacaaaacacgccccagtttccacaacgtttatctttgaaacatttcactgtacaagcaaatcctgcgactgctgcttccatacgtcacacggttctaccgcaacctggtagggtttattaatccactggaaaagacaaccacgggcttcaacaactttgagcatatgtgat

SEQ ID NO: 13174 - DNA, 416 bp, Oryza sativa
  Clone ID: uC-osflcyp174h12a1
ggccatcttctggtccaccccaagaagattttcctggggtcgtacctgaatcccttgttcctccagacgaattccaggtatcctcagtcttatttttccaagaccctcctccaccggatccaccaccagtcatgctgtcagcaggagcaccccacggattgtttccattgttttttcctgcctggtcatctccaccagaaggttttggcgctccccagctggactgtcctttgttggcgttccagtcggaagattgggaccagtcaccacctcgatcttgaccgaacggtcttctgtcatcatttcggttccaatttttgcaaccatcctggtccctgtttcccctgccagaaccccaggttctgtcattgttgtcacccgaaccatagttattaccttgattgcgatcacctctg

SEQ ID NO: 13175 - DNA, 482 bp, Oryza sativa
  Clone ID: uC-osflcyp175b01b1
cttttccaagattgctgagctcctgaggtatcactccaccaagagtggtgatgagttgaccagcctcaaggactacgtaacccggatgaaggagggccagagtgagatctattacatcactggtgagagcaagaaggctgttgagaactcccccttcctcgagaagctgaagaagaagggttatgaggtcctgtacatggttgatgccattgatgagtacgctgttggtcagcttaaggagtttgaaggcaagaagctcgtctctgccaccaaggaaggtctgaagcttgatgagagtgaggacgagaagaagcggcaggaggaactcaaggagaagttcgagggtctgtgcaaggtgatcaaggaggtgctcggtgacaaggtggagaaagatgttgtctctgaccgtgtggtggactctccctgctgtctagtcactggggagtatggctggactgctaacatggagaggatcatgaagg

SEQ ID NO: 13176 - DNA, 522 bp, Oryza sativa
  Clone ID: uC-osflcyp175b03b1
gtcctgtgttctcgcagaatgttggttttgctcaggaggaggctgcatggaatgatgtaggtggtgctgcagagtgggtggatggtggaggtgatgggctgattggtttgtcgcttgggcggcagcgcagctttgctgatatccttcaggacaatattggccgcagaactcctgcttcagagcatccctctcgtgcagttagtcgcaattcttttcttgacaatcaggaactactaaattctgctgatagccagtactccatgcataatgatattctggaagcacaacgtgctgtcggaaatgtgcaacaatgtcagtggccttcccagtattaatgcatccgcatttcaaacttttgcatctgttctgggttcatctatttcaaggaatgccacaccagattctcattatgtccctagggtccctagccctggccttccacctgtcggtgttaggatcaattctaatgagaagatgctgaattgctcatcatcattcaacactgcatctttcaaagccgtt

SEQ ID NO: 13177 - DNA, 549 bp, Oryza sativa
  unsure (1)..(549): unsure at all n locations
  Clone ID: uC-osflcyp175c06b1
gtttaaaattaaggcggcttaaaggtgaactctctatcgttaatatcctctaggatggcagctaccgtttggtcgatttggtgggtattcgggggatggcctttaaaaattttctcatttcgcattagccaaatgtgtcaccaagtcgtaactagggctcccatacttcttcttgcttgtgccttgtttgaggaggagcagatgttcgaggtccattcttgtatgttatcctgcatagaatggccggggattccttttattttgaaactcggtttgtttcgattatttggttttgtttccagtttttcttgtcggtctcctggaaattgttctgctgctgccggtgcattgctgctgcggctgattgatgcttaattcttttgcgcattccaaaacaaaaaaaaaatctgctgcggctggagagaacaccacaatgggcttgtttcttgaaaaaaaaataaatttctttttattgtttggngctggtttctgctgccgctggagggagcacagttaattttgattcttaccatagcacgatttgtttga

SEQ ID NO: 13178 - DNA, 461 bp, Oryza sativa
  Clone ID: uC-osflcyp175c10b1
ctgaacacagcaccaccccttgtgctgcatctcccacctccctctgaattgtgggcctgaggcgatggcggcgctcgccccgtccaagatgctcggcacccggctcaacttcgccggctcctcccgttacgccaccgtggcaccgaccaccggagcgcagaagatcgtctccctcttcagcaagaagcccgccccgaagcccaagcccgccgccgtcacctcctcgagccccgacatcggcgatgagctcgccaagtggcacggccctgacaggaggatcttcttgccggagggtctcctggaccgcctcagaggcgccgggctacctcaacggagaggtccccggagactacggctacaacccttttggcctaagccagaagccagaggacttctccaagtaccaggcctatgagctgatccatgccaggtgggcgatgctcgccgccgctgggttatta

SEQ ID NO: 13179 - DNA, 491 bp, Oryza sativa
  Clone ID: uC-osflcyp175c11b1
ttttcgcgcaagccgcatcccctccccacaactggaccaggatttacatggcttcaaacgctggcaagaagctcattcagatcgatgtgagctctgatacggtgtgcccatggtgctttgtcgggaaaaagaacctcgagaaagctatggagcaaaacaaggacaagtttgatttcgaggtccgctggcatccattctttttaaatccgaatgcacctaaggaaggcatcaagaaatctgattactaccggatgaagtttggccctattcagtttgagcatgcaactgctcgtatgacagagatatttagaggacttgggatggaatatgacatgtctgggttgactggaaatacaatggacagccataggctcataactcttgctgggcaccaaggttatgacaaacaaagtgctcttgttgaagaattattccaaagttacttttgccatggaaagtttattggtgatccgcaagttctgctggatgct

SEQ ID NO: 13180 - DNA, 513 bp, Oryza sativa
  Clone ID: uC-osflcyp175d01b1
ctccactccatttctgagctcttctagtttgagtgagagagcagcagaagggagtagtgcaagatgccgatccgcaatatcgccgtggggagccaccaggaggtgtaccacccgggtgcactcaaggcggcgttggccgagttcatctccaccctcatcttcgtcttcgccggccagggctccggcatggccttcagcaagctgaccggcggcggagcgacgacccccgccgggctgatcgcggcggcggtggcccacgccttcgccctgttcgtggcggtgtccgtcggcgccaacatctccggcggccacgtgaacccggccgtgaccttcggcgccttcgtcggcggcaacatcaccctgttccgcggcctcctctactggatcgcccagctcctgggctccaccgtggcgtgcttcctcctccgcttctccaccggcgggctcgccaccggcaccttcggcctgaccggcgtctccgtgtgggaggccctggtgctggagatcgtcatg

SEQ ID NO: 13181 - DNA, 279 bp, Oryza sativa
  Clone ID: uC-osflcyp175d02b1
ctcttggatgccgctcgccgacgccttcgttggtgccggcagcagcggggacggggacggcgcggcggcgggggcggggggttgcgccttcgtccctagcgtggagcttctggacattgtgcaacacccgatctcgggctacggggtgcttgtggcgcttatctttagccccgacgaccgttcgatggtctttctgtacagtcccgacggtacgctttaccggaatgtgtacgtctttgaccccgtgcagaggcgccaggagctcctttttgggccccc

SEQ ID NO: 13182 - DNA, 520 bp, Oryza sativa
  Clone ID: uC-osflcyp175d03b1
atttctcagaggcccatttgttgtggaaaagaagcaaaccacctaagtttcccaccagatacaattttactcgctttgcaatcacattaaatgaacttaccgctggattgaaggaaaaactgccaccaacagactctagattgcgaccagatcagcgatgcctagagaatggtgagtatgaaagagcaaatgctgagaagttgaggcttgaacagagacaacgacaggcacggaagatgcaggagagcgggtggaaacctcggtggtttgcaaaagataaagctaccgacacataccgctaccttggtggttactgggaatccagagaaaagggcagctgggaaggctgtccagatatcttcggacaagttcctaacgatttgatgataactgactaggctttgagtaggttacaggtcttctggttctctgcttttattctttctgtgggatcacttgattccagattttttagcggtttatattagagcaattaaacgggtcttggcctgtaaggaga

SEQ ID NO: 13183 - DNA, 441 bp, Oryza sativa
  Clone ID: uC-osflcyp175d07b1
gtgtttttttttttttttttctttttttttctttttttttttttttttttttttttttttttgggggtcaaaaagaaattttgaccgcattactactggttggacaaatggacaagaagtcaataagctggtttcagatgaaacttggtttggttttaaccatttcaacagggcccatggaaacttaaagagaagtttaacaattgccttgagggatttctttggggccttgattttttagatcataaaataaaagggggccactgaagggtttaacttccggacactgggacccgaccaaagattctatcccctgggggccttggggtgacaccaacttctttcaggaaggggggaagaattacccatctccgagggaactttggccttcctttcttggcactcaacaaatttttttaacgggggggtttttcaagggcc

SEQ ID NO: 13184 - DNA, 538 bp, Oryza sativa
  Clone ID: uC-osflcyp175d10b1
tttgtttaccgccaccgccaccgccaccgtccgtccacatccgtcggcgccgatggcctcctccgccctcgccgtctccgtcgtcaagccagccgcgtctcctcccgtcgccgtcgccgcggtaaccccgcagcgttgcctcctcccgcagtgccggggcgtgcgcgctgccccggtcgtccggctccgttcgggacgcgcccgcggcgtgtcggtggtgtgcgccgcccagggccaggagacctccttccaagttcctgacgtgactaagtcaacatggcagtcacttgtggtggagagtgaacttccggttcttgttgagttctgggcttcgtggtgcgggccatgcaaaatgatagaccctgtcaattggccaactcttaaaagaatatgaagggaagctgaacctgctaccaggctaacactggtgaaaaccccggcatagcaccccagcttgggatagaagcattcccacaatgatgattttaaagaacggggagatgaaagatgctgggattggagctgtgcccgagagcac

SEQ ID NO: 13185 - DNA, 483 bp, Oryza sativa
  Clone ID: uC-osflcyp175e05b1
aaaaagacatcatgtccttgaataatatcaatttgtgtcttgtctgaacaattcactgatttcaataggagttttcaggaaacgatgacgaattacagcaaactacaacttcacacctcactaaccacgaagatatacatccaaatatccaatacacaaggaaaccgagatgagattgctcctcaagatggctcaaaatcgggctgtaacctgggagaacaacgatttgaagtcttttgttggtgtgcctgtgccttcaggctttgaagccaaatcaaatgccttgaactttgtctcttcatactgcagggcctgaacacaaacttcagcaacatcagctcttggaattgacttcgtgtctgtctggagaagttcatcgtcattgccaacaatcaactccctcactcccccgtctttgtcttgcagaccaccaggccttattattgtataagggactccactgtctgccaaatactgttctga

SEQ ID NO: 13186 - DNA, 395 bp, Oryza sativa
  Clone ID: uC-osflcyp175e07b1
tttgtgacaccgaaggcatgccgtacctgaaggcctttgtgaaggagctcctccgcaagcacccgccgacgtacttcgcgctgagccacgccgccgtggagcccgggagcaagctcgccggctacgacgtccccgtcgacgcgaacctggacatcttcctgccgaccatctccgaggaccccaagctgtgggagcggccgacggagttcgacccggacaggttcctcgccggcggtgagacggcggacatcaccgggttggcgggcgttcggatgatcccgttcagcgccgggcggcggatctgccccggggtgggcatgggcacggcgcacatcgtgctcatggtggcgcggatggtgcacgcgttcgagtggcgcgcccaccccgtgcagccg

SEQ ID NO: 13187 - DNA, 474 bp, Oryza sativa
  Clone ID: uC-osflcyp175e10b1
ttttcaggtgatttgcctgaaattgttgtagctgctccacttcagccacctactttgtcatggagcctatacttgccattgttgaaagtatttgagtatttacctcgtgggagtccatctgaagcatgccttatgagaatttttgtggcaacagttgaagctatactgagaagaacttttccatcagaaacctctgaacaatccaggaaaccaagaagtcaatctaagaaccttgctgttgctgaactccgaacaatgatacattcactctttgtggagtcctgtgcttcaatggaccttgcgtccagattactatttgtagtattaactgtttgcgtcagtcatcaagctttgcctgggggaagtaaaaggccaactggtagtgataatcattcctctgaggaggtcacaaatgattcgagattaaccaatggaagaaacagatgtaagaagagacaaggaccagatgctaca

SEQ ID NO: 13188 - DNA, 487 bp, Oryza sativa
  Clone ID: uC-osflcyp175e11b1
ttggtctttggttcagacaacagttgttccttatggaacattagatgaggaccttgttccttcttatttttctaaagaaagtggcagatatatcgaggattgtaaattgagggttgttcttgttagtgcatcttatccttttggagagcagtcaattaatggtattccaaacactgtggtagctgttgaggttccttcattaaaggacacgttgaacattaagaatgaaattccagttgcagagaaagaggttcattctcctctggaagaagacctagttgttattcctgcacccccttaccctgttaaggaggctccaatttttagagaagtttctgtgcatattccccctgtcaaggagactttattcctgagagaagtttctgtactcgtatccccagttatgggagacttcaatcctgagagaagtttctacacccattaaaggaaatcacctgtttttttgacagaatctccacccccttca

SEQ ID NO: 13189 - DNA, 450 bp, Oryza sativa
  Clone ID: uC-osflcyp175f06b1
gaggccctccgtcccatccgcgaggacgaggtcaccgccatggtcgagtccggccaccgcgccgtcacccagccaggtagtgaacataaaccaatcgtagtgaggaatcaccttgctatggcggccttcaacaatataacaaggctagctttcggcaagaggttcatgaatgctaatggtgacattgatgaacaagggcgtgagtttaagactattgtcaacaatggaatcaagatcggtgcatctctttctgttgctgagtacatttggtatttgaggtggttgtgttcacttaacgaggagctatacaagacccacaacgagagaagggatcggctgaccaagaagatcatagatgagcatgctaaggccctcaggtgagtggtgccaagcatcactttgcggatgctctgtttactctcagagaacagtatgaccttagtgacgaca

SEQ ID NO: 13190 - DNA, 449 bp, Oryza sativa
  Clone ID: uC-osflcyp175f07b1
aaatcctgtgagaaggcgcttgatgcatccaaggaattatcaaagaaatgaacaatggaaaataatctgcttgaccagacggttcaaaggcttgaaagagcaaaatgtgtatagaaaagttatatggaaagagtttatgaggatgaatgctgcacgctgaaatctcgtattgctgtattggagtaaaaactggaaagcagaacacgttccctgaatgttactgaatcgactcttgccttaagaaatgctgaggtggatacattgcacaacaacctcaaagaacttgactagttacgagagttcaaagcggatgtggacagagaaaaccaacagactgctgagattcttaaaaggcaaggcgcacaattgattgagcttgaaaatctgtatacgcaagagcaggttctgcggaagcgttattatgacacaattgtagatcttgagggaaa

SEQ ID NO: 13191 - DNA, 533 bp, Oryza sativa
  Clone ID: uC-osflcyp175g06b1
atcaattcgcagtacatcccggccaaggccttcaaatcacgcaaggtttattacactaacgaggaaaacggattgcttcatgtcccgaaagaggaagcacagaaagctcaggctgccatgttttcagatccaaacatggccatggacatgatgaagaagaacctctctatgatagttcctcagacacttacatttgcatgggtgaacttcttcttttcgggttttgttgcagctaagattccctttccattgactccgcgattcaggggaatgctgcaaaacgggatagacctgagtactgttgatgtgagctatgttagcagccgttcatggtactttctcaatttgtttggtttgaggggtcttttcagtctgatcctcggtgaagaaaatgctaatgatgatgcacataagatgatgcagatgggtggcggatttggcggtaatcccacaatgggtttggtcgcagagaaagacaacctggatataatccagcatgactgggctttaccaaagatggagcattatgctga

SEQ ID NO: 13192 - DNA, 501 bp, Oryza sativa
  unsure (1)..(501): unsure at all n locations
  Clone ID: uC-osflcyp175g08b1
tttttaaatattatgatgcagtcatgccatatctcaagtctatactcatgaatgcagctgacaaatcaaatagaatgttgcgggccaaatcgatggaatgcattagcttagttgggatggctgttggaaagcaaaaatttaaggatgatgctaagcaggtgatggaagttatgatgacattgcaaggatctcagatggaggctgatgaccctataacaagttacatgctgcaagcatgggcgagattgtgtaaatgccttggtcaggacttcttaccatacatgaatgttgntatgcctcctctgctccagtctgctcagcttaaaccagatgtgagtgtcacatctgctgggccagaagatgaaaatggtgaatctgatgatgagggtgttgagactattacgctaggagacaagagaattggcatccgaaccagtctgctggaggaaaagcaacggcatgtaatatgctatgttgttatgctgaaaagctcaaggaagg

SEQ ID NO: 13193 - DNA, 410 bp, Oryza sativa
  Clone ID: uC-osflcyp175g10b1
ttttaaaactatatagttgtgtactactgttgattccaatcttgctggtggaattcaacccgggttgcggagtgcaagttgaattcgttcttgttatgtctgccatttgatttctttaccattgctgcggggtaacacttgcgttgctttgaaaataccctgatcacctcataagccgccgggtctcactgggcactgactttgactggtgcgtttctttttgaaggaatcttacgtttcttgttcgaacgaacagcttgcccagtaatttttttccttaattattgtaattacgatcatatataacatcaaggcctcgcgactagctgaagtgaaattcgtgtggcgacatgcttttagatattttctgataaattcttttccaaaaaaaaaaaattttattttcacac

SEQ ID NO: 13194 - DNA, 419 bp, Oryza sativa
  Clone ID: uC-osflcyp175h01b1
gataaatatcgagtcgccggattggtagccgccctgctcgtgctgcattcgctagccacgccgtccgctcaggccgaggcgcatcgcgcagggggagaaggggaggagaagatgtcgagcgacggagggccggtgcttggcggcgtccagccggtggggaacgagaacgacctccaccttgtcgacctcgcccgcttcgccgtcaccgagcacaacatgaaggccaattctctgctggagttcgagaagctcgtgagtgtgaagcagcaagttgtcgctggcactttgtactatttcacaattgaggtgaaggaaggggatgccaagaagctctatgaagcttaaggtctgggagaaaccatggatggactccaaggagctccaggaggtcaagcctgtcgatgccagggcaaatgcct

SEQ ID NO: 13195 - DNA, 80 bp, Oryza sativa
  Clone ID: uC-osflcyp175h02b1
tggtgctgccgcggcggtactggttggtcccacgcggccgcttgttgtcttcaacctgtgtaagtaagtttgggcggttt

SEQ ID NO: 13196 - DNA, 340 bp, Oryza sativa
  Clone ID: uC-osflcyp175h05b1
tattccttgatatcttgaaggagcagtggagtcctgcattgtctatttcaaaggtgctactctcaatttgctcgctgttgacggatccaaatcctgatgatccattggttccagagattgctcacatgtacaagactgatcgggccaagtacgagtccaccgcaaggagctggacccagaaatatgctatgggctagaatggttaacaataagaaatgtgagatatgccattgtattgccttgtattctcctgtaactctttcaacatttaagaaacagcaagaatcaaattgaactctaaaaaatagaaaaactacatgtgttaatctatactaattcg

SEQ ID NO: 13197 - DNA, 368 bp, Oryza sativa
  Clone ID: uC-osflcyp175h07b1
tacatctcctccggctgtagtggagtatggaatgcttttttttcctcgtgccgaccaccaccaccgttacaatggcgggcaacgggccgatcaacaaggaggacccgctcaactggggcacggaggtgctcaagatggccgtgagccacctctacgaggtgaagagcatgttggcgcagttccgcgagccgctggttacgatccagggcgccaccctccgcgtgagccagggggccggccccaaccaggccaaggacgccgccagcatcgtctaacagcttgtcgaggaggcccgccccccgattaaggccacccgcgtgtggatcctcatctgcatcgcccacggtggcgacatctacggcgtgacc

SEQ ID NO: 13198 - DNA, 550 bp, Oryza sativa
  Clone ID: uC-osflcyp176a03b1
ttgtgatggtgcaaagcttgtccgtgatgcctttcagcttgcaaaggagaaatccccctgcatcatttttattgatgaaattgacgcaattggaacaaagcgttttgatagtgaagttagtggtgacagagaagtgcagcgcacaatgttggagttgctgaatcagctagatggattcagtagtgacgagaggataaaggtgatagctgcaactaatcgcgcggacattcttgatcctgctttgatgaggtctggtaggctggaccgaaaaattgagttccctcatccatccgaagaagcacgagctagaattttgcaaatccattcaagaaaaatgaatgtaaaccctgatgtcaactttgaagagttggcacgatctacggacgacttcaatggtgcacaactgaaggccgtttgtgtagaagcaggcatgcttgccctacgccgagatgctacagaggtgacacacgaggatttcaatgaagggatcatacaagtgcaagccaaaaagaagtccagttaaatattacgcttaatcttccgaagagta

SEQ ID NO: 13199 - DNA, 463 bp, Oryza sativa
  Clone ID: uC-osflcyp176a10b1
tgctggctcgcgcaaatcgaggccttccgctcgagctcgcgtcgcgcggcctgggactcgcctcactcgccctgcccctctcccacgcgccgtccgccgccgtgaccggaggcgagcgagcgcgcgcccgccgacgacgctccccgccgccactggatccgccacccacgatcctttcagccgaggaagcaagaatttcggctggtcctatatgaatcctcggtcccttgtatactagagggcagtaggagtttggatccaagatgaggggcagaagcgatggggggcagagcaagaggcccatcttgctgctctgcgtgatggtcgcgtgcctctgcctcctcttcttgtatttctctggctccaatgggcaggctgggagtgccgcattagagtacgggaccaagttctcgcgctcactcgggtggggaagtgatggggacggtgacgacggctcggagga

SEQ ID NO: 13200 - DNA, 510 bp, Oryza sativa
  Clone ID: uC-osflcyp176b02b1
gtcatttggggcaaaatgttttctgtagtcaatggtacggcacatcacaaatgagctaagcttgtaaatcgttatgtgatttccatgtctgctcaggttaaattaacctgcgctttgctaacagctctggtttgctatgcttgctgatagttatgatttgtagcatttggttttctttataatttatagcccagaatcactgaatttgctgaatttctttgttgcaggcatttgaacaattgatcaacttaattgaaaaggggtatggctaattagcatcctgttggttttcaagttatgtttaggaatgatatgaagatattgtttcttgttatatcttagctgacaaacactgtttgtatttcatagtgttgctgttgaacaactatatcagatagatgagactgacatcacaaaaaacagtgaggatacttgatgattgctagactgtttttccctggtactcatctgtttcactgcatgatttttttttcccttgttaggtttacg

SEQ ID NO: 13201 - DNA, 568 bp, Oryza sativa
  Clone ID: uC-osflcyp176c08b1
tttatcttctccaagtccaatcgacctcatttcattcgattcatcgatcgctcggcgcggcttagggtttttggcggcagcgatggcgtcggagaagcacttcaagtacgtcatcctcggcggcggcgtcgcagcgggatatgcggcacgggagttcgccaagcagggtgttaagccaggggagctcgccatcatctccaaggaggccgtggctccttatgagcgccctgctctcagcaagggatacctctttcctcagaatgctgcaagactcccaggatttcatgtgtgtgtcggcagtggaggagagaggcttttgcccgaatggtactcagagaaaggcattgagttgatcctgagcactgaaattgtcaaagctgatcttgcctccaagactttgactagtgcagttggagcaacctttacatatgagattttgatcattgcaactggctcctcagtcatcaagctatcagattttggtactcaaggagctgattccaacaacattttatatctaagggaagtagatgatgctgacaagcttgttgcagctatccaagcaaaa

SEQ ID NO: 13202 - DNA, 571 bp, Oryza sativa
  Clone ID: uC-osflcyp176d01b1
tattcttattgacgatcttggcctacaaggcaaacagcagtatcctaactcacaacacaagcgttacattgtcaaagatggagcaccaacactgattccctcagatcccattgcgctcatgaaaagcactgttctttctacaaaatcaaagctcaagctatttctggaaccatttctctatgagaaatctagcagaaggacctcgggaaaagtgtctgatgaacatttaagtgagagtgttgcaagtttctttgaacgccactttggaaaagaggttgttgattatcttattgatccatttgtggctggaacaagcggaggagatcctgagtcattatcaattcgtcatgcatttccagcattatggaatttggagaataagtaagtttgtagtagtttgtttggagaataagtatggctctgtcattgctggtgccatcttgtccaaactatccactaagggtgattcagtgaagacaggaggtgcttcgccagggaaaggaaggaataaacgtgtgtcattttcatttcatgggtgaatgcagtcactaatagatgcacttcacaatga

SEQ ID NO: 13203 - DNA, 578 bp, Oryza sativa
  unsure (1)..(578): unsure at all n locations
  Clone ID: uC-osflcyp176d05b1
gacccacgcgtccgttctgatcatgtcgacagatctagtgggcttcagcagatgtcacggtatgaaatactgaatcatcttcagaggccacagagtttgcatatagaaactgtacctccattgaggctttcaccaccagcgatatatcatgaaaagatacagaagagaacaaccacgatgggagaatccagcaagcattcagttagaactgaaaaaccccagagaatatggcaaatgaaggaaccaagatcaaaaagatcagggaaccgagttctgccaaagtcaagcatgtggagttctcagaataatcaagtgcgatagtgtaaatataatatggtatgaatttgacaattcttaaaatgtgtggttgtgctgctcttcctttgtactcaattctcatcttggagatgcattaatgctgtttggagtagtgcaattcttctcccacggtacttatgttgaaagctgggagatgaataccagatctcaaggcaaaagcgggagcggagaagggcaactagatcaggtgaccctgagaagctttacttagacacanaaaactatgcgatagaaatttt

SEQ ID NO: 13204 - DNA, 425 bp, Oryza sativa
  Clone ID: uC-osflcyp176d06b1
tttgtgctcttcactctccccctgttcctgcaggggtcaggcactgcctgctacaagagtggtgtaggtgattcggctagctcagcgcgaagatgggggagatcaccaatgtcacggagtaccaggccatcgcgaagcagaagcttccgaagatgatctacgactactatgcatctggggccgaggacgagtggactctccaggagaacagggaggccttcgccaggatcctgtttcgcccacgcatactgatcgacgtatccaagattgacatggccacaacagtcctggggttcaagatttcaatgcccattatgattgctccctctgccatgcagaagatggctcacccagatggagagtatgcaactgcgcgtgctgcatcagcagcgggcactataatgacattgtcatcatgggctact

SEQ ID NO: 13205 - DNA, 465 bp, Oryza sativa
  Clone ID: uC-osflcyp176d07b1
ttcgtcgatactgctatcttgtcgtgctacccaggtacaatggccggcgacgctcgaacgtatatgtaaggcagggagagactgaccgacgcagaagcgcgcaggtcgtgagggcagagactgctacaggctggcatgataggagtgccgtgagacgcgcgcactacgcggagagcatctacactctgagtacaagctctgtgctgcacactgacacacctgtggaggcctctccgtatacccgacactacatatgcttattcaccaaccgatccgtacaggtacttgctgatgtacaacttcatggagtgcgtgaggaattgcaacgaggctatggagaaggaccgggagctacgagcctacagcaagctattggtgcgggctcttatgaggatctgcgtatcgctgaatcaagattacgcctgcgtcatggactacaacccgacaatcatggcgctgcagtac

SEQ ID NO: 13206 - DNA, 291 bp, Oryza sativa
  Clone ID: uC-osflcyp176e02b1
gttcactaccgctatgtctgtgtcatggccagcggtccccatggaggctgccgcgaaggtcgtcccaaagggacgcacaaccttgcgcacgtttgcatggagcgcaaagccagagccttcatgtacccagcagtacgtaacgactcttgagctgtacctgatgccgctctactctatgacatcgtactacctgatcaaaaagtttcgaagggactacggattgatacacgagttgggcatgttcaactgcctggtcactgataaccaagagacacgttagtctggaggtga

SEQ ID NO: 13207 - DNA, 479 bp, Oryza sativa
  Clone ID: uC-osflcyp176e06b1
tcgccggccggccggcggacgcgatccgctccgttgtcatcgctcgcgatacacgcagcgactaggcccagcaggtctgcacggcggtctcctccggctgctcctttcattccaggcacgccgggcacccccggttcgttcatcgcatctcaaagaaggtagggaagcatcgcatctcgccgggtattgccagttcgccgccatgccccaaccgaagtgcccaacggagcggaagaaggctgaccacctccaattgattccttgcggggccccggccgggtcttgcggggggtcttgctggataacaatgtgcaccaagattgatacatacaagaagaggcagaggggacaacagcaaatggactttgaattgaagacataccacaggaagaggcagaggcgaagggggcaccagcaaactgtagagttacccgatgagattgtgagggaaagcttgatctggctccctgtaaaatccc

SEQ ID NO: 13208 - DNA, 468 bp, Oryza sativa
  Clone ID: uC-osflcyp176f03b1
tcgaagatggtgaggatgagaccaaaggagtgtatgttgctaagcttgaagaacttaaaaaggtggggggtcccattgaggcaaggtacaaggaatggatggacagaggcccttccatcgaccaacttgcttactgtatcaacagtttcagagatgctgccttgtccaaagatccgaagtttgatcacattgagatggaggagaaacagaaggtgattaaccagtgttccgaagcagaagtctggctgagagagaaaatacagcagcaagatgctctgccgaagcatgctaaccctgtcctactctcttctgatttaaagaaaaaggccgaaacggttgacaggttctgcaaaccgataatgatgaagccgaaaccagctcctaagccacagacgcccccacaaacgccaccgaccgagaaccccgctggcggagcccaaacaccagagcagcaacctcagggagctg

SEQ ID NO: 13209 - DNA, 526 bp, Oryza sativa
  Clone ID: uC-osflcyp176f04b1
gtacgacaaaccatcttcagttgagcctttgacttcgatatctgtggcttctggagcttctacttttgaagtctggatgaccctacctaagtgggcaggacaggttttgaaatatcttgctccggaaatctcttacaaaagcctggttccacttggaattgcttgtgtaaatggaactccagtttcttcgtttgatagacaagatgtggatcggcttcttttcttttgcaaaaatgaagctattgtaaatggtctatattctcatctgccaagatggtcagcatcccttgttaaggacagactgaagggaactccagagtcaaaatcaagtacttttagtgcaaatggagttggagagtaccagaaacatccaatgaaagggacttccctattagtcaaaccaaagctgaaatctgcaaaaatgaggcctattccacactcttcgaagcggcagatgcacccttttgtgggtatccctccgtcctttattcatgatgctagtcaagttaagcctagcttgccagca

SEQ ID NO: 13210 - DNA, 528 bp, Oryza sativa
  Clone ID: uC-osflcyp176f05b1
ttacaagcgtgtgattgagaggttcgagaaggaagccgctgagatgaacaagaggtccttcaagtacgcgtgggtgcttgataagctcaaggccgagcgtgagagaggtatcaccatcgatatcgccctgtggaagttcgagaccaccaagtactactgcacggtcattgatgcccctggtcaccgtgacttcatcaagaacatgatcacgggtacctcccaggctgactgtgccgtgctcatcattgactccaccactggtggttttgaggctggtatctccaaggatggccagacccgtgagcacgctcttcttgctttcactcttggagtgaagcagatgatctgctgctgcaacaagatggatgccaccactcccaagtactccaaggcccgttacgatgaaatcgtgaaggaagtctcatcctacctgaagaaggttggctacaaccctgacaagaattccttcgttcccatctctgggtttgagggtgacaaacatgatgagaggttcaccaaccttgactg

SEQ ID NO: 13211 - DNA, 479 bp, Oryza sativa
  Clone ID: uC-osflcyp176f09b1
tcgttccgctctgcgctgccccgggagatcgaggccgcccgcgtcgccgtcgccaacggcaccgcccccgtcgccaaccggatcgtcgagagccggtcgttcccgctctaccgcttcgtccgcgaggagctcggctgcgtattcctcaccggcgagaagctcaagtcccccggcgaggagtgcaacaaggtgttcctcggcatcagccagggcaagctcatcgaccccatgctcgactgcctcaaggagtggaacggcgagccccttcccatcaactaagccaagatcccatcgccattgccattgccatacacccatcatcgaggaggagaggagactaaaaataaaagaaaacgaacccgtttgtgtatctttagacaaaaaagaccctgtattttcttcgttcgttgcccgtttgtttatagtgatctcgtgttctttgtgttagcttgtctgctcaacttggccgccatggcgga

SEQ ID NO: 13212 - DNA, 529 bp, Oryza sativa
  Clone ID: uC-osflcyp176g01b1
gtcctaccaacaatggaggtcgccgccatggagatctctacctcattgctcctcaccaccgtggctctctccgtcatcgtgtgctacgccctggtcttctcccgcgccgggaaggcgcgtgcgccgctgccgctgccgcctggccccaggggatggccggtgctgggcaacctgccgcagctgggcgggaagacgcaccagacgctgcacgagatgaccaaggtgtacggcccgctgatccggctccggttcgggagctccgacgtggtggtcgccggctcggcgccggtggcggcgcagttcctccgcacccacgatgccaacttcagcagccggccacgcaactccggcggcgagcacatggcgtacaacggccgggacgtcgtgttcgggccgtacgggccgcggtggcgcgccatgcggaagatttgcgccgtcaacctattcttcgcgcgcgcgctcgacgacctgcgcgctttccgggagcgggaggccgtgctgatggttaggtcgctggcggaggcgagcg

SEQ ID NO: 13213 - DNA, 558 bp, Oryza sativa
  unsure (1)..(558): unsure at all n locations
  Clone ID: uC-osflcyp176g05b1
gtacctaatacgctgttactatgtctgacatgagctacccatgtcaacactgacattttatttaacttttcctatgtgaagactggagcaggaaagacatacagcatggaggggccgagcatcttgcattgcaataagcagaaaactggactagtccagagagttgtagatgagctttttcaatctctacaatcatcagaaagcatggctatgtggagtgtgaaattgtcgatggtggagatatatttggaaaaagtaagggatcttcttgacttgtccaaggacaacctacaaatcaaagagagtaaaactcaagggatctacatttctggagcaacagaagtatccatccagaatagttcagatgccttggagtgcctttctgaaggaattgccaacagagctgttggagaaacacaaatgaacctggctagtagtagaagtcactgcttatacantttntcagttcaacaaggatcaacttctgatgagagggtgagaggagggaagatattctttgtgatttagctgttcagagaaggtgagaaaactgtgctg

SEQ ID NO: 13214 - DNA, 312 bp, Oryza sativa
  Clone ID: uC-osflcyp176g06b1
caagtaatatatatgtgtagtatatatgtattttatttacatctcacacctccaaaatcttattctactacagtaaactgggtacagagatataataatactcatacaaatatgtacaacaacaagcacaccacacactgatcaacttttccttggattttttgctctgcagcaaaacaccaaggcaaaagcttatcactgctcatatgtatctcatcatactgaattatactaagtagtagtagtaactacatggctgtatagctatatgcagaccaaatctcgtcaaaattaaaatcctaaaatccaaaa

SEQ ID NO: 13215 - DNA, 557 bp, Oryza sativa
  unsure (1)..(557): unsure at all n locations
  Clone ID: uC-osflcyp176g08b1
tcgtttttctagatttctattctgtacttatttgggatgatttttttgttacttggaccaactagactctagagcgctgtgtgtgtcttttgatcaatgctgaacagtgcttataaaataagtgttgtaaacacagtgctgctttgatcatgtatttgagcctaacaatctctagatgcaccatgcaaaagtagttttttgttttgcccttatagctgttagacataagaatttccttactgttcgactaaaaagttctctttctacttcgataaaagaaaaacttgatgtgaccaggcaaacatgtcatcagtgcttcatataatagttgattctatgaatttttttttagtttcaggtataaaaacgacttggacttctatttcatggagtcatggttaggaataaggaatattctatgaatattccttattcccaaatttgaggactctagcatggacatcctaggagttcctacactggtgggtcgttctcaagaattcttcaagccgagntgtctctttctcttttttttcatctgactttatctcacatga

SEQ ID NO: 13216 - DNA, 519 bp, Oryza sativa
  unsure (1)..(519): unsure at all n locations
  Clone ID: uC-osflcyp176g10b1
tcggtttcttctcgtcctctccacgcccccgagatctcaggagcacaggaggaggaagccatggcgtcggagaccgagacgttcgccttccaggccgagatcaaccagctgctgtccctcatcatcaacaccttctactccaacaaggagatcttcctccgcgagctcatctccaactcctccgatgcattggataagattaggttcgagagcctcacggacaagagcaagctcgatgcgcagccggagctgttcatccacattgtccccgacaaggctaacaacaccctgtcgatcatcgacagtggtgtcggcatgaccaagtcggacctcgtcaacaacctcggtaccatcgccaggtcggggaccaaggagttcatggaggcgctcgctgctggtgctgatgtgtccatgattgggcagtttggtgtcgggttctactccgcctaccttgatgctgagagggttgntgtgaccaccaagcacaacgacgacgagcagtatgtgtgggagtcacag

SEQ ID NO: 13217 - DNA, 517 bp, Oryza sativa
  unsure (1)..(517): unsure at all n locations
  Clone ID: uC-osflcyp176g11b1
tcgtgaacggatccgggcgcagggtgcgagtgcgtgaggcccaatccccaaatcccccccccccctcgccgccgccgccgcccgtctgcacgcaggcctcctcgtcgcttcacttcatcaacaatcaagatgagtcgtggtgggagtgccggtggtggccaaagttctctgggttacctttttggaggcaatgaggcccctaagccagctgctaaaccagcacctgcagctgcacctgcaccagcgccagcaccagcaccagctgcggctgtggctgctcctgctgagaaaccatcacctgcaaaggctgatgccaccaagcagattccagctgggattcagggcagccggagcaataacaactaccatagagctgatggccagaacactggaaactttcttacggatcgcccttcgaccaaggtccatgctgcccctggtggtggatcttccctgggctancctcttggtggaaactgaaggagtgatcctggtgcactgtagcaccggatgaaga

SEQ ID NO: 13218 - DNA, 445 bp, Oryza sativa
  unsure (1)..(445): unsure at all n locations
  Clone ID: uC-osflcyp176h04b1
caaattccaaggtagtacaccaagcactatcaagcttgctattggctacagtgcatacatacacatccctagctatctacccagtacacgcatacgtacatgcacgtattgtacgtacagcttaattaattaattaattaaattagacgttgacgagcggcgagccggtgaggaactcggtgaaggcgagcgcgacgaggccgagcatggcgaaccgcccgttccagagctcggcgtcggcgctcatcacgccgccgctcctcgcctccgcggtctcgccgcggagcagcggcaccagcgacgccgcggagagcacggcggcggtggcggcgaaccacgccagcccgctccagctgccggcctggtccaggagcccgtcgncgngcgacgccttcacggncagngccgacacgaaccccaccatcgncagncgcccgtgatccgc

SEQ ID NO: 13219 - DNA, 573 bp, Oryza sativa
  Clone ID: uC-osflcyp176h05b1
gtactatcggatcgggagaggacgcgacgcgaggcgggctgcgttgtgagggagagaagggatgctggcggtgttcgatcgggcggtggcgccgagccctgaggggctccggcatcccggggcggcgggggacggcgcggcggggctcgccgagaggttccgcgacgcgcgccccggcgccgtcaccgtcgccctcggccccggcggcgccaactccctcgcctactcctcccacggccagagccccctcctccccaggttgttcgcggcgacggacgagatattctgcctgttccaaggcacgatcgagaacatcgcggtgctgaagcagcagtacgggttgcacaacaagggctccaccgagatcaacatcatcatcgaggcttacaggacattgagagacaggggaccttaccctgcggatcaagtcgtcagagacatcaacggcaagttcgcgttcgtgctctacgattgctccaacaactccgtcttcatggccaccgatgctgatggtagcggtccattttattggggagttgatcctgacagccgtcttgtggtttctgatgatga

SEQ ID NO: 13220 - DNA, 348 bp, Oryza sativa
  Clone ID: uC-osflcyp176h07b1
ttgttacggtgagggccatattgagacacacaaggcgtattttgagatactctgtgttgataggaaagatgtaaagcccaacataccaacattatcttcaggcaaaaaagcagaatcatttgatggccaggtcatccactccatggattactccaatatcggcaccaagacttataaggaaatgatcaaaggcaagcgtgtaacgatcgatggctatctcaaatgagtggtatacattgctgcacaatgtgcagaagtaaatggtactgagattccatgtacgatggtggtccgaacaaagcattggatcataccaaactattttgcatggggcgttcacattttaaa

SEQ ID NO: 13221 - DNA, 292 bp, Oryza sativa
  Clone ID: uC-osflcyp177a01a1
tttgtttagtttataatcactgtatattttctgtatttggtaaattattgcgcaaacacaaaaggtactggtcctgtatttcactaattaagcaccaagtcctatgactatgagaaaaacctcaaacatgcaaacttcaaagactccaaaatttacaggaagttcacaagctccaaaacgaaaacacacatcattcagctcagagctgcagctgtaactggagccaccttactttcttgaagcgagatcactgtctcgaaggcgccgacgagggccttcaccttgctcttcc

SEQ ID NO: 13222 - DNA, 326 bp, Oryza sativa
  unsure (1)..(326): unsure at all n locations
  Clone ID: uC-osflcyp177a02a1
tttgttttttttattaacggggggaacattccttgtttattaactccatgcccatacacacaagggtccaaacacggatcccattaattaaacgcccatccaaacgactatgtataaaccctaaaacctaacaacctccgatacgcgagcatttctaagacgctcactagctacctatctttaacacttatcccacatccaaacttaacgggtccacacctggaggcctttcacctaatcaagtgatgatacttattggaaccatttttccttggaggtcccctcgctccttttgccntggccccccctttttacaagaaaaagca

SEQ ID NO: 13223 - DNA, 345 bp, Oryza sativa
  Clone ID: uC-osflcyp177a03a1
tttgtttttttttttttttggggtttaacaggcaggaaactaatcactgtaactcagctgaaactctaaaccagaagtatctttgcatgtccagacataggagtgagtgattacaggcccagctgttctgaaaccaatagaactactgaagagcaaatcgaacacactgagcaaaaactggggcagcagttgagcatattgatatgggaggtctaagaatgaaacaaatgaagaagtaggttgtgcttacattacgcttaacacgacgatgggttcgacaaaaactaggataggggccccccccttcttctctggagtccttaaacaaatatgatcctcttgctg

SEQ ID NO: 13224 - DNA, 255 bp, Oryza sativa
  Clone ID: uC-osflcyp177a05a1
ttttgtttttcacgcaaaatcagagaatgaatttagcagaaaatattgtgggcaaaaacaaatgaccccattgtcacagggccagttcgatgggagagcagacgccattatagtgctggcgtgtatatgctccacaatcctagctcagaaatttatagattatttcgtttaaaaaatatttctctggatatatatgtgcatgcatgcaagcatgcagcaacacatatatagtcatatgttaaaaggtcggttatg

SEQ ID NO: 13225 - DNA, 324 bp, Oryza sativa
  Clone ID: uC-osflcyp177a06a1
tttgttttgtggcggttggaagtaggcaataaaacatggtacacacatacatgtagaagcatggcacacccttagcagcatgcccaccaacaaaatgtttatgatcaacaggaatagcaaactacaccaaatacatttccaaaaatagataatactaattcccaattccaattcaatcacacatttattgggtcacaaataatctcaatggtaagcccaaaggttctttggcgggccccttttcgctaaccccctccttggcgcgggctgttacttttcctgccgccaaataccgggcgccttctgtttgccggggggagggct

SEQ ID NO: 13226 - DNA, 338 bp, Oryza sativa
  unsure (1)..(338): unsure at all n locations
  Clone ID: uC-osflcyp177a07a1
tgtggtttttttttttttggtttttttttttttttttttttttttttttttatttttaataaaaataaattaaaaaaaaaaaaaaaaaaaaaaaataaaaaaaattaaaaaaaaaaaaaaaaaaaaaaccttaaatgaaactattaacaaaaattaacaaaaaagaaaaaaaaaaaaaaaaaaaaaaacccaaaatacccccaacaaagtacaccgcaaacacaacaaaatcagacaaaaactggaaaaaaaattggagaaccttacaaaacctactaaaaaggttaaaattcattacaaacctgnttttttttttcccgcatgacataataaaaagg

SEQ ID NO: 13227 - DNA, 373 bp, Oryza sativa
  unsure (1)..(373): unsure at all n locations
  Clone ID: uC-osflcyp177a08a1
tgttttttttttttttttttgttttttttttttttttttttttttttttttttttttttttttttttttttttttttttttttttttttttttttttttttttttttttttttttttttttttttttttttttttttttttttttttttttagaaaaaaaaaccccctttttaaaaaaaaaaccccaaaaaaaaggtttcaaaaagggggaaaaaaaagggggtttaaaaaaaaaacccaaaggtttttaaaaaaaaaaacccggggggggcaaatacaaatactaggatagggtagagctagagagccaccttggtccttttccaacgcgagccacttagggcttaaaccacgtcagnngagaagggtgtaa

SEQ ID NO: 13228 - DNA, 333 bp, Oryza sativa
  Clone ID: uC-osflcyp177a09a1
tgttttttttttttttttttgttttttttttttttttttttttttttttttttttttttttttttttttttttttttttttttttttttttttttttttttttttttttttttttttgggggaaaaaaaaaaatattttttttggaggaaaaatcccaaaaaaaaaaaaaccccccccccaaaaaaaaaaaaaaaggaaaaaaagggggccccttaaaaaaaaaaaaaccccccaatcccccaatttttgggaaaaaaataaaaaaagggggaaaaaaaaagatttttaaaagtggatcacgccaacctcctaaaataccaaaattcttaaaa

SEQ ID NO: 13229 - DNA, 345 bp, Oryza sativa
  Clone ID: uC-osflcyp177a10a1
caggacaaaatggatcgataacataataattatgcagcattcattgataaaagcagcatcacagaaccatgacccaaaacttgacaggaaatagaaacatccagacgcagcacaatccaaggatgacaaccggttcttaactattgtaaaacaaagtgcatcagacaagtccgagctagcaaagactctttttactccgccatcctaagcctctacgttcgcgactgatatatatatatatatcaccagatggccattgaacttcttttcttgcccacataccgggcgccttctgtttgccggggggaggggctaccggatttggcctggccccccttcgctcgg

SEQ ID NO: 13230 - DNA, 339 bp, Oryza sativa
  Clone ID: uC-osflcyp177a11a1
gacagcaactcaataatctttcgatatttcaccgagggtaatgtatggtaggaaaatcgccagacataacagagccggccagactcaactcaaactcaaccctatgatggtaaactgtttgcgattaacgcctccgcctatgacaatgtttggagataaacgcttccaccaaaaaacgaatgtcggggagtgttctcccctacaagaattattattgtgttaaaatcaatggtcctacccccctctttgcggcggctgttacttttcttgccgccaaataccgggcgcctcctgcttgccgggggggggggctacgggattgcgcctggcctccttttt

SEQ ID NO: 13231 - DNA, 360 bp, Oryza sativa
  Clone ID: uC-osflcyp177b01a1
tttgtgtaatgaaacatatagcaacataatattattggatcatttacatgaagcaggtgattacaatacattgaggggggcttcatcaccacatataggtagatgagtcagcaaaagattttcagatttaaagctaaggtacaaaatatgctgatgggggttcttaacaaaacaaagattacatgaacaaaatatgaaatcaacaagagggggggcttgatcgaaatcgatcgatgatcttcatcagctagtcgatgatgcatcaaacgatgaacagaggataaacccccagaaatgactttccatcctcaaggaatttgtgaggcggcgtacttctcggaaaacctgctcgttctaaaa

SEQ ID NO: 13232 - DNA, 330 bp, Oryza sativa
  Clone ID: uC-osflcyp177b02a1
gccgccgaggtgggggcttttaaggaggagacgccggcggcgccggccgaggctgtggccgaggaggcggcgcccgccgaggccgaggtggcggagaccaaggaggcggagccagctgcggccgagccggcggcggaggaggtgaaggaggccgagcccgagccggccgagccggaggccgagcctgccaaggaggaggtggcgccagagcccgccgccgccgccgaggcggaggccaaggaggccgagccggcggcgcatgtggccgaggaggtgaaggaggaggaggcagttgctggtcatcattttctgccagttaaggtggaggag

SEQ ID NO: 13233 - DNA, 330 bp, Oryza sativa
  Clone ID: uC-osflcyp177b03a1
gccgccgaggtggaggctcctaaggaggagacgccggcggcgccggccgaggctgtggccgaggaggcggcgcccgccgaggccgaggtggcggagaccaaggaggcggagccagctgcggccgagccggcggcggaggaggtgaaggaggccgagcccgagccggccgagccggaggccgagcctgccaaggaggaggtggcgccagagcccgccgccgccgccgaggcggaggccaaggaggccgagccggcggcgcaggtggccgaggaggtgaaggaggaggaggcggcgccggcgccggacgacaagcttgtcgctgtctcctcg

SEQ ID NO: 13234 - DNA, 354 bp, Oryza sativa
  Clone ID: uC-osflcyp177b04a1
tttggggttgtttaattatttcttttttttctccattttttttttttttttcctttaatttctaattttcaactttgggggtcctcttaagccttttttttttttccccccaaaacaagggggaacaaaaaaaaaaaaagccccctaaaaagcccccccaacccccggaaaaaaaaacaactgcgggggggtttgccaccccgccccgtttttttccaagcccaaaataaaaaaagaagaaaaaaaaagggagaggaaatacggatgtcccacagggggctgggctcttgagatccgatcatcaggtccggaacttggagtccctttaagtgcagccgaacctgagagcccccc

SEQ ID NO: 13235 - DNA, 308 bp, Oryza sativa
  Clone ID: uC-osflcyp177b05a1
tttgggtttttttttttttttttttttttttttttttttacagaaataaataattatgtgcatgtcacggcattcatcaaacgcaaccaacggagtgaattacagtttacaaatgcaaggctacaagcacattccacgatcgttcacacaaactcaaagtagtaccggcggggatcatcagctggatcatcattttagcaggtccacaagatcattggggtcgtgctctgctattttctgcaatttactgaagacgatcatgcgacgctgtcttgacttgagataaaaactcctggaatgtacgtacg

SEQ ID NO: 13236 - DNA, 313 bp, Oryza sativa
  Clone ID: uC-osflcyp177b06a1
tttggggttacaaaaatgaaacatgattaattactaggattacttaacacacggatcacagaaaatcaatccttgcatgcaggggaaatcgatggatcgacctttctccttaacttgttcttaattctcatgtacaatcaaagaaacacacacgcacacacacatgcgtgcactgcatctctctgagcaacgaactcgattgatttgattttgattcgctagggattaaagagatcgcgagggagcatcactgatagagataaacggcttggccaatataggcagccaacacttttttaccgtgattttttct

SEQ ID NO: 13237 - DNA, 344 bp, Oryza sativa
  Clone ID: uC-osflcyp177b07a1
tttgtttttttttttttttttgagcgaatgtagctgaaccattctagtagctggttaacaagccaagcatgtcattggatacaaaaaaatgttggcaactgtatagaaatttacaagactctgaaatctgaatctagaaaagcatcaactcatttgggcatacaaaaagtgcagttcagaaaatgtgcaggactcccatgctaccatgatcactccgaacttccttccttgaacaccttgacccaattctcagcactgtcaattatttcaccagtcttgaccaggtaccgaaccttcgttccataggtgaaagtaccgcccgagccgccggtttcacaatccct

SEQ ID NO: 13238 - DNA, 307 bp, Oryza sativa
  Clone ID: uC-osflcyp177b09a1
tgtggttttttttttttgggtttttttcttttttttttttattttttgttcttcacaaaatgttcttggtcctgtgtttcactaataaagcaccaaggcccatgaccatgagaaaaaccccaaaccagccaacctcaaaagcccccaaaatttacggaagttcacaagctcccaaacgaaaacacacatcattcagctcaaagctgcagctgtaactggagccaccttactttcttgaagcgagatcactgtctccaaggcgccgacgagggccttaaccctgctcttcctcgtctcacaagcttgc

SEQ ID NO: 13239 - DNA, 311 bp, Oryza sativa
  Clone ID: uC-osflcyp177b10a1
ggctggaaatggatatattccccaagcgtgacaacaacttttgagtgccagtgtgtgtgtgtgttcccctcccctccctgcttaattacatcatctctaacgtaaatgattcgtgatcttcaacgggaggaaaatgacgctctcttcgacctccagagcggttttcctcccgagacaaaaagcacaaatccaaagctccccaaaaggctgtacaaaatggcaaaaagaaggaccctctcacttggaggaagtcccttccctaaggagctggctttcgcaggtgatcaatgaaacttgacgatctcttcctt

SEQ ID NO: 13240 - DNA, 355 bp, Oryza sativa
  Clone ID: uC-osflcyp177b11a1
tgggtttttttttttttttgtgttttccccttttttcccctatttcttttatgggggcaaaaaaccctgcatttttgaacccaggaaaccttgtttaatttgatttgaacactgttttttttctactagttaaactccttttttgcaaaaaccccaagcctttcttacacttgacagttacataaccaactcctaacaatgatcccaattatatttcggtgggatctaagagaagctgagatagagattccgacaggatgaatttgcgctctcaaaagtcggtgtccctccggatcggacatcattgttgcatgtattaagggccccccaatttcccttggccccccctcgctcg

SEQ ID NO: 13241 - DNA, 346 bp, Oryza sativa
  unsure (1)..(346): unsure at all n locations
  Clone ID: uC-osflcyp177b12a1
aggacaatccacacccagtaatccatattaataccacaatataagagtttgggagagggtgtttcatacgttttacaggctctgagacctcatacgggtaaatctccgacaacactccatctgcagctagaatcatgcaggcaaggctaaacgatgatgatgatgatgatggtggggatacgttttacaggaaacatggatatctttcttattaacaatagtatcgcaagggtgaatcataagagccttatatatatatttctggacccgtccactgagcatcnggggnctttttgtttgccggggggaggggctacggtatttggcctggccccccctcgctcgg

SEQ ID NO: 13242 - DNA, 196 bp, Oryza sativa
  Clone ID: uC-osflcyp177c01a1
tttggggttttttatattttgcctgtttttttttttttttttttttttttttgggggggaagagagcaaaaaaaagaggggggcaaagggacggaccaaaaagccaaacattgtaagggtgcaaagccgctcgcaacagagagaaaactacagggccaagacaaccaagagcccagccaaaaggtcaaaagggcaa

SEQ ID NO: 13243 - DNA, 373 bp, Oryza sativa
  Clone ID: uC-osflcyp177c02a1
tttgtgttttttttttttttttttttttttttttttttttttttttttttttttttttttttttttttttttttttttttttttttttttttttttttttttttttttttttttttttattaaaaattttaaaaattagtgaaatattaaaaaaaaaaaaaaaaggcccaaaaaattttaaaaaaaatacaggcattttaaatttgaaaaaaaaacaacacaatatgttctttgtgtgaaaaaaagtatataacagaaaaatgttgcaaaaagccgggacataaggtaaaagaaatgggctattatcaaaacaaaacacgtaggtgattgcagcaatgcccacgtcggcttccgagtagagcaatagatagcc

SEQ ID NO: 13244 - DNA, 355 bp, Oryza sativa
  unsure (1)..(355): unsure at all n locations
  Clone ID: uC-osflcyp177c03a1
ggaccagagtcaccgctattcattcattcattcattgcctcttggttggatacattgaagcccacatgttacatactgccagctgcccccacacaaacagttaccaaattcatctataatatgtccatacaattgaccgattgattatgaaaacatgcttctcagtaaccgagcaaaaaaactctggcattgccattgtgcttcacctcaaacacttatatattttcaggtgaccaaaaattatataacactaccatgtagtagaaagctggagcaggagggacaaagattacagcaactcggcacacggcgacggcagtggcngccnaaaaacattctttttgcccatctgcag

SEQ ID NO: 13245 - DNA, 353 bp, Oryza sativa
  unsure (1)..(353): unsure at all n locations
  Clone ID: uC-osflcyp177c05a1
ttgggggtttttttttttttttggttttctcttatttttttgtgtttttttttttggagtggattcttgttcaaattctacttttgagactgctcacaaaatttcatttcagttcaaggctagtcctgtgggggcaaaaaggggggggatcccccattgaatggcccccccgccaacacggggggccagatgctggataccggagaaaaaggaggccccccccacgaagggaatttcaggcttgatgatcaattctnnnggacccaacactctagttggggggaggcgacggcgtattggtgatcataacgcaaggaatttgtcgcccgggaggacgctggatccatggactt

SEQ ID NO: 13246 - DNA, 324 bp, Oryza sativa
  Clone ID: uC-osflcyp177c06a1
ttggtgttttttttttttttttggtttgtccaccaaactgttgttttttttaaaggttgggcctcggggtcacctttgtttgggtgggtcagcctcccccagaattgatatgtgggttcaaggggttcctttcctcgagtaaccatggggttcacccaagaaacgttgctaaaggctgcaaggtgtcagccgctgctatgggacacctgtaccatatgtggccccaatccgccctgttaggaacttggggtacaaaaaaaaatcaaaatgatcgttcacattggaatccgaccgtgcagtggagccttataaactttggcgccc

SEQ ID NO: 13247 - DNA, 440 bp, Oryza sativa
  unsure (1)..(440): unsure at all n locations
  Clone ID: uC-osflcyp177c07a1
gaggatgcacgtttacgtattttaggacctcctcgagccgccccccttttttttggggtttttttagtttttggcgaccaaacattcaaaccatgcattgctattgtaattacacatgcatacattaagaattcctagatgccaagtggcatgaagctgtaaaaaaaaatctagagactactgtttatgcacagcagacataaatgaaccgagtcttttggcatgttaacactggagcaactacgttttagtcagcatcaagaagatgattccaagggtaagtggcagtgtgacacacgatagacacccgagtatatngttccattagccttcttgataggaaccaactttgagggacccccccctttcaaaaatttagggaaagaaaattgcagtcaagttaaacggcgtggatggtcacattttggatgcccacacca

SEQ ID NO: 13248 - DNA, 309 bp, Oryza sativa
  Clone ID: uC-osflcyp177c08a1
ggaagccagcgggacggaaacattatggcaaacaatccaaggaaagcagtccaaagaaaaaaataaagaaaaggggccccaatgctgtgtggccattccggggcttggatttagaagctttgctgtaaccagcttgcagaatcccacttgtacaactccagcattcacagttggacagcacatgctcgcaagccgttccacacaggccaatccacagtggggattcccagggcctggatctaaggtcaacgaaatggggcaattcggttcaagtacacgtaggtgacgccgcccaggcggacatttcct

SEQ ID NO: 13249 - DNA, 336 bp, Oryza sativa
  unsure (1)..(336): unsure at all n locations
  Clone ID: uC-osflcyp177c09a1
gcaacagtaattagaatagcttccttcactgttcttcgaaaaaaaaaagaaaaagaaaaaaaggagtcgaggacgagaagagagcacaccatcagttttattttattaagatagcagcgagagatgcatcaagcatcaatcatgaaaggtagagtagctacgatcaggtgtttgtaggaaatactctcaattggctagccacagaacatagccctgcggcatgtagtggcagatggcgtcgccacggcttgccttgaggagctcgaagtacgcactgtcccaggtggtggtgttgacgtgaagaccnncattgtccaaccctacttcntttcaaag

SEQ ID NO: 13250 - DNA, 355 bp, Oryza sativa
  unsure (1)..(355): unsure at all n locations
  Clone ID: uC-osflcyp177c10a1
tgtgttttttttttttttttttttttgctagttatatcatatatattagatgaagtttagtctcccttgtatcacatcttacagtttcccaatcccaatacattgcagcttacgcctgtacgcgtgtatccaactatccatattgtaccaaaccagcgttgataacaaaactgaaaccgtctccgcttgctcctgcccaccggccatggcggcccggcccgaacaaattgattttcagtcttgatgatcannntnaatccactcaccactctttttggggtgaggcgacggcatcttggtgatcataacccacagcttttgtcgccnccggaggaccttacgatccataagtctt

SEQ ID NO: 13251 - DNA, 335 bp, Oryza sativa
  unsure (1)..(335): unsure at all n locations
  Clone ID: uC-osflcyp177c11a1
aagatcaaacaaaaggtgaatatcataaatgtttggttccgtgatcaatatcttcgcttgctacagctacacaaattttcatttatgttctatgtttgttctttttctttattttgattgtggatctgccattgaatgtctcgattgtctcctcgctgtcaccagatcttggatctcgtattctcatctgtcgcaactgtatgattgattttcagtcttgatgannnnnntnaatccactcaacactctattttgtgggtgggcgacggcatcttggtgtatnttnnnnnaccaccttttgtcgctcccggaggggtttggaatccatggacttg

SEQ ID NO: 13252 - DNA, 359 bp, Oryza sativa
  Clone ID: uC-osflcyp177d01a1
tttgtggttttttttttttttttttttttttttttttttttttttttttttttttttttttttttaaaaaacggaaccacccccccattccggaagggctgctcaaacctgggcctggaagcccaaccccaagcctcgggggaaaaaaaggttttggttacccaaaggccccgggggcccagggggtttgttggcccccggggtttggaaaccaaagggggggggcccaatttttttccaaccccatttcccagggggtttggttttagccccccccctaaattttggggccggcccccctccgcaattgcaggacgaaagagtacaactactgtacaacttggcacgtttgcgttgga

SEQ ID NO: 13253 - DNA, 372 bp, Oryza sativa
  Clone ID: uC-osflcyp177d02a1
tttttgtttttttttttttttttttttttttttttttttttttttttttttttttttttaaaacacaataggcttaaaccctttttactaattttgccttagcacaaggttaattggtccagagagacggtcaatgcccccataagggagaccggtttggatttcggggcattgcgaaggggaccaaaacgggggggtcaacccacacgggaagataacattgatattggatttgccaaagttcacacttgccggcgggggtttttcctttgtaggagaacaaaacaggggatgccccattttttgggccaggcaatgacctgcagcgacgtgctcaatgaggggtggttgtgggacagggttcttcctcat

SEQ ID NO: 13254 - DNA, 345 bp, Oryza sativa
  Clone ID: uC-osflcyp177d03a1
tttggggtttttttttttttgggttttttttttttttttttttttttttttttttttttcattttaaaccaacccccccccttgggaatgcatttcatttttccaacccaaaaaaataccggcccgaaattttaccaaaggaagacttcccccattctttttattcaacaaaaaaaaaaccagctttgaaccttttaatacacttaatactcccaaggtggggtatccccccctggtgatgctctccaaaccttttggtcccatttttgcagggaaccccttgtacagggccgggtttgatgccctggggctcccaacaaaatgggacctaggcctatctgatgc

SEQ ID NO: 13255 - DNA, 343 bp, Oryza sativa
  Clone ID: uC-osflcyp177d04a1
tttgtgtttttttttttttttttttttttttttttttttttttttttttttttttttttttttttgttttttttttttttttttaaacgggggtccccacactttactaggggccctggggcaggggggccgggggacgggggccgcgcccgcaaggggggggggcaaggcccaggagggtggggggccccagacatcggggagaggatggaaacacagaggggggaactacggccagctcaccacaacaaaagcagcaggaattccttgtgaaactctcgagaaagaaaaacacgacgagctaaaacacaaaaggttccaagaagccagggcccccaccgcg

SEQ ID NO: 13256 - DNA, 363 bp, Oryza sativa
  unsure (1)..(363): unsure at all n locations
  Clone ID: uC-osflcyp177d05a1
tttttgtttttcttttgggagccgggcacaccacaaactgttcacggaactgcagctggttcaccaggaataactgtaacaccaagaagaataacagggtccaacagtgtgaagttcttacatatatatcctcagggcttcaatttgcacctcttggtaacacataatttaactttccaggaagaattttctagcagaatgtgggaaatttctatacataagctacctatgctcaagggtggctcancnggcataatccgaacccaccctttttttaacgagctcagcatattattctnnnatatgcaagctataccctagctccggagaaaatctacagccctctgcttttacaggttgccg

SEQ ID NO: 13257 - DNA, 343 bp, Oryza sativa
  Clone ID: uC-osflcyp177d06a1
gatggggaaaaggtgatcattatgctcataaacaaaatttaacgaagaattacacacaatgcaggaagaacaaattaatcatgagcagatttcattttggaactatttcatacacaaaaatacagttctaagttatcaaagccacttccataatttcataaccttcctccttatttttacttgtcaatgcagacttaggttgatggcatgcctacaccctttaaaaacaaaaattagaaatttccgctgtccggaacaatcaaaagtttttgtgtggatttctaaggaaagcgtctgaccgataagcttatcagattttttttgggccttgcagaatctacct

SEQ ID NO: 13258 - DNA, 360 bp, Oryza sativa
  Clone ID: uC-osflcyp177d07a1
gctagtcaatcaaaacatctataaattattatcttctgagatgaaaggtttaacatcggctgacagcggactcaaatagttaatgtacaatactcagacattgttagcattagaacagaagaaatggttagccaatcagtcggacgccgtctccgtgcagctcggaaaggaatgccgcattgccgcagcttgcaaccatgtcatttccttggcggaagacatgatgatgataagtcatatcatcgtcctaaacaatattccttctattctttgcttgtcacagaagcctcagtccgcaattgcaggacgaaagagtacaattaacctttttaacgtgacgacccccttttgttctacccg

SEQ ID NO: 13259 - DNA, 319 bp, Oryza sativa
  Clone ID: uC-osflcyp177d09a1
agctcgctgtgaaaatcatctaactgatttacaagtgtgcacatggccgaagagttcagcagcagcaatgcattccaagccaggtactttcaagttttccagtaattacagaatgcgatacatccaaagatgtgagaatcaccagcatgaaaaatagcaataccagcgacaaaactattaaagcaatttttagattgttccattcagcatatgctagtaaggcctcaagccacccaggcggctttgttatttggcttctgataatcagatcaccgttggttctccctcctccgggcgtatcgggtcctgtcattgtacc

SEQ ID NO: 13260 - DNA, 238 bp, Oryza sativa
  Clone ID: uC-osflcyp177d10a1
ggttgcaaggcacgccaagtagggttattttgctgtaagttttttttttttgtcatcacagcaaaggacatttgcagttcacacaccgtaccatatgcacctagatcataaccagattggaatgaatcccaacatacacaggtgaggctaaaaatccatgacatagataggacaacaaattaacaggaagtcaattcaaacacagcatccaactactgccagcttaccacaactctta

SEQ ID NO: 13261 - DNA, 362 bp, Oryza sativa
  unsure (1)..(362): unsure at all n locations
  Clone ID: uC-osflcyp177d11a1
tggggatttcctttgggttgcggggcaccccaagtagggttattttgctgcaagtttttttccctctgaatcacagcaaaggacatttgcagttgacacaccgaaccatatgcacctagatcatcaccagattggaatgaatcccaacatacacaggtgaggctaaaaatccatgacatagataggacaccaaattaacaggaacttaagtataggcatgcctacacccatgccatagcccaaaccacaaaaaacttgggcccaaaaaggacggaaaaaatctgcagatatntaattttcattgcaaaaaacangctagctcaccaagaaaatactacggtgttcagatgtacagcagttgg

SEQ ID NO: 13262 - DNA, 266 bp, Oryza sativa
  Clone ID: uC-osflcyp177d12a1
attaaaatataaattaaaaaaaaaaaaaaccaaaaaaaaaaaaaaaaaaaaaaaataaaaaaacaaaaaaaaaaaaaaaaaaaaaaacaaaaaaaaaaaaaaaactaaaaaaaaaaaaagaaaaaaacaaacacaagtgggaaaaaaagcccaaaagaacaaaacaattttataccacaaaactttgcgcagcaagcaatccgcaaaaatggctgacacatcattggcgccaatggtggatccccaatatgagcgtctaacgtaaa

SEQ ID NO: 13263 - DNA, 364 bp, Oryza sativa
  Clone ID: uC-osflcyp177e02a1
gtaccagacgctcaaatgcattcaattgatataggggcgaccccataatgttgcacaagcaagtgagatgagcaaaaccaggaaatttgtggcccctcccaacgacaataacgccttcctcctggtgtccaccctaacagctcaccatgacactccacatttttgcatccggcattttagtagaaggtgacggtggcaatggcagccgcgacaccggcaacggcagcgcaccttttgagagcaccggcaccggagaaatcggggtcagccgcattggcagggtcatgggccttcagcctgctgcactgccgtttctgccttgatcttgctcttggaaaaaacaagccgcaatgcaaactttttt

SEQ ID NO: 13264 - DNA, 366 bp, Oryza sativa
  Clone ID: uC-osflcyp177e03a1
gtcgaatgcttgtgtgaattttgaaacaattaaatgtacacagttctggttaaggttcgtacaggattcaactaagcatcacactaaacaaacaatgatgaaacaactatacaaaaaaagagtagacgagaatccgtgtccataattaagaacccagggcctcaaggaagcgtcctccaaacaggagctgctaagcccatttttcagatccttaaaacagcagcagcagcaacaccaatggagctttgttagaccagcagttaggatgtttgctagtcctcgagctcaacaagctgagctcttctttcggcaggttttttttgaaccaatccatctttttgggccccaaaatcataggaggccccc

SEQ ID NO: 13265 - DNA, 232 bp, Oryza sativa
  Clone ID: uC-osflcyp177e05a1
ggggggcatttcagcattcaattcgatgaggttctttttcacatatttttttcaacattttccaggaatgtgttatatcccagagggcccttaatccaatccaactttttgtagagaccctgaagcccttctgcttacaaagatgtgttttgttccctggcccccgggggtactcaatagacgcggtggagaataccaggatcgtgtcagtagtaggatatcccatccaccc

SEQ ID NO: 13266 - DNA, 290 bp, Oryza sativa
  Clone ID: uC-osflcyp177e06a1
gctggtataaaacgcaccaacattactcggtttaagtagagtatttatcagcagaaacaatcttagacaaagagaagaaaatgatgaaaatcaactattagcagcacacagcatactgcatgagttttcaatctcaatacaccatcacgactgaatagactttatgagttaggcaaatgcttcatgctttacagccaacttattaatttttcccacgggtccagcaacaattaggccagggttgttaaaaaggctggctttttaagaaacctcacaagtcaatttgcaaa

SEQ ID NO: 13267 - DNA, 353 bp, Oryza sativa
  Clone ID: uC-osflcyp177e07a1
agactggttaaaaaatgttcagttttcacttttcagcgcatcactagttgagtagttgatccttgtaaacagtttatattcacatcaacaactatatcagagagggtcgatttgtgtgacctatccatgctatttcatcgagaatgaagtttgtctaatcagggtgtgctaaactgctaatatacttgacagaaatgcagacacccccccaaaaaagagaagaacagataactaatactggtatgtatggtcactatacatgtgtgctgtcatgttaagggcttgaagcatagcctctcctcgcttgtttaccgcacggtggccaacggcagtagcttgcttccacccgacga

SEQ ID NO: 13268 - DNA, 386 bp, Oryza sativa
  Clone ID: uC-osflcyp177e08a1
cagtgcagaaatttttctgaaacaaaatgagtacatcatcctcctctatcatctccctccttaattaaatcatcacagaataatcatatatttactccgtgatgcagtagtatagtgtgtgacgaaaagtcagagcagtaaataaataaatccaaaaggcgaatttacgaagcaagcaagcattagtggttattaatctccttcaattaaggcctcctcctccttaatcaacggcgagggtggtagtgctgcggcttggcggcggcgccgtcgccggcgggcttggcgtccatgacggtctcgaaggcgccgacgagcgccttcaccctgttgcaatggcatagctgcctttcagcgctcttggaagcacaagcgcaaggtttgcc

SEQ ID NO: 13269 - DNA, 336 bp, Oryza sativa
  Clone ID: uC-osflcyp177e09a1
ctctaaaccttcctggcatttgcaaatttcattgctggaaaatcaactccaatgcacagcaaaaatttcaggtttgttggtgcaggattggatcaacctcacacacatgttcagaaatagtcctaaaagtaagtatcatgaggcacatggaacggaagcacacacgccattacaacacaatggcataaacgaagttcaggcccaaaatggcatatcaagatcagctgttcgtgcatcagctagcacttagcaatatcttggtccatggagagctgctaattcagattttacttcaggtatttcccgacccccccccttgcacgggctgcaaaatcc

SEQ ID NO: 13270 - DNA, 370 bp, Oryza sativa
  unsure (1)..(370): unsure at all n locations
  Clone ID: uC-osflcyp177e10a1
gaccaaaacaacacaccgattggcaattgtgccttataccgagaataaagtaaggtttgcagcagtgaaacaaatatcacggcaaaaaaatattggccggatcatatggaaagcctcgagatggtacaggtagaacacaccaaaccactagtaggttggatgtgcgaataattgttcctcaatatgtggctgggttggccctagttgaaatcaggcttctcagggtaagtttacagactgcctcatagagaaaagggtccaacatgggctggtggattaatatttgaacaaacaactgattttnntggagcagaaagaagattccctcaagaagtccagcacaatttgcacccatctatggcatctttac

SEQ ID NO: 13271 - DNA, 359 bp, Oryza sativa
  unsure (1)..(359): unsure at all n locations
  Clone ID: uC-osflcyp177e11a1
tttttttttacaatctcattaacccgtgcatattgcactgagcataatatggtcttgatcaaggaacaatgtgaccaaggtacaaatcacattccaaagggcgtgaacaatgtaatgagcaacaatacatgcaacatgttagctctatttatgaaatggagccctttcaacagtgaaatttacatcatgataatttatacggggactagtgatataatcatagacgcggtgaacaattaggatctggaaacagaaaaacaggggccttgttntttccttaactcaccttcgggggaacngagagccgaggcttttttatgtcgtctttttgcagacttgcnnttttttcagcttcgtgg

SEQ ID NO: 13272 - DNA, 407 bp, Oryza sativa
  unsure (1)..(407): unsure at all n locations
  Clone ID: uC-osflcyp177f01a1
acaaaagactcaactaagactgggtattcattttctttacagactaacaccactaagtgaaaacagttaagttaatctagctaatgagacctagacaatgttagcatagaggtagttccgatataagccatgctatccaaaagagtaagtgaaatacacctgagaccaagaggaaaaaaaaaggaataaagatggcataaagatgtatatataaagagtacaagagacaggcaatatttaatttatgtctggaacaattatatattcttgcacatatcattcatagccaacccacgagattctagctaaaacctttgtaccacaggtgaataaatttgacgcaagncattaatgttcggggggatggnntttttagccacccgggcagtgcagctcgacattccccc

SEQ ID NO: 13273 - DNA, 385 bp, Oryza sativa
  Clone ID: uC-osflcyp177f02a1
aatagcaaacacaccaagcactatataaataccaccacattgtatatgtacatatctagcagagcacacaaaggctcatccttattaacaccaacaacatgatgagcttccaatgtagcattaccagatgatagggcacatacaaatcacaccagaatgcgcttccaatcaaacccaaatgtttaggccttgcgaccagtagtatacacatataccattggttctctctctgaaagaaccattttacagttgcaagatgcaatgttcttgcttatttgaggtagtttcagctttctaggccgcaaccgcctcgcgcagtttgctgctgtccgctgatggcctcaagactcttcgtggcaggtggagatcatatttgccacttggc

SEQ ID NO: 13274 - DNA, 426 bp, Oryza sativa
  Clone ID: uC-osflcyp177f03a1
gagatcgatctggaattaatttgtattcatcgtgttggtattacatgtacaaactgcatttggtacaactgctacgatgaattctccagggactagtgcgttatgctctccatgattgggaatctgcttgacatatatatcatcagaagttattttttttcttcatctttgatccctggagatataacagccgaggaaaagcaacgaacaggcgaaaaaggtcgtggatttaacgcctaatttgcttgcagctcctgattaataacccatctgattcatctctcattccttaggggtataatttgttcttttgtaggcccgcactcgatctccatcctgtatggtctctcttctcctagtgatggaacgaaaccctctagggctccgcgggccacagccattgtatccctttggttggaggtgccc

SEQ ID NO: 13275 - DNA, 305 bp, Oryza sativa
  Clone ID: uC-osflcyp177f04a1
tttttggttttttttttttttttgttttttttttttttttttttttttttttttttttttttttttttttttttttttgggaaaaccaaaattttattgggggggggttcaaaaatgctctggggattaatttacaaggggcccgggggttaggcggggattttggttttacgggccctggtttaccggccccgaaaaaaaaaccggtgggggggggggaccccttgcaacaaccggggggcggggcgaaagaactgttggatgacttcctcggcattacggcgtcccccctcggtggaaacccc

SEQ ID NO: 13276 - DNA, 368 bp, Oryza sativa
  unsure (1)..(368): unsure at all n locations
  Clone ID: uC-osflcyp177f05a1
tttttgtttaaatcaaactgttgtttatcatagtaaatcttcccggagaatcagatgctcagaattcatagtgttcttcagcatcttacaacttacaagatggcgcagatatacaagcgcaactatcttaaagtaagctgtaggaggaaatggaaccatttctaacaacgggaaaaatataggttatagaaggaaaccatttgaacaaattaatagggaaataaattaggaggatcgtttccgtccgatccaccccccaagggaagggccaaatggggtacntttaaaaaacatattnncctcaatgtgtgtggatcngctatgcaaggttctnnnntaatgaccatgcagggncctatgttcccccc

SEQ ID NO: 13277 - DNA, 313 bp, Oryza sativa
  unsure (1)..(313): unsure at all n locations
  Clone ID: uC-osflcyp177f06a1
tttgggtttttttttttttccctcttttccccttttctttttttttttttcctttcttttttttttttttcggagggggggaaccccggcaaacccccaatgaccccctggaaaaaaaccccccccccaattgccaaaaaccaaaggaaacgcattacttaccaaacccccccgcccgcaaaaccccaaaccttcggaaaaaagcaaaataaaaaacggggggccaatccaaaccaatttttacataaaagtaaccgcacaaaaaaatgtatgcaaaaanttttcccagccttcacgaagtggcagttgggag

SEQ ID NO: 13278 - DNA, 377 bp, Oryza sativa
  Clone ID: uC-osflcyp177f07a1
agggatcacttattcattatagttcttccatgctgctctaccacagcaaaacgtttcagacaccatcaaaccagacttaaggatacacattacaggtaaatagtacacaatgaaacgggacacgaccaaggaccagaccagacaaccatagctccattggggaagacaaataggcagacttgtgaaccctagaacagcagcagctccatggctgaggacttactggccaccacggaggcggagcaccaggtggagtgtggactccttctggatgttgtaatccgcaagggtgcggccatcctcaagctgcttaccaagaaagatcaaaagcctgcgtagtattcaacaaggaccactactcgccgttggtgcccatc

SEQ ID NO: 13279 - DNA, 394 bp, Oryza sativa
  unsure (1)..(394): unsure at all n locations
  Clone ID: uC-osflcyp177f09a1
agtatgccaaccgcaaattttcatcttcgaatacattggtccgtaaaatccaaggacaaagtgtacaatcaaccagtagaaaccagaaagatcaagaaattgtgttcttgatctctaaagcctattatgcaaagggggcagaaattaacttaagacaggcaacaacagaaaaagatctcagcagatgctagcataagcttttcactcctgatccagctcgaatggaacttcttcttcttggacgtctacctcctcttcaatctcaacttccttggtgtcgtactcttcctcatcgtcactggccttcccgtctttgagcttcatcatgttctggatcgttttttacatcaatggaancgccaccagcgttgctgggcgtgttaactcctcggta

SEQ ID NO: 13280 - DNA, 303 bp, Oryza sativa
  unsure (1)..(303): unsure at all n locations
  Clone ID: uC-osflcyp177f10a1
cattgcaacgatcatgatttactgctgcgacgcaatcctttcatgccttggatgagaagtgtgaaccggattattttttcatctttgtttctgtattacatggaagaaaacgtagtggacaaaggtactgggaccagaaacctagttccaatagaacttcatatacaagaaaagtatgaacaaataattgatttctaaaacaaatgaaacgtatctgatatttacacaaagcactacgaaaagatctgttggatgccttgatacgtagaacaaagccccctnnnatatatacccnngctcttt

SEQ ID NO: 13281 - DNA, 238 bp, Oryza sativa
  unsure (1)..(238): unsure at all n locations
  Clone ID: uC-osflcyp177f11a1
gggaaaaaaatgccccaaaacatataaaaaaataaccggggagacaacccccccccctaggcaaatgggcaaagctagcatgtttttatcccttcgcaaggtccatgccaacaagaggaaattttctcagcccttccaagggtttgggccaaggaccagcccaatagctttaccaaaaaccccccctaaaaggaagnnntnnaaacttctattaaaatntnacagagtacggttagct

SEQ ID NO: 13282 - DNA, 290 bp, Oryza sativa
  unsure (1)..(290): unsure at all n locations
  Clone ID: uC-osflcyp177f12a1
gaatgaaatgcacaaatgttctgttcactaagatgaatttaccgaacttactcccctgtatggacatgaatgtacaatcagagtatgcagacggtatgtctgataagttgtggcatgcatgtaggatcaactttatctacatgcttgccatatttacagttttaagtccaaatgggaaaccaagctgatatgttgtaaatgaaagaagtaggaccattccagcgctagctagagtatagaaactgcacanatnancatttgcggcatagcaacggaatggctctatgctg

SEQ ID NO: 13283 - DNA, 412 bp, Oryza sativa
  Clone ID: uC-osflcyp177g01a1
tttggtgttttcatccccgggcgggagtagggtattacttcttttataagaaggcctgaacctgcataaatcctttgtctccaaacccatacacttttccagcttgatagccacccccttttattattgccgaaatctagtttcgacaaatggcgacttgaccacagatatcgccagacgagctcaactacgcgttgctccggaaggagccgtaccccctggcactggcacggaggatgatcttgtggtacagggccaagatcgccgcgccgatgaacgggccgacccagaagatccactgatcactccaggccttgttgtttgttgtagaccacggggtttgcccaggccaaaagcttttttgatttttttggaggtccttatgggggaccaaggtcaaaaccttgggggg

SEQ ID NO: 13284 - DNA, 403 bp, Oryza sativa
  Clone ID: uC-osflcyp177g02a1
tttggtttttttttttttttttttttttttttttttttttttttttttttttttttttttttttttttttttttaacaggaaaaaccgggggttggttggaaaaatttaggaggaaggaaaaccttttttaaaaaaaaacaaaattactccatttttggggggaaaaactaaaaaggaaggttggaatggaaaaaaaaatccattccaaaaacttattttttatagaaaaaagccggggggagggggggccacaaattcctaggttgaaatggggggaacaaccccccccttgaggataccgggggggcccccttttttggtgggaaaaattggagccttttttttgggggacggggggaagaaaaatgggagggcccctacccgaaaaagggtgaagggggg

SEQ ID NO: 13285 - DNA, 385 bp, Oryza sativa
  unsure (1)..(385): unsure at all n locations
  Clone ID: uC-osflcyp177g03a1
tttgggtttttttttttttttgttttttttttttttttttttttttttttttttttttttttttttttttttttttttttttttttttttttttttttttttttttttttttttttttaaaaaaaaagggggggttttttttttttgggtcaaggggggggggaaaaaaccgggggggggggggcaattttcctcacccggggggggggggcccccccctttttgaagggggggagggggggcccgagacaaaaatttgggggtcgggagaaaccgggggggggggacccttggggggctagggggcccccccccccggggggccggtgggcccccccgcatgngataaacccccaataaataaatttccacagaaaagtatagg

SEQ ID NO: 13286 - DNA, 293 bp, Oryza sativa
  Clone ID: uC-osflcyp177g05a1
tttttgtttttttttttttttttttttttttttttttttttttttttttttttttaacacggggagacgaacagtacatttactttttaccaaaaagccaactacgatgttttagttctgggggacacaatttaataccaagaaatccatacaatacccctaatcctaaaatttggaaggttaaatggaccctaaataccccctgttaatttttatccaggagcactcctttttcaaagggggggattcaaacaaatgcattaggggaacaacatttctgatactcgctgatc

SEQ ID NO: 13287 - DNA, 306 bp, Oryza sativa
  unsure (1)..(306): unsure at all n locations
  Clone ID: uC-osflcyp177g06a1
tttttggttttttttttttttggccatacgttaaatttatttaaacgcaacagcatccgaaagcacctaatatgtccatagttccccactgcttatcatcatcatctagtcttagccaccaccagaaccgttctttttaccaaagacgaccacctgcagcttgtcatatccagcaagcacaccagcaccagcaacagcacgcagaatgttagcaccagcgcccttgaagagtgacttcgcaccctccttcgcaacaatctgcttgaacgcatcctnggctgacccccaaaaacataagcagtccgg

SEQ ID NO: 13288 - DNA, 369 bp, Oryza sativa
  Clone ID: uC-osflcyp177g07a1
tgtggttttttttttttttgtttttttttttttttttttttttttttttttttttttttttttttttttttttttttttttttttttgggaaaaaaaaaaaaaaaccggggctccttggttaaaaaaaaaaaaaaaaaagttttttcccttttccgggggggacaacaaagttttttttcccaggggacccaataaaacaacaaaaattttttcttggaaaaaaaagacacaaggttgggttttaaaaagggccccaaggggggggggaggggccctttggacaccccccccgggcctgggataaccccaaatttttacttaaaaaaaacccgggggtttttcccggggaaccgggggaagaaatttgg

SEQ ID NO: 13289 - DNA, 414 bp, Oryza sativa
  Clone ID: uC-osflcyp177g08a1
ttgttttttggttttttttttttttttttttttttttttttttttttttttttttttttttttttttaaaagaaggggcccccaaattcattgggggtatagcaggggcaatttataccccccacagcaggggaaaagaaccgaagagggaagacggtttcagtcgtcaacattggaaattcgttttgaatcacatgggggacatactaaaactggggccttccaaacctttattttggaacaacgttcattttgccaggctttgcctagggatgttggagatcccatttaactctgacatactggaatggggtgaacatgtttcttcagaaaacaaaggctaccgagacacttggtggttcaaaaggggggggggaaggaaacggtaattctttttttccaaaaagggaaata

SEQ ID NO: 13290 - DNA, 406 bp, Oryza sativa
  Clone ID: uC-osflcyp177g09a1
ggtgtttttttaaatttttggggttttctttttttttttttttttccttttccttctttttttctttcacacaaaaccacccccaaatttaacggggttataacaccttcaacataaccaccccacagcagggttaaacaccccaaaagagaaaacggcttcaaactacaacatttaaaatttccactgaaccaccccggaaacctactaaaacctgaaccttccaaaccctcattttgcaccaacggtcattttcccagcttttccccaaggaatttttaaaccccaccccactgttacatactggacagcttccccacaatgttcctcacacctaaaaatctttccagaaaatacaccttctcagatatcaacagaaaagtcctggatctttgcatgaatccga

SEQ ID NO: 13291 - DNA, 311 bp, Oryza sativa
  Clone ID: uC-osflcyp177g10a1
tttgtttttaaatcaaactggtgtttatcatagtaaatcttcccggagaatcagatgctcagaattcatagtgttcttcagcatcttacaacttacaagatggcgcagatatacaagcgcaactatcttaaagtaagctgtaggaggaaatggaaccatttctaacaacgggaaaaatataggttatagaaggaaaccatttgaacaaattaatagggaaataaattaggaggatcgtttccgtccgatctcaatagaactggacgtttgatacgtagatggcgccaaattagaatggcagctggttgtca

SEQ ID NO: 13292 - DNA, 363 bp, Oryza sativa
  unsure (1)..(363): unsure at all n locations
  Clone ID: uC-osflcyp177g11a1
tttgtttttttttttttttttttttagatacaacagcagaaaaggatatacctttgcttccccggttaccatatggaaagatttttacgttacagacatacaagttacagcacaagcagttttcatatgcttgaacatctaatgtcagcggtagcacattaaccaaaagtaaagtaaaaatcacatcttgggagcaagccccgtatcatgcttgggaacatcagctaatatcagtcttaaatcacatctcaggaaactgaccggcaaggcatcactgtgctgttgtaccttgaataaaaaaagaatcgcgcctcttttggcgnnnttatagattnngaagcccttctgcctcaaacagaatgg

SEQ ID NO: 13293 - DNA, 340 bp, Oryza sativa
  Clone ID: uC-osflcyp177h02a1
tttgtttttttaaattttttgggttttaatttttttttttttttttttttttttttttttttttttttttttttttttttttttaaaaaaaaagggtgtaaaccaatttcaaaaaaatttttcggttttaaaaaaaaaaaccccaaaaaaaaaaaaaatatttcctttaaaaaaaaaaaaaaaattttttcctttgggaaaaacttttaaaaaaaaaaaaaaaaccttaccagggggggcccaaaaaaaaaaaatttctgtttggggcggaaaaaaaaaaccacccccccccaaaaaaaatttttcccggaaaaaaaaaaaaaaaaccccccccccctct

SEQ ID NO: 13294 - DNA, 406 bp, Oryza sativa
  Clone ID: uC-osflcyp177h03a1
tttgtgtggtacataaagaagggggtgtgatatatggtggagtacacgacacaaccaactaaattgaacactattaatacatagtttaagttacatcatgatttattatgactggcaaagacccaaaaaaaaaaaaactctcacacaatgcaaacaatagtagagtttagatgcagtctatacctgactagaaaggattatgtagtagctgcagaaggtcgacgagcgtgacaaactgtaaccatatacgacgcatacacgacgtatattatgtatcacaaacgacgtagaaaattaacagatacggtacaccatgacttaatcaaagaaagctgattactatgctggttggacacttggtaaccggatgggcaacgcgtcggggacctggtcgtagaagaacctt

SEQ ID NO: 13295 - DNA, 352 bp, Oryza sativa
  unsure (1)..(352): unsure at all n locations
  Clone ID: uC-osflcyp177h04a1
tttgttttttttattttttggggttttactttttttttttttttttttttttttttttttggaacctccaaaatcaatttttcccttgggtgttacaaacactcaaaccggtttagctcacaggggcagctgatgcaatgcttgcccggcccccatacatattgaacccaacaacggccccggaaataacttaccgggaacaggagtcggccccccccattgggaaccacaactgggaaaccgacccctacccccctattgcaaggaacctcatcgccatcctcattctcgtcggactccaccttgcaacacccgccccaggaaattcggccttacttangatcctcggttt

SEQ ID NO: 13296 - DNA, 339 bp, Oryza sativa
  unsure (1)..(339): unsure at all n locations
  Clone ID: uC-osflcyp177h05a1
tttgttttttacttccagtatcaaacaatagtttaacagcaagcaacaaaaatttgtgtagcagaaccaagctaccaacttgtccaagaatcacacaacattcaagtatacccaattttggttcaacaaactggtgaaaacacttgcagcaccacaaaaatcagcagcaaaaaattgctgaaccaaaaaatcagcagcaaaaaagttgctggtccaagttcaggttccccccaccagcaggacctgcagcacctgaaacgtgttgtttgattccagaagcaaaggaagttgtagtacccatgctaaaagattgctctgttcccccnanaggctctaggg

SEQ ID NO: 13297 - DNA, 326 bp, Oryza sativa
  unsure (1)..(326): unsure at all n locations
  Clone ID: uC-osflcyp177h06a1
tttgggtttttttttttttttgttttttttttttttttttttttctttttttttttttttttttttttttttttttttttttttttttttttttttttttttttttttttttttttaaggagacctggaaaaaaaataaggataaaaaaaaggaggggaaccatacacaaaaattttggggcccaaacagggggaaaaaaataccttggtggtcctaatggcccaaacaaaaaaaaaaaaatggggggggccacctaagctggggacccgatgatgataatgaccaatctggccacctcgcccatgannaagacgtctttggagga

SEQ ID NO: 13298 - DNA, 361 bp, Oryza sativa
  Clone ID: uC-osflcyp177h08a1
ttggtttttttttttttttgggttttttttttttttttttttttttttttttttttttttttttaaaaccaaaaacccgggggtttttttaaaagggcttattttaacatccataacaagcaaacgattgttgtttcccccccccacctttgaccattacggggcaactggccacccttgacttgaccaaaaatcccgggggccggataaaaaaaacatcaggggcgagcaaaaggaaccgtttaaaacttgaccccctttaacccattaaaaaaaaaaaggaagggtgggtcgggggctccccccctggaggagggaaacaccaagcccgcattattatgcgtggtttcaccaacaaaaa

SEQ ID NO: 13299 - DNA, 324 bp, Oryza sativa
  Clone ID: uC-osflcyp177h10a1
ttggtttttaaaattgaacaaacgcgcatattataagtgacgaagcggtctcacataaaacagggcacacaggttacaacaacgagggttgtaagcccattaagccccaaacatcagatcaccacaagcaaatgtctcgaagacacacgcacacggcaacaggataactccacactggcagatcatgggatagcagcagttatcaatcaggccttgacacacagaacatcaagcccccagacgacgacgactcctctagtactcgtcaccatcatagccatggcagcaaaagttgaaaagctctccccagttttttgttccccc

SEQ ID NO: 13300 - DNA, 360 bp, Oryza sativa
  unsure (1)..(360): unsure at all n locations
  Clone ID: uC-osflcyp177h11a1
tgggttttttttttttttttttttttttttttttttttttttttggagcttcacatcatcggtggttatcataactggaataacagggcagatggggcataaaccaagtatatttcggagttctaggttatttataatatcagaatcaccaactgggaaccatccacaggatgggcgggggactactgatcagaatctactcctttgagggggggatgggaaacacgggggagaccattaaatccacgccacatttgttggggacgttggagcccccgcagatcttgaagtcccatgcccatgcttatggctctnnntggcgatgagggagacctgtcacgatttggggccccctgagta

SEQ ID NO: 13301 - DNA, 321 bp, Oryza sativa
  unsure (1)..(321): unsure at all n locations
  Clone ID: uC-osflcyp177h12a1
ttggttttgtgatagccaaatatggccaggcccgccgaattatgatgagtgctacgttaggtctttatgggacggggggtctatgataccagaacgaagataaaacacactgaatttcagcttcaggctttcaaacgcatatcaactctgaaactaactaattcaggggcctgaactgaatttcaggcaggttcataggaggcgatctgaagctccgcccaccacaggggcttctccctaggcgcctcctgctccggctactacccggggatgccccccaccagtctgtccannnnttnaccgggatgatcgaatttgcat

SEQ ID NO: 13302 - DNA, 429 bp, Oryza sativa
  Clone ID: uC-osflcyp178a01a1
tttgtttttttttttttttttggttttttttgaaacaaatatcttcatcgaacttatattaactcatcatattgcatgattaacacgatcaatcaacagaagaaagcaataaaaaataaaaataaaaataaaaatgaggctctgttagcctttatgaaggaagggtaggacatatatgcttgatcaatgttcttgggatgaagaattattcacttggacttcattattactcgatcaggcatcagcggcgctcggagatggagcaaattcactgctggactcttccgctgggcctggggccgccgcaggcccagccgggctctcagcgggcgcgtcggaggccaacaataccctggagccaccggtgactgtcgaggcttccgcgaacggtgccactgcgatagcggcgaggaggatcacgacgagaac

SEQ ID NO: 13303 - DNA, 457 bp, Oryza sativa
  Clone ID: uC-osflcyp178a02a1
tttgtttttttttttttttttgaaattaagaggcattagggaatgatgattaatttaactgttcactgttgtatacatcgaggttcaagattaattaagtaaaagctgcagtaccttcacaaaattatactccttactccttagcatagagctgatcgatggagcgtataaaaatttaactttacatacagagaccaaattatatgcaataggattaatttgccgctgttccgttctgccaaactgcaggcagaaccatcgctgctgagaattgctttccttccttcgttcgttgtgcttcagatcctggacgggatgagcggcgtcgaattcgacaggtacgccgccgtcgccgtcacgccggagccgagcttcaccgggtagccgatgtccttgagcaccatctccactccactcagggcacccatcaattgcagctcgttgaggtggccgaggt

SEQ ID NO: 13304 - DNA, 456 bp, Oryza sativa
  Clone ID: uC-osflcyp178a03a1
tttgttttttttattttttttgttttttttttttttttttttttttttttttttttttttttttttttttttttttttttttttttattttttttttttttttttttttttaaaaccccccaaaaaaaaaaaaacaattaaaaaaaaaaaaaaaataaacaagcacaaaccccggggggggcaaacccagaaaaaaaaaaaaattttccccccccccacaaactgtgaggcccaaaaaaaaaaagcgggaaaaggttaaacccgcccccgcccctttaaaaaaaatattacccccgcttgacccacaaaagaccccaaccaaaatcccaaaaaaaaacccccccccaacaaaccaaaacccaatctttaaggggggcctcccaaaaaaaaacaaaaagctttttcttggggacccaaaaaacaccctttaaaaaaaaaaagctaaaaaaacccccc

SEQ ID NO: 13305 - DNA, 301 bp, Oryza sativa
  Clone ID: uC-osflcyp178a04a1
tttgttttttttatttttttggttttttaagttttgaatttaaccaacatgtttttttgtttttatatacgcctatctaacattatttagtgatcacaggcacagatgtgcacacatttacaaatggaagaaaaaaaagaaacatatgtgaggaaaattggaagaattatgataacttcccgttccattgctcgcccttattcagttgcttcttgaatcagacaaacgattccatcttttgaaaccaatgtcaccataatgtaattaatacccttctccatgcctttcagcccaaacattt

SEQ ID NO: 13306 - DNA, 474 bp, Oryza sativa
  Clone ID: uC-osflcyp178a06a1
actattcaatcaagcgttgcatcatttaggtcagatccaaccacaatgattattaacgcatatgtaaaccggaatacagatctgatcgctccataggagcggaatacgggaggaaagaaaaggaaacagaaacaattacaagttcgaacacccaccaggattcagctagatggtactacttataaccgcacgagaatcaactgagaagcggctcgcgtcaccccctggctcctaatatacgttgccattaaatataatggtgatgctgccgccactagtatgtacaagagtgccatgaagggcttcttttttgttgttgtttctgaatctaagctagaatcaccagcgtccatggaaggggccgcacggatggcaactattgcctcaataactctcctcgaaataatcgcagcctcaaattatgtgataaggctgctttggatgcgcttgaggcttggacataccacacgcagt

SEQ ID NO: 13307 - DNA, 395 bp, Oryza sativa
  Clone ID: uC-osflcyp178a07a1
tttgttttttttttttttttttgttttttttttttttggttttttttttttttttttttttttttttttttttttttttttttttccaaaaaaaaaaaaaaaaacccaaacttaaaataataaaaaaacaacagggtggataccccttaaaaagaaaggacccccaggccccaaaagttggtttttgcaaccaaaagcccttttctttggggaaaaacaaaatgccgaaaaaaaagcctttgggttatcccttttcccgggggcctatcacccaagggaaccccaaatcccgaaggagcctctaccccaccccaagttgctaaaagcctaaaactgaaagaaactttattcaatttcaaggccttgtccgtggggaaaaaaaaaaccaacacttg

SEQ ID NO: 13308 - DNA, 425 bp, Oryza sativa
  Clone ID: uC-osflcyp178a08a1
tttgtttttttaatttttttggttttttttttttttttttttttttttttttttttttttttttatttttttatttttttatttttaataaaaaaaaaaaaaaaaaaaaaaaaaaaaaaaaaaaaaaaaaataaaaaaaaaaaaaaaaaaaaaaaaaaaaaaaaaaaaaaaaaaaggggggccaaaaaagaaaaaagaggaaaaaaaaaaaaaaaaaaagggggggaaaaaacccggccaaaaaaaaaaaaaaaaaaaccccggggttaaaaaaaaaaaaagggaagaacccccggggcaaaaaaaggaaagggtaaaaaaaaaatggggaaaaaaaaaagggggaaaaaaaaaaaaaaaaaggggcaaaataaccccccaaaaagaagaaagattggaccatccccccatttgggggggaaaaa

SEQ ID NO: 13309 - DNA, 423 bp, Oryza sativa
  unsure (1)..(423): unsure at all n locations
  Clone ID: uC-osflcyp178a09a1
tttgttttttttatttttttggttttttttttttttttttttttttttttttttttttttttttttttttttttttttttggggggaaaaaaaggggggttaaaaaacagcctaaaaaattttgaaacgaaaaaaggaaccccgataaaaaaattccacgggaaaatgggggacccttgaccaaaggggacaccattttttggttgaacaaaacaccccttgcacagggattaacgggnngacaaaattgaaaggggcccccaaaaaaaacttgatactggaggaaaaacacgcattttaattccgaccaaaaagggggaaaggggaatggtctttaattattggagccgggggaaccgcaaaaggaggggcctcaccaaatccaccccgaaaaccggcaagatccccgggggccctgaaaaa

SEQ ID NO: 13310 - DNA, 430 bp, Oryza sativa
  Clone ID: uC-osflcyp178a10a1
tttgttttttagtagtaattcttatatgaagcttgaatttaaccaacatgacaaacagtatatatatacgcctatctaacattatagagtgatcacaggcacagatgtgcacacagatacaaatggaagaaaaaaaagaaacagatgtgaggaaaattggaagaattagtagacttccacgttccattgctcgcccttcttcagttgcttcttgtaatcagcccagtcgattccatcttttgcagccaatgacaccataatgtcatcaatacccttctccatgcctttcagtccacacatgtacacataggtgtggtccttcttcaggagctcccacagctcttccttgtactctgccatcctggtctgaatgtacatcttctctccttgagcattggtctgctccctgctcacagcataatcgacccgg

SEQ ID NO: 13311 - DNA, 310 bp, Oryza sativa
  Clone ID: uC-osflcyp178a11a1
tttgttttttttaattgcaagggttgcaactgttaggtcagatccaaccaagatgattattaacgcatatgtcatccggaatacagaagtgatcacaacctccgagtagaacacggtaagaacagacagaaagccttgagaccttcacgaggctaagcttaagaacatgctaacattaaagtggcattaccagcactcgataagctgatgcatgggacaagggaaacaacatccgttctttagaagccctgcaagaagaaggtaataaaaaccggtgctgccgactttgcactatatactgatcacacgg

SEQ ID NO: 13312 - DNA, 492 bp, Oryza sativa
  Clone ID: uC-osflcyp178a12a1
ttttgttaaaatccaatagggggtttcaccattattgattgcttagaatacatcagttcattgctccggccagtactcaactcttggctatgaacaatctaatgtctaggtaattgaacagatacttttccgatcaacgattttgagtttttgacgccttgtccctctaccaccgatccaaagtgatgaactgaacaaatttgagttcatcacttaagtacggggattacatatgagccggctgcagatatgatctctcatagaggcccatcacctgatcagccaccgcccacattatagcctgaccaggtggaatcctcataagcctcggaagcaaacctttccaaagggctctgagaccctcttcagtgtatattgtgcgtatcgcgtggaccatacccttgtacttgatgtcaccagttctcccctgggccatcagtctagtcttcacgacattcgaagggtccagtgcagatcggacctgcagttcct

SEQ ID NO: 13313 - DNA, 304 bp, Oryza sativa
  Clone ID: uC-osflcyp178b02a1
tttggttttttaattttttttggtttttcttttttttttttttttttttttttttttcccattacattaaacaacataccaacaaaccaacaaaaaaaccacaaaaaccccaaaaccaacaacaaaaaacaccccaaaacacaacaaaccaaaaaacacaaaaaaaaccaaaaacaaccccccaaaccccaaaaattaacccaaagaaccacgaaaacaaccacaacaaaaaaaacacacaccccccaccaaaaaacctaacaacagaacaccaaccaatcatattgtaaaacacaaacactaa

SEQ ID NO: 13314 - DNA, 441 bp, Oryza sativa
  Clone ID: uC-osflcyp178b03a1
tttgtttttttttttttttttgttttttttttttttttttttttttttttttttggataacgataaacgaggactttgaatcttatcgatctttaccgaaggggacatcccaggaccacaaaacccacagcattttcagaacattcgacgaattcatgacatgttaccctggtatgaatcacacaaaactcttgctaacttattcgggaccttccactcttataacactaaaagaacagcactaaggggactccgacttgggggaaatcctaattgcaacagccaggcccaatatggggaggggaaccaaaaactggaggatcttgatgatgaactccggggtcttgtcccggctgtagtggggttgctttgggggaacgtacttcgtcctcgcgggtattggggatgggtcgatgtcgccaacgtaatactcatccatta

SEQ ID NO: 13315 - DNA, 509 bp, Oryza sativa
  Clone ID: uC-osflcyp178b05a1
tttgttttatagatttttttgggtttttctttttttttttttttttttttttttttttttttttttttttttttatataaaaaaaaaaattttaataaaaaaaaaaaaaaaaaaactaaaaaaaaaagtaaaaaaaaaaggggggggaaaaaaaaaaaaaaaggggttaaaaaaaaaaaaaaaaaaccccccaagaaaaggggaaaaaaaaaaaaaaggaaaaacccacaaaacgggggggaggggaaaaaaaaaaaaagggccgggcgcaaaaggaaaaaaaaagggggacccccccgcccccaaaaggggaaaacccaaccccaaaaaagggcgcccggaaaaaaaaaaaaaaaaagggggggggagggcacaaatttgtcttccggaggggccacaaagggaaggaaaaaagatgtaaaaaaaaaccccccccctaaaaaaaaaaaaacctcggtgaaaaaaacaacagggggggggggggcccccaaaaaaaaaacacccaaaaa

SEQ ID NO: 13316 - DNA, 330 bp, Oryza sativa
  Clone ID: uC-osflcyp178b06a1
tttgtttttttttttttttttgtttcaaacaaaaaatgcatgatctattgctcttgcattgaaactaaaagcaaattgtttagggaactacatcccaaaatggaataagcgctgatatataagatttaagattcggatttggtgctctcgtctataattgtcagagagaccccctcacggtatcctcaactaaaatttcgtctttctcagaaaagcaactttttgtatcagccaaaaatttgcagtattattttccagacaaagcacaaagcagctttcaggctgcaattggtggcgcgcgcggagtttatatgtcgaggagcaatctcc

SEQ ID NO: 13317 - DNA, 464 bp, Oryza sativa
  Clone ID: uC-osflcyp178b07a1
tttgtttttaaaggaaatctggtttatattaagcgacagtcacacagggacacaaaagtgatcgagtcatatacataaaaagctatatacattatagactcgtatacaattacactgccacggtaatatctgaacaagaaaacatagccaggtagaccctggctccctggatctcaatgctgtcgtcgaaggattggccggttgaattgttgtacagggtgaaaaagacccacagatccgtgccaagctgcgtaaccgcaacggtgactgcgacctttttacgtggactcgtccctgcagtgtggaatatcacacgatcttttcccccgtaaagcagctcaatgtccctacatgttggctaaggccaacaagctgatgtgcacgagatccaaaagtctagcaatctaacctaagtggccagaatctgaagattcacaaagcaacacacgatgtcgaagcttttt

SEQ ID NO: 13318 - DNA, 430 bp, Oryza sativa
  Clone ID: uC-osflcyp178b08a1
tttgttttttttttttttttgggtttttttttttttttttttttttttttttttttttttttttttttttttttttgttttttagggaagacccccgaacaggtttccggggaaaaaaaaaaaaccaagggggggacaaaggggaattttaacggccccggcgggggggggttaaaaaaaccgggggccccccctaaaaaaaagggcggggtacaaaaaccccccaaattttaaaaaaaaaaaaagacggcccgccccgccaaattttaaacaaaattaaaaaaccccggggagaggggaaaaaaaggcgccctcccacgagaacgggggggccaattgggctccgcccgaataaaccaaaaacacgggggggggggaccggcaaaaaacaaggccgaaaggccccccggaaattgttatgatggggggg

SEQ ID NO: 13319 - DNA, 427 bp, Oryza sativa
  Clone ID: uC-osflcyp178b10a1
caaagtagtggtaatttggaattgccgctaactatttagtttaaggattaataattacaataaataaaaaactctgggcggacgaagaggtcgtcgacgtcaggggaccgagcagcactgtgaggaaccaggcatgggtagtcccgtaccagtttatccatcgtgcagagcttttgatccaataagaacccataggcactaaaatgcaaagcattctccgaacatatctaactccaatagagttttcacctatgggtaaactgacaaacaggtaccattgccatccctaatagcaaccagttacgaatccagaagtctgcccttcaggctactcacggagaaaaacacatcatgttatcatccttgtggtgtcaaccttctgaataatcaaaaggtggtgcatcaatcatcttcatcttcgtcatcc

SEQ ID NO: 13320 - DNA, 438 bp, Oryza sativa
  Clone ID: uC-osflcyp178b12a1
gccaagcagcatcaaactttgctcagaaacattaagccaagtcaaatctcgtaatagtaacacaaccaaagaaaaacatttttcccacatagcatttcaaacttcatgacattatctccaggggcgatgttaaaacattttggcaggagtgctaatttaacagaggttctacagggtagcttttgatgagatacgatttaaacagccggggagaaccaggcgaccctttcctggggatcaagaaatcttcagggctttccaccaccaccaccaatctttgggcccttggaacccctcggggcggcacccttcgactgcgacttctgggacttggttacctcagccttcttcgccttcttttcatccttgggcttcttgatgcgttccttgatctcacgaagagcagcttttctagcagcatcacgaactttaggcttt

SEQ ID NO: 13321 - DNA, 405 bp, Oryza sativa
  Clone ID: uC-osflcyp178c01a1
gggaccgaaaaactaaaaccttggaagggcataaaacataacagaatgctgtagctgagtacacatggaacctaaataccacgagaatacaaccatagcatgtgaaaattctcacaatcagttcttccaagctaagagttgattcatcattctttcagaaaattggtgttcagtagggtctgtaggcacgacatagacgcaaacatgactaacaaaatccactgaataaaataggcgggccttccagcgtaaaacacactcgagagaacgctctaagctgcagcacccttgcccttcttcctctggagcttcttcatgtagaactcaagctctttgccctccaggatgtacccatcagctctgccacattgcccaggccgggaggagatgcaggccaagagcctt

SEQ ID NO: 13322 - DNA, 466 bp, Oryza sativa
  Clone ID: uC-osflcyp178c02a1
ttttgttttaaatcaaactgtgggttatcatagtaaatcttcccggagaatcagatgctcagaattcatagtgttcttcagcatcttacaacttacaagatggcgcagatatacaagcgcaactatcttaaagtaagctgtaggaggaaatggaaccatttctaacaacgggaaaaatataggttatagaaggaaaccatttgaacaaattaatagggaaataaattaggaggatcgtttccgtccgatctcaatagaactggacgtttgatacgtagatggcgtctggcatccagttgaccgggatgacgtctttggcgatgaggctcttgccggactcggtggtgacgcgaatggagaagggtgccttgagtggcgtggcggtgtccatcctccagatggcgccccacgacagcttcatgggcctccacgctggcaatccggcctcctggaggtccatctggat

SEQ ID NO: 13323 - DNA, 460 bp, Oryza sativa
  Clone ID: uC-osflcyp178c03a1
ttttgtttaagcttgaatgattggaaaagcttcttgccatattatccaccatcagttcatgtgtcatgatggataatttttgaactgactaggatttagagaaataagcggacaagagcccgacttgaccttcaatgcaaagaaaagagggggcaacgcacaattgcacgatctgaaaggaacaaattacagacatacaatgcacaggtctgatgaacacattaaactacacagacattgagatatttgggatacttgcgatgaacaattccaaagctgctagatcagttgcctttctcgtccagacgaaggttaatcttatctgctctgccctgactgctctattgatcttggagctattccagcagcatcagatcctctcatgattttcaatttccggcagatagtggtaaacaaatcccaaggaagatcaccaacaagcatccagtcagcatcctta

SEQ ID NO: 13324 - DNA, 344 bp, Oryza sativa
  Clone ID: uC-osflcyp178c04a1
tttgtttttttttttttttttgttcgttattactttgtttattattcagtcctgatcgatgagccgcgcagcatgtgtgcatgtaactcaacagtaaaggttgccacccgggtcaacgccgaattggcggcagaagtctttgtagtagtttacccttgcgttgacggcgccggggttcttgccgttgcactcgagcgcaccgttgatggcccggatggtggcgccgaacccctgcaacatcacctggtgcacgttgttcatccagaaccagagcgccgtcttgaaggagatcgttgggtcctgcgccaccctgtccgggtccctcagcccgtcgaacccgatgt

SEQ ID NO: 13325 - DNA, 324 bp, Oryza sativa
  Clone ID: uC-osflcyp178c06a1
tttggttttttttttttttttgtttttttttttttttttttaggacacaacataggctcttataacaggctcagggctgcacaacaacttttgatagcttacaagcttcataaactttgccgaaaaatggtttcacccacttggtacttacttaggaaaacaggtcactatcactggtttctggttgctaaacccccttgggagggtggacccccagattgggcaactttaagaactcaaacgaaacgcacagtttttcgcaagggtaagggcaaagccatttcatttgccgcaaaaaacattatgctgctagtaaggaccccc

SEQ ID NO: 13326 - DNA, 435 bp, Oryza sativa
  Clone ID: uC-osflcyp178c07a1
tttggttgatgaaaaccacttggagacaatttactcaggtagcaaatatttctcagccacaaatccaaacacttggtccttcctatcagaagatcagaatgaacaggttttcaaattcatctcccaactcgacgataatttacacgtacatttaacacattcttccacccttctcaaactcctcccttcttcttcccgggtaagattaaaattaacttgaggccagccagcgtcgccggcggcgagatgtttacaggctgggcgtcctctcggcggcgccggagatgacggtgagcaggttgttgccgaaggggtcgctgaggtgcttggagaggttctcgacggggccctcgccggtgacgtaggcctggatgaagaaccccagcatggagaacatggccagccgcccgttcttgatctccttcaccttcagca

SEQ ID NO: 13327 - DNA, 463 bp, Oryza sativa
  Clone ID: uC-osflcyp178c09a1
tttgtttttttatctttaaaggcaagaatattattcataaatgacgcatgatttttatcaaaacgcttgcaaatgatatcagataagtagagtcaacaagacaaaactgtatctgccaaagcacacctccccaactccacccaattacgccattatttctgggcaaaagcaaacggcttcccattcctccccttcaccagtctcaaaccataaaccccacaacaaatcctcctaagtgacggcatataagatgatgaaaacaaagcaggatactccagagtcgtcatggcgaacttcaagttgacacttctcatgccacagccgctagtcgtgctgggcagcctagtaccggtagtgcgcgggcttgtagggaccctcaactggaacgctgatgtattcagcctgcgacttggagagcttggtcagcctggcaccaagcttgcccaagtggagggcggccacc

SEQ ID NO: 13328 - DNA, 424 bp, Oryza sativa
  Clone ID: uC-osflcyp178c10a1
tttgtttgttaagaaaagggaaaactcatataatgatatacccaggataaatacacatattgtatcccccaccatcagtttaattttacctaaacctcagatttacacttctgcggcatggcattggccagaaatctacaagtattcctctcccacctaaacctatcttgcaaactgaacccaaaaagaaaagtaacagtaatttatacctattgtttaaacaggctaatatacacatgggtgatccacttatccacttctaaatggctttgagttattgtagcccattcttccttccagaaattagttcctttggtttgactttgtcgaacttattcactttcccatgttctttaacttcacattctcatattgttcctttgctttgttaatgtcaaccgcgagttccatatactttttcagt

SEQ ID NO: 13329 - DNA, 423 bp, Oryza sativa
  Clone ID: uC-osflcyp178c11a1
ttggtttttttattttttgggggttttttttatttttttttttttttgatattcaaaaattatacatgcaaacatcactccaatacaaagaaaaccccagaacaaaaggaacaacggaaaaaaaagggggggggaatgaaaagggccgtaaactatgcgagcccacgtggcgaaccaaaaccaaaaaaaaccgcgcccaaaaaaaagcaagacacaaaagaggggggggatgaagaaaaaaaagaggcccaaaaaaaggaagggggccaccaacacagggaggggggggccgcccccaaaagagaacctacggaagaccgccggagaggcaaaaaaagggggagaaaagcatgggggggacacatattgggggggggggacccccccaagaaagggggagccccccggggggggggggggggg

SEQ ID NO: 13330 - DNA, 441 bp, Oryza sativa
  Clone ID: uC-osflcyp178c12a1
tttgtttttttttttttttttgtttttttttttttttttttttttttttttttttttttttttttttttaaccacaaaccccaaacttggattttaaagaagccccaaaaaagggtcacataaacaccccaggtcacaggagggaaaggtacaagcaaaccctggataatcgaaaaggaaatgtttttaaaaaccagacacccaaactgttagatagaagcccccccgggccgatcataggatagcagcagtaatcaagctttggcaagggcccaggcaagaaccctgaacctttttaggactcgggaccctaataacccttgttaccatcggggaactcggagccgacccccttggagtccttttccaggggggggagggccccccgggcccaagagaactcccccttcttcatgcccttggcaacaaaccaatggaaaa

SEQ ID NO: 13331 - DNA, 467 bp, Oryza sativa
  Clone ID: uC-osflcyp178d02a1
tttgttttgagaattactatatattctgtactgttggtgtgtttgccctcatgtagacaaatactgatgggtatgcacaaggtacatattctcagtacttctactgccaagtttgcatcacatagtctgaatacctcggaagattgggggtacaaacataaccgggaaatacgttgctggaggcacttctattgctgagagaacagggtggaaaatcttgcattgcaaacttagcagcgcagttagaataataatgaaaatgacaaccttagaatcagctctaaggcgctgtcatcttggaaaatgtagagagtgaagccactgcttccccagtggttaagtacagactatctgatttgaaatgaccatgagcatcattcgctcgttgtatcttctccatgacctctccagttggattcacaagtataagctctagtccatgcttctctgttgatttcttcaagtcg

SEQ ID NO: 13332 - DNA, 461 bp, Oryza sativa
  Clone ID: uC-osflcyp178d03a1
tttggtttttttttttttttttgtttttttttttttttttttttttttttttttttttttttttttttttttttttttcaaacaaaaaaccggaaccttatggccaccaaagttaatttatctaccagaaacccccctaggcccagggggaaaattccctttttaaagccccccatacccccaagggaaaggggggaaaacggaaaaattggtcaagcccccccccaaaaataacaggggaaaaacccgggggggggaaaaacgggcctggccaaacccaaaaaaaccccatggccgctggcaacaaaggcgaaattaagggcaaaaaggcttccctgggcccgcacccgaaagaggacaatggccctgggggaaacccaaaccctcgggcccccgccccgggaaaggggcaaactggggaccccgggaagggaccaaaaccccccctagccggggagggg

SEQ ID NO: 13333 - DNA, 426 bp, Oryza sativa
  Clone ID: uC-osflcyp178d04a1
actcgtttgtgaggtcttttcggtagaggcggacgattggccgacccctgtaggtactcgaacacgttcacgaatgaccacacgaagtagcctttcacgttggcgccattccttagtgcagtcaggatactccctatatagctcttcaggtaatcaaccctgtcattgtcatggacagtgtcattgcttgatccataaccattctcgaggatataaatgggaaggttcccataggtttcttgtaggtactgcaccatcaatctcaatccttgtgggtcaggtccaatagatgttggagcggccttaccaggtggtggatctgtcttggaacctctgtagtaaattgacatattcgctacaaagttgcgtgtgcccttacccaaaggacgatcattcacatagagagagtagtagtgattcattccc

SEQ ID NO: 13334 - DNA, 391 bp, Oryza sativa
  Clone ID: uC-osflcyp178d05a1
tttggttttttttttttttttgtttttttttttttttttttttttttttttttttttttttttttttttttttccgggcccccccaccaggggaaagaaagggggataaaaaaaacccaaaaaccccccggggtggggtcaaaagaccagcccggggggggggaaaaatggaaggggattccctttcccccacacagagaccccccccggggggacccccccccattagtcccccttacaggaaacaacaccccccccaagctttttgacggaccccgaaaaaaaaaaaatacctgacagtgggggcaacaagcggggaagggccccccaaagggggcccctgcccaaattagcccaactgggaaaaaaaaggcccccagggggggccggg

SEQ ID NO: 13335 - DNA, 414 bp, Oryza sativa
  Clone ID: uC-osflcyp178d06a1
tttgtttttttttttttttttggttttacttttttggccatatttaccattttttttttattttgaccagagtcaataccaacagaggatcactcaaagtatcacagcatcatggaagacattctactgcttttacacaatatcattcaggataagcgggcatgcaagacaaactttaccaggtactaccacccagcaaagaaaagcaacatagaaggaaatatttcttatagcttaatcaaaagctagcactactgccacagggctctctacccattttaagctgaagcctatgaaaacccaagaaactagctcaataatgcatattgctgccagaagtgctcagttctaccaggcaataaccttcatgcccagaagttactgggcgaaggcgacaagggtcctgatctcgga

SEQ ID NO: 13336 - DNA, 425 bp, Oryza sativa
  Clone ID: uC-osflcyp178d07a1
tttgtttggattaattaactagcatatttaaatttaaaacgtaactgtttgagcaaataccacgaaatgttcaggcgctaagatacggcaataccgatacatccagcatagcaaaaatggcgaagagcacagagtcagataaagctatagagaactagggctccaggagatgggggccgaatgacaaccatggcgcttagtcgacctcctccatcttgctctcgccggcgtcgtcctccagcggcggcatgtcggcgtcagcctcagcagactcgtcctcgtcgatgctcaggccgagcttgagcatccggtggatcctggtgccgaaggtgttggggtcctcaaggctgaagccggaggtcaggagggcagtctcgaagagcagcatcaccaggtccttcacagacttgtcgttcttgtcagca

SEQ ID NO: 13337 - DNA, 472 bp, Oryza sativa
  Clone ID: uC-osflcyp178d08a1
tcgcgatctagaaccgtcaatccccaaaccctcctcctcctctccggcgatccacccatcgatcggcgatgacgctggggagctccggcgccggatcgagcgtcgtcggtgagcgatcgatcgaatccccccttcccttcttcccttcccccccttttctcgcgagtgcctagggccttcggatcggaggaggctgaggaggagaatccacgcgggtttcgctccgttccgcgcctcgtaactttggcgctgtgtcccgccatggctgtgctgcgctcgatgtggttggtgatcaggcgagacgccgacgcgttggtttgtttgttggaattagcgatctgcggtttttgtaccatatgggttccatccatctggtgatttagcttggtttgcatgcgtgcagcggtcatgggatctctctagatggcctgggttgctcggtttgcgaatttatttacggcatgttgatgat

SEQ ID NO: 13338 - DNA, 430 bp, Oryza sativa
  Clone ID: uC-osflcyp178d10a1
tttgttttttttttttttttggttttttttttttttttttctttttttttttttttttttttttttttaaaaacacaacacactttgtaaaaccacaaggcttaggggaatggaatcccccaaaacctcgccccggataaacataaaaggggcaccctttttaacaagagagagggcacctgaaaaaaaaaagcaacctttataatgaaactaacctgcaatgaaggggccaaccgttggggccctggggcagggcccaaacaattggctccaagggcccctattgttaagccccccgcttgaaaaaagggtaaaccccttggggtgcccccacggaaaccaccccatttaaaggttttgggggcaaacccctattatctctgggggggaaaccataatccggggtccctcaacaaaaaagatttttccc

SEQ ID NO: 13339 - DNA, 436 bp, Oryza sativa
  Clone ID: uC-osflcyp178d11a1
tttgtttgaacacacaagacagcatagggggctctcattgagatgctctgtttgttagatgggtcatgggattacaacacacattacactttacattcctccgctaactctgacgcgacaaaaaaaaaaaggtaaaaaataaatctaccgcccgcctccagcttctcactccaccctccttccagtcagactaacttcctaaacacacagagcccgctccaacactgcttatacaccaggcacccatcttcaggtgcccaggtgaaatgggccactacttcccgtatcctacaattggaaagtggtggccaaaaagaaaagagaaaatgaatatggataggacatcgccaattatactttacacaatctccgagccgcagatggagatatcagagggaagaaacgccccgggaagttatagtcattagccagaaag

SEQ ID NO: 13340 - DNA, 393 bp, Oryza sativa
  Clone ID: uC-osflcyp178e01a1
tttgttttttttttttttttgggtttttttttttttttttttttttttttttttttttttttttttttttttttttaaaagggggggggggcaaaaaaacccaaaaaggggccccccgcccaaaaaagggacggggggcccccccccaaaaatacagggggcaaaccgggacaaaaaaaaaagggggccgggggccccccttggggggaaaaaaaaaaacaagggccaaaggggggcccccaacctgaaaaaaacccccccaaagggccccccacatttttgcccggggttggggggggaaaaaatttttcgggggaaaaaccccaaaaaactttggcccgggcccccccccgggggagggggccccgggagggggggccccccggggacccc

SEQ ID NO: 13341 - DNA, 204 bp, Oryza sativa
  Clone ID: uC-osflcyp178e02a1
tttgtttttttaattttttttggttttttttttttttttttttttttttttttttttataattcttaatttaccattgaactgaaagaaatatagacatgaaaaagacaaaataaaaaaaacgaaaaaaacccaaaaacaaaaaaaataagaaaaagaaaacaaaaaaaaaaaatacaaaaataaaaaaattaaaaaacaaaaa

SEQ ID NO: 13342 - DNA, 396 bp, Oryza sativa
  Clone ID: uC-osflcyp178e04a1
ttttgtttttttttttttttttggtttttttttttttaagcagaagaggtagaaataaacacaggatatttaaatctgagcatgcaaaaggacaaagattatacacatcaaaatacccacatttcagacacggttttcggacttacaacacctttaagctctagagcggttggtcatactagtaacagtaaaatggtgcctttaagtggcacccggtcttattttttatttttttcatgaaatccttgcaagttgatgcaaagcttggtgaactggcagcatggaataaaccacagcgttaaaagttgattgcttgatgtgcactggagatcagatcaccatatgctgcaaggcccaaccttatgtacagtggtgattggttgcctttatatgact

SEQ ID NO: 13343 - DNA, 429 bp, Oryza sativa
  Clone ID: uC-osflcyp178e06a1
tttgttttgcagaaaagtttggggtgtgatttctcagggctggcctaactggggactgaccaaaactcttccagcctgattgtgttgtacattatggagatctatcaggcaatttcaaagttaacacaatatcacagatttcctctttgactgaatatccagtatgaatagaccaaaatgcccctacctacactgctctccaaacatgtgggaattatcaagaagacaaagcaaaaggggacatttttctgatcatgccaccaggaggagcaccaccaagatcgccgaggcggctgcggccacggaacgcggcggcccgatcggagcggagttgggtaggtaggggagggagtccggcggcggcatcttgcactcgtcgccgttgaagtagatcttgcgcgggaacgcccagccctggctgaaggtgaa

SEQ ID NO: 13344 - DNA, 316 bp, Oryza sativa
  Clone ID: uC-osflcyp178e07a1
tttgttttttttattttttttgtttttttttttttatttttttttttttttttaatttattttatttattttttttatatttttaaatatataaaaaatttttaaaatattaaaaaaaaaaaaaaaaaaaataaaaaaaaaaaaaaaaaaaaaaaaaaatataaaaaaaagaaaaaaaaaaaaataaaaaataaaacccaaaaaaaaagataaataaaaaaaaaaaacacaaaaaaataacaaaaagttaaaaaacctaacaaaaaaaaaaaaaaaaagaaccccgaaacttaaaaaaaaaaaaaaaacgggggaa

SEQ ID NO: 13345 - DNA, 429 bp, Oryza sativa
  Clone ID: uC-osflcyp178e09a1
ggttgcgctgaaacatgcaacacagcatgcatagatggaactaattggcagagaccacagggacaaacggggtggcgcacagcatcagtggcgagcggcggcgaaccccgaggcctggcgcctccgccatgtccacctcatttacaccctccggtagcgaccagtcgaagtggtagagaagacccgtaaacatgagctccatgcttgcgaggccatagttgaaaccggggcacatcctccggccagagccgaaagggatgaactcatagttgcttcccgtgaagtcgagggttccatcctcgaaccgttctggcctgaactcctcaggattatcccagtacttggggtcgcgtcctatcgcccacgcgttgatgataacgcgtgatttggcagggatcgtgtacccgtcgagctcgcacacgtcgatgc

SEQ ID NO: 13346 - DNA, 447 bp, Oryza sativa
  Clone ID: uC-osflcyp178e10a1
aaagaaacagagataatataacgttatattgcacgaaatttattgatacaacaaaataattgactgttcaagcataaggtggtaaagaagacacaaaaaccttgccacgattagcacgctagtaactcaactacaaacgatacacacagcagcatcagttcactggatggagcttctccaaggatcattctaagctaaggcactcattccgatggcgtgtggcaatgcttctacggttcttcacgatagataccaagacacaatcaggcagtcttgggcttgggtttaagccgcttcaattgtgagtacaggaaaactccggcaagagcgactccggttcccagagagttgataggcgaaacaggggtgcggaagaacagaacggatgtcacaatgaccaccactcgcttgacacagttacccaccgagtgagtaacaggtgacact

SEQ ID NO: 13347 - DNA, 306 bp, Oryza sativa
  Clone ID: uC-osflcyp178e11a1
tttggttttttttatattttgggtttttattttttttttttttttttaaaaatgtcatgttaatatatttgttggaaaggaaattcattctaataataagaaaagacataaaaaaaaaaaaaaaaaaaacgcaagaaatgggacatctgactgaaaatgcagtatgaaaaggaaaaaaaaagcataactacactgctatcaaaaaaagagagaattatcaagaaggacagagcaaaaggggacatttttacagaccaaggaaccaggaggaaaaaccacaaaaacgccgaggaggcaccaggcaac

SEQ ID NO: 13348 - DNA, 130 bp, Oryza sativa
  Clone ID: uC-osflcyp178e12a1
tttgttttttaaaaaaatttggggagtgacccctcaaggccggcctaactggggacagactaaacccttaccactctgactgtgcctgtccttctggagatctatcatgcaatcttatagtcaacacaat

SEQ ID NO: 13349 - DNA, 390 bp, Oryza sativa
  Clone ID: uC-osflcyp178f02a1
tttggttttttaattttttttggttttctctttttttattcctatcatttttattttttttttttttttttctacctctttttaaaggccaaaatccaaacatacaaaccccccccaaatttggcccaacccaaccagcgacaaccccaggggcaacggcataacccccacccccaaaaaaccctcgacctaacccaaaaaaggggccattcccccaaaaccggtcccaaccccaaaaatttcccaaccttttgtccccaaaccggcaaacctccaaccctttttaacccccttaatctaaccatggccccccacacaaaaaaaaccccccccccaaacccccatttaaaaaaaccccgttccatttccccccccccccccaagtcccag

SEQ ID NO: 13350 - DNA, 472 bp, Oryza sativa
  Clone ID: uC-osflcyp178f03a1
tttgtttttttttttttttttgttaaagcccctgatgataggtttcttttatttgaatcaacacaggaatccaggattatttacaccacaaggcaacgcaaagaggaaaacccaactcgcagaagtaacacttcaaggtactacgctaaacggttaccattacaacttggaaaatcgtttgcttcaatattgaaggcgatttgccctacattactggccatccatgcttctaggcaatgtatgtaggcattgatcactcgatggacacctggatcctgtcgccagttgcatcctcacgatcaagcagcaattttcctttttgggactgatctgcaccctgaagtatttccgtcaaattgacaccagccaagcctggaatagcttttgatatcttctctaggattccagcaggtatccctttatttatcttctgcgttccacttttttttgtgatctttaatcgaagtacaat

SEQ ID NO: 13351 - DNA, 459 bp, Oryza sativa
  Clone ID: uC-osflcyp178f04a1
tttggttttttttttttttttggtcctaaaatgcgtatatttgaattacacaaaggaccagtttggtttcatctttgagatacacatggattactatatggctattgaatacaatgcagtgcacagtagtggttttacaacagtttttttaaagcaggaaacatcagcctcaatcgaaatgatctgcagagaagtcaggctcatcaggcttctgcagcctccggatggcggtatcgtcggcacggaaccttctggaagcggaggcgaacttgtgcatttgagcaatggcactctcagcaatagtcttggtactgcttgaagtgccctcctgtttaggcttgtcagctggtggatgttcttctggccaccatgagtatgattcccaccggctcaggctctttgccagctttttcctctggtgctgccgccaagcagcctggatgaagcaggcagcccatg

SEQ ID NO: 13352 - DNA, 433 bp, Oryza sativa
  Clone ID: uC-osflcyp178f07a1
tttggttcgaactcttttttttctccttgttttctatttcatttcattccgatagatagcaacaagcagttcaaacaccataaccaaagcgaactcaattcatggtaacatcacggacgaagaacacctaacactggatggatggatagagggcttctcgactcgagagagccactggacacgataacgactcgactcgatgataagatgattctgacacggatagctaaggataactggccacgatgggccccaccaatcagttcctccagttcccgccggagtcgccgccgtagccgccgccacggctgccaccgtagccgccgccgccgccgtcacggccgtcgccgtagccgccgccgccaccgtagccgccctcacggtgcccgtagccgccgccgccaccttctccgtagccgccgccttcacgacc

SEQ ID NO: 13353 - DNA, 449 bp, Oryza sativa
  Clone ID: uC-osflcyp178f08a1
tttgtttttttttttttttttttttttttttttttttaggagtaaaatttatagccgcagcccgtggctccagacacttttagtcaatgtgcattgaatatgcaatagcgatggaaaacttgcattctacttaatggtgcattccaccggtctatgccccccaaaaacaaacttgaataaaaaaggaaaaaaattccatacaggtccaatgtatagagaaggggaaatctattaacggggcaatggccaaaaaagacccaaaagggaaagaaaaaaaatattatgaacaccaaatagttgctgtcttctagcactttctggtacacctccctgcacattcttcgcagcaacagtcctataaagcatcgggggcaggccggtactttgtcaacaaatctcatcagtcttcagggacccacgccgatggttgatgcaggcaacaaatgaat

SEQ ID NO: 13354 - DNA, 395 bp, Oryza sativa
  Clone ID: uC-osflcyp178f10a1
cgagtaaatggggatcttgcaagagagcgagatggcaaatccagcatcataattctcaagttagcacgaaaaagatcaagttgcccaagatgctctactcaagtcaagggagaaggtgactaagttaacccatctatgttaaaattgcctgggatcattaacaacatgaatatggcaaatccatatcaaacttgaatgcccatgtttttgagagacagccattgccattggtccgaggtcaccgaaagggccaccaaacggattggaagacccagcctgaggtgcagggtactgatgctgctgctgctgctgttgttggcatatctgattttgctgataatgggcctgaaaatacatgttatggcgatgttgatgatcctggaaatgatgaggct

SEQ ID NO: 13355 - DNA, 422 bp, Oryza sativa
  Clone ID: uC-osflcyp178g01a1
tttggttttttaaatttttttgtttttttttttttttttttttttttttttttttttttttttttttttgcttgttccaaaacacccataaacttctgtaccaaccgtttattgcccaccaaacggtgtttacatggcagcccaaaaaaaaacaatttccctaaaaaagattccttcaaaaaagtaaaaactaatcctaaatcctccctggcaatattggctatccccctggctctctcttttaaaccttgtcagctaaaccatgttccaaaaaatagttaccttttcaacaaagacaaatttattaaaaaaatatatttaattattggctgggggaaaccaatttaggattataaaaattaccatttttggctttaaacccaggtcaacccaaaaaaggtggacttttatcaaaaacaaaa

SEQ ID NO: 13356 - DNA, 455 bp, Oryza sativa
  Clone ID: uC-osflcyp178g02a1
tttgtttgatggcacttctatgatcatgatgtcacaaatgaaattgccgacacgtttcttataacaaacaaatcaactacattcaatcacatacacgaagattgaagagaagggatgtcagttgacaacatataagctttactgtgccagcttgtaagacaattacaagataactcctattgatttcaggtaacagaaccaaacttggaaattaattaacagtagccaagtagcagctcattattctttactagaaggtgtccaactaagtccagcaacaaaaaggtgaaacgtcaaaccaacagagaatagaagtgccataagattttaaaccctgtggtcaatgtaatctcagccgatgagcaatttgttctcttccagaaatgagtaggtcgggacttcgaggttgtatggtgcagggcccttacggattctacctgatatatcataatggg

SEQ ID NO: 13357 - DNA, 415 bp, Oryza sativa
  Clone ID: uC-osflcyp178g03a1
ttttgttcataacttgcttgccagaattctcattataattttattctgttatatgcaatttttattcaaatggacacgtacacaactctgtactgaattacaacctttttccagaagcagtaactaatagccgtcttcaccgacacatgcttgattatcatagatcaaattttcttttcattgtctcttttaaatgaaaataccagcttagaaacccccaaagactctatctctctctctctctctccaaaggttatatgtgaatgcttggcaatactgaagaaccctgatgccgatatgcaaaggtcactactagcttttagagttttaagccttctttgtaaattatacatggcataatcgatggtcctctggcaagaagttgtatgaatcagatctaatggataccatactg

SEQ ID NO: 13358 - DNA, 435 bp, Oryza sativa
  Clone ID: uC-osflcyp178g04a1
atagcagggggttttttgcctcttattttccagcccagacatcaccaaatcgtgcttacataccacctccatgacgccgtccatgaacaaatacatcccaaaaaaaacccaaacaattcgccgacgggagacatcactcacacggttacactgaacaacacaagaacaaatctcgattgcaatttgcaagcacgcggcaacgaaccagctcaccctctcgtcggcagctcagatggctgccggaggcttcatcgccggctcgagcctggccttccagaaccgggcggcctcggcgccgtagcctttcaccacctcgacgacggacaccgcgtcggcgatcttgaacacgcagaccttggccacaatgccgccgttctcgcctttcacgtacaccggcccggtgcccttcttcccttctctcgttaccatgtaccc

SEQ ID NO: 13359 - DNA, 409 bp, Oryza sativa
  Clone ID: uC-osflcyp178g06a1
tttgttttttaagtgtgaaatgatccaagcacagttgcacaccacgcatacataatacaacatcatcagtaactggtacaaaatgtcaagagacaacacacggtttaaccgctggatcatagcacacatcaagtggtttggtaaatgaaatgaagttcttgcgttgatcgataataatgcatgcgcatgcaggtaagtaacacgagcactgcaatttattcgtcggcttgttatctagatcgagcgatgatacggtgtccggcggccggccggccggcgacgagcaggccgccggcggcggcggcggcggcggcgatgatatatcaaccgaggcgcatgtcgtggttgccgccgtaggccatgccgtgcaggttgggctggctgggcaccactcggaaggcgaacatgt

SEQ ID NO: 13360 - DNA, 440 bp, Oryza sativa
  unsure (1)..(440): unsure at all n locations
  Clone ID: uC-osflcyp178g08a1
gattgaacagatttttatcaacaagaacacaagaaaataccgacactttccctaaaaaaacaaaaaaaatgccgacacaggaaggggagggtgccgccgtcgccgtcgggccgccgctggctcccctcccgctggatccggcgaggggagggcgccgccgccgttgggacgccgtccgccgggtcgccaccgcctctcctcccatcccctcccctcacgctggatccgggatgcccggccgccgccccttccctcccgctggatccggcggaggggagggcaccgtccctgcccaccgtcttcctacccgccggaagggccggcgccgcagtctgccaccgtccgccaccgtcgagccctcccgtggcattatggcaagggagaggaggtgaggggcggaaaggcgccnacgcacgttgccgctcgcgggaggagagagc

SEQ ID NO: 13361 - DNA, 379 bp, Oryza sativa
  Clone ID: uC-osflcyp178g09a1
tttgtttttttttttttttttgtttttttttttttttttttttttttctttatgggaatttcatgggaatatatcgaatcccccaagatttcaccagggccatagaaaaagataatcatgtccaccaaaacacatggtaacttaaagcattatcatcacggctaagttcaaaatcttgaaagcccccattgatctaaagacaaaacatagaactcagttgtacccaaagcttggcgagccctggccaccaccgcggcgaaaaggcgacaaccatctaaacccggtcgcggggggggccaccctactgcgggcgggagtaggtcggcgcggacacctcttgctggcgctcgaccccggggaggtcggccatgccgagcgc

SEQ ID NO: 13362 - DNA, 356 bp, Oryza sativa
  Clone ID: uC-osflcyp178g10a1
tttggtttttttatttttttgggtttttctactttttttttccacaaaccacgagcttgaaggataaagagggcacacaaacagaacaaggcaccaaagcaaaaccaaaaaagaaaggctacacgcacacagagcaacacccaaagggaggaaaaaaacaaagcaggcacacacagcgaaaacaaaaagacccccccggcaaaacaaagagcaacagccggcaataagcctggccaaggccccaggcaagaacacagaacctagcaagtacgctgagcccacaaaaaggagcacgccaccaacgaaatagcggacggccgggccaagccgcaacaaccgaccgcgaggaccttgcg

SEQ ID NO: 13363 - DNA, 446 bp, Oryza sativa
  Clone ID: uC-osflcyp178g11a1
aataacacaaggcaagcatagcttaataaagaaagtaaatattccagtagtgtctccctctcccagctagcccaggaagcagcacagcctaacagctacaaaaatttccaaacatagttgcatacggaaaagagaaaaacatggaagccgtccttaaccacaattcaaatagaccccgtccttaccactcctcccaaacgagaaagttggtcatattaaaacaaaaacaaaaacaaacttttatccagaaccttacttcctaagacataatctagagaaggtcagcgacgttggccggcagctcctcgatggtcacattgtagaacctctggatgtcgaacagcatcctctcatcatcgcgggtgacaaagttaatggcaactcccttcctgccaaaccgaccactacgaccaatgcgatggaggtagttctcaggctgggtgggc

SEQ ID NO: 13364 - DNA, 427 bp, Oryza sativa
  Clone ID: uC-osflcyp178g12a1
tttgtttaacaaaaatgccaggagactcttaaaccctacagggagttccctgggatgtaaacatactactcactactccaacaatacgcaatttcaacttaagagcgtaggggtaccgctgataacctggatactaaaaggtaaccacacactgactacctgggtgaagggaattgctcacatttctttatatatcctggaatatagcgggccaaaacatggcatttgacttgaatattgctgtgacagattaatcaccgatctaatgtagaacttaggacaccataaacggccagatgtgacgacaccccgttagactgagaaactgtcagttagcaggcggtgcacattaaccactctggggtgttggcttgacaatcggtgcttaacctgcagtatgctcagatgactgagcctatacaggctg

SEQ ID NO: 13365 - DNA, 414 bp, Oryza sativa
  Clone ID: uC-osflcyp178h02a1
tttgggtatttaaaaaaatggggtgttaaccaccttttttttcatagttttttatgggtttacgtttaatgattgcagttttttgaatgcagccggacccggggcccgcccggggaaacgggggccggaaccggcggggcccccgggagccccaaacgggggggcccaaaacactaggggaaaaccgggacaaggccgccgggagggggaaagggtacacggaggaaaacacccaacaagaaaaggcgcgaaagaaaaaagggtaaaggggggggggcccaaggggggaggcaaccaacacaaaccgggtttacctgacgggggcattacaagaggggaagccggccagaccaggacacaaactgaaccggccaccccgggggaaggggcggtcaggagaccgggcccccgggg

SEQ ID NO: 13366 - DNA, 419 bp, Oryza sativa
  Clone ID: uC-osflcyp178h03a1
tttgtttttttcatcaagcaggtgcacagttatgcatgcaaattctttattgcaagtatgatgagattgaacactttctgtttacatctctgacaggttaagtcggcgaaatcgaacattacaacaactaatctccacctagcacaaaattgggctggcatccaaaacttttattaacttaacccagaggaatatttgggctaattactcacaaccgtcgcttcgccattcgcctgttatgtgtatttggcagctatctcacgcatcaggctttcaggagcttcaataccacctgtgaaatgctcaaactgacccatggcttgtctgacaaacatctctacaccgctgacaactttaatcccacatttttctgcttcttcgagaagccgggtaactttcggggcatataccgcattaaa

SEQ ID NO: 13367 - DNA, 467 bp, Oryza sativa
  Clone ID: uC-osflcyp178h04a1
tttgtttttttttttgatgggggcaacgataagtatttgctgctagcaactcccagtacatgagaaatcatatgtacaacaacaggatggatgctacagtgaaacaccagaagttgatagctctgccctaagacctgcaagtgcggtatacctcaccacgcatcacatcaattggtccatggtcaagtgcataacgatctgggccaagatacacgcctgtcttctcaaggagagctaaaccttcctccctgccgtaccttgacgaataaagcttcaggtattcgatgtcctgcatgccactgagaatgcgctctagcctagtggacgcaaccggttcatgtgatgaagaaaacacttcaccaggatagaacagaaccccatcgccaggaggaagaccacgtcggaaacaaatctcagcacttggaatcatagccttttcgtagcagttggtaccccaataaaggaat

SEQ ID NO: 13368 - DNA, 434 bp, Oryza sativa
  Clone ID: uC-osflcyp178h06a1
ggggcgcaataccgcatttcataccaacacatctagaaagaggtttcagtggatgcagcattgcagttgagcataacagcccaccgagacattgacaacgtactgaggatggccataggccgaacaaattttattacagaggcgactcacagtggtagtctgctggttcacactggccctagcctagatgcaaaacaagagtaccacgggcaatgttctagcagtagtagactagaaacctcttaagcatcagcgaaccccagttcggagagcttgaggtgggcctccttgtagtcttcaaagaaagccttctcatctgcagcatatttcttgaccagtgggcggaaggcagggtcactcaacagggctttgtcactaggaagctgaagaaggccctccttgtcaccactcacaagctccgtgaagtaagagtt

SEQ ID NO: 13369 - DNA, 430 bp, Oryza sativa
  Clone ID: uC-osflcyp178h07a1
tttgttttttttattttttttgttttttttttttttttttttttttgggcaacaccggataaataaataccagctcgatgatacaaatagtttaagcctaaccatagaagtaacacagcagggttaaaaaagagccaacaaattcatgggagcaacatgtaacaccacacatcaaaagttttcaacccatcaggcacgcaggaaacgttcacattccacagacaagctaacactagcatgcattggcctaattcaaactcttatgaagagactcaggctgaagcatgatagactcatgatcctctctactcgatcagatcggcatcgtcatctgggagagggtgggctgctgtaaccgcaagctcaacctcatgctggtgctgcattggcaggtcaatgggaacttccggagggttaagagcaacagctt

SEQ ID NO: 13370 - DNA, 444 bp, Oryza sativa
  Clone ID: uC-osflcyp178h08a1
tttggttgcttgattccaatggggaatcgttatttctttttccctagtccaagacagcaagagcttcacgaagggaagcaacaaaatgcatctggacctcctcatcgatcgtcaagaacaggggcacatgtacaaacagagattcgatgccgtgttgctctgcgaaccgaagagaacgataatacacatagttgcatacaaaccgaccagcatcgtctgatggcattacatcgtagcctgtcttccggagtgacttggtcaactcatttaccggaagcgtaatctctcttgtccgtgagatggctccatccgatggtacaataggaaccctctgaggtttccaccctagctcatctggacaacggaaggtggcttcgttaacagcctgattctcaagagcaaacctttgtgcaccactattaactccaaaacgggatctgaaca

SEQ ID NO: 13371 - DNA, 436 bp, Oryza sativa
  Clone ID: uC-osflcyp178h10a1
ttttgtttaagaaataaaacaggagttacttaccttctagatccaggacccaagaggttaaaggatctacagagcatgctatatggaacatgcctcaatgctaaagctgactagaagcgctaatacactgacaacttattcacaccgatacattgacaatctgggggtagagatatgcatgaatgattctggtcagcccaggctggggccgaccatcatgtactcattgcttgtgctatggctttgacactataatcacggttctaatcgcatgctgagaacagtatgtactcacgcttgcaagaacaactcgtttgactgatacatagccatggattccggcatccaacatctacgactgatgcctgttaacagacccacaaagaacttacctggcatacgcttacacacttgaaacagagcatcattcacctgg

SEQ ID NO: 13372 - DNA, 369 bp, Oryza sativa
  Clone ID: uC-osflcyp178h11a1
tttggttaataaaaatggcaggagacacttaaactctacatggagttccctgggatgcaaaggctctactgagaaatccaccagtaagcaaagggaacgtaagcgcgccggaggcccgctgataacctggatactaatacggaacaacgcactgacaacctgggtgctgagaatggcaaaaatatgtctagagagcctggaatatggcggaccaagcagatgggatttggctgagctacggctgtgacagaataatcaccgatctaacggcgaactgagcacaccatgaacggccacatgcgacgacacaccgttagactgagaaactgcagggtcgcaggctctgaacatgaacgactctggggtgtt

SEQ ID NO: 13373 - DNA, 374 bp, Oryza sativa
  Clone ID: uC-osflcyp178h12a1
tttgtttaataaaaatgccgggggactcttaaaccctacaaggagttccctgggatgtaaacattctactgaaaaatccaacagtacgcaatttcaacttaagagcgtcggggtaccgctgataacctggatactaaaagggaaccacacactgactacctgggtgcagggaattgctcacatatgtttagagatcctggaatatggcgggccaacacatgggatttggcttgcatattgcggtgacagaataatcaccgatctaatgtagaccttaggacaccatgaacggccagatgtgacgacaccccgttagactgagaaaatgtcagggtcgcaggacctgcacattatccactctggggtggtggcat

SEQ ID NO: 13374 - DNA, 428 bp, Oryza sativa
  Clone ID: uC-osflcyp179a01a1
ttttgttatatggtactgagagagctaagtattcagaatccgggcctcattttattcgggaaaaagatgctcaggccagttccaggtcacctgatggcaagctcacaagttcagacagtcacgcacacacatacaatactctcggacaaactgtaacaagatgcaagctcccttgagattatcttatctcactctacgatgactgccggagctctgggcgcacgaaatcggcgttggcaggcacggagatgtcgacggtgggccgcagctcagcgcacacctcgattgcgccatggacggggtcggacatgaagttgctgatgaggtcctggttgatgggagcatccttgtccactgtcacgaatgcttgctgggtcaggatgtagtcgaagcgtggcgcccatttccttgatcccagacgagccgtc

SEQ ID NO: 13375 - DNA, 422 bp, Oryza sativa
  Clone ID: uC-osflcyp179a02a1
ggaattaaaggagatttacgtaatttgtttgtacagaagaagagagtagtaattgattgggggtggaagacgacacaggtagcagctgcatggagtaattaatattctagctatatatggatcgagacgggggacgaattcgattattgagactgggggcagacgatatgatatgatatgatcagtagtcggcggtgggcagctggtcgtgcgggcgctggccgatgaagatgatgtcgtagatgagcgcggcgatggcggcgccgacgaaggggccgagccagtagacccagtggttgtcccagactccggtgacgacggcggggccgaaggagacggcggggttcatggaggctccgtcgaaggcgccgccggcgaggatgttggcgccgacgatgaagccgatggcgatgggggcgatg

SEQ ID NO: 13376 - DNA, 343 bp, Oryza sativa
  Clone ID: uC-osflcyp179a03a1
ttttgtttttcttttttgtttggttttttttttttttttttttttttttttttttttttttttttttttttttttttttttttctttttttttttcttttttaaaaaaaaggggtttaggggtacccctattggcgttgaacaaaacccccgcccgaaactataaccacgggcctgtatccgggcagaggccacagagatggctagggcgggttgttctacaaaatagggggcttcaggggcacaaagttgccctgggggaagcctaaatacccttacaaagccaaacaaccattgatgccatggcgttaaattgaacacccgggcgtccataagggcgagac

SEQ ID NO: 13377 - DNA, 396 bp, Oryza sativa
  Clone ID: uC-osflcyp179a04a1
tttttgtttaaaaaggtaaactcttcataataatattattaagacattatagctgatgtcttttgatcacactgcgatcaaattatgcatcataggcagtacaactccgcgtcaggaaaaagtagaggagatatatttcttgttattacttaatacagcattcacatatatcgaaccatccggtacgtacgtagtagtactccacgcgttcacatcgatgatcggggacgatatcctcaggtagtacttatgcaaaagcgttggcgtaaactgacgaactgaacggacggacggtcggatttagggctcccataagtccaagttgccggagacgaagtcgtagtggccgccgacgagcttgagggtgcccgtggcgatcccctccttgacgaacgg

SEQ ID NO: 13378 - DNA, 472 bp, Oryza sativa
  unsure (1)..(472): unsure at all n locations
  Clone ID: uC-osflcyp179a06a1
gccgccctttttttttttttttttttttttttttttggtttttttttttttttttttttttttttttttttttttttttttttttttttttttttttttttttttttttttttttaaaaagaaaaaaaaattttcccaattaaaccccccccaaaaaaacctgggtcaaggaccccccgggttttaaaggaacactaaaaagggggccccccccaaaattttttaaaaaaaaggccccaaggcattttaattttggaaaaaaaagggaaaaggggttttaaaaaccccgggggccccccccacgggggaaaaaaaaaaatcccaaaaaacccccctaaaaggttttcccccctttccaaaaaaaaaaaaaggcccccaaaaaacctttaaaaaaagggccgggcccaaccaaaatnnncggcttgccctgggggcaaaatttttggggaaaaagggcccccctaaaaggggg

SEQ ID NO: 13379 - DNA, 405 bp, Oryza sativa
  Clone ID: uC-osflcyp179a07a1
gaaggcaaaggaaatttcccgcaaatacttattcatatgttttgacaacatttctcccgacgcatgctcattgtggcagacgcagctgaccacctagagcttttagttcaccattattatttagaccaagcatacgtcccaagatcagaacacatgcttacaagcgaaaatactaatagcctggctggctgcttcacagaataaccaaacgacaacctcaacagataaaaatgccacggaatgaaaacaaagcagcgaatcgtcaccagaagtcccatcttactcatcaaacactccatcattctcctccaacgcatcctttccccaagggagaagattgcccagtttaccttccttaacaggagcagggttcaccatattctcagcctcgaagcagtgcaaaac

SEQ ID NO: 13380 - DNA, 419 bp, Oryza sativa
  Clone ID: uC-osflcyp179a08a1
acaacattaatgttacatttctttgtaattaccatctgaaagagccagtcacggcaactgaccacctcaacacactacatttagacagaagaattacaaacttacatttgctaattagaaccctacactttgtatggtttttgtatggtcaaatacattccaattcatagggctttacatgctagggagagctgttttctctgcttgtttttcctcctcctcccctacaatcttcttccagaaccaatgcttcctccagacctgctccatctgctccatgggcagcttctttgtctccggcaggaagaaataaacaaacactgtcatcaagcagatccatcctgcaaagaagaagaatgtccctgacttgatgcggcataaaactgcaaggaatgtctgtccattcacaaatgtcatca

SEQ ID NO: 13381 - DNA, 425 bp, Oryza sativa
  Clone ID: uC-osflcyp179a09a1
tttgtttgtagtggaggggctccaatatttcattcattccagaggtggcataaccgcataagctacagcagtgcacaaaggtctcgatcacaatacatacacgactacagcagtgcacaagggtctcgatcacaatacagacacggccagaacgttgcagtgcaggataaggtaacaatagaactagatattgttcgttgtcagatgattcgtttccccagttcagcttggtgaaaaaacgaaaacggtcgcagtgggtgaaaagaattctagtgcttgaagacgatcagcacggcagtgcagttgtccttgcaacgcctctcacgaacagcttccttcacgagccgccgcactgccagagtcgctgacgaggtctccttcaattgattctgcacaaattcaacagcatcacctggtccaaatac

SEQ ID NO: 13382 - DNA, 379 bp, Oryza sativa
  Clone ID: uC-osflcyp179a10a1
tttgtttttttttttttttgaaatcctcaaaagtaccataaacaaagtatacgttagcatctgcggagtagcaaaattaacacaaacacatcctaataaaattctcggaagtaccatgaacgacagcaattcaaatacgtgcatgcccaattgcccagatacatcttttcaagtattattacgggccattcagcacttagcagcagacctaaactgctgtctaagtgagggcagcatttctcacactaagtttctagttatccgatagattcttaatatggcgtatctcaaggagatactcctgtttccggttcgaatgtaagcttttaagcagtccacccggatctttacgaaggcatatatgtcgaagtatcaatct

SEQ ID NO: 13383 - DNA, 453 bp, Oryza sativa
  Clone ID: uC-osflcyp179a11a1
tttgtttttttttttttttatgacaaatgatattttcaccttaagcacacaatccaactccacaatgaaagttgctaccaaatacccaaagggttaacaaaacgtctagggatggtggtttaggggtacaggaactcaggaaatttaggacagtgaatcgacgacgagacccagataaataagagcctgactggcggggacgagttttgtgatacaattccttaatggttgtgactctgtatgttttaagagaatccttgttcctacatacccaaaccgatcataactgaaagttcagtagtaatcacatggaacaggtgaggtttacttcgggccgatgtccttcagcgcgcagatctgctcctctcccatggcagacataacagtcaccaccaggtccttcccttctccaaatccatccttgatctgactaagcaggttatcatcagtagg

SEQ ID NO: 13384 - DNA, 260 bp, Oryza sativa
  Clone ID: uC-osflcyp179a12a1
tttgttttctaatcatattgagagtattttcacgatgtattcatgcattacaaataatcgtgcgaataaacaaatatgagcaaatagttagagaagctgacagcctgtctaaccactatagtaaccaaatacgaacacgagcagttaagcaacaactcggcacgcgtaaaccgccacaaacgacggcgtagccaccggccccgtacccggcgatgccgtacctgactgcgtcggagtcaacgggctttacgagaatggtg

SEQ ID NO: 13385 - DNA, 430 bp, Oryza sativa
  Clone ID: uC-osflcyp179b02a1
gaagacagaacacagaatactttattcttccaagctgaaggatcataccacattgtacactaaaagatagcatttccattgtgtctcaaaacctatcataactcagaacgtcctggtactcatctctctgtgcttaattgtctaacaagatacaaggtgacccttggatttcctctcatccgacaaataggaaaagaaataaacaagaggatagagcaggaaaccaagatgcatatatcataacctggagcagtggccttggtgtatcatgcctttctatctatttaacaagttttacctagcctatcttggatgaaaaatgagctcaggctggtagctccagcttcacattgttcttccagctcattatgtaatagtagaagaagtcagcatacaagagagtctgcacgatgcccgcaacccagcttat

SEQ ID NO: 13386 - DNA, 352 bp, Oryza sativa
  Clone ID: uC-osflcyp179b03a1
agaatatcgatcacaagctctaatgcttcaattcttagacgattacacagagataccaccagtaatttgttttctttggaagaaaatactactagtacaagataattgagcaaaataaatacctactgggcgccgtcctcggggaagcgcgtgtcgaccccgccgtggccgtgctgccccgcaacgccggaagccgcagccgcggcgccgcccccgccgccgggacccgcggcggaggcacctccggcgccgtgctggagctcgatgacgagccagcggacggccttgctcatctgctcgaggcggacggcgctgatgggcttgatgccgggggcggccagcgccgcggagg

SEQ ID NO: 13387 - DNA, 384 bp, Oryza sativa
  Clone ID: uC-osflcyp179b04a1
agtgccaaccgtgcctgccatgccttgttctgggtattacgcacggcggctttacggattcctacatgccaagtgcggtgacagtgcaaaaagaaatctactaacttctgcgtctgtgcagcggacattgatgaaccaagtgtttgggtttgttatcactggaccccctaccatttaccaaggagtaatattaaaattccaagggtaagtggtaccttgtcgctcaattaacacccgggtgtgtaggtactttttgtactgcggccggcacccgcttaaaaagactagggaccatgaccttgggatgggcccggaaccgttttaccaagtgtgagtgcagttgcctcattagataaatcaaagacaccatgttgaatgttcttg

SEQ ID NO: 13388 - DNA, 406 bp, Oryza sativa
  Clone ID: uC-osflcyp179b05a1
gggcaacaccggataaataaataccagctcgatgatacaaatagtttaagcataaccatagaagtaacacagcagtgttaaaaaagagccaacaaattcatgggagcaacatgtaacaccacacattaaaagttttcaacccatcaggcacgcaggaaacgtccacattccacagacaagctaacactagcatgcattggcctaattcagacttttatgaagagactcaggctgaagcatgatagactcatgatcctttttactcgatcagatcgtcattgtcatttgggagaggttgtgctgttgcaaccccaaggttaagcctaaggttgttgctgcattgccaggtcaatgggaacttccggaggtttaagagcaacagcttcaacgaaatgcaggttcgggt

SEQ ID NO: 13389 - DNA, 101 bp, Oryza sativa
  Clone ID: uC-osflcyp179b06a1
tttgggttttttttttttttttgtttttttttttttttttttttttttttttttttttttatattattttaatatgcaaaataattaaaacaaaaataaat

SEQ ID NO: 13390 - DNA, 359 bp, Oryza sativa
  Clone ID: uC-osflcyp179b07a1
aaaacgccacaaaaaaaacttaggacaaaaggagaaagcttaacatataccacacattttgccgggctcaccctcacagaattggtgttcgaaaaaggggcggacaaacaacacaggttcagctagaaattcctaaaaacaggtgagttcaggggggagctatagaggaccacattggatttgggggggtcattcatgcctggggaaatatttaacttaagggggggaagacatttcaaagggattgcctagtctaatcccacccttgagcagttggttgagctgccgggccccatccaggaggcgcaaccgggggaacgacgggggttttaggggctacgggggctcctgtttgcccg

SEQ ID NO: 13391 - DNA, 406 bp, Oryza sativa
  Clone ID: uC-osflcyp179b08a1
ccagcaacagagatgataacttaagaattaagatctccatcacataaaaacatacagtgactgagtactggattacacgattgagttgttcagggttcagataggaaaaacatcttggggactagagatagagggaatcgacagatgcgcagcagtagcgcgcgggaaacaggacatcacgattgcgttgcatgtcgtcggctgcgcaacggcggcgcggggcttaagacctgctcttgaatgggatcgccctgatgatcacctgggggtagatggcagccagggcagcgccaacgaaggggccaacccagaagatccaatggtcattccaggcatgggccttgttgtagatgatggcagcgccaaggctcctggctgggttgatgccactaccggtgatggggat

SEQ ID NO: 13392 - DNA, 445 bp, Oryza sativa
  Clone ID: uC-osflcyp179b10a1
tttgttttttttttttttttttaccaaatattcaaaccatgcattgctattgtaattacacatgcagacaataagaattcctagatgccaagtggcatgaagctgtaaaaaaaaatctagagactactgtttatgcacagcagacataaatgaaccgagtcttttggcatgttaacactggagcaactacgtttcagtcagcatcaagaagatgattccaagggtaagtggcagtgtgacacacgatagacacccgagtatatcgttccattagctactgcagcagccacccccttgagaagacgaggaaccagcacctccggattggcccgggaccgtgtaaccaagtttgattccattagcctcattagataaatcaaagacaccatcttgaattttcttgtatattgctccagcagtcttgacaaaagccttctcaacattt

SEQ ID NO: 13393 - DNA, 345 bp, Oryza sativa
  Clone ID: uC-osflcyp179b11a1
gggaaggggcaagggtccttttattccaaaaggcaaacaaaattttgaagccccccgaaaatgtttcccggaacaattaatcaaccaagtggggcatcatcaggggaatttttaccccaccgacatgggacgtttcactaatccgttgccaatcccttaggaacacgccaggctaaaaaaacccctgcaacttttcaaacgaaaaaataggccaagccaccccaaaatttaaaccaaattcaaaaacccttgtaagaacgcataaatagccgccctactacgggaacgagagagccaattagcatccggccggttataccccacacactgggggggaggacgggc

SEQ ID NO: 13394 - DNA, 423 bp, Oryza sativa
  Clone ID: uC-osflcyp179b12a1
tttgttttttttacgaaagcggcgcatcaccgaagaaaatcaacggcgctaatattgtctattacctttgatatgctagtcaatcaaaacatctataaatcattatcttctgagacgaaaggtttaacatcggctgacagcggactcaaatagttaatgtacaatactcacacattgttagcattagaacagaaaaaacggctcgccaatcagtcggacgccggctacgatcatctcggaaaggaatgccgcattgccgcaggttgcaaccatgtcatttccttggcggaagacatgatgatgataagccatatcatcgtcctaaacaatattacttctattctttgcttgtcacagaagcctgagtcccgaattgcaggacgaaagagtaccaactcctggcaacttgcacgggctgcaaaa

SEQ ID NO: 13395 - DNA, 439 bp, Oryza sativa
  Clone ID: uC-osflcyp179c01a1
tttttgttttttttttttttgggtagagcacaaacatattggcatcttgggtgttaactcaacagacaatttatttcacatacagacgcatttatgcctacaaaatcatattattcgtgtccaaaattgaatcaacagctcaaccgtatactggggatccgcggagactcactaattacagcgtctaacagatgatagtagatcacggaactagcgcgaaacaacgattgtcataaaggaccatttgtaaacaagcactcaggttaaccggtgttcttgccaactgacggtatcatgaatcatcagacttgcactttcatctggcagaactaacaaatccaatatacactcaccaacaatccgacagggtccacaagctatttgtgcctccaataatagttttggcatcatatgattcaaccaaggaccttcctgattt

SEQ ID NO: 13396 - DNA, 384 bp, Oryza sativa
  Clone ID: uC-osflcyp179c02a1
ttttgttttttttttttttttttttttttgagataatgtacaagaaggagccttgaggattgattttgggagctattgggttgaaaaggacctcccagaaagttgttattctcccaaaccccttataactaaatggaaggtgcggtcccactgaggacgacctgtcttttgagcataccctataggccggctggttaagaacaaactaaacagagcgtgcgaagacaaaaactatcattgacccggataatattgctcgcaaagaaactataatgaagggggtggggggatggtgcctaagatggtcgtttagaaccactaaatctcgttgaggcacccggtggcaggggccttgttattcttgcagacggccatggccttgaa

SEQ ID NO: 13397 - DNA, 428 bp, Oryza sativa
  Clone ID: uC-osflcyp179c03a1
ttttgttagtagtaaagccatgagatttactgctcaaatccgcatttgaaacttctcttttacatatggtattacagtcttcaggatatacatgggaaaaccttgcattatgttgtctacatatagcagctgcatgtttaagaaactgtacacatctatctcaacatcctgggctgcctaaacaaattctcacaacctgggagtttcagcacacaagcatggaaaccttatagttcaagcttgtggaaaaacctcaattggtcggcatgccatgaatcatgagcagaatgcaaagtgaccaggatgctactcaatccgacatttgataggattgcgacgatgactcgctcatcatcgagttcatacaaccatagggtattgagacgctgggctgtccaattgttcagggatgtcattttccgggacct

SEQ ID NO: 13398 - DNA, 358 bp, Oryza sativa
  Clone ID: uC-osflcyp179c04a1
ccaggggcattaattaacaactaattaaacaagggacgttttaacccctacccggccacagtacatatacacctagaaaaaaagactaaaggacccccaaccccaacaggggggggaaacccccggaaaaacaaccgacccccgaaattttacttttgggcgcaagcaaaaacaaacttgccggtcccggggttaacggccggaataaaaaaaaaaaccacgttaaaaaggcccagcggctcaatctggggggggggaaccccggcctcaatgtaaagctgcgcgagggcccccttgccggtaaaaatccccccgatgatggaaaaggcaatccctagctgggcaagccggcccacaa

SEQ ID NO: 13399 - DNA, 392 bp, Oryza sativa
  Clone ID: uC-osflcyp179c06a1
tttttgttttttttttttttaggcatcaatggattcagcaattcagctgatgcatcctctcttttttttttttaggtttctcgttttttggttcccccactccaactacatttgggacatgaggcttaggtttctcaatggcctatgtgccaataccaaggcccaaagtaaacgaaccacggagctttccatcaaaaagaaaaataaaggggaaaaaaaagcccggagaaccacctcaagaacaagctaatatacaatggggaccctcatcatatcctccaatggtgatcataagaatttctaccatctgtcggattataacggtcttgctttccatgatgatgactccattggctcgatgcctcagggtttagactttgatgacctgaatt

SEQ ID NO: 13400 - DNA, 420 bp, Oryza sativa
  Clone ID: uC-osflcyp179c07a1
ggccaatctgagctgtaggtataagcagaagcaagagtaagcaactacatggacttatatacaatctatgaagctgctgaggaattctttcagcacaacaaaattcaaggcaagtgctcatatgaaagaaattgcttcctacagatttgctactggcattgaaatgccatgctctgaacaacaaattgacagatgctccacagaatctgtgacaatgtcctccaacacttcactggcaatctgctcagggatctcatctgtttccattggcaatagcttaatccaacccttcccttccacctcctcctgcataattctttccaagattattccagcattgtcgtccttgtttgccgcaaagctcccatctccataaagccaatcgctcacgatgttccatacttcttcacccaaggtttc

SEQ ID NO: 13401 - DNA, 370 bp, Oryza sativa
  Clone ID: uC-osflcyp179c08a1
gggaaaaagcccaaacccctttgggtttatttaatcatcaattgaaatatttttacatttgtctcccggaattttgggaaaaacgacataccaaatcaatcactgggaagttttaaacttcaacaaagggaaacaacttaaaggggaaagggaataaacctgacaatgtaatgcagggctggccgttgggggaaaaccattaataatggccccgctcggccatgatgaaggaacaaatggggggggcctacaaaaaataaacatgcttgtttcgggggttgaatataagcgacgactttataaaggaataccttggccttcttagcattaggtttgcaactttttggacactttttggttggggggggat

SEQ ID NO: 13402 - DNA, 366 bp, Oryza sativa
  Clone ID: uC-osflcyp179c09a1
aaaaattgggggatcccatcaaaaaagcatttactactacttggccatttgatcattaagatcgaacaaacccccaatacaataaaaatcctaataataataaggaccgccttaaaactcaaatttaatttaatgggccccacaccaaactttacctaagcattattaatcaagctaccatttattactggatcacaagctaaagaagccttttgttttacgcgccggggccggaaaattgatcggccggggggagctttcgccggggagcgcttcgggggggggggggccgccgccgcccttcaaaaaggggttgccgaaaatgtgccccgccctcgggttcggcccgcgggagaagacccaggg

SEQ ID NO: 13403 - DNA, 363 bp, Oryza sativa
  Clone ID: uC-osflcyp179c10a1
ttggttttttttttttttttttttttttttttttttttttttttttttttttttttttttttttttttgttctttgtttctgttcttttgcgctgtttttttttcttcagagagaaacggaaacatgtgaaaacagaaggaaaaaggggccggccctttgcgccgggttaagcccccacggaaaggagaaaagggcgggggagaagtccttgcacatgggggggccaaaaaacccggggggctgggccctttttgggccggggggggggggtttaacgcacacccccccgggggggaccccccccgggggggcccaaaaggcggggggggcccccctgtccccgaccgggggaaaaccccccc

SEQ ID NO: 13404 - DNA, 434 bp, Oryza sativa
  Clone ID: uC-osflcyp179c11a1
ttggttttttttttttttatgtaaatgtaatcgcgtatctactaaattcagttatttaacttgtacagaaaaagagaaacaaatccaatactttctcttgtacataatcgtgaacccctcgttttacaatggaaaaataattgaatcgtaccgcagcgatttgtttcattccatgtactgtactccttaacaaccaagaagaagcggaggcacacagcaaatatacagaagcacaggagatcgatcaagatcaatgcctctgcatctggtcctgctgctgttgctgctgctgcaagctgacgagcttgtggtaggcgccgttcctgttctcgatgagctggtggtgagcaccctgctcgatgatcttgccgtcctgcagcaccgagatgacgtcggcgttcttgatcgtcgacagccggtgcgccaccatcacg

SEQ ID NO: 13405 - DNA, 411 bp, Oryza sativa
  Clone ID: uC-osflcyp179c12a1
ggaccaaatattcaaaccatgcattgctattgtaattacacatgcagacaataagaattcctagatgccaagtggcatgaagctgtaaaaaaaaatctagagactactgtttatgcacagcagacataaatgaaccgagtcttttggcatgttaacactggagcaactacgtttcagtcagcatcaagaagatgattccaagggtaagtggcagtgtgacacacgatagacacccgagtatatcgttccattagctactgcagcagccacccccttgagaagacgaggaaccagcacctccggattggcccgggaccgtgtaaccaagtttgattccattagcctcattagataaatcaaagacaccatcttgaattttcttgtatattgcttcagcagtcttgacaaaag

SEQ ID NO: 13406 - DNA, 444 bp, Oryza sativa
  Clone ID: uC-osflcyp179d02a1
tttgtttttaatctaacatacgcaaactgatattatcacaatgttagccgatgacaatggaaagagtaatctaggtacaagcggatcattgacggtggagacaagacattggctgcaccacaacacccaccagtggcgccaacaaggagcgctatccgttataggacgagagaaaaagtaaaacatcacgatgtgaagtgaaactgaataattctagtagacgatgatgatgatggataggctccttaggacgcccgccgcccttagcgtcttgctgctcccatcttgtccactggaaggctcactcgtcatcgtcttcatcctcttcgctgccctcgtcgtcatcctcatcattgacctcggacttggacttgtcagattcctcctcgtcgtcctcctcttcctccttggcgggtgccttcttggcagtgctctcgcccttgt

SEQ ID NO: 13407 - DNA, 315 bp, Oryza sativa
  Clone ID: uC-osflcyp179d03a1
gggaaaaaaaaaacgaaaaaaattttgagggggggaaaatttcccataaacggccatttatccccccgggggtaaattagtatagaaaaggaattaaaacctccccggccggaaagggccatttttaaagcatggtggggcccttcttgggggggccccccggggggggggggccacccccctttaagggggcaaagggaaggttggggtcacaaacggggggaaaaccggcaacctggggggggggggcccaaggactccaggggggcaccaagttggagcccaaggtccggatccactggggggggccaacaa

SEQ ID NO: 13408 - DNA, 437 bp, Oryza sativa
  Clone ID: uC-osflcyp179d04a1
ttttgtttttttttttttttttgtgtttttttttttctttttttttttttttttttttttttttgttttttctttgtgttttattgcatgaatgaagagaaagacaattggaatcacataaaaagatggcccaaagcacactaatttttattacaaccgccacgacagtcttgatcgtactgactctaaggcgcaaaatacaaatcggcattaatcttttgcggatatcccgctctctaaaggcttcttattcctcagcaaatcccagttcagagagcttgaggtgggcctcggcgtaatccgcaaagaaggcgtcctcatccgcagcatatttctccaccagtggacggaaggctgggtcagccatgagggctttgtcacttggcagctgaagaaggccttccttctcgccactcacaagctcggtgaagtaagag

SEQ ID NO: 13409 - DNA, 420 bp, Oryza sativa
  unsure (1)..(420): unsure at all n locations
  Clone ID: uC-osflcyp179d05a1
ttttgtttttttaatattttcgggtctaccctttttctttttttttcctttttttgttgtcttttattcttatttttaaatttcttcctctcgactttcccaccaaacccatgggaagagaacaatcccacttcggtaccactcaacttcatctttccaacacctactacacactctggattatgcccccccacgcctctgctatagacatttgtatacaaggaaaccaactttccccctccccgtttaaaaaattaacaagaaacaaagcctctcccatgtaattaagctgtncccacccttgcaagcatcacatttcatgacacaagcacacactcacactataaccgccaaccaagaaggctttttcactccctttttttggccgggtgacccagggcagcttactccaactcaacg

SEQ ID NO: 13410 - DNA, 422 bp, Oryza sativa
  Clone ID: uC-osflcyp179d06a1
gatgccaagagcattccccaactatcaacaatgttcagtctacaaggacaggaatacatataagctgttcattgtactatcatctccagcatcatctaagatcagttacactgataggatattacgatcacataacgccaatttctcttacactctagtagttgtagctattactgctacgaaaattcttcagcgtctcatgtaacgccaaagcacaattcactcaacggctttgccctcttagagattagtccagctgatgaggcgtgcagagattcagacaatgatggcatgtaacagccatggccttcctgtaggagtttagctgttgctggggttcaagatctcaccaagattcaactgcaagctgttcctcatggttctccttccagctccaccagcattgccctttctcatcatcg

SEQ ID NO: 13411 - DNA, 342 bp, Oryza sativa
  Clone ID: uC-osflcyp179d07a1
tgggttttttacaagaaggggcgaaacctccaccttaaaaatttgagtaccatggaaagtcccgatatatcacccaccccgtaagacaccaaaactgaaacgtgccctcatttctcgaattgaaagaaatccccttggaagattaattaaaaagggaaagtccggttttaacaacacattgaaacagcttggatataaacactaaacgcaccgttcatgcagatgatccttaacaaatatggagaatcaaaaaaccatccctagccaaccgatacagaactacggtgtggaaagcagcttacaaatgcaaacctatcaccactttcttggaggcaacccctc

SEQ ID NO: 13412 - DNA, 376 bp, Oryza sativa
  Clone ID: uC-osflcyp179d08a1
agagaaaataattaaaagggtcatctgaaaataatctggacagggacccaggagttacatgaaccctttttatggggatgctttttaacaaatattatggtacattacccaccattggttccccaaaaatcaaaatttgaaagaaaaaaggggagagaactttttaatcgggtcatacccaatcagattcattcatcccccgaatcctttgaatgccaaatggccaatacccccttacctactggggaggctgatctacccgcacgacgaggcccaattaaatccacggggatcaccgggggccggtgccggaggaggggtcggaggaacaatcccatttggccggggggggctccaccttttgcctggggaagct

SEQ ID NO: 13413 - DNA, 427 bp, Oryza sativa
  Clone ID: uC-osflcyp179d10a1
gaacagaatagaatgtatactttgccaagtcgtcccgattgcttgccttcctaattgacacaacccgcagtaccgcacacaagctgcaacctcaactagacactttatttatcaactaaataggcttaaacttagactgaaacttactatgtcctttcatcgattccaccgtgcaatgcagcagctgaaacatccaagacatacacataaatattaactgacacgagtagctatgggaatctgtcgttgcaaaaccatacagatttctccatgccatccacgctaacttgtacaaaccatctgacttgtaatcgaaagaatgcggccgatgcacgctgtccatgcccaaatcaacagcaagctgaattgggcattgcccctctgatcgaccgatcaccttctctgtacacgaagaatgcaaccagcg

SEQ ID NO: 13414 - DNA, 431 bp, Oryza sativa
  Clone ID: uC-osflcyp179d11a1
actaataagtaaattactagtagtagtataatatcactctgcttgtgttgtgctttcagccagcgtcaacatctctccctctcgacgttacagacaaaacccaagggaagagaacaacaacactacagtaccactcaacttcatctgtccaacacctactacacactctggattatgcaccaaacgcctctgctatagacatttgtatacaaggaaaccaacacccccacccccgcaaaaaaaataaacaagaaacaaagcctctcccatgtaattaagctgtaacaactcgtacaagcatcacattccatgacacaagcacacactcacactataaccgccaaccaagaaggcatcttcactacatttctcgtccgtggtgaccccagggcagcttactccaactcaacgtcatctctcctctacaactt

SEQ ID NO: 13415 - DNA, 429 bp, Oryza sativa
  Clone ID: uC-osflcyp179d12a1
ttgtttttttttttttttttgttttttttttttttttttttttttttttttttttttttcacgttaattttctccaggggcattaattaacaactaattaaacaggggccgtttttacccctacccgtccacagtacatatccacttgaaaaaaagtttaaatgatgcccaagcccaacaatggggggaaaacctcgggagatcgaccgaccctcgaaattttacttttcgtcgacgtcgttaacaaacttgccggtgccggggttgatggcggcgataaaaaaaaaaaccaccttaaaaaggacgagcggttcaatctcgttgatggggaccccggtctcaatgttaacctgcgcgagggcccccttgccgggaataatctccccaataatggaaaaggcaatgccaagctgcgcaagccggccaaaa

SEQ ID NO: 13416 - DNA, 183 bp, Oryza sativa
  Clone ID: uC-osflcyp179e01a1
ttgtgtttttttaaccccccccgccggccttacccttttagggtggagataatttattttattttgtatttacatatcctatagccgggtttgcctataaactgtatgaaacgatcaattaggattgccccaagttggtctatattaaactcaaatttggtaattttgcaaaatcaaatacaa

SEQ ID NO: 13417 - DNA, 433 bp, Oryza sativa
  Clone ID: uC-osflcyp179e02a1
ggcagagaatatcgacactcatgaacaaaactgaaccaagcacttgattgggtcacagtgcccttgaattgtctttgcaggaatgtcgacagatacaaaaggatctcttctgagatcaaattagtccaaaatgcaggaacagcttactcaggacatcttcactagttacatttattgcggaaaaaacacaccatcagatatctgcataatttggccaaaacagaaggtggggggaaaatggcagacgcctctcagattgactatctagtttatgcaagcgctggggtaggggtgcaaccagtggcaggagcaacttcagaggtcttctgtgcagaactgtacttctttgtgatgaacctgaagaaatctctccatagcaattcgaacattaaccaatttgtaccagcatcagatgtgccatcaccattcttgg

SEQ ID NO: 13418 - DNA, 448 bp, Oryza sativa
  Clone ID: uC-osflcyp179e03a1
tttgtgttttttagtaacttcaagaccagccaatgacacagctggtgatttggttaacatgcttttccaacttgacagtaagctgccaatgatcagctctgggttattgcaatcattctaactcatgacatgggcttgggctcagttttttttcccttacaatcatttttgtctcattacagctccaccacgtactaatcgaggcctaaaatatatacatgaagcagcatgctttcgtcatcgccgacgaatcaagttgtgttatgatatctatcctacggtatgctctttcatatgctattcaactatgagaagttgtatacttacgatcgcttccaatctcatcacatgctaccatgctaagtatcgtgtatgtggctgtcaggtggcaactcatccaagctattggtcatagaatccgcgtctctggttttggggttgttcacct

SEQ ID NO: 13419 - DNA, 416 bp, Oryza sativa
  Clone ID: uC-osflcyp179e04a1
atcaataaattgcatgatctgcactttttatcagtaaaatcaactacaaaaatcacaaatgccaacaacacttttgcaggaagacagagcatgtgcaaccagtgttattgttaatggaaggagacttctcgtctgtatcacaagaccattctgttgtagcaacaagagactcgctgatcattaataaataaacaactcccaacaccagaattgtgacctaaaagaccaagtagcaacccgcggcaatgcttcttccagccgttcttgttttcccagttgaaagcctatgtgttgagaaccttggaatccttttcgcgcacctgcaatcaggacaacaatgaataagcaaattaagctggaggatgcattacaacaaaggccatggagttaaacaggttatacaataaagcagtagt

SEQ ID NO: 13420 - DNA, 436 bp, Oryza sativa
  Clone ID: uC-osflcyp179e06a1
ttttgtttttagcaatgtaaatactcgcattccacaacagccgaagggcaataatcaggctcagaacaagtttaaaccgaacagaaaatagagagttttaaacgacacagtgcacacagcgggcatatgataataacggtcaatgcaacgagtgccatggccgtgcacaaaacttaacgaattatttaaagctagatatcttaaatgcagacacgcaaaccaccatttgaacgaggatcatttcttcttggcggcagccttggtcaccttggcaccggttgggtccttcttctccacgttcttgatgacgccaacagccaccgtttgccttatgttacgcaccgcaaaacgaccaagaggagggtactcagagaatgtctccacaaccatgggcttggtggtaattatcttaactataccagtatgaccgttcttg

SEQ ID NO: 13421 - DNA, 447 bp, Oryza sativa
  Clone ID: uC-osflcyp179e07a1
tttgttttgtttggtaggtgttaaagaatactttctccaagcacaaccctctttatattcctttacaaccccttctgttggtttgcttcgaaaactgtatgaaacgagcacttgatttgccccaagttgggcgccacaaaactcaaatatggcaaatgtacaaaatcaaatacaaacgcagtacacatcaaatcaatcgtacattggggatttagggttgttagtgcatcatctggccgtcgggcgtcggatcgataggaaggccatcggcacggtcactcgatttttccttggctttgactggattctttatgacgaaattgacgtattggtagcctccactggtagggccggccgccgctgcgtcggccttgtttgttggggattcctttgccgcggcggatgcctcggccttacctgccgcggatttctcagccatggcgggtg

SEQ ID NO: 13422 - DNA, 437 bp, Oryza sativa
  Clone ID: uC-osflcyp179e08a1
ctcattgatatatatggtagtcatacataaagatagatggtagccattctagactaagtacaagacatggtgttacaaaattggactaccagagagtttatatcgagatactactgtgtgcccttaaaagagaattacaatttttcgaagatccctaatacaaggtctaagcactttctgaaaatttggctggaggattaggtactacagtaggagttgccatggttaaacaataatgacgaccattcctctcatagatataagacagcccgtgtaactctggatcactagcaagtgcaggatcagccatagtactacggctcttatgatcagggtatactggtgctgctgatggcggaggacagaggaagagagcaccgccgctacttgcatcacagcgttgtcgttttcatcacagccgctgtcatcgccgtcgt

SEQ ID NO: 13423 - DNA, 427 bp, Oryza sativa
  Clone ID: uC-osflcyp179e09a1
ctgctacaggggtctccaccttgcattgcagtgcactgagcacctcatctacacattctctaaccctcaaggaaaagaaaacacaaattatgcactcttggctctcatatagttctcctgtggcactcttagctggttatgcatatttgcttctctaatataatacagagccttatttgcaactagaaaataaaatctatcaagttgactatccaattatacaaacagaaaaaatatagttttgatccaaatatcttctacaaagctactgcaataatgctcagaaacaaggctataaaaaggagataagaaagcttgccactgccttgtatggcttgcacaaggcttccctagacggcagtcacggcaccttactccatggagcactgcaagtgtgtgggataagtggttaaatgcctcatcaaat

SEQ ID NO: 13424 - DNA, 363 bp, Oryza sativa
  Clone ID: uC-osflcyp179e10a1
atataataataaaatataaatgaaaaaaaaaaaaaaaaaaaaaaaaaaaaaaaaaaaaaaaaaaaaaaagaaaaaaaaaaaaaaaaaaagcatataaaattgtctaaaaaaaaacaaaaacaaaaaagcaacaagaaaaggaaggggaccaaaaaaaacatccaattatacaaacagaaaaaagataggttggagccaaataacttctacaaaggtactgcaaaaatgctaagaaacaaggctataaaaaggagataagaaagcttgaaactgccttgaatgagttgcacaaggcttccctagacggcagtcacggaacccaactcgaaggagcactgaaagggggtgggataaaagaggtaa

SEQ ID NO: 13425 - DNA, 390 bp, Oryza sativa
  Clone ID: uC-osflcyp179e11a1
ctccaaaaggccggctcaatttatcagcgagaaaggtatctccctcgtagtatttgtaatgcattgaaacaaatcaaaacaaacccccagcgatctgtacatcatttctccaaattattgcaaagtttttatcacaagttccttcatcagtttatctgttacataaacctagtttccaacttttgatcagcagtttacggcaacaagcttcaaaactcagaggcccaaaacatggagacatgggaaaagcaggggtgataatgctcgtcaaatctggagcttgctggcgaggtcccaggagtgcattgcaaggctaccgaacgccatgatgttggccagagacgacaggccatggatcatcccgaacttcttgttcatggccgccagcgt

SEQ ID NO: 13426 - DNA, 401 bp, Oryza sativa
  Clone ID: uC-osflcyp179e12a1
tttgttttgacagcaaatagtgtggtaactttgaaactccacagtacaatacggcgttctagaggtccagacaaagagcatcaaagcaagaatgaagagaaagacaattggaatcacataaaaagatggcccaaagcacactaatttttattacaaccgccacgacagtcttgatcgtactgactctaaggcgcaaaatacaaatcggcattaatcttttgcggatatcccgctctctaaaggcttcttattcctcagcaaatcccagttcagagagcttgaggtgggcctcggcgtaatccgcaaagaaggcgtcctcatccgcagcatatttctccaccagtggacggaaggctgggtcagccatgagggctttgtcacttggcagctgaagaaggcct

SEQ ID NO: 13427 - DNA, 443 bp, Oryza sativa
  unsure (1)..(443): unsure at all n locations
  Clone ID: uC-osflcyp179f02a1
cagcactaaatcaacattttatttcgtctctcagacagtaccatgctgatgatgcgcacgaccaacacacaacacatgcttacatattcacaaaatgtatgtaggtaatgcacttgaaggtttgagatgctacaaacaaatgaaatcatttagtccattgaagagtggcttgtcaacatacttacaccaaactgactggatacagctgaacaactagatcagttattctgggtttctaagcgaacttcttgtcgaggtgacggtctatgatttcagatacggtttctaagaagattacttcacttgaccctgggagaacatggccctcggcttcctggacgatgtcctcaatctcagagtctctattcacagtttccctgnacagtatacgcccgatgtcatacggtgtgaggcctcgtgctgcacctttctttaaaagcatg

SEQ ID NO: 13428 - DNA, 427 bp, Oryza sativa
  unsure (1)..(427): unsure at all n locations
  Clone ID: uC-osflcyp179f03a1
tttttgttgacgagagcggagcacactaagattcattcattcattcatttgatcaaagcaaacgagacgagctttcttcttgcgatcaaaaacacagatgggcaaccacacagttaacacaaactagatagttccacacaaaactaacgatgataacgatcggatgatgatgatggtagctcgattagatagatagataacttggccatgagggccccaccgctcagttcctccagttcccgtcggagttgccgccgccgcggctgccgtagccgccgccgtagccgncgtcaccacggccgccaccgtagccaccgccaccgccgtagccgccttcacggtgctggccgtagccaccgccgccgtcaccaccactgtagccgccgccaccgtagcctncgncttcgccgngctggccgtagccacc

SEQ ID NO: 13429 - DNA, 426 bp, Oryza sativa
  Clone ID: uC-osflcyp179f04a1
ttttggttttttttttttttttttttttttttttttttttttttttttttttttttttttttttttttttttttggggggaacgggaaaatctttttccacgcgaacaatgtatccacggggctttgcccatgtccccaggaaaaccccacaaaaagcctaaaattccggggcgtcatggaaccccgcgtaaggggggagggctagcctccattgatcccaccatttccccggggattaacccctcaaccgggcctccggggagcccgagtcccaggcccaagcccattcgtccacctttcctaccccccggttgttgggccccccaaccattttacgttccccggggcggggggccgggcttttacccctaccggggttgacccctggaacccccctgatgcttttgcggggggaacccccctcc

SEQ ID NO: 13430 - DNA, 396 bp, Oryza sativa
  Clone ID: uC-osflcyp179f05a1
agaaatgttagatggcaccggattattttttttcccctggggctcttacaaatggagagaatggaatgagttgcacgacatttattacataaataaccgttgatactcggtacgtgtccgatcgtctaccaatgtcggcgatgtagtagtagacctttattgatggttggtgtgtggctcatgatgcgattacctgcataacagccactttgaaggattcatccatcaacttaaacttgtcagctggggcggcatcgaggacagctttagctgctttcttgtaggcaagtgaagttgcagcaactttcttctcatctccttgggccatcccgagagcagttatggcgaagattctccgcttccacgtggcagcttcaacttcatccttttttgctg

SEQ ID NO: 13431 - DNA, 427 bp, Oryza sativa
  Clone ID: uC-osflcyp179f06a1
agagaataaacaatctcatcttttgcatttaaatcaacgaaaatgctttgatgcacctgtttgtgggcatacaacatctatctatacaatactcagcaacagcctatgtaacagacgtaagaataatatggtatggagatgtaataactcgaaaatgcctaaaaagaaaaaaaaatcatcgccctgtgtgtacaaaagtaacggaacttctgaagggtcagcaagtcagcagctgtacgacgcctcctgaacaaacttctccactgtacaacgatcaatcctggacctaacctcttgtgatgctgttcgcctaaacctgtgcatgcttatgtacggtcacttggtggactttgtgcgggctcagctctgcttcttcccgcctgccaagatgcgggagatctggaggcctcggctgaaggcctggttg

SEQ ID NO: 13432 - DNA, 364 bp, Oryza sativa
  Clone ID: uC-osflcyp179f07a1
ttggttttttttttttttttggtttttttttttttttttttttttttttttttttttttgtatttttttttgtgatttattaatgctaatcctgaggcagaatggaaacaacaaaaagcaaacaacaaagactatactatgagaacgaagaacgcaaaacaagaagggacacaaagggaggcagaaacgccaggaaaagggaacaggaaacctcgaaaagaaaaaggcatcccgcagccattgctggaccttggaacgtcaaaggggaaaaaggcgcctcctactgggaaaacgggcacggggatgggaaaccaccaaaagggggcgccaaggggaacccccaattacgggcaccgaaacaagg

SEQ ID NO: 13433 - DNA, 434 bp, Oryza sativa
  Clone ID: uC-osflcyp179f08a1
agtaataattaagctttgttacttccaatttaactcaaattgatcttttacaagtactttttttttcgccgggccttttacaacacgtacacaaatttgtcggtacgtcgtgtcatcctcctccagacgagtgagtgctagctcaggcttcttcttcacagagagtgacgcatttgcttcgcagtgatatgtacacaagaaggcgttcatgcagcttagcccacacgtgtcatttccaaatctttagcgagtccttccaggtcccttgcttcatgcactgggcgtatatcttgtcgagcctgatgattatctctgaaaatgttggccttgctataccctgagtatcccagcattcttcgatcagcgctttgaaatctggaggatatcccctgagcttgttcttcagcgatggacgcatcccatcatatcgaatt

SEQ ID NO: 13434 - DNA, 372 bp, Oryza sativa
  Clone ID: uC-osflcyp179f10a1
acaaaaaaagctttatacattatagactcgtatacaattaccctgccacggtaatttttgaacaagaaaacatagccgggtagaccctggctccctggatctaaatgctgccgtcaaaggattggccggttgaattgttgtccagggggaaaaaaacccacagatccgggccaagctgggtaaccgcaacggggactgggacctttttacggggactcgtccctggaggggggaatatcacacgattttttcccccgtaaagcagctaaatgcccctacatgtgggctaaggccaacaagctgatgggcacaaaatccaaaagtttagcaatctaacctaaggggccagaatctgaagattcacaaagcaac

SEQ ID NO: 13435 - DNA, 349 bp, Oryza sativa
  Clone ID: uC-osflcyp179f11a1
aaacacaacgacgggtcaaaccctttttttattcgccggggaaaaacctttcaaaaaaaaaaaagggggggagagaaaagacatgggggcccactaatcctagagggccttaaaaaaaaaaaaaagttggtggggggggggtagcaaaatcatcccccctccccctttttatagggggtttagatcctcgggaaaaaccaatttaccaacatacaaaaagggggccaccccgtgacaaagggtcataccctttatttattggaggccccacacccggaaaaaacttttgggtaattaaattcaactcgaaaatttttatgcaatattgtaagcgggtgggaaaagcctt

SEQ ID NO: 13436 - DNA, 432 bp, Oryza sativa
  Clone ID: uC-osflcyp179f12a1
ttggtttttttttttttttttttttttttttttttttttttttttttttttttttttttttttttttaggaaccaaggccaactttgctccgtgcttttgaaaaaacgggtgcaaccagtgctattgttaatgaaggggaattttttttttgtatcacaagaccattctgttgtagcaacaagagactcgctgatcattaatgaatgaacaactcccaacaccataattgtgacctaaaagaccaagtagcaacccgcggcaatgcttcttccagccgttcttgttttcccagttgaaagcctatgtgttgagaaccttggaatccttttcgcgcacctgccttcaggacaacaatgaataagcaaattaagctggaggatgcattacaacaaaggccatggagttaaacaggttatacaataaagcagtag

SEQ ID NO: 13437 - DNA, 418 bp, Oryza sativa
  Clone ID: uC-osflcyp179g02a1
ttttgtttttttttttttttttttttttttttttttttttttttttttttttttttttattgcagtttagtattggaccaatccggccttctgccctcaaacaaacaacagaaaggggaaagcaaacatggccaggggtacagacagcaacaaggagcaaaaaaggggggaagggcataacaagacacaactaaaaaaacaaaaaccacaaaaaacagcagaggtgaaagaaggcaccaagaatcccgaaggccgccggcccccgggaaccacgattgattaacctaacccttaaccccactcggccgtactggtacgcgatgccggggccccacgttgcaccccggggggggggggcaacaaacaacaaacatgagccgaacgcaaaacggccggagaacggacaatggagggcgga

SEQ ID NO: 13438 - DNA, 403 bp, Oryza sativa
  Clone ID: uC-osflcyp179g03a1
ttttgggttttttttttttttttgtttttttttttttttttttttttttttttttttttttttttttttttttgagaaagaaaaaatcatcgatggggccccgggcccagggaaacaaaatggcccagggggggaaaaaggataaacacaacttaggggcttttaaccagaacacaacacaaccctgacccgatgatttgacagacgggggggatagggttaaagaaggccaatggtggaccacaaaacacgcttaaagaccaccccggggggccaggacaaggggcaggggggacccctttgggatggtataggcgggaagggggggggcatcctcgagctggttgccgggaaaaaaaaaggccttttggtctggagggaagccccccttatccgggaactt

SEQ ID NO: 13439 - DNA, 368 bp, Oryza sativa
  Clone ID: uC-osflcyp179g04a1
ttttgtttttaaagatccacaacatctcaaatatctttaactcatactcatgtttaatatgtccctaacaaaaggaacacactaaacactttcatccaagcacatgatatctcaacatagggagttctaagttctaagttttagttaggatcatacaacttataacttaaatacacatggccgattggctgaatagatagggtcgcggaagcatcttctacccaaaagaactttcatgccaccgacttggattgacccttataagaaccatcctggaagaaagaaacttccccaaccaaatcatccttcacaagagtgaactcacctgcaaccaaattttggtctttcactccttggttaaatacaaa

SEQ ID NO: 13440 - DNA, 423 bp, Oryza sativa
  Clone ID: uC-osflcyp179g06a1
aataccatccattttttttattgtcgacgaatttatcagatatgctctagatacatatcttgtgtgtatatagccggagctttgttttcacatatcctcacccaacgataattgtagtactcttacaataaaaccggtcggagagggagggaagagattattacatatgtgttaagagcagaggccattgagatggtacataaccaaattgtaaaataaaaatatatagcatattatatattgatatatcatcaacatagcccaaaacaaagctgcatactattattataggcagcaatccaccagcgcgatgcttgatcttagcttagttgccaccagactcctcgcaacctgggggcttgtaggcgatgaagctaatcaactgcacctgcctgacgttgtcgaagccgatgatacggacaa

SEQ ID NO: 13441 - DNA, 131 bp, Oryza sativa
  Clone ID: uC-osflcyp179g07a1
tgtgttttttaaaaattggggggcaaacctcaaccctattgtgttttccatgtggtttaagcaaactactcacaaatcccggagaacacaagggcaagataattacggaggggggtaacaaacagcatgga

SEQ ID NO: 13442 - DNA, 453 bp, Oryza sativa
  Clone ID: uC-osflcyp179g08a1
aaacaaatgagcagtgatatctctgaactttcgcttacacatagatagcaagcagtctagtagtggaccaatccggccttctgcacgcatacagtcactcacacgctactacgctatctttacatggagaacatatacatatattgcgacatagaagtgcatatgacatataattagtgtgcacatgtgtgcatgctgctgctgcatgcagcgctagattattcgttcgcagcaggtagcgaagttgtgtgatcagttttgtcaggcgtggtccggctcaccaggaagagcagcgagaacatcaggaggagcagcgaatacatggcggtctatgtcgtcaggtggactagcgaacacttggtccggataatggtctacgtcatcatgggggctagagaacacgtagccgtggtcccgatcatggtctacgtcatcagggggactagagagcac

SEQ ID NO: 13443 - DNA, 448 bp, Oryza sativa
  Clone ID: uC-osflcyp179g09a1
tttgtttttaggccacacaaagctcaatttcaatccgtaaatgcaaacagtcaaacactgagctgactagcatcagactaccaacaatagcttcctcgatcgggttcattcctatacgccatgacacgccacaatctatatatcgtgtacgtaccatgaacaatttcatacagattacagaccacacgaatagtttgcaggcgatgccatcactcggcggcggcggcgtggagggtgttcccgacgtcgatgacgaagcgatacctgacatccgccttggcgaggcgctccatggccgtgttcacgtcgtcggcgccgatcaccttgatgtccgccgtcacgccgtgcttcgccgccagctcgatcatctcctgcgtgtccgccatgccgccgatgttgctccctgccagagtcctgttcccgtggacgagagagaagggagggacct

SEQ ID NO: 13444 - DNA, 424 bp, Oryza sativa
  Clone ID: uC-osflcyp179g10a1
ttgttttttttgattaacgggggcaaacgaggatccattaattcttctcaaagaacaggggcatgtctccttgtttcaccattacataagcttacgcaatagcagataacaaaatctgctccgtctctaggtaaaatatttaaacagaacaccctaataagaacttattacaaggaaaggaccgcgcatggacataaaaggcaacggcaggaatggtaagaataacaatgctgagcagtcaggaaacaaaacaccataatgggactgagcaaaggcctgcgaaggggagctatgaggcagaaggcttctccgacttgaggggcttcaccacctgccaggtgaagtcggggccgcccctgccgaagtgaccgctagccgtcgactagagggacagtgcggcgccctctcacatgagggcaagggt

SEQ ID NO: 13445 - DNA, 426 bp, Oryza sativa
  Clone ID: uC-osflcyp179g11a1
attccatgtaaacagaccacatgcatataatacagaccattcaaaagattggtaatagtaaaaatacaagttcgtgaatggcgataatacttaaagctacctccaaatagcgtgtagcattgcgtagcaaaccaagcatataacttaggacaaacattcagttgcagcttcacatcatcgctgcttatcataactgcaataacagcgcagatggagcataaactaagtatatttcgtagttctagcttatatataatatcagaatcaccaactgtgaaccatccacaggatggtcgggggactactgatcagaatctactcctttgaggtgtggatggcagacacggtggagaccatagaatccacgccacatttgttgcggacgttggagcccctgcagatcttgtagtacccatgctctcccca

SEQ ID NO: 13446 - DNA, 435 bp, Oryza sativa
  Clone ID: uC-osflcyp179g12a1
ttggtttttttaagaaagcaggcgtatttcacattgtaagaagaaagatatgatcttccaaagaagcagaagaacatacaagaggatgagctcctactatacttacaaggaggcaatagatgatcagagacgtttttcgttattccttaggaaaagtaaaaaaaaatgaaaaaaaaagttttgacttgaaagggctcaatgctaattgagctcattcccaggccaaatacttgtctaatctctatagagtagtataggtttacaagagtagtcatcaccagaaaataacttttggtgggaaactctcttgtactaaaagttactaaccattttgcgttcacactgcacgctatgcaagccattcaatccgaccatctctgctccatggttaccccgggaagctcttccggccgccgttgcggcgccgccttcttg

SEQ ID NO: 13447 - DNA, 365 bp, Oryza sativa
  Clone ID: uC-osflcyp179h02a1
ttttggttaaaaaggaagcgggtcttcagatgcgttaacgtttactgaatttcatcgcaacagataaaaggaagcaacaatcttttgcaagttcatgatgttcttagccaaaattctacgacatcataaaagacagttgtgtctggaggattgtgtcccgtcgatccaatactaaaaaaacatgccttgcattagcgcaactgattactgatggcgttcatgacgatccaaatcagtccacaagggtgcccaagatgtcatgctctctgaagagaaggtactctttttcagcagcaagcttgacttcgagtccaccatattcaggcaggagaacagtgtctccttccttgagagcaacagggatc

SEQ ID NO: 13448 - DNA, 476 bp, Oryza sativa
  Clone ID: uC-osflcyp179h03a1
ggccgcccttttttttttttgttttttttgttttttttgttttttttttttttttttttttttttttttttttttttttttttttttttttttttttttttttttttttttttttttttttttttttttttttaaaaaaaaaggggggttttttttttttaaaaaaaatgggggggggccctttttttttttaaaacccccctccaaatggttttttttttggggggggaaatgtttccaattttttcccccccccggggattgggggggaaccccatttttttttttcgggggggccccccgttttttcccccccccccatgggaaaaaaggggcctttttcttggttgggggggggccccttaaggggggggtttttttttgggaacttccaatctggggggctttttgaaacccaagcttccctttttttttggtttgggccccccaaaaaatcccgcctttttgggcccccc

SEQ ID NO: 13449 - DNA, 427 bp, Oryza sativa
  Clone ID: uC-osflcyp179h04a1
gcacccgcaagcatacatcttatatataataagtgtacaacattctttcttgggtgaatgcttatatcaaaagaaaattttccaagtacacatacaatgatacaaaacgacagctttgtttgccatgtttatggtgaagacatccataaaagaaaaaaaaacatgaaatctagctactccttgtcatggtaaggagaacacatcgtaaagtaactcaaatcgacatcgccgtagctggcctcttcaaagaaggttattcgtttaatttgcggcccatctcaacatactccttagccaaggtcggacctgatcagaggtcaactttcttcgcaagctttgtatagatgatgcgattatcccttgcagaattgctctcaacaagggcgatttgaaccaaatccttcacatccctgttagataagaactc

SEQ ID NO: 13450 - DNA, 432 bp, Oryza sativa
  Clone ID: uC-osflcyp179h05a1
ttttggtttttttttttgatggaaaggagagatatacataggggtatacatgatccaagcttgttaattaggtacaggagatacaaaaaaaaatccaagcttgtgacatgagttgattaaataaattttacaatgatacaagagatatcggctgggaacaaaacgcagaaaagaaatgaagattctggggacctatactgatgacaaacttgcagtaaaacatgggtaaaatcaataacatggttgtcagcagctttcctcgcttgcgcgagatggaaccatgaagctctcgggagcccatccagcgagtgaatgttcgtctgagttgcctctgtaaacgccccctgggaggcttggactccaggaaatgaatcatttcttccagcaaccagaggtgtgaaaatcagatgagtgtcaactcatattcaccag

SEQ ID NO: 13451 - DNA, 360 bp, Oryza sativa
  Clone ID: uC-osflcyp179h06a1
ttttgttttttttttttttttgggtttttttttttttttttttttttttttttttttttttttttttttttaaaaaaaaatgggccatcaagggcctttagggggaaaaaaaaaccgaacaaaagggttaaggccgggttaaagggaaaaaccccggccccgggggccgcccccggaaggccggccccggcccccggggggccccccctttccccttggggggccccttgaagagccccgcggaatcccgggaaaaagggggtccccgggggaaaggcgtaatccgcggacactttcccccaaaaggcaaacccggggcctaaaaagtaaaccccggggggcccaaggggggggctaccc

SEQ ID NO: 13452 - DNA, 415 bp, Oryza sativa
  Clone ID: uC-osflcyp179h07a1
ttggtttcgatgaatatatagatatatatatatggtaaatggacacttaatcccatcatgctatagcacttcaaccaaacaagaaaccggaggcaaactgcagtgcaatttagtttgcttatcacttccacttgcgcccaaacttcttgtgcttgccgtacttgccatgcttgaactttcctttcttgaatttgccaccatggtggccgaacatcccgtggccgccaccgccgccgggtcgtaccatgtgagctcccaccgcagcagccgccaccgcggcgcctccggcgagcagcgctccatagccagatgcgcctgcaccatgcccacctccttgcatgggtggaccatggccatgacctgggtaaccagctggcgggtagcctggttgttgtggatatcctgatggtggata

SEQ ID NO: 13453 - DNA, 417 bp, Oryza sativa
  Clone ID: uC-osflcyp179h08a1
tttgtttttttttttttttgtggtttttttttttttttttttttttttttttttttttttttttttttttttttttttttttttttttttttttttaccccccccccctaaaatttttgaaaaatggcgaaaaaaaaaggggaactttttttccacgggttaggtgggtttccccagggggggaaaacaggggtttttttggggggaaactgggaaacccccctttggggggaaaaaaaatgcttttgggggtgaaaaaggggaagggaaaggggggccatttttaaaacgctttttttttaaaaattttgggggggaccccttgacccaagggggcaacttttggggggttttttttcccccgcatttggaacccaaaaagtttttcccaaagggaaaagttttcgcccccccccc

SEQ ID NO: 13454 - DNA, 349 bp, Oryza sativa
  Clone ID: uC-osflcyp179h10a1
ttggttttttttttttttttttttttttttttttttttttttttttttttttttttttttttttttttttattcagaaaaaacaataaatattaaaaaaaaaaataaacacaaaaaaaaaaaaaaaaaaaaaaaaaaaaaaacaaaggcttagaaaaaaaagaaaaacgggcaagaggggtttatccaaagcgactggctcaacaaaaccacagaggaccaagatccaaaggacccaaagtaatcacactcaaagaagtaggacccgcaaaaactcgcaaccggaatgagaacactgattaatcaatgtccgcacttggagctggctacccggcttcaaatgagcccgg

SEQ ID NO: 13455 - DNA, 276 bp, Oryza sativa
  Clone ID: uC-osflcyp179h11a1
tgagtttttttatgtattgggggcttaacctgttccattttttttttttaaagtaatgtatcatttttccttctttcaccattacataagctgaagcattaacagataacaaaccctcctactcctatagggaaaagattcaaacacaatacccttataaggacgtattattaggaaagtatctgcgccgggcccccaaggggggaccccgggtggcaccgtttaagagaggacacttgctgagcatgcgaggaatcaaaacgaccatatatggga

SEQ ID NO: 13456 - DNA, 424 bp, Oryza sativa
  Clone ID: uC-osflcyp179h12a1
tgggtttttttttaaccgggcataggaggtttcatttcttcttctcaaagtagtggagcatctttccttctttcaccattacataagcttaagcaataacagataacaaatcctcctcctcctctaggtaaaatattcaaacacaatacccttataagtacttattattaggaaagtagcgtgcatgggcataaatggcagcggggggcaggttaagaatcacaatgctgagcagcgaggaaacaaaacaccataatgggacagagcaaaagcctccgaaagggagcttttaggcagaaggcttctcccacttgaggggcttcaccacctcccaggtgaagtctgggtcgtcccttccgaagtgaccgtaagccgccgtcttgaggtagcgtccgttgccgactttcttgaggtcaaggttgat

SEQ ID NO: 13457 - DNA, 556 bp, Oryza sativa
  unsure (1)..(556): unsure at all n locations
  Clone ID: uC-osflcyp122b02b1
gcctttttggccttgttgaacccactataaacactaaagaggcaatggatgctatcagtagcatgtttttggagccattggaaccagaaactaagctcaagaggcgctcaaatcgtgataaaccaagttttaatcaggaagcaagtgcatttgagatctttgtcgatgaagatgaacctaacaagagtggacccagcaaactccaggacaaaaacatgaagcaggataatccaaagttaagtcagcaggcaagcgcatttgagatctttgtagatgaagatgatccttactgcaacaaccaaaatatggtgcagcataggcactttaataaggagaacacacaggtaaatcagaatgcaagtggatttgaaatctttgttgatgaaaatgaggctcatggcaatggtcgtaatgccatgagccataagagtagtggatgtcctccaaagccatcgcgtgattcaaagcagcaagccaattttgacttccagaaaccattcgtgggagggttngcaatactgcctgatgatgaagataacagctngagaaaatgata

SEQ ID NO: 13458 - DNA, 367 bp, Oryza sativa
  Clone ID: uC-osflcyp122c06b1
cctttattgcggattcagggacttcattgctcggggggcgcatcaactattgttggtgagattaatcacgcaattggagctgagggaattgttagtatggaatgcaaacaagttgtgcgggactacggggacatgatcctcgagatgctcatagcacaggcaagccccatgaaactgtgctctcagattggtctctgtgcatttgatggtactcgttctgtcagaaacaatatagagtctgttgttgataaagaaaaggtgggctcagatctttcctgcactgcttgcgagatggctgttgtctggatacagaatcagctccgacataaccaaacaagggagctcattttgcaatatgctgaccagc

SEQ ID NO: 13459 - DNA, 473 bp, Oryza sativa
  Clone ID: uC-osflcyp122d02b1
ccttggtttggaaaaagggctccccgctggcgcgggcgcagccgaagtccgggctcttcgtgggcatcaacaagggccacgtcggcaccaagcgcgagctgccgactcgcccgtccgaccgcaaggggaaatccaccaagagggtgacctttgtcaggaacttgatcagggaggttgctggatttgctccctatgagaagcgtatcactgagcttctcaaagttggcaaggacaagcgtgcactgaaggtggcaaagagaaagcttggcacccacaagagggccaagaagaagagagaggagatggctggtgtcctcaggaagatgaggtctggtggcggtcacgctcacaccgagaagaagaaatagagtatcttcaagttcatgaagtccatggcaatattgtcttggtgagtgtactcttggagaaccctactactagaattgcactctattatccagctaaacattcat

SEQ ID NO: 13460 - DNA, 507 bp, Oryza sativa
  unsure (1)..(507): unsure at all n locations
  Clone ID: uC-osflcyp122f04b1
cacaagaatgtatattagactttctcctgagaaattttaccttcagaacaattgatgataaccttcaaaggcaccgattcacacctatttggcacgctatattaaacacagatcctagttgtggcatggcaggccagtcctatttgtggtcaacacggatcctcggccgaatttgtgtgacagcaatcaagtcaatcccaccgcaaccacattacattttcttcggagctaaagttcctatgcaatcaatttatgtttggagctaaagttcctaacaatcatatttacccttttgagagggttcctaagcaattactaaatcttcacaagtcacaacatgtgttgtgaagactgaagacatacattcctgcgttggaagtcacaacatgtgtgtagcagcctagcaggagaacaggtgatcagatgccaatgcatttaaccagatgctgtttactgcagccgccagccaaacataatgctcagcanaggcaaccaactatccctctt

SEQ ID NO: 13461 - DNA, 536 bp, Oryza sativa
  unsure (1)..(536): unsure at all n locations
  Clone ID: uC-osflcyp122f12b1
tagtagaagctcaacccaatcccctcctctcccggaattccgccgccgccccctgctcggatcctcccccacccccgccgccggcgagaagggcccgtaggcgcggcctcgtctccttgctgatcccgactccgcgcgcacggccggtgactcgactgcctcgtctcggttcgaatcgagctgggagatattgaggagcacttggactgaagaactcaattttggagcacttggattagcattggccaccctgctggactcactgactgttaaaacggctctggtttaaggagttgtttctcttgtggtcattctttggattatgggagctctttgttcatgtttgcaagctgattattccgaccaccatgggcatcatgcttcaccggcattagggggatgcatgtgcctcagatgttctactcagcagctgatcaatgcgtacactgttntattccgagctgggacagtgcacgcagnttctcagtctatagaggccactcctgttgattcatctgaaagtcatttgacacata

SEQ ID NO: 13462 - DNA, 522 bp, Oryza sativa
  Clone ID: uC-osflcyp122g08b1
tttttatcccctcgaaccaaagaattcgaagcgcgcaggcgggcacacgccccaaatgcgccggcggacgacgcgcgccgccgcagaagcagcacggcgccgatgagtcgcgcccctccggacgccgccggcgacctcttcgccgccaacctcaagggctccctcctcgccgtcgcctcctccgcgttcatcggggtcagcttcattgtcaagaagaaggggctccgccgcgccggcgccgccggcccccgcgcaggtgttggaggctatggatacctcttggagcctctctggtgggttggaatgattacaatgctcattggtgagattgcaaatttcgtggcttacatgttcgcaccggctgttctggttactcccctcggcgctctcagcataattgttagtgctgttctagcccatttcatcctgaatgagaagctgcaacggatgggagtgctgggctgcgtgctctgtatagtcggatcaacagtgatcatccttcatgctcctgaagaggagaca

SEQ ID NO: 13463 - DNA, 190 bp, Oryza sativa
  Clone ID: uC-osflcyp122h12b1
tcataatcaccactctcactccgcctcttaccagcgggtttttaaacatctgcgggttcttaaataaactgcaccttcattatcacacactttaacaccaacccttttcctcttttacctttcactgactctttaccaactcattcctctctttatctctcttttgcctgactctctccatcttttttct

SEQ ID NO: 13464 - DNA, 340 bp, Oryza sativa
  Clone ID: uC-osflcyp123a08b1
ttcatctgcaggaaggcgagaggaggaatcggggggagtttttcggattcgagggggggacaagccagcgtggtgcacctagaacggcgcggctagcggcggggaggagagattggatcgacgccgggtagttaggaagggagcttggagagatggcggcttccgcgaggcccgtctgcgtcagccgggagagggcgacgagcttcaccatggcgtgcaggctgctcagccgctacgtccgccagaacggcgccgtcgccgtcgagctcggcctcggcatcagaggtgaaggtgaggctcccagggccgcgcccgcgactatgagcttgctgcccgggga

SEQ ID NO: 13465 - DNA, 390 bp, Oryza sativa
  unsure (1)..(390): unsure at all n locations
  Clone ID: uC-osflcyp123b04b1
attttcgtttctcgtaagattaangggggaggaatgggggggcagatgccaccatgggggtgagtagaaataaaatccacgcattttatatatttaatttaacccccaattttaacttagcagcacactagctagctagctgctaagttaactatttgatcagggtacagttgctggcctgacaggtaattaatctcttgctggttgattagttgctatcagctacacgctctcgctagctgccactgtactaatacatactcccatctattcgcctgagaaaatatcgaaaagtagcagcaaagaggagcaggcaagatggtgatgaaccctgacgccgtccgcaatgtcgttggaatcatcggtaacttgatatcggtcggggtggtc

SEQ ID NO: 13466 - DNA, 550 bp, Oryza sativa
  Clone ID: uC-osflcyp123c08b1
tctcgagcggtgcagtgcaggcgaaaccctagtggaagcccgtggcgagccaccgccacctccagatccgaccacaccgcgccgccgcagcgatggtgtacttcgattcgtgggacgagttcgtcagcaagtccgtcgagctcttccgcaaccaccccgacaccacccgctacgttgtcaagtaccggcactgcgaagggaagctcgtgctcaaggtcaccgacaaccacgagtgcttgaagtttaagacagatcaagctcaggatgcaaagaagatggaaaaactgaacaccattttttttactctcatgacccatggacctgatgctgatataagtgatgtttcggggaaggaacaggcagaacaacagcaatcaaagaaaggccggggcaggaggcagtagtgtattgggtctgtcttgattttgttcaaagtaaatcataactgaagtggtggatggacattttggctctttgattgctctcgtaatgttctgacagagatgtgagatattttgggattaattctcttgaaaagactgaatacctt

SEQ ID NO: 13467 - DNA, 555 bp, Oryza sativa
  Clone ID: uC-osflcyp123f04b1
gcgtccgctcttttttaatctcgctctcaagtcgcagcagcactcagcatcgtggcggtcggtgcccggggcaacggctactaggcggtgcgccgtcagcgcggtcgcatcggctccaagcagatactcaaatatttcctgttaattagagtattttttccctttctttggtgtataagaaataatttttttttgttttgttttcttctttattttttccatttgtcttatggacatgttagtttctttttatttattttttttctatctatatttattttattcttacttctttttatttttattattttattattatttatttttttattttttatttttattatccatttttttttttatatttttttttatatttattattttatttttttttttttttttttttttttttttatttttatttttttttttttttttgtattttttatttattattattattattttattattttattcataatatatttttttttttttattattttttttattatatattattaattatattttttttattattttttt

SEQ ID NO: 13468 - DNA, 191 bp, Oryza sativa
  unsure (1)..(191): unsure at all n locations
  Clone ID: uC-osflcyp123g08b1
tcctcataaacccctcctcttcgagaaaatgggtttttgttcatccacgacgcgaattcccaagcaacccccccacacccagctgagtagctgacgcagcaccagcagtcgcggggaaagggacacgtctngccgtcccagctttccgacttcctcccatcccgccgtcgtggacgcgttcaagccacagt

SEQ ID NO: 13469 - DNA, 145 bp, Oryza sativa
  Clone ID: uC-osflcyp123h04b1
cactctatacactcagaccacgcacgcgttctagccgggtgttcttaataaccctactgggggctcttcaaaacccaccacccaaagatctcgccctactctcgtaaatctcccactcttctggccctacggggattagagcgcg

SEQ ID NO: 13470 - DNA, 410 bp, Oryza sativa
  Clone ID: uC-osflcyp124a08b1
ttgatcttgagggtgaggcagcggaaaacactgagggacaagattcacaatgcaggagggtcacttccattctcagaacgctcacacaatgcagttaaaccgcttgctaagcatgttcctagagctttaaatgatcatgaagagaagttctcttgtatattttatggaaatgactcgttttatgttttgttcaggctacaccagatcctatatgaaagaatactgtcagctaagactaactcctcctcagctgaaaagaaatggaaagcttctaaggataccaacttgccagaccaatattcaaaggttatgagtgcactggataacttgcttgatgggtcttctgacaacaccaaatttgaagatgactgccgttcaatcatcgggactcagtcctattgtccttttac

SEQ ID NO: 13471 - DNA, 374 bp, Oryza sativa
  Clone ID: uC-osflcyp124d12b1
tctattccctaaataaagaggatgtgtggtgtagtatttaatttaataagaggtggactacacacaaacattcgatctcctatagtctgttcctactactcttacttatcacactgcccgatccaactaagaagctccaagtcaattctgatgacatcactaatcatttagttgatcccccgaaggtagaggagaatattggtggtgtttcccatagcctgtccactgactctatggtttttcatatggaggctgattcaatctccaggaaaaccctcaagaacctcaacgaaaaattttagttccaggcttatgtgttcagactcattgacatcatcattaacttactttacagtaacaaggacattttcctt

SEQ ID NO: 13472 - DNA, 493 bp, Oryza sativa
  Clone ID: uC-osflcyp124e08b1
gctttgaaggagagagcttggtgagctgcagagatggccccctccgtgatggcgtcgtcggccaccaccgtcgctcccttccaggggctcaagtccaccgccggcatgcccgtcgcccgccgctccggcaactccagcttcggcaacgtcagcaatggcggcaggatcaggtgcatgcaggtgtggccgattgagggcatcaagaagttcgagaccctctcctacctgccaccgctcaccgtggaggacctcctgaagcagatcgagtacctgctccgttccaagtgggtgccctgcctcgagttcagcaaggtcggattcgtctaccgtgagaaccacagatcccccggatactacgatggcaggtactggaccatgtggaagctgcccatgttcgggtgcactgacgccacccaggtgctcaaggagctcgaggaggccaagatggcgtaccctgatgcattcgtccgtatcatcggcttcgacaacgtca

SEQ ID NO: 13473 - DNA, 488 bp, Oryza sativa
  unsure (1)..(488): unsure at all n locations
  Clone ID: uC-osflcyp125e10b1
gcagggagcaattacaaagaggatgacagctattgaggaaatggctggtatggatgttctttgcagtgacaaaacaggaacactaaccttgaacaagttgactgtggataagagtcttattgaggttttccaaagaggtgttgaccaggatactgtcatactaatggctgccagagcttcacgtaccgaaaatcaggatgccatagatgccacaatagttggtatgcttgctgatccaaaagaggctcgtgctggtattcaagaggttcattttctgccattcaatccaactgacaaaaggactgctttaacctacattgatgngtgaggggaaaantgcaccgtgtaagcaagggagcaccagaacnagatccttaatcttgcacacaacaaaactgagattgaaagaagagtcagagctgtaattgacaaatttgttgagcgtggcttgcgatccttggtgtggcatacagcaagtgccgatggta

SEQ ID NO: 13474 - DNA, 534 bp, Oryza sativa
  Clone ID: uC-osflcyp126c02b1
cgaggtctcccctctcctctctcgcctcgcgttcacgcatcccccccttctccttctgccccccccctccccagccgcgaaatcccctactaaaccctaggattttctcccctcccaatgctggagacggagccgtagcaaggtttcttacctctggaatttgggggattctcaacgcccaagctagattacataacatgaatgcaggattcagcccacagatcttggcgcagaagcttttgaagctcaataattcacgacaaagtatagagactttgtcacattggtgtgtctttcattatcgacactgccgacaagttgttgaaacatgggaatctgattttcactcagctcctcgtgagaggagggtatctttgctgtaccttgcaaatgatatcgttcagaacagcaaaaaggactctggtagatatgtaaatgagttctggagggtcatccctgctgccttaacgatgtgtttgcaatgtgatgattttggagggatgtcgtacagagactggttgcatatgggaagac

SEQ ID NO: 13475 - DNA, 411 bp, Oryza sativa
  Clone ID: uC-osflcyp127a09a1
aaagccccttgggggggctaaattcggggggccaaccgcaaaaaaaggaacggggccccccaaaaggtccaccaggaaggaaaacaaacccttaaaaaaaaaaaggaaatgggcaaaaagggaaagaaaacaagggggccaaaggagccaaaaagggggaaaaaaaaaaaacaccccctggggaaacaaggggggccaaaaaaaaggatccccccttatgggggaaccccctaaggatgggccgaaaaaacccctggacattttatttaaaaaccaaaacccaaaacaggggggaaaaaaaccaaaaacggaaacccccaaaaaaaggtgggaatcccccccctagaagggggggggccaaaaaccacacccctgggtgggtggaaacaaataaccaacccggatattaac

SEQ ID NO: 13476 - DNA, 438 bp, Oryza sativa
  Clone ID: uC-osflcyp127b05a1
gaagactggtgaatctggaataatatgcctcaaatcatataagataataacatggaagacaacctctcccactaggcaaatgtgcaaagctagcatgttattatcccttcgcaagttccatgccaacaagagtaaattttctcagccattcgaaggtattgagctaagtactagcacattagctttactaataaccacccctcagagcaaggacaagatggaggacagagccaccttcgatgttatagtccttcgcagtcttgtcgtcggcaagctgcttaccagcatagataagcctttgctgcacgggaggaatgccttctttctcctcaacacgctccttgatcctatcgatcgtgtcggtgggctcaatgtcaatttcaatctcttttccagtgagggtcttaaccttgatcatagtgccacccctgagcctga

SEQ ID NO: 13477 - DNA, 378 bp, Oryza sativa
  Clone ID: uC-osflcyp127c01a1
caaaaaggccccacttgtatcacttatgggggtaagccataaaccagcccggtttgaccagacaattaaagggtggctataaagaaaggtaaaaaccataagggttaacaaaacacactagcaattaagttttactcccattggaaaaaaacataataacttttagagaaggattacataacattcatccttccaaatagaggggggctaaaaaaacaccaatcttaaaggtaaaccctactggatagggggaaaaaaccatggaagttccacatgaggcaaagatcatttaaccttcatccgtttggggctttcctaaccctaatttccttccaccattgcctgcatgcctttggagagctccaagtttgcagggaa

SEQ ID NO: 13478 - DNA, 385 bp, Oryza sativa
  Clone ID: uC-osflcyp127c09a1
agggaaatagaaactttattaaataggagagggggtgacaactagcaaaaaaaatgggaaactccaagctagttagttccaacagcagctgggtggaattcaatctcccccagggggacctttagggttatgggggggggtggctcctggcgcccgggagtaattcacccccacaagggggggcgccgccaccatgccctggagggacatttctttccctgggggacctttaggggtatgggggggattggctcctggggctggggagaaattcacccccacgtccggcggcgttggcaccatgcccgggaaggacaattctttccctgggggacttttagggataaggggggggatgggtcccggggccgggtagaaattcacc

SEQ ID NO: 13479 - DNA, 453 bp, Oryza sativa
  Clone ID: uC-osflcyp127d05a1
agaaacctcatgaaaggggaggcagttatcatagaatcatacacactaacccataacttaatcactactgaacaccgagagtatccaactctctcatagaggttcacatcacactacgaccacagcagttagcctgcctgcctgctaaatacaatagctacttaccatgtcgggtacaacacaatgactgaaactaatacaacaaccggcctgcacgccgggtctgctgctgcacggcagcaggttgcgggtgaagcggttctccgcctcttcaccaattcctaacgattctaaaacatgtcaaccgggagcctcccgtggtcattctcggctcctcttgctgctgcagccagggcacttgtactgcttgatgtactctgccttcgcaggggtgatccgaacgcacttgccatggaaccacttctcgcagacgtcgcagcagatccagaacta

SEQ ID NO: 13480 - DNA, 333 bp, Oryza sativa
  Clone ID: uC-osflcyp127e01a1
gtgagttcttaaaataaaacacaaattaaatctctaaaacccaagcgccaaggacaacaccaaaagacacggaaaaaaaaaaattctgaaaaccaagtaccttcaaaacgagcacctgaactgcttactaccaagggaatggaggaaagcatcttccatcaaaaaccatcaactactacatgatcaactcaactcttcataggcagcaaaaagggaatgccaaggcgctaatacttgggaagctcatacccatcgttcttggtcttggcctcaagaaacgaggcactcgccttgtccaaaaaccaaaccaacttaccgtccgttggctgaacc

SEQ ID NO: 13481 - DNA, 380 bp, Oryza sativa
  Clone ID: uC-osflcyp127e09a1
ggggcaaggggccgcaggcatacaacaaagggcccacaaactatttagagatggtgatttacatatgaagggcgatagatacggtcaaagttccctgaaaacaaaaacggaactcctttggacacaacttaaaagaggagaccccaactcaaaatggaacataaatgaaaacccccgaaaagggtccaaaaaaaaatgcagggaaagacttcctttccacaccaccactaaaaactcatggaaaagggctccttgctctcctgtctttttctctctcccctcaaaacaattactggaaactgctatacaacatggggttaatacatttttaaaaagggaccaaaatctggaagctttcgctgggcctttcaccttttttg

SEQ ID NO: 13482 - DNA, 375 bp, Oryza sativa
  Clone ID: uC-osflcyp127f05a1
attaagagctgcaagaatttttttcagtgggcatgcgaggtcagaacaggcaatatgaaccataaatccaataattggaaacgaaccactctctataccttgcggtcgagctgctccaataactcccatacaacaaatttaccatatcaggagggatgaaccatgtacacaaatatcgcccttaaaaaaggaaccactgctaacacgtgacaggctcacatttcacagatcaccgacaccaagccttgggcatgggcgaactaccagcatgggtactaaatggtaaggaccatgtccaaacggctctgttggatggaaaaaccacgcacttcgaaccttagctggggaaacccacccgactaaataaggtccaat

SEQ ID NO: 13483 - DNA, 418 bp, Oryza sativa
  Clone ID: uC-osflcyp127g01a1
aactcagtgtaaagtttgcattactaaaactgtactctgatcagaatgtacaacatgatttacctgttttctatacagaaagtttgacctaggattacaacaaaaatatgtatgctttactctcagcaacggaaaatgtattttctgtctaccgtgacctccccgccttaccaacaatgaataaaaagaatttccaccttgatggttgtgaaaaagcacatgttaccagagaaaatggagctggaaaaaaatatgaagaattaacaactgggcatgtatttgctaaattttaactgggctcatcggtgccttttggtttgcctggtaacatatctccaaaaccacccagcattatacgaccaaaccttgtgattctttgctgagtttgtggggtaggctgagagggggtcgtggcaac

SEQ ID NO: 13484 - DNA, 321 bp, Oryza sativa
  Clone ID: uC-osflcyp127g09a1
gatacaaattcatctgcaaaagcagctgaagatttatatcctgatatgcgtttgtgcaatctgatgcacacaagtgcacagggatgatctatagaatctcctggaagcaaagaaactatttacatatgtaatcaagccggactattttctgggcggttactaagattctccactaggccttgctagatggtacgcaaaaattgatccacgagaaaggaaggccaatcatggattactcaagagaaaggcctctgatgttgcgctgctgaactgcaattacggtggctaatcgcgacggcagaggaagccagctaattggtg

SEQ ID NO: 13485 - DNA, 470 bp, Oryza sativa
  Clone ID: uC-osflcyp127h05a1
aaacaagttaataattggggggtatatttaaaatcggaggagcggagtagtacacacacacgggtaattagatccaatcgccaccacgcgaaatcaatcgtccaccagctagctcatcgtcgtcgtcgatgatcaatactcaaatacacatgtttaattgcgacgcgcgcgtgccgtccgtaagccggggcaccggttgatcctgctgcagccgcgagtgtacgggttggcctcctgcattttcgagacccccaggagatcgacggcgttgatggcggaattgacgaccttgccgacggggggggcgatggagggggagaccacggcgggcagcttctcgggccgcgcggcgtgggccgtggaaaccaggatcaggcccacgagcaccacggacaccagggccacccttatgctcgccgccttccccatgcgcgaacgccctttttttctccgaccaatttgaagtggtt

SEQ ID NO: 13486 - DNA, 325 bp, Oryza sativa
  Clone ID: uC-osflcyp128a01a1
accaaaaaatccaccaaattgaatatcacaaatgaccccaaatatacagaatgaacaagatttgatcaagtaaacaaaccccatcagacaaaaagagggggctcaacacatccccttaacacataatttaaggccccaataaatactgggggagtatatatgaactaggggtatacacaatacacacaggacatcatatgggatgaacaccatgcatgcatgatcgatgaaccaccatgcttgctcataaaaagcacatgtcgggggggcagcagcagcagagggcagcgcaaaatcctttccagaatcctgtcgcctggtggtg

SEQ ID NO: 13487 - DNA, 433 bp, Oryza sativa
  Clone ID: uC-osflcyp128a09a1
tttttgtttttttttaacagattaacagtatcagactattcagacaaatgatagcgtccacaatacacgagatgaatcgatgtagaaacatcaatgcctgatccaaaccgaacattctatatttctatcagaatttcagaatcatatctttctgtcatttctgtcaaatagcaacctgtaggcccaatgctctcttcacttcatttcattctcaccgccagtggtcacagggatggattccttgccctgattttcatcttcagacagatcagccgcctctttcgctttgccccacagcaccatgtacaagccacccacaatcaggacagaaccaagcacactttcgaggtgcaacgcctcattgagaatgatcgagctcatcagcgcgacgaagatgagcatcagcgggctgaacacggagatgaacaggggg

SEQ ID NO: 13488 - DNA, 317 bp, Oryza sativa
  Clone ID: uC-osflcyp128b05a1
cctattattgtaaagtaatagtccttcatgtttacaagcattgatataggaaagtacaaaagggggagagaaaaacacaacggccccatggggaaaaaagcactacacaacagtgcttggcaaaaggaaaaaagcgggggcaacctgttttgaacaaaaaaaaagctgccacccccatagtaggggaaacaggcctgggatggacattggaacaggcaagggcggaagaaaaaaaaaggccctggggggccaccttggaacaaaataagggccccggataatcaaaccaaggaacaggttttgttatatcccaaaac

SEQ ID NO: 13489 - DNA, 146 bp, Oryza sativa
  Clone ID: uC-osflcyp128c01a1
cctgatccgggctattccaacatgcacggataacaatactcaaaactttattggagctcctgaacggtgataacccaacgctggcgggtaatactgacactactcatggtgacattgctaatttgcctgccagactgtgctacccc

SEQ ID NO: 13490 - DNA, 452 bp, Oryza sativa
  Clone ID: uC-osflcyp128c09a1
gcagcagattcacagtacaccaccataacattcatattctaatacttagtatgtagaggagttcctaacatagcactgacatatacctcagcatccagcaacatcatttctcaaacaactctcttcctcttacacctacagcaagttagcgcatcgcgttgcattgcatgctaccaagcgcactcacggggattcggggaattccgtcagtcagagatagatatataggtggtgctccttccttccagcaataatacacattactcgcgaatagagttgatgtcgatgtttggagttcttgagtccatctgcctcatcaacccagccgaccatccacccatcgtatgatgcggcatgttgtgatctggcagtgccattgtgggggttttcttcttaccggcaattggctcttcgttattctccgtctcttgctcagctttcgctttattttt

SEQ ID NO: 13491 - DNA, 456 bp, Oryza sativa
  Clone ID: uC-osflcyp128d05a1
gcagttgtgctgagtactataattcagtacttgcaaagccaaaagtagcacggacacagtcacgcccaaagctgatgacactcgacagacatactgtactgtgcctggagactcaagtagccaaagcccacacactgtcaaaactaaaaaccaccactagctcatatcactacattacagatcagtttacattgcagagtgcaccagcagcagcagcagctaacaccaggtcgagagaacgggggatggtcagagcagccttgggctggtgtaagggccattgaggatgctgatggcgatggcgtggtagccggcctccgtcaggtggacgccgtcccagttggcgtacgccgacgggtccgtgcacacgctggagccccgcacgccgcagctcgccttcgggttgaagttgtacggccctccgccgccgcagcacgtcctcagcgccccgtgcct

SEQ ID NO: 13492 - DNA, 316 bp, Oryza sativa
  Clone ID: uC-osflcyp128e01a1
ggcaaaacaagaaattatccattaacttaccaccaaaaaaaagccgccccccgaaaggtaccccccctttgggatatttaaccagggcaggacgctaagtttttttacaaaacagcccttccattctccaaaataaaaatcctagacctagagctaatttcaaaaaaaatttcagggggaagattttccaacatgccggcttttgagggaattctggcttcagggcccaaacatggttttacccgggaacagggcccccaaggatggggcccccataaacagccatagggggggcaaaattgggttgaagccggcc

SEQ ID NO: 13493 - DNA, 385 bp, Oryza sativa
  Clone ID: uC-osflcyp128f03a1
cactgagaatagcacgggtacatcacatcacacaaattcatacgttgatacacgcatagtcgccgaagcgaccagctgcttaattaatcgataacacacgggtttaattcagcaataatcagcacacacacaaaccacactcatatgggtggtttttattgtggactaattaaggtaggtgactcgccggcggcgagtgttcggttgcttcgtgacttcacttgccgcacttgcagtcggtgcaggagcagctggtgccgcacttgcagccgccgttctcctcgccggcggcgacctcctcgaagtggctcttctcggcttcaactatgacgacgccatagctggtacctttcttcacgcactggcttttgtcagcacagtcgca

SEQ ID NO: 13494 - DNA, 448 bp, Oryza sativa
  Clone ID: uC-osflcyp128f06a1
gacagaataatatttctcggaccgcttcggccttttgggcacttgaagcatacgttttggcaatgtagacaacaatgtgtggtgaatcaagaaccatcgtgcacacaacgggatttacatcgaagaaaccaaaaacactcaagcagggcacttggcaggactggactctggagataaggctcacaactgacataccgaaaacaatcgatccaataagtgacatgaaggttccaccctgaggctccccccaaagaaagtgcagctcgagaatccaccagccaagcagcgagtcagctgcaaggtttcctagcacaacataaatggggagcgcctcctgtttccgacaaatcacgagacattacaatctataaaatgaaacgataacccacagcacatttgcagcgtcactattctagtttgtgggcgcacgcattcgatcatgttcact

SEQ ID NO: 13495 - DNA, 408 bp, Oryza sativa
  Clone ID: uC-osflcyp128g08a1
cacaactggcaccatatgacaccacggcctttactgatttagcataccagcatggtggaaggactcatgagaaaagtatccaagtctcaaaacgaaagcatgttctagtttacagcagtaacacgactatggcaccaacgacgggggaaagagaaaaacggcaatacagtctcatacagaatgcaacacatttgcttccaggaaaagaatgacaagaaaatggttgaccatcgccaacgggaaggaattgtaggcagaggagctgtagcaaattaacgccttttcgctcctggggattgcagtaaccggcctgtgtttctcagagggctcgcgacttgacgatgtccatgctcatctcactcgggtcaggggcctgcagctccacctggatgccgtccagcttccttt

SEQ ID NO: 13496 - DNA, 272 bp, Oryza sativa
  Clone ID: uC-osflcyp128g11a1
gtaaagatgttgccgttaaaatcacttgccttcataacttgggagtttttttagcctataaattgtgagttacatgacaagttacacgcccagcgcactgggcaaacacttctcttgattctttggtaaatctacctctacagtcggaaacaaaatgagaacgtaccaaggtgatgtcacaaaaatttggaccaccttcctgcaaaaatcatttgcacagaaaaccttggccaacccaacgaccacaggtccacaggtgtgaaggaaacccc

SEQ ID NO: 13497 - DNA, 353 bp, Oryza sativa
  Clone ID: uC-osflcyp128h10a1
aggcgcaaatgaagatgtgttttcacgtttcgatcaacgcgaccaccattacagaaagatccgtgtcatgtagcatgctagtatttgcaaagctactacgacgacaaacctgagaagattcacaccatatcaacaaaatgcaaaagaacttgtattcaccataaaacccagttgaagtgcggctctgtcataatacgtagaggcaatagccggggtggttttttcttatgtgcaaagcgggaagagaagctctcaagacctcttcttcctcttcttctcctccgacttgtcagacgcgttcttgagcatgatgacgaggatccggacaaggacggccaccaagtcagtgaaaa

SEQ ID NO: 13498 - DNA, 346 bp, Oryza sativa
  Clone ID: uC-osflcyp129a01a1
tcgctggaagacgaagaggaatttatctgagcagtggagtccaaggaaaggaaccaactgaccttagcttagcttaccttagctcaaccccaagcttgaagcttgcactataagaactcacccagccacacggctacttggacgacgaagcagcagcagcagcagtaaacagcatcgctcgctcgtcttcgtcgttgtcgatcggctccggtgagggtgatcggtcgtcggcagaggcttttgatgctggagaggccgtccatcctgaagagataccgtgcaccggtgtgggcagtggaggcttgctggaaatgtcgttacaggagcagcacgccggtgaggcccc

SEQ ID NO: 13499 - DNA, 457 bp, Oryza sativa
  Clone ID: uC-osflcyp129a07a1
aaaaacaacatggcaacacggttattcagccgaattaaccgaaaaaaatccccaagatttcagcattggaaaagccaacagggaaggacagtttattaaaaaaacagaccccacgcaacagggggggccctcaaaaaacctcccgggcaaataaaaacgggggggggaacaaaccgagggggggggccttctcccggccgaagtctgggggcatccaccggggggggccctaacagaaacttcctgtccggccggccggggccctcgcccggaaaagggaattcggggccgatgcccttgaaaacaaggagggggccggcgagccccaaggggccccccacggcagggctgggggggccccaggggaaggggaactcggggttttgggggccggggtcccactcctggacccactggttttggggccccttaaggccgccccccattttttccggtc

SEQ ID NO: 13500 - DNA, 457 bp, Oryza sativa
  Clone ID: uC-osflcyp129b03a1
aattaagatacacacatgcatattaatttattacacatacatgcaaacgttacacgattttacccacgtactagtatatagtactcactctatttcataatataaaattttttagcattgttcatattcatatatgttaatgaatctagaaatacattaacatctatataaatgtaaacaatgctaaaaagtcttatattataaaacggagaaagtatatgtgtacgtatgtgcatatgcttgctgtatatctaatcaaacagctgggaggggtttgcgaggaagaagttggtgacgaggtctttgatgtcggcgccgaaggtgtacccgtccctgccaccgagatagatcacctccagcatcctcgtcaggttcaccaccagccgtgccgtcgggagcagatgatcagcccgaccacccatcttcacgcactcccggttgatcgttcttcacgcgc

SEQ ID NO: 13501 - DNA, 389 bp, Oryza sativa
  Clone ID: uC-osflcyp129b11a1
aaaacgaaccttaaaaaatcttttgggagaaaaaacagggttaaaccctaaaattcagcaggaacccgggcccgaatatttccgggggggcagggcccccccgctaagggcccccccaaaatccgaaaaaaaaggggtataaaaaagcccatcccccaaggggccccccgctacaggggcaaaacggggaacaaaaactttccacgcaaagaacaaggtttaaacggggggctaaattacggggatatttgctaaacgggggccacaatttgggcaggctgcaccacgggggccccccccaggggcgcagcatacggggggggcccatcctgggacaacaagcacatgaggggggccccaagggagccccagaagttgccgaagagggc

SEQ ID NO: 13502 - DNA, 287 bp, Oryza sativa
  Clone ID: uC-osflcyp129c07a1
tttttgttttttttttttttttttttttttttttttttttttttttttttttttaaagaaaaaaaaaaaaaaaattgggggggcaaaaaaaaaaaaacaagcaaaaggaaaaaagaaaagaaagagaggaagggaaaaaaaaaaaaaggaaaaagaaaaaaaaaagaaaaggccgggggaaggaaagccttgacctttcaaaggggggaaagggaaaaaagggcaaggaacccacccgaaaaaaccaacctcccgggccggccgggcccggaagcccgggggggggg

SEQ ID NO: 13503 - DNA, 416 bp, Oryza sativa
  Clone ID: uC-osflcyp129d03a1
gcaggtagcaatgtctgccacaaacctacagcatttgattagaaagcatcttacagtgcacacatatttacaagtacggggaaggaagaacgccaaagatttttggcagcctgatttaaccctccctcacaaagggaatctgcatcctagagagtttgttcatcacagatcagctcataccgacgacattctcgaatccattctccttgatcagatcagtgaattggttcaggtagctcacaagcccacctagcgatttgatcagctcatcacctttttggcgagtggtttccatagaatccgatgagatagcaaggttatggttctcattttcgcctgccttctctttgagtagcatatggatgtgctgagcgttctcttgtaacttgttggccagtttacatgcatcggtttgg

SEQ ID NO: 13504 - DNA, 459 bp, Oryza sativa
  Clone ID: uC-osflcyp129d11a1
ggggaaccaaaaagcagcagatgcagcagcattccttttagagcaaggccaatatgaagctagcactcctaaattagctataagcatatatggagaagagatgagaggaggggagagaagagagctacagatttgttagctggagtatgggctacaagacagtactgatggggataggatttttttatatgaaactattatatggggagactattagattaacaggggatggggggccaatttttagagctggcagttgactatacaattaaactgggtcttaaaaaaaggcagcagcattaagccgccggcgacgataccggcataagggcggtggtggaggggaaggtatccagccatgggagcagcttggcggggacgaggtccgggcggtcgttgtgggggcaggggccgacgccctccaacatggggagcgtcacgttggggagctccctgggg

SEQ ID NO: 13505 - DNA, 433 bp, Oryza sativa
  Clone ID: uC-osflcyp129e07a1
caggacaaaatggatcgataacataataattatgcagcattcattgataaaagcagtatcacagtaccatgatccaaaacttgacaggaaatagaaacatccagacgcagcacaatccaaggatgacaaccggttcttaactattgtaaaacaaagtgcatcagacaagtccgagctagcaaagactctctttactccgccatcctaagcctctacgttctcgacaggtgcatcaatcataagagccttagtcggcttggccaagaggtcggtgtactcctggaatggagacttgacgaacttggtgtccctccagaagtcaggagtaaggaatccataagtcttcatcaggcagtcaaaggtggccttgacgaagttgccaagggtcttggtggatccacgggacgaggtgaagacatcctcaatgccggcg

SEQ ID NO: 13506 - DNA, 365 bp, Oryza sativa
  Clone ID: uC-osflcyp129f06a1
agttaaagaatatgttttaattaataatccagatgctacagggttttggggttcattcagtgtaaacacgatatgatcggatagtgtgatactgaatgaagtattcctgttactacgaactgaagggacagggccagctatgaggttttacaaacctacaccgggtacttattctgttaattggccagacattaataataaggatcggaaccatgtttgctgtgaaagaacaacaccctgtgttgaactccaataaggctaggcaaccgcaaggttgcgttttgaaaaacataggattggattggcctgtaccatggctgtgaaggcgacaaccaggtacgacacccttactgatacaaaacttg

SEQ ID NO: 13507 - DNA, 77 bp, Oryza sativa
  Clone ID: uC-osflcyp129g06a1
gaattaaattccattttttgtagattaacacatttctttggattacaaaatgcgataacaacaagaaaaattaacca

SEQ ID NO: 13508 - DNA, 454 bp, Oryza sativa
  Clone ID: uC-osflcyp129h03a1
attagcagaaggcaaagcctttttcccgcgctttattaaccaggccagatcgagttcgtgtcacatggtcttaaactcttaaatcttagtacatcaaaccagacacactgtttaaccatcagctcatcatcaccttactcatgagaagaactaatccagagatacggggtaaatcaaacgcccaatgtttcggaagctgcagaggagaagaagtagagagtactatcgctcagattctttggtgctggttcgtcactgcgtcttcttcctggcgtccttggccatgcccctcttgcggatgccgacggacatgttgaggaggagcctgtccacgatgggctccgggaacgcggtgatgaggaaccacagcaccgcgtgcggccagtagggcgtgcaccttggctcgtacccgatgtagcgcacggcggtgcgggcgtacgtcttcggcgacggc

SEQ ID NO: 13509 - DNA, 363 bp, Oryza sativa
  Clone ID: uC-osflcyp130a05a1
gaacaaattagctagcatgcaacagtttgctgcgcgcgcaagccaatcaatcatgcgaaagatcgaacaatccacatcaaataccactaaattgttgcccattatcctagctatatggcagctagctacaccattggctgctcatcttgtcaaccatgcataaccccacaaatctcaacacggctagtagaagagaaggatagggaataatattacttatgcgaagccattggggaagtacatggcgggcggcgggctccctcggccgttattgcttttcctcccctcgccggcgggcacggccgccgccatttcctggccctggtacatgagcgtcgagttcatcgtcaggctcaccaagct

SEQ ID NO: 13510 - DNA, 409 bp, Oryza sativa
  Clone ID: uC-osflcyp130a09a1
aatggaaaaccatatagtatatcccttttgattggggagggggggagcaaaaattttgggtttttattaaccaaccaacccatgggtatacaaaaaggggggggggattaatttattacacaaaattccacacgggatatatataattcccggccacagggaaccccaaaatttttccgggaaacccaacggagggggggtttactaacgaccctgattcacctaaaaaatttttggaaggaccctttttagggcaaaataataaagggcaatcggggaagggtaagcattacctatttggacggattgaaaccgcttttcctggccggggtgccgacccatttccgtgaaaaacgcaaacatgctagaaaggtttatttggccgtttccgaaacaatacgttgccacc

SEQ ID NO: 13511 - DNA, 472 bp, Oryza sativa
  unsure (1)..(472): unsure at all n locations
  Clone ID: uC-osflcyp130b07a1
cggatcataattgtctgctcaatggcacatacaaactccagacattgaattgcctggcaaactccaaagggttacacggtataacttggacactttcagaactaatcaaaactgaacgacccgctagctacaacaacaattggacaatgcttgtttagtgatctgaatatggtgatccaacagatcaatgaatccctgtgttctgcagggccgcatgcttttgagcaggtaagtagcccttgctgcttattatttctctttctttcagcagttcatgctatgatggatatgctatctatcagaaaaacaatccattcttcacttactaagctactagtacacggtgactccaataattttcaagttaatttttcacttatgcttagcatcttcggcccagtcagtgccgttcaagctgtgatctgtttggtagtaaacaacatncccgacgtcgctgacaaagtgatcaact

SEQ ID NO: 13512 - DNA, 475 bp, Oryza sativa
  Clone ID: uC-osflcyp130c02a1
catcaaccaaccacacttgccctggccgtacaacacacagtgcaagtgcgtgtcatgcattattaattttacattatcatcatatatatgacgtatattacatggtcagcaagggtatagcttagctcgcggcgacctcaccgccggcgccggggaagacggtctcgatcatcctcccggcggaggacgacgacgacgacgaggacgggttgacggcgctgcagttgagccggatctccccccgggcgccggtgagcacgtcgatgttgcccatcttgatcatggcggcgacgaacttctccttccacagcgtctcgttggcggcgaaggcgtcgacaaaggggaggagcgtggcgttgcggatgagctggtcgtcggagaagtggaggcccaggttgagcggcagcagcttgtagtagttgttgtccagcgtcgccggcgtgctcacgtcgatctccgtcgtgatcggcgtgaa

SEQ ID NO: 13513 - DNA, 279 bp, Oryza sativa
  Clone ID: uC-osflcyp130c12a1
gccatggacatacataaaagcgtactgacgaaatgcataataacaacatggaaagcacctgcgcaaaaaaaaaacccaagacagactaatgcagccaaaaagccgggctaccgctccaaaactgagcaaaaaagcattctggtatcccaggacgcatgcccaaaaagagaccagaccagccagcactgaggccagggaagaccgaagaacatcgaatcatggcaaaggcccaaaaaaccaccgccggacgacaaaatcgacgatgaagcatcaggacac

SEQ ID NO: 13514 - DNA, 444 bp, Oryza sativa
  Clone ID: uC-osflcyp130d04a1
aaagaaaacggcaaagttcatttcatgagttagatggaagcgcctcacatttccagagacctaaccattttttacactacaccatcaagggatacataaaacttcgcctactcaagagaactatctaaatggggagacatagccgaggcagcctttgtccagatcctaaacaccaaccatttcaaccaagaggggacctacatagttatcaaccaaactcccaacttaagctggaggggccttgggggtttttttcgcggccggcgaccggacggtcttgggcttggccttcgccgccggagactttttgggcttggcgaccacctttttttccggcgccttgcccttggtgccagctgcgggggccttcttgggtttggcagcggcggcctccttattgggtttggcggcgtccttcgctggcttgggcgctgctgccttggg

SEQ ID NO: 13515 - DNA, 467 bp, Oryza sativa
  Clone ID: uC-osflcyp130e09a1
aaccaaaacataggaggtttcatttcttcttctcaaagtagtgtagcatctttccttctttcaccattacataagcttaagcaataacagataacaaatcctcctcctcctctaggtaaaatattcaaacacaatacccttataagtacttattattaggaaagtagcgtgcatgggcataaatggcagcggggggcaggttaagaatcacaatgctgagcagcgaggaaacaaaacaccataatgggacagagcaaaagcctccgaaagggagcttttaggcagacggcttctcccacttgaggggcttcaccacctcccaggtgaagtctgggtcgtcccttccgaagtgaccgtaagccgccgtcttgaggcagcgtccgttgccgcctttcttgaggtcaaggttgatgatgatcatgccaggcctgaagtcgaagttctccttcacaatcttgaggatctcc

SEQ ID NO: 13516 - DNA, 497 bp, Oryza sativa
  Clone ID: uC-osflcyp130f05a1
gccgccgaggtggaggcgccgaaggaggagacgccggcggcgccggccgaggctgtggccgaggaggcggcgcccgccgaggccgaggtggcggagaccaaggaggcggagccagctgcggccgagccggcggcggaggaggtgaaggaggccgagcccgagccggccgagccggaggccgagcctgccaaggaggaggtggcgccagagcccgccgccgccgccgaggcggaggccaaggaggccgagccggcggcgcaggtggccgaggaggtgaaggaggaggaggcggcgccggcgccggccgccgaggaggtgaaggtggaggaggcggcgccggtcgcggagccggaggccgagaaggccagcgagtgagtgcatgccggggaaggctggctcgccgtcgtcgtacaccgtggagtacatgcatggcccgcgcgcgccgccgccgccggcgactcgccggagttgtacgtacgtgtgcgtgtagcgagtga

SEQ ID NO: 13517 - DNA, 391 bp, Oryza sativa
  Clone ID: uC-osflcyp130g01a1
aagatggaattttatttttttacattacaggacaccaaaatggcaatcgagagatcgagcaaattattgaagcagtgttgcaacgatgtgctcgtcttggctgacatccagcactagaaagactttccataaacaaaattgggaaaaggcaggaggtatttttgtcatttcgacaagcattagctacccccgttttttataaaccaggatttaatcagaacttttctagaccttatagccggttatggtgaatcctttgccaacaatttcgcctacgcagaaccacgcataaagctcaactccaaataatgtcacaattccaagggcctctaccttgagctcctttctattcttccatacctgcttgacaccatcaaattccttccaaaat

SEQ ID NO: 13518 - DNA, 296 bp, Oryza sativa
  Clone ID: uC-osflcyp130g09a1
cgtgggaagtctttctaatttgtattgaaaataaattttgttcaaaggatccagcacagaggaagcccacactaaggaaaacaaaaacgtgcaccggacgacggcactaacataggccccaaagagcacattacagagaacagcagacacacaggggatccttaaaagagagcagatcagcttggaggaaccatattgcaccaaaggatgaaccattttttcagacaacctgcagctgtgcgcgccggtgcacagctcacaatggaagcaccacccgcattctaagcaccacccta

SEQ ID NO: 13519 - DNA, 230 bp, Oryza sativa
  Clone ID: uC-osflcyp130h05a1
cggggcatcgaacaagctgctattaagatggacaggcacagtagtaatcctaacaggctcaaaagtgcggaatccagcctaataacatccaccccccagctggtacttaaacaaacacgacataaacaagactaccataacatccacaagtctcaggccaaaacatagaagacaagcggctgctcagcaaaagaacatggagctcctgacttttgatatgcaagcaaggc

SEQ ID NO: 13520 - DNA, 184 bp, Oryza sativa
  Clone ID: uC-osflcyp130h07a1
ataagcaatgacattaaattttgttcaaaggaaaaagagcaaaggaaattaaactaaagaaggcgggaacacgcaacggaaggggccagaagcatggccaccagcacccacaggacagaaaaaaacacacccacacgggaagggaaaaagacagcggtccaccaagaagtaaccaaatggcccc

SEQ ID NO: 13521 - DNA, 242 bp, Oryza sativa
  Clone ID: uC-osflcyp131a05a1
tttgttttttttttttttttttttttttttttttttttttttttttaataattttttttaattaatttatattagaatactcattaaggtgaactgaaaaagaaagaacagacaaaaaagcccaagaaaaaaaagacgaagagaaagaaccattaataacaaaaaatgaaaaaaagaaaaaaaaatgaaataaaaaaaaaaaggggacataacttaagaaatgaagaaaaaaaacagaggaa

SEQ ID NO: 13522 - DNA, 216 bp, Oryza sativa
  Clone ID: uC-osflcyp131b05a1
aaaatatataaaataagaacaaggaggagaaacaaaaaaaatgggcaaataggcaaagaaagaaagcaaaaaaaacaaaagaagagggataccaaccggaaaacaatagaaaaaacactggaaaaaaaagaactagggacaaggaaaaaagcagaacaaagaaggacaaaggaaaaaaggaacaaaaaggagcgcggagcgttgctaaaaaacaga

SEQ ID NO: 13523 - DNA, 481 bp, Oryza sativa
  Clone ID: uC-osflcyp131c01a1
ctaactataaagtaaaagtagagtaaatgactcgtctcaggaagaatacagcaaagcaacgttcgaaaaaaaaaagcaatagcaattaaagctactatgttctgctcttggtaagatcatgcaaaatcgatgccaaagaacagcacagctcgagtaatttcagccacaattaaagctttattcagagtgaaagcatgatttagtatgttgggccattgggctgaagagggcttggttggcatgggagtaggcgaggtggctgaggtcaccaagctgcacggacaaggcctgctcggcgccaccaggaagcagctgagcgctgaccagctccgacgtcatccgactgccggccgccaacagcttcgctgacacctccaaaatcttctcgaactagggtggtgcggatggggcaaccccttttttctcgctggtccaccctggatccaggctttcaaccaccaagcttgcggcggcaagcttt

SEQ ID NO: 13524 - DNA, 153 bp, Oryza sativa
  Clone ID: uC-osflcyp131c09a1
tttggttttttttttttttttttttttttttttttttttttttttttgcataattaaattggtcggttgttcgaagacaaaaaaaaaaacctgaaaaaaaaagcccctttggaggggaactaacacaagagaagaggggcaaaagaaaaggcc

SEQ ID NO: 13525 - DNA, 313 bp, Oryza sativa
  Clone ID: uC-osflcyp131d05a1
tttttttttttttgtttttttttttttttttttttttttttttttttttattttatttttattttattttaattttaaataaaaaaaaaaacaaaataaaaacagaatgaaaaaagaaaaacaaaaaaacataaaaaaaaaaaagaaaaaaaaaaataaaaaaaaaaaaggggaaaaggaaaaaaacaaagagaaaaaaaaaaaaggtaaaaattcaaaaataaaaaataaaagaaaaaaacacagacaaatgaaagaaaaaaaggaaaaaaaaataaaccaaacgaggggggacaacaaaaaaagggaattt

SEQ ID NO: 13526 - DNA, 465 bp, Oryza sativa
  Clone ID: uC-osflcyp131e01a1
ggtggacaatacatttgcaagctttattgaacatttatgtagcgaacaaacagtttattgacaacattttgcaaagttggtaggggtgctcaatcatagcagtagcacatggtgtccaaaccatttacacgaatagcattaacacacgtacaaagacttgggcacaatcaaatagagtttatgtccctaggagatttggcgaagctaacataacaagacacctttttttttaactttcacaatagcaaaccatgtagtacagaccataaggcagactccatcttaaaactgttagacttcttggttttcagaaaattccctacagtcatttgatctccatcttgcttttgactggggggcagaaaccattctagttgcggtttttggactaatcaactgcccttggagcaagtccaattgcatctgaacctttcatgaacctgagcctgcgacaagagttggaaa

SEQ ID NO: 13527 - DNA, 494 bp, Oryza sativa
  Clone ID: uC-osflcyp131e09a1
ataaaactggttaaaactagcattggaagacttgagtgtttcagttcatctaagtatattcaattccatccgttgctatccaacgtcacaagcaacctatgagaccacgaaataaaattacacttattttattgactgacttcaaatctctttgacatacactcttgatagaactctccatcctaatgctagaaggcaacatcgcctccgatagcccatctgtacccatattaattttctcaggcgccggccatagcccatctgtacccatattaattctcaggcgtcggccatgctgtgcttgtacctttcctctttaacgtataatgacgtaatgtaacccctttttatagcctggtcttagcaacgatcattatgataaggtgactgcacttaagcaacgtgtaagctgaacctaaagtacattcagcaacacgcaaaatctttatccgtgccgtgttgatcacataaatcatagctatggcaccgacaaa

SEQ ID NO: 13528 - DNA, 451 bp, Oryza sativa
  Clone ID: uC-osflcyp131f05a1
tttttttttttttttttttttttttttttttttttttttttttttttttttttttttttttttttttttttttttttttttttttttttttttttttttttttttaaaaaaaaaaaattttggtttttaaaaaaaaaaaaaaaaaacccgaaaaatttttaaaaggggaaaaaaaaaaaaagaaaattgaaccccttaaaaggggtgggaggtaaaaggaaaaaaaaaaaaggggccaaaaattttaaaataaaaagaaaagggggcaaaagggggggaaaccttaaaaaaaaattttaaaaaaaaaagggggggggggggcggggccaaaaaaaaaagggggggggggaaaaacaacatttttttggggggggggggggggcccaaaaaagggggggggtgaaaactgaaaaggggggggaaatgctcaaaaacacaaaggggggggggg

SEQ ID NO: 13529 - DNA, 435 bp, Oryza sativa
  Clone ID: uC-osflcyp131g01a1
atcttgaattcattcttaattccattgttcttgtgaagtttttcccccctgtaatgctataccattatcaccctcttgtatatatataaaagcggtttaccctcgtttacaacacaaagaagtgaaaattgcagactagtaaactttgatctttcaggaagtgaagtccaaaacagaatcaagaaattgtatagatggtggtggctggcaaccatcatatggcatctgaaaaattctgaaaccagtagcactatatcatgatgatgcctgtttcctgcccagggtgagagctcactcctttccatcagcagcacggagggagccaagctgcaccggcgcctgagtctgcactaccttggatgacccgtaagccgacaagtcgacgccctcggcctttttcttttcgagctgcttcttgatccaaaagtatgtgat

SEQ ID NO: 13530 - DNA, 488 bp, Oryza sativa
  unsure (1)..(488): unsure at all n locations
  Clone ID: uC-osflcyp131g09a1
actcgaaattaagcttataaacaagacaaactgtggatattctcgaagcacatatagaaaaaggagtagtaaattgtctcagcatagcacatacccataactacttagatacttagatatagttaagtagtagatgcctaaggattgtctcagcatagcacatacccataattagttagatatagttaagtagtagatgcccaaggatggatgcacatacttaacatggtggacataaatacagcagaagaatccttcgattgtccctccaatccctttaagcatgatgacattaagcaatcttcaatccagcaagcggcctgctcaagtgagcctccattcctctactttccgttgccatctgttgttttcccttcattttgcttagttcccaactattcgatcccatctccaatccattcttttgcattgctctntcttgttttccttctgcatcaattcacgtccaatcttttcgattgcacttt

SEQ ID NO: 13531 - DNA, 410 bp, Oryza sativa
  Clone ID: uC-osflcyp131h05a1
acagccaacgggctttgctccgtgcctggggccaatgcgtggaaaatggtgcgacggagatgtcatcggccaagagtcacgctatacagcaagtgggttgacgtaatgtaagataggatacatggtacttgtgtatgaaatggagcaacttgctagagcacaagattgttatggtctctcctattcctcagttttttttcccctccttttggccaccagatacgagcaactaggtcagaaaccgaagcacatggtttcaacataaaaacgcgagttttttgcgctaaagtgtgagccttgaatagcccaaaggtggcaaggtgtagtatcttccgagctggggtttgggaaggggctcgattgatccagtgatttacacaggctgggcattttcacaattggcagttagt

SEQ ID NO: 13532 - DNA, 53 bp, Oryza sativa
  Clone ID: uC-osflcyp132a01a1
cacatcataaaggaaggttttgtcccttgctggcaccagttaaaaatagaaat

SEQ ID NO: 13533 - DNA, 413 bp, Oryza sativa
  Clone ID: uC-osflcyp132a07a1
agaaccgaacaaaccctagcaatatataatttaaaaggcataatggtttacatgtccggacaaactgcaacttagcacactcctgacgaaactcaaaaccagacgggttcaggaatgtgttgtgacggctttgcagaagctttgactcaggctatacaagtagcaaaatgttgcacaccatactaaaagatgcaaacactacatagtagtagcctgatgaaaaacgcagacttcaaagctttaatccctgttacagacgtagtgatatgatatccgtgaccagtagggaaataatgtaacactggcccccttgaaacctttagctttattgaaccaccagaacaattcagtaccccgcacaggggccacaatttaccacctttgggcaaatcttgttttatttgaattgagca

SEQ ID NO: 13534 - DNA, 474 bp, Oryza sativa
  Clone ID: uC-osflcyp132b03a1
caagaactctccttgaaaattttgtaatttgatccgcaacgattcagatgcagatgaaacactgctgattcccactcagattacacacaatacaaatccaccgacaaactgcctcaaaaaccaccaaattgattcaaaagtaaaacgggtatgagggatcttcccaccgagactgactaaacctaaccacagacaatgggatccactggacccagattattcaaaaacagatggttatgacggcatcgtcctcgcaaccgaagggaacttgcagctatggatatcctcacttcgcgctggcgagctgggtgcggatgaccttggcggccgaaaccatgttggtaagggcgggcttgacctcgtgtacttgcgggttttgagaccgcagtcagggttcacccaaagaatgttagtgtcgagcaccgtgagcatttttgtgacccggcccgaaatttctttggggacgggatcctt

SEQ ID NO: 13535 - DNA, 505 bp, Oryza sativa
  Clone ID: uC-osflcyp132b11a1
tttgtttttttttttttttttttttttttttttttttttttttttttttttttttttaaaacacaagggaacccacatgggatcatcaattcagaaacagataataatattccaagggggtactactcaaagttttccaattggaaacggggaacaaaacgcatataatctgaataacatggaaccaggagcagcttatttcagcttatgataataacagaaaaaggggaatgaaaagcatcaaatcagagcaaaggggggagcagcaagcatcaacctaggccttttgggtggagacgtagggggggccgcacttgccgcaataggggcgaacgaaggggttggccatgaaggggcccgcgccccaatcgttggtggggcactctttcctgagcctggggaccttgccgggggggtcccccaccttggaaaactggggcccggggggcttcacctttttgggcttgggcttgaacttttgggggctgggggaccgttttttttt

SEQ ID NO: 13536 - DNA, 481 bp, Oryza sativa
  Clone ID: uC-osflcyp132d03a1
atcattcaaacgaatcaaataagcagagctttttgattacacaagataagtttcttgctgaccacaataaacggaaacttaaacctagcaggagtactaaattaaactcaacagccaacttaaaatagtttatttagctagccttgttcctcgccctcagcagcagccgcggattccctctcctcggcagcagctgccatcagctcatcaaacttctccgttttcccaagcaaaattttaatcttcgccttttgcataggacggttccttgagtcgtctttgacatcaacagttgatgtcatgatctttttttcaacagcaaggccattattttttagaattttcgcaacagtcaccacagtggcaatggccatgccgagcgcccagagctccaccttattatgctgttgcatggatcttttggcgaggttgacgttaaaaagaacggttttttggggttggatacctggatccggttttt

SEQ ID NO: 13537 - DNA, 469 bp, Oryza sativa
  Clone ID: uC-osflcyp132d11a1
aacttaaaattaacattactcggccttattcattaccaccgctggcagtcaagtccagtccaggtacataactggttacattcctagggaagattatatacatggaagcaggcacagcttggtctgctgcacttagctaagccagtgcactagtgttgtagacaagaatagcgccgccaactagaattccagcaagagtgattgcccagagaagtaaacctgcctttcctccaacatagacatcaccagttgaagaccattcttttggggtatatattgggctgtacccatcaacatttgctccatacttggtggaaaactggtaaagaccctttcccttggctacccttccagatgcatcaacaccttccttgaacaccactccttcagcaggcccatagggctgggatggctgaatctttttggttttttggccacttgaacaaagatggccttgccattgtccctt

SEQ ID NO: 13538 - DNA, 425 bp, Oryza sativa
  Clone ID: uC-osflcyp132e07a1
gccccacaaataaagaatgactcgtgttaaaaagaatggaagaaataatacattgccaagttgatggaagaattacaacagcagagtacaagaccaagatcaaccgatctgtggtaacaaaatcccacacccacaggctgagcgagcctcagacagatcaatatgccaaaatgatcgtgaaacaactgtagataaactataggagtttatttctatgaacaactgagatcctttggatacacaccattcatgcaaattttttgtcagctttatttttcgagcccatgcatgccatccccctgaatcaaatggttctcgatgcatcaattccgttgtacttcatacctagcatgaaaatatgatgttggcggatgatgatcaacatgcttaatatttttgccctggaggtgctggtggcaaacggt

SEQ ID NO: 13539 - DNA, 468 bp, Oryza sativa
  Clone ID: uC-osflcyp132f03a1
gttgaaagtaagataactagatcaattaagcacagctcaggtttggttcagatcatttaccgcctgtacaaatagatatccctaacaccaattaaatagtaccaggagaagagcaaaatctgtaagtgatgacaaaaggtagtccaaaaaaatgtgggaagcccctgatgcatttagcatctgcatcaggacaagacaactaacctagagagcaattcagtatgtacactcgatagtcgataccttggttgaaaaacattgggaaacagtcggtcatgattcgtgactaaccatttctttcgcctgagattttgcacagtaaccatttttcattcttggaagctgcagaatattttttgtgcagttggccaaggctacaaaccacaccaaaactgtgctataggccaacgcattttacccacctgaatgcgtgtcccatcttgaaaggaaggtcataagcttttatga

SEQ ID NO: 13540 - DNA, 403 bp, Oryza sativa
  Clone ID: uC-osflcyp132g07a1
gagattgaaataagctattagcatttcagaatgtacataatacagatagctaagttgtctcctttcacaaggtttgtttacacaagtattccatttccagagcccccctattgtaatactatgaaacatgagaacaggctacaaggaataaaggtccataaggagatttaactctgcacgaagcatatcgaaagcaggatttgctggtcgttatatatgcacacgacacggtaaacacatcgaatgcaaaacaaagaaaaaggctttcaatgttctagcacttgaagcccccgcaaataatcagccagaggaagagaatcaacgccgcaacagcaccccccaccattaacttaaaccttaggttctgaagccacatcttacgcctgagctctcttccatgcct

SEQ ID NO: 13541 - DNA, 382 bp, Oryza sativa
  Clone ID: uC-osflcyp132h03a1
acttcaaaattcttaacttcatcatcaagaccaaacaaagcaaacgcatagactcaaaaacattcatttctcatcagaaagcaaatatgcagctggcaagtaatcccaacaaactattcagaatatctgccattgacacaggctagggtggtcacgaaccacaattagatagctgtttacttgttgtctaaataaacgggcagaaaaataggggataattttactcggcagcagcgacctcctgcccgggcatggcctcatcttctgcaggcctatcaagcttcgaaccgatgtcctccttggcatagtcaccatgcacctccatgagctttcccaggtcaaatttcggggcctttagaatcttcactttgcggacaaacac

SEQ ID NO: 13542 - DNA, 465 bp, Oryza sativa
  Clone ID: uC-osflcyp134a08a1
ggagaataaaaatgtaaaccacttcatatgattaaatgaattaaaaattggcattttaatagttaatacatataaaaggatatcagctatggtaacacacaaaataatttaatgttagcaaacttacttatttacatggctgaggcgcacaaagaatgaaacaacttaattgggtctaaatactaacaaatttgaggaccatattgttgtttgtcctcgcgtgtcctatgcagcagccgacttgcaaattgggcatgagttcttctccttcaaccacttcttgacgcagtcggtgtggaagtcgtgattgcatttcagtattcccagcaaactgttgtctttgtattcctccagacaaattgcacatttcccattatcttgatcattttgctgttcatcagaactgcaatagatcacttctttcacacaacctgagattttctcgtccaccaagcctgtgcagac

SEQ ID NO: 13543 - DNA, 327 bp, Oryza sativa
  Clone ID: uC-osflcyp134b12a1
aaagggcaaaaaaagcggatcccctttttgggggggctttttgggggacatttttgggggggcccccccttctaaaaggggtttggttccccccggggaacccggacccaaagggggaaaaaccggggaaaaggaaccaaattttttttggggccaagggcctccctagggggaaacaagggtaggaaaacccccattggtcaagcaaataatttttcccaaactttgggcccaggggcctttaaaaaattgggggggtggcccggaaaaacaattgggcccctaaaaaaaaccaacgggccccttaaggttaagggttaaaagggc

SEQ ID NO: 13544 - DNA, 374 bp, Oryza sativa
  Clone ID: uC-osflcyp134d04a1
aaacctgggggagggggggcacattttgggcattcaaaacatcccaacaaacatgttgactgtattcatgaactctacaatctacagccgtctgaacaaattttttatccacaaatagaatttctcctgtttcgcctgtccaactaggaccaagtgtggaagaagacatcctgactcctgagaaagggaacattctgtaacctctggaaggctttgaagcagcttcatttgggggccttagtctcagaccatccagtttgcaaaactgacatgtaaatacactactgccgcaagcaggttgggaagaaaaaggcatgatgcttaccatataggaactttaacatttgcaaaacgaagattgagggccctcaatt

SEQ ID NO: 13545 - DNA, 444 bp, Oryza sativa
  Clone ID: uC-osflcyp134d12a1
caaccaatcagaatatgatataatcgtattgcccatgtaaaaaccaaattagcattccagaatccacgataacatccacaaaacagctcgactgattgattgttgcatacccaacgtattgcacacacgaaacacacatggttaacagtggccattatttgtcaggacaaggggaatacaatatcaatgtcccacacgagttaactattttacagcgccaaggatcaaaagttgcaaaatgaggggtagggcaaccccaagtacatccaactattgcaaagaacatattcatgatatcacaaaaaaaaagtttttgagattatacctgttttatgccaaaatttttgcagtccagggagagcgactgaaaaaaccaaccgtgcaacaaattcaaggtccgttgcttcaaagaatgtcacgccctgatgtagccaggcagcaaac

SEQ ID NO: 13546 - DNA, 260 bp, Oryza sativa
  Clone ID: uC-osflcyp134e08a1
tgcttcttggtgctctcgctgctggctggctgcagctgcggcgccgtggtgaggtgtgaaggagacccatggatgtggtgccaaaaaaacccgaaaaggcccatgcatggtcatggatggtgctagagtagacggactggacggcaagagagagagagagcaagggaacaccaaccaaaccaaaccaaacaatctctcatgtgtttctctctctagacttgtagtagtagcggtggtagcggagagggagggagggtggg

SEQ ID NO: 13547 - DNA, 402 bp, Oryza sativa
  Clone ID: uC-osflcyp134f04a1
ggcgagagttgactagttgaaactccaacgatgcatacaattaatcacataatatcaatatcacacgttattaaagcatgaaagccccacatgatggagagattacaggtaacatggtcgtatttgtatatcagctcatggctgcatgcagattcatttcaatgcagtacaggcatggcacagagagagccatgagttcttacatttcctcttttcataatccactaatcgcattcgcatggcagcatttaattagtcaagcgagtccacatgtgggatacgtaggtgcgatttattattaattagcgcgggtaattacttcattagtacttaatcagagcgaggtggagcatccggtggcgcaggacaagaacttgctggtgcagccgatgacgcaaaacg

SEQ ID NO: 13548 - DNA, 443 bp, Oryza sativa
  Clone ID: uC-osflcyp134f12a1
gctgcaatccagattagatgatatcatcgcccctcaaaacttatctccagttccgaatggctaactaaaactgataaggttagatgatgaaaatgttacaggaagagtccatacataaagatgaaatagatgggactcccgtctaccaaaaccatcaatcacaaaaacacccgaccatcaacatgcggcagataaagcgcagcagcaatgggcatgcgaacaggtgagcacttggctgattccaaaggttgattccagttcccagtgtaaaagaagacataagccatcgcatcttctaaagatcatcaatatgaagaaaccaatccccacttcacgatttcgaactacatcatttgaagatggagatcagcagcctgctgcgccagctcgttcatcatggcctcatcaaagaactttgtgatgctcacattctcactcatgcc

SEQ ID NO: 13549 - DNA, 497 bp, Oryza sativa
  Clone ID: uC-osflcyp134g08a1
ggctgaatagaccactgatgacttggataaaagcacgacacacctcaagttacacaagtctgttattaataactccaaataaattaatggaggcacagacctaaataatggacaccacaccactaataactcaaaacgtaaagcacgacacatctcaagttacacaagtctgttattaataaattaaccaaggcacatacctaaacaatggacacaacaaataacttaaaacataaaggacaacacaccttaagttacaaaattaaatactgggtaataatgatccgacatccaagttaccaaccatggcaacggctgcaaggctcccggacattgaacttgactgtagagggaattttcccctcgatgtatgttcggatagccaagagcgaattatgcactcccttgataacatcctgatccaatgggaggcagacattgatgttgccgtcagaacaccgaagttgagtgcaaagagtgttcaatgtaaggcactc

SEQ ID NO: 13550 - DNA, 471 bp, Oryza sativa
  Clone ID: uC-osflcyp134h04a1
attacacagggcatcatacaatatttatcacctgtagtccaaaattacaccatttatcaccggtcatgcatcgatgattcggcctgaagctagttggaccaacatatttgcgtgcaagcaataacagtaacattattgatttgcatatattctgcacaaatgcagaaacataatattatcccttgtttcaaatataatgcaaaaatggctgctcaaaaagagcatcacccaagagacttttattgttattttcttcatgagatcagggtctgattgctccatctgacgatgataattaattagcgcctcaggctgtgcaggatatattcagcataaagatccatggagtacttgatggcctcctgagcagttgccggtggcaggaaattgtttacggcgacctctttgttttcattcttcttgtagtcttcaaagaagcggcggatttcagcaagtcggtgaggagagagc

SEQ ID NO: 13551 - DNA, 289 bp, Oryza sativa
  Clone ID: uC-osflcyp135a02a1
acaagaaaaaaacaaggttctggattattaagacaaggcttttagataaccacagatatattgtgccccagggttcgatctatcggaaagggaaaaaattctgaaattccgatccgaaattgtgaatcctgttagagcctctagatatcaaaaccgaattaagtaacggccccagaatgggcaatcgatcaggtagccaagccatagcaggccagcgcctgatgcagatcagtacttgtagtccttgacgtgcaggctttcagcagcgccctcgccgaggacagcatct

SEQ ID NO: 13552 - DNA, 287 bp, Oryza sativa
  Clone ID: uC-osflcyp135a10a1
accagggcacaaaagcataggatctatttattgatggacaatatatatagcagctgcaggctacagcgtaatgttgtacacagacacacagcaggcaatgagacaatctggatgggccacatggtttagatagatggacacccagattgagactgatcatcaagcactattatcagaacagaaatgacattctttccgctaatcgtcgataaattcatctattctatctaccagggaagcatgaatttgtttgcactcaaacaaacaaggcaaactatcataaacat

SEQ ID NO: 13553 - DNA, 245 bp, Oryza sativa
  Clone ID: uC-osflcyp135b06a1
aaaacaaaaaaaattcaaccccccggggggggcctgacactacagggggggagttaacttatgctatatttgatgaaattggccacaaaggggcatttcaatccaatacactgggacaaatgatctcatgggggaaaatagaccaaattcagcattggaaatcgactgccaacattggtgatcattcaggaagggagtagagttacaacccaggtttttcaggggagcatgtgcctttgcaaggg

SEQ ID NO: 13554 - DNA, 192 bp, Oryza sativa
  Clone ID: uC-osflcyp135c02a1
gacaggggaaccaaattacccccattattttaatggttttgaattcacccccaagttagggcgaccattctgggggttatttttgttcaaaaggataacaaggtggtaacttggcacaaaaattttggtacattttgaacagggttaattgggtttttaagcaagaattcccgggatatgaaagtttttggg

SEQ ID NO: 13555 - DNA, 269 bp, Oryza sativa
  Clone ID: uC-osflcyp135c10a1
ttttttttttttttttttttttttttttttttttttttttttttttttttttttttttttttttttttttttttaaatttaaaaaattaaaaaaaattttaaaaaaaaaaaaattaaaaaaaaaaataaatttttttttttttttcacaaaaaaaaaaaaaaaaaaaattaaaaaaaaaaaagcccaccaaaaaaaaaaaaacgggggacggttttgtaaaaaaaaaacaaactgggaaaaaaaaaaattttaaaaaaaaggggccccc

SEQ ID NO: 13556 - DNA, 59 bp, Oryza sativa
  Clone ID: uC-osflcyp135d06a1
tattttgccagactttttttttatttttttttaggtttttttttatttttttttatttt

SEQ ID NO: 13557 - DNA, 284 bp, Oryza sativa
  Clone ID: uC-osflcyp135e02a1
atgcaacaacaaaataacatgcaaggattaagcaagcctgttcctggtaaatagttcttcgtcacaaagtcatctgtacaactatctgttcttttttttccccctgaatgtttcttagggttagaaacataagcacccaaaagtattccatttccatctttccagctaaaagtgaggtataacactgatatactgtgccacacacgcacgagtaggagcatcgtcacagttaagtgaggacattcttgggagggcacggcgtcggttgggcatccggagaaagg

SEQ ID NO: 13558 - DNA, 250 bp, Oryza sativa
  Clone ID: uC-osflcyp135e10a1
cattccgatagatagcaacaagcagttcaaacaccataaccaaagcgaactcaattcatggtaacatcacggacgaagaacacctaacactggatggatggatagagggcttctcgactcgagagagccactggacacgataacgactcgactcgatgataagatgattctgacacggatagctaaggataactggccacgatgggccccaccaatcagttcctccagttcccgccggagtcgccgccgt

SEQ ID NO: 13559 - DNA, 259 bp, Oryza sativa
  Clone ID: uC-osflcyp135f06a1
aattaagatagcaggctactacaaataaattagactccaagatacaagacaaaacttggtttggctattataataaacctccgaggagctgtcaagagaggaagataaaaacgaagggcagatagaactagtcagagagaccagccctgctcctcaagggctccttgaagtccatgatatcaccttcccacctggtcaccgcctgcttttcgcacacccaaattttttgagcaacctggttgataagcctgaagtcatg

SEQ ID NO: 13560 - DNA, 299 bp, Oryza sativa
  Clone ID: uC-osflcyp135g02a1
ggcagaacaccaaacgtggcaacttgctggtcatcctagacatccaaggatacagaacttatactagcaccatgtagtcacaacacctagtagatgacctccagtcctagtactcgtccactacatatacaatttgtactctttttttaccggcagtcttgacctcttgggaaaaaatgcaggcaaagcattctgtattctctccctttttccgctctcaagaaaggaaaagcatgtgtaactcatgtggctaacgccattctgcttgggattactgagctctgcaagctgttgtctgc

SEQ ID NO: 13561 - DNA, 246 bp, Oryza sativa
  Clone ID: uC-osflcyp135g10a1
aacagggtcgagacaaatgaggcattcataattcattcattaggcatacgaaaagtagagagtccaggggaaagcaagatgagttgcatcagattctgaatcatatggcccctcctcctgcacttacatcacccactgtttcatctcatagcaatcactggctcgcaaaaggacacacactgacacaaactcgaggacggacggacaccattgactgccatactccgatcgatcgaacgaacgaac

SEQ ID NO: 13562 - DNA, 279 bp, Oryza sativa
  Clone ID: uC-osflcyp135h06a1
gcgattcactccacatccatataataaacacatcagtgctgtgacaatatacatttgtacaacaggcaacactacaacagtgctcacggatcaggaagaacattattttggttcacatctcatctgttcctcccttttattcagtcaggcataacataccatacttaagacagaagagttacagcgacattctcctcttatagttggcatatactgtagctaaggacgtcgaacatggttgtcgcatatggccgcccgaatctaggaagcagtcggaat

SEQ ID NO: 13563 - DNA, 201 bp, Oryza sativa
  Clone ID: uC-osflcyp136a02a1
gctgcttcgttttaaacaaggaagaggaggggcttgggtgtgttcatgtctgtcttttgggggctaagttagttgcttccgggggaaaacttttggcgtttatttttactattattattaataagaagctcttggatttgcggggggaaaaaaaaaaaaaaaaaggggcggccccgcccttttttttttttttattttttt

SEQ ID NO: 13564 - DNA, 190 bp, Oryza sativa
  Clone ID: uC-osflcyp136a10a1
aaaaaaccccaaacccttaaaaaaaaaagggttcccccctttttcaatttaaaaaaattaattttggggggcccccaaaaaagttttttccaaaaaaaaaatttttaaaaaccggggggaaaaaaaaatggggggggaaaaaattattaaaaaaaaattattaaaacaaaacaaaaaacctagggtccaa

SEQ ID NO: 13565 - DNA, 262 bp, Oryza sativa
  Clone ID: uC-osflcyp136b06a1
gattggcatacagcattgaaatttgcaggaaaaagcaagactagacatgcaaaagatgtttagggtacagatctgtaagctacagatgagcatccatcaaatgttaccatccacatataaataacatcaggaaagagagccaaaaaaatttaaaataatctacaaagaaatgcctccggctgctaaaatttcttccagtgctctctatagctagttctctctcccttttagatggccaggtaccattggatttataaacatt

SEQ ID NO: 13566 - DNA, 257 bp, Oryza sativa
  Clone ID: uC-osflcyp136c02a1
atagcaagatcacattaaacaattttgttgcgtatcacaacgagggagtactactactgcagatttcctcagcaagaagctggagtagctagtagctaggaccaagacatttggacaacatgcaattcataaaacgtataggattacacgtacgcacagatcgtgtacatactgaagaaaattaagatagaacatgcccacagggagcgtgcaacataaagtatacagctgatacagagagagagtggagcgctgca

SEQ ID NO: 13567 - DNA, 252 bp, Oryza sativa
  Clone ID: uC-osflcyp136c10a1
aacacgcagtaaccagatgcatcggcattcaaaattgattctcacttaacattatgcaatactttaacatggagctacttaaacagatctaccaaatacattacataatgttaagtaactcagttttcctccagtagctgacgaatgatgatccgcacatttcctaccagccagtaggtgccggagcactgccttcctcccatccaggggcggcaggaggtgcaacagcagcagcagcggcaggaggaacag

SEQ ID NO: 13568 - DNA, 283 bp, Oryza sativa
  Clone ID: uC-osflcyp136d06a1
acgacaaaccacgaacttggatattaaagatgccacaaagaaggttcacataaacaacacaggtcacagcagcgaaagctacaagcaaaccctgcataatcgaaaagcaaatgtttttcaaaaccagacacacaaactgatagatagaagcccacacggacagatcataggatagcagcagtaatcaagcattgccaaggcaccaggcaagaaccctgaacctctctagtactcgtcaccctcatcaccctcgtcaccatcgtcgaactcggagccgacctcc

SEQ ID NO: 13569 - DNA, 198 bp, Oryza sativa
  Clone ID: uC-osflcyp136e02a1
gatccccgggccggcaaaacttggggtttccgggaccttttacgtacaagaaaaacccccccctgggccccccaaaaaacaaaaaacccgcgcgcccaaggggattcccatttttcgggaaggggaacatcggcccctgggggccgcaggccccccccaattccaaaacccccaaaaaaaaaattcgggaggggtccc

SEQ ID NO: 13570 - DNA, 280 bp, Oryza sativa
  Clone ID: uC-osflcyp136e10a1
accacaaaacaacacatgcatatcaatgaggaagtaacaaaaacaatatgccatgtacatgttgttcacctcacaccaagttggtgaaacaattacaaagtttatggaaacttgaactacacactgcctgcctatatttacaagcgtccttaagaacacaacctttgaatgaatcgttcatacaaaattacagatggttcactaaacccattgcaatatcctacacctcacataaattccttacaaaaatacatattgtacaagaattacatgctctaag

SEQ ID NO: 13571 - DNA, 280 bp, Oryza sativa
  Clone ID: uC-osflcyp136f06a1
aacacaacttatgattgaatacatagatcgagcataaaaaactgaacgagaataagtcgcatacaaagactatttatgaccaaaccacacaatcacggccatctgattctactactctcaagaacagcacttctctaatctacttccagggttcagaatgcacgcagattagtaaaggtatcagccaccacgtctactgtctagttagtgcatatattgcagcaggatgttagtaaaggacaaaagagaatcgtttggttaatcttcatattctgtttcc

SEQ ID NO: 13572 - DNA, 219 bp, Oryza sativa
  Clone ID: uC-osflcyp136g09a1
ggaaaaacaagggggggcctgcccggcccaaaattccttcacgtttttcccaacaaaattggggggggggtgcaccccaacaaaagggtggggttgattttgattttaaacaggccgcctttacaagggggggctaaaaaaacaaggggggcaagggcctgaattcagcgggaaaaaaaaccccccgaggggtcaaaaatttcaagggcaaacccgtgg

SEQ ID NO: 13573 - DNA, 332 bp, Oryza sativa
  Clone ID: uC-osflcyp136h05a1
atgcacgcgccgcagctcgatcctctattctggcgccctttttttttttttttgatcaacttgacgcttatgattgccttgaaatggcgagctataagttgcagaaaacgaacactatgttcacaggcctgaatgtttttattgaccaacgtaacgattaatctgcactcaaatggacacacaccaaatggccccgctaacatatatcaggtgcagatcccgataactctttttacttgaatgccacatacactgccttacttatttggattatttgcacactattgattaagacggctggtccttgaccttcaatacatcctgtattacta

SEQ ID NO: 13574 - DNA, 61 bp, Oryza sativa
  Clone ID: uC-osflcyp137a01a1
ggaaattataattttggaattttttaatatataatttgaaaataaaacgaaaaaacaaaaa

SEQ ID NO: 13575 - DNA, 411 bp, Oryza sativa
  unsure (1)..(411): unsure at all n locations
  Clone ID: uC-osflcyp137b03a1
atacgcaaaactttgcagtaaccaaatcgattcacaggccacacatacaggtagtatacagattcgtctacacacaaggttattgcagaggcaaaacacgaggtatgtatatcaaacgctctagaaaagattcatgtgatgaaatacatcgatgaanccacgntatgttctcaagggtgagaaattaattagatgcacgtattagttttaaactttgttccattcgatactcaacgctgttaacctggttgacgaccacacttggctacagatgcccttcgagggtactagccagtattagcagtgagcctgtagtaacgttagcagccaagcagccagcaggtttcactgtcttgattggattggatcggattagtaagacgtagttctttgacgaacatgccctccttg

SEQ ID NO: 13576 - DNA, 116 bp, Oryza sativa
  Clone ID: uC-osflcyp137b11a1
ttttccttggggcaatttatgcatccgttgcggcagactttttatccataaatttatttttgaacgaaatctgatgaagacccgcccaattttaaattgaaataagaggaagtttt

SEQ ID NO: 13577 - DNA, 105 bp, Oryza sativa
  Clone ID: uC-osflcyp137c07a1
ttttgcctggtcttttttgtttttttttttttttttttttttttttttttagcttgatagtcaaagcttataaagccagcggggcaaaaaggggggaaattatcc

SEQ ID NO: 13578 - DNA, 147 bp, Oryza sativa
  Clone ID: uC-osflcyp137e07a1
ttttttttttttttttttttttttttttttttttttttttttttttttttttttttttttttttttttttttttttttttttttaggaatttttttttttaatttttttttattttaaatttttttaaaaaaatattattttatttt

SEQ ID NO: 13579 - DNA, 213 bp, Oryza sativa
  Clone ID: uC-osflcyp137f03a1
gctatggctacttccatattttttttaatgtaatgagcctatcctctaccctctcttttctgtttatatttcaatataccgaaacccatataagactagataaatattaagaggactctttccgcctagataaaaattctattcgtgggcacgcaaaagttgttatttttattttgcattttgcccctttttagttaaaaaatttttccaatt

SEQ ID NO: 13580 - DNA, 301 bp, Oryza sativa
  Clone ID: uC-osflcyp137f11a1
acaaaaaaaaaatcactaggggaaaaaaaaagggattttttgggagggccagcccaaaaaaaaacccaacaggaataacttttacgggccgggaagttttaaccattaaaggggggggcccaaaaaattatttggggggggcataggggaaaagaaacccctattaaccactcaaaaaacaaaaaaccccaagttttcgaaaaaggaaaaaaggcgcccccaaaaagggcgggaaaaaacgtcaaaaaaaaagggttatgggggggctaaaggctcccttggggacccccgggggggggaa

SEQ ID NO: 13581 - DNA, 375 bp, Oryza sativa
  Clone ID: uC-osflcyp137g07a1
cagtctctatatccacaaattcataagtggacacaaccaaaggttacacgagtgttgaatcttgttttcggttcctttctatatatattggggctgaaaacaacaaaaatggactgaatttgcagccagccactagggttagggggaattacagagcccagagtggaacaaccattatttgagtgtgctcaagccctatccagaaaattattattagccaactataattagaaaaccgcagctcatcccaaaatcagagcagaggttcttacaaaacaccggtttatgagccaagcggagcagagtccacttcgccagtgagcagaagccaacaccttgaaccattgtgtaaggctttcagtcttttcctgttcg

SEQ ID NO: 13582 - DNA, 248 bp, Oryza sativa
  Clone ID: uC-osflcyp137h03a1
tttggtttttcacagcggtgaccccatacctcgggaacttcttcgtacggccacaactcggccgatcagacgccgaatcctcgtcaggacgcggggcgccagacgccgtgcgcgccagcctttgccgctttccagggcgcccatcctctccggcctgcagcttcgagcatcaacttgcagagtgccggaatgccgccttcatgctccatacctgcggcggccgtcctggtctaatcggccgaacggag

SEQ ID NO: 13583 - DNA, 188 bp, Oryza sativa
  Clone ID: uC-osflcyp137h05a1
accaaaggtcgtttccatatttttaaaaatgcagaaaaacattatatatatgttctagatatatatatatagccagcatccagcgaagagaagattactagattggcaaataacaaaggtatgaaaaggaggaggttcaggagaagggcttcatctactaatatgtataagggtggttggaggggtca

SEQ ID NO: 13584 - DNA, 233 bp, Oryza sativa
  Clone ID: uC-osflcyp138a01a1
ggggaagggccaacaacctataggacccggaaattttgatgccccgtcacaattaaaaattgtttacccgcaggacccaattttgagcccccaatttttccccggggtactcccgaagggggtaatttttgaaactccttgggggcaacaaggcgaaaaaaaaaaaaaggtcttcccactttagggtcaacaattttttgggtttataaaaggggggggttcgggttaacccc

SEQ ID NO: 13585 - DNA, 292 bp, Oryza sativa
  Clone ID: uC-osflcyp138a09a1
atctctggaaggataaggataagtccaaatatatcgttaaaagttattacattatagaacagagatagtaagttatataaaatgaacaaacttaagtaacagctgagctatcatacagtcctctggagagacaggccggcatcaacaacaactacttgctactacgaaaacaacgtgtcagcagtcggcaccgtcagaaaacacagctttcgttttaagcattcggtcaccttacagcagcagtagttgaagcatgcatgtgtccttcattgccatcgacaacatatgttca

SEQ ID NO: 13586 - DNA, 306 bp, Oryza sativa
  Clone ID: uC-osflcyp138c01a1
tttttttttggtttttttttttttttttttttttttttttttttttttttttttttttttttttttttttttttttttttttttttttttttttttttttttttttttttttttttttttttttttttttttggaaaaaaaacccccccttaggagggggggaaaaggtcccccccccaagggggaaaaaaacccaaaaaaaaagggggggaaaaacccccccctaaaaaaagggggaacaccgtttttataaaaattttaaacaaaaataaattcttttttcataaaaaggggcccttttttaat

SEQ ID NO: 13587 - DNA, 303 bp, Oryza sativa
  Clone ID: uC-osflcyp138c09a1
ggacgaaggaattgttctcaagaatcttaagatggtaaatacacacaagagagaggtacggtatacaagacttagtttttcttaagtacaacagatcttccattcctccatgatcctatcagcttttacacccaaaccacacaaatcaccatgcacgagcccttttcctccactgccaaatcaactcacctggggcttgagtagccaagcatccatgtggtgatcagtagccgatgtcagcgtcgtcgacgacgaggttgccggtgatgagctcacggtaggcggcgacgggccagatgaacc

SEQ ID NO: 13588 - DNA, 310 bp, Oryza sativa
  Clone ID: uC-osflcyp138d05a1
aaaaaaaaaattcctgccctagggccttctgcataaatgcgcatgtcctctatcatgacaatgcattggctcttccgtgatcaccatcaacaagtagacctatacgcacaaacatgcatgctcctcgccctatcgccctctaaatttgcatcgccaccgcttccaaaaatgcttttaattaatacaacttttttatatgtagaacctataggatcacattgaccagaacccggccggccacagatcaagatttcttgagtaagtacgtatgtgtagaagaaaaaataagctcacacaactacaaaataag

SEQ ID NO: 13589 - DNA, 308 bp, Oryza sativa
  Clone ID: uC-osflcyp138e01a1
ggtggccaagaggaaactcttctaatatatgaaaacttcttacagtcaatattctgttcggtagataaggaggatttgcgaagcacggcaaaattcagacaggtccattccatggcgatgcatggaatccctagtgtgattcaaccaatttgaatttagcataaacactacaacaacataggtatttagggagttaaaagtaccctgtctgaaattagatgcaccaggtgtctgatcagtatcttctgatgtcctttggaggcttgaaattgataggatgggtctctggagtggctgacaaatcttcc

SEQ ID NO: 13590 - DNA, 270 bp, Oryza sativa
  Clone ID: uC-osflcyp138e09a1
aaccaaacacaaagcccatatatgcaaccagcataacaaaattacaactgcactggacggcttatattcttcacaagcaaaaaagtagactcaggtccatatcatcagcatcgttacaacttacaagtaggtagattggaaaacaaaatgcaacttattatcccaactagcattaacagagggggggggtcctgatgaacaccgtccacgttttattctcagcatagacaaagcataccggtatttccggcttgggggccatggaatacc

SEQ ID NO: 13591 - DNA, 239 bp, Oryza sativa
  Clone ID: uC-osflcyp138f05a1
ctcaccttccatttttttttttatttaaagcaacccaaattgaggggaccatccacggacaaaaaacaccccaccctggagggtgggaaaaagggtcttcacacgacggaaaaccccgggacaccaaaaacccccgggctggaaaaaaaaatgcacccccccgcatagtaaaggaaaactgcccccggagggccccaccaaaaaataccccaacttccctcgggaaaccccccccaacc

SEQ ID NO: 13592 - DNA, 231 bp, Oryza sativa
  Clone ID: uC-osflcyp138g01a1
atatcatgcgatttcttgatggcatgtacgaccaacgtgaagaaatgcactcgggtcgccatactttccaagccccctaaaccatggaagcacaatttgcacaatgctgtagccgttcatggctcgaacaccatgtattcggccttcctcttgatcgattcgaagaggacagactacaggtagcgctcaccgaagctcgggaagaccacaactacgagctgttcttttgtt

SEQ ID NO: 13593 - DNA, 283 bp, Oryza sativa
  Clone ID: uC-osflcyp138g09a1
cattccgatagatagcaacaagcagttcaaacaccataaccaaagcgaactcaattcatggtaacatcacggacgaagaacacctaacactggatggatggatagagggcttctcgactcgagagagccactggacacgataacgactcgactcgatgataagatgattctgacacggatagctaaggataactggccacgatgggccccaccaatcagttcctccagttcccgccggagtcgccgccgaagccgccgccacggctgccaccgtagccgccgc

SEQ ID NO: 13594 - DNA, 231 bp, Oryza sativa
  Clone ID: uC-osflcyp138h05a1
ggggcagggggaaaccaattccaaaacggttaaaaaacaaaacatttgcctttttaaaacaggcaaaccaagggattcccttttatgggggaaaaaaaattccgggaaaaaagaagtcccgctccccctgggggaacgggaaaaaaaaaattttttttacccaccccaaattccaaaacggtgggtggggtttttttgggaaacgggaaaagggttcccccgggggctttg

SEQ ID NO: 13595 - DNA, 215 bp, Oryza sativa
  Clone ID: uC-osflcyp139a02a1
agcaaagcaaaccatgcgaccatgcttgcaaaacaattggagcacaaatttacatgttactcccacaccgtacacccatgcataataatacatcgtatatactgtacgtgcatacatacccgctttcgatcacatcgcaccattggatcgtacaaagcttgcgttcataacatacgttacacatcaatataccgcatacagcaacgtacataaca

SEQ ID NO: 13596 - DNA, 172 bp, Oryza sativa
  Clone ID: uC-osflcyp139a10a1
aacgacaatgcatcaatccatggtcctcacatatatatcggcagtggtagagcttgatctgctgatcagttacacgaatcagagcacaaacgtgcttgttatttatataatataatatatactctatatatcatactatatgtatatactatactatatactatactatact

SEQ ID NO: 13597 - DNA, 92 bp, Oryza sativa
  Clone ID: uC-osflcyp139b06a1
gtggctaagaaaaccacacgatttcacgattgatttatttcactgagaacagtacgggctcataacattatacaatattattcggtgttaca

SEQ ID NO: 13598 - DNA, 101 bp, Oryza sativa
  Clone ID: uC-osflcyp139c02a1
aaacagtgtcatgcacagtttcagtatttaaggtttcatatacaacatggattcactggttgcacaaaataaaaggaaggttttataacaaaaatttttac

SEQ ID NO: 13599 - DNA, 397 bp, Oryza sativa
  Clone ID: uC-osflcyp139c10a1
gaacaaaattatatatattacttcatgaaatactgtgtacacgagctgaacgaatacatcaatctatcagcttacattatatatatccaacaacaacagacacaattgcaaaagaaaaaaaaaagagaaaaagaaaaacatttatcaattaatgcatataacctccgcggcgagagcgcaaccggtccagaccgaactgacgcgctcgcgagctcagcagaagaggtacccaacggcggcggcggcgagcgtgccgagggcgacggccggggcggcgttcgtcgcggcggcgccggcggaagctccggacgggccaggagccggggcctcggtcgcggtgggcacgccgaccaaggacgaccccacgacggcggtggtggcagccgcggcgaggatc

SEQ ID NO: 13600 - DNA, 451 bp, Oryza sativa
  Clone ID: uC-osflcyp139c10b1
ataagccctcgctagctttctcgttaattctccgttgccagtttctccagtcgattcatagctagcgatcgaaatggcggccaccctcaagctcaggatcctcgccgcggctgccaccgccgccgtcgtggcgtcgtccttggtcggcgtggccaccgcgaccgaggccccggctcctggcccgtccggagcttccgccggcgccgccgcgacgaacgccgccccggccgtcgccctcggcacgctcgccgccgccgccgttgggtacctcttctgctgagctcgcgagcgcgtcagttcggtctggaccggttgcgctctcgccgcggaggttatatgcattaattgataaatgtttttctttttctcttttttttttcttttgcaattgtgtctgttgttgctggatatatataatgtaagctgatagattgatgtattcgttcagctc

SEQ ID NO: 13601 - DNA, 186 bp, Oryza sativa
  Clone ID: uC-osflcyp139e02a1
gtacaggggcgacatccaaacagatgagaaaaatcaaaggggtgaaaactcagtgatttactacggtccaccgaacaacaggcttaacaactggcaccatatgacgccacggcctttactgatttagcataccagcatcggcggaaggactcatgagaaaagtatccaatgtttcaaaactgaaag

SEQ ID NO: 13602 - DNA, 200 bp, Oryza sativa
  unsure (1)..(200): unsure at all n locations
  Clone ID: uC-osflcyp139f06b1
catggccatacatcgcgatcgatctgcaggngcagcgcggtgggcgtgcatggcgactaaagctggggtgatcgccacgctcctggccctgaacctgctctgcttcaccttctccgacgcgtgcggctgccagtgcggctcatgccctagtcccggcggaggccgcggtggcggtggcggtggccgtagcagcggcggag

SEQ ID NO: 13603 - DNA, 168 bp, Oryza sativa
  Clone ID: uC-osflcyp139g02a1
gttatatatatcttgatcatatagcagcagcagcagcagtaacaacaacactgatgatttctctcacacccctaaaattttcagacaagagaagaagcagaaacctagatttttttttcttgagctagttataggagcctgcattttggagatcggatagtgagaatg

SEQ ID NO: 13604 - DNA, 382 bp, Oryza sativa
  Clone ID: uC-osflcyp139g02b1
gactacggtaatggagggggaggaggagggggaggaggcggttagcattgcgaaggaggtggttgtttacgtggagggaggggggctcgggtttcattaattgtggactctagaatccctggaggacgcccttcccataaagcaagccttggttcggatttactgctttgcttaaacattctatgtgattttcgtatgatttgttttttttaggctaccaaaaaatatgtttcgaaatggttaactaccaccattaaggtgctgaaatatcttagacgggtgaaaaagaaatggtttactactattcaaaaaaagaccaaatcattagaacagatcttacatgttacgctagatgaattatttttacataaaacaaagcaat

SEQ ID NO: 13605 - DNA, 452 bp, Oryza sativa
  Clone ID: uC-osflcyp139h06a1
cgattgattcgccctttctttttttttttttttagatcgaacaatgtcctctccgcttgtcgaaatgcaaataacatcatcgggggatatgatcatcagttcacgagaacagaggaagaaacaaaagctaaaaattaaaaccatcaacagcccgatcgagtttgcattactcgatacacacattgcagccttccttccctctctccatgtatcgatatatcaacccggccacgcacaaaacatttgttcattccctactcgagctgcgcgtaccacaccccttggatcttgacatccttgggcaccttggcgccgaggtctgtgtccgacggctgcacgctctcgaagacgccaatcacctcgccagtctctggcttgctcttggggacgctcaacgtgatgttgcccgtcgacgacgaggcggtcttgacgttctccttagcgagctcctc

SEQ ID NO: 13606 - DNA, 398 bp, Oryza sativa
  Clone ID: uC-osflcyp140a02a1
aaaagcaggaaaaggtatgggatcacatatatcatggcaaagttttgggcaacaacccaaattacattccaatggcactttgaggtaaaataacaaactatcaactttagagctgaaactttattccatatggatgatcagacttaaacattgtctaggtgatcatgcggaacccttgagtttcttcgcaattccagcaaagtacttcccttggtggaaggtttgttgcaattcaagctcagtggcaacccttgatccatcaccagcgaatgtgccagacccgtacgggctttcgcccttcacttgcttcattttaaaacatcccagcaccaaaggggtaccctcctggaacaaagatcatgccatggagcacttagctgagtaatttgctgtcaacg

SEQ ID NO: 13607 - DNA, 402 bp, Oryza sativa
  Clone ID: uC-osflcyp140a10a1
aatctaacatacgcaaactgatattatcacaatgttagccgatgacaatggaaagagtaatctaggtacaagcggatcattgacggtggagacaagacattggttgtaccacaacacccaccaggggcgccaacaaggagcgctttccgttataggacgagagaaaaagtaaaacatcacgatgggaagggaaactgaataattttagtagaccatgatgatgatggataggctccttaggacgcccgccgcccttagcgtcttgctgctcccattttggccactggaaggctcactcgtcatcgtctacatcctttttgttgcccttgtcggcatcctcattattgacctcggacttggacttgtcagattccttcttgacgtcctttcttttccttcttg

SEQ ID NO: 13608 - DNA, 127 bp, Oryza sativa
  Clone ID: uC-osflcyp140b06a1
gggccaaaacgcaactgtttggcttttattaaattcttctcaaaatacacatcacataaatcatatattccctttcttttcttggcaacaattcaattaactccgcaacataagcagaggccctaaa

SEQ ID NO: 13609 - DNA, 300 bp, Oryza sativa
  Clone ID: uC-osflcyp140c12a1
gacatgtggtgctagaagtttctcaccaagtacatagcatacgcttaatatgtaggtacttacaaaacataattagacaattgaagtccaagcgcccccaagtaagttatgttacacgaagaaacgccaaacataagcaaatttacagcgaaaattgcatacaccagcagttccatagtaagccggattatctacacaataggtgcacacaaactttttcatatgcgcagtgagctcatacggagctccccgctcgcatggacctctttgaccctcttatcgtactcatctttctcctct

SEQ ID NO: 13610 - DNA, 520 bp, Oryza sativa
  Clone ID: uC-osflcyp140d04b1
caattattttatcaagtctacttctgtcccgcaactcccgcagcagaaggagttgctttctgccctgcgtccataccattccagactagtgggagagagttttctagcaagaaagaggcccgtttatgaatgtacagatgcccaggtggaagctgccaaaggtttcttggcagtgcttagatcctaccttgattcgctgtgttccaacttgagatctcatacgattactaatgtgcaatccaacaatgacaaggtttccttgcttttaagagagagcttcatcggttctttcccgacccgtgagaggccctttatgaagctctttgtggacacgcaattgttctcagtacatacagacctagttctcttcttttatcagaaggactaagtctcttttaagaatttaaccatcttcagtgagctgatttgccaagtgttagatcccgatctcaactgtacatattgatcttgaaaagatgagctgccttttattacattggcagcttcaacgtgggtacca

SEQ ID NO: 13611 - DNA, 167 bp, Oryza sativa
  Clone ID: uC-osflcyp140d08a1
agcggggaccctagtagtgtgggcgccctttttttttttttatagatgtaccaccaacagctttcaccgatgaatagtaggacattgacaaaacatgcagacatgcaactgcatctggaagacgcgtatatcccattgtactaagcagcggttcaagaccaaaaaca

SEQ ID NO: 13612 - DNA, 565 bp, Oryza sativa
  unsure (1)..(565): unsure at all n locations
  Clone ID: uC-osflcyp140d12b1
aatgagctggagcccgggagaagtcgagaagatcatatacccacaccttactcgcgccgcgcgcgccgccgtcgacggcagcctcctcctcctcttcttcccccgtgccggcgttcgcgttgcctcctcgatcgcgccgcgcgcactccaggcgggcgagctggtttggagagggggcgagacgacctgactccgccctcgattggaatcgaatccaagattgatggcgatggagggaccaatcctgtgtcgtgcagtgatgcaagcgaagctacctgtcacgatgatcagcaattcactgaccaagtctgggcagcttggaactgcattcctgggttctgtgtgtaaatacaggaatatcactagactcatttccccaatctatcagccggcacaaaagaactttgctcctgtttgcggtagcttcagctcgtcgtccgatggtaatggatatatggctggaaactttagtgagagtgatgaagattatgttaattctactgtgctagaagcagttgaggtgagaagtggngcagagggatatgtaatcaagatgcgagatggg

SEQ ID NO: 13613 - DNA, 428 bp, Oryza sativa
  Clone ID: uC-osflcyp140f08a1
gacctactgggataaaacgatttctatagcattagcaagctcattgctacaaattattaacagtaagatctcaaaatatagaacataagggagtaaacaaaactgaacaaccaaacaactacagtactgtacatgcctggtatcctacatgaggcgactgatctaggagaatgctgataagcatagatactgggcaagggaagggagcctgggcagtcagactcgcgggaagcgagaaggtcctctcctccgaaggaactcaggaatctcaatcatgctgccttctgcagaggatgggcgtcgaccattgtctccttgcgtttgttggccaccctttgtggtgcgaccttctggttcatcttgacgtttgaagccagtggcaatcaaggttatgctcacttggccattgagtgatgggtctatgacag

SEQ ID NO: 13614 - DNA, 356 bp, Oryza sativa
  Clone ID: uC-osflcyp140g04a1
gctacagcaaagttacttttttttaccagtgtaagtcacaactgaacacagaagtccgaataccagcaattgcaattttaacgtaaaggaggcacgaggataggtcacaagaaaggcaaaggataaaagttacaagcgttgtatgaaactatgatcactattttattttccatccggcaacataacacttacgatccacaggatgcagattttttggaaagatgggggcctaaaattaccctttggattggtcgaacttggaacgggcgatacctacgttttggaataaggccctcccaagggtttggttaaaaccccctgcctttgaaaagaaaaacctgttgacatttaaggtt

SEQ ID NO: 13615 - DNA, 158 bp, Oryza sativa
  Clone ID: uC-osflcyp140g12a1
tatataagagatatgtcgcggcatgtgcacgctcacgtgagtggggaccctatatttggggcgctttttttttttttttttttttttttggagataatggtattatggatacatttttttaccagtttttgagtttatttacacatgagatgcaccaa

SEQ ID NO: 13616 - DNA, 433 bp, Oryza sativa
  Clone ID: uC-osflcyp140h08a1
aaaggcataaactggggtgttgactagatacgatagtagtacggtaatccatgtccacataaacggtacaactacaaactcatagctgacttacgttgttcctacacgcagatcttaacagaatcccacacataaaacacgtaatttcaagtattgggggtgcttccctgatggagcagcccatttttttcccaacccttttattttttgaaagggaagcatatgttaagtgagcttaggaacttcaaaacatcgagaacactttaataaaccacttcacatttgacctcgacaatctcaagatattttaacattgcagttgacacccccgatggatggcggcttcctttcatttccactttatgtttaggtcccatcaaaaaaagttgaagagttgagctttttttaaaacaggtgaatgctgaaaaatgta

SEQ ID NO: 13617 - DNA, 370 bp, Oryza sativa
  Clone ID: uC-osflcyp140h12b1
tatgttgacgcctagccagaagaagaggaggagcaaggggaaggacggagcggtggcgccggtgggactgaggcttaatcgcctgggacgggcttatgctcgcgaggccgacgggaagccggagtaccttgcggtggagcacgacgatgaccaggaggtgcccgcgcactccatcgaccagctcggcggctgcggaggacaagcccaccttgagcttcacaacgaacgcgggaagtgcttctccaccgtggagtcgcgctacggaccccagagcgtaggcggaaaacaggaggagcactacaccaggagaagacagaaagactctgtctaaacgcgggtgatctagctggtatagcctaaaggcactgcc

SEQ ID NO: 13618 - DNA, 92 bp, Oryza sativa
  Clone ID: uC-osflcyp141a04a1
gggaaaaaaaaaaaccgggggggaaaaaaaaggcccaaagaatcagcaaaagttcggggaaagaacaggcagataaaaaagaacaaccgaac

SEQ ID NO: 13619 - DNA, 107 bp, Oryza sativa
  Clone ID: uC-osflcyp141b08a1
atgttaagtaccaacagttgagaaataacatatggaacattctagtaagtcgtaacaaccaataatttagcaaatcctggaataacttcttgcatgggaatttaaca

SEQ ID NO: 13620 - DNA, 61 bp, Oryza sativa
  Clone ID: uC-osflcyp141c08b1
aaaaaaaaaaaaaaaaaaaggggggatttataaaaggaattttgcccgttttctcccccac

SEQ ID NO: 13621 - DNA, 526 bp, Oryza sativa
  Clone ID: uC-osflcyp141d04b1
ccctagcggcggcaatgtcggagagggttgtttttgatgcgactcgccgagctctcccaccccaaccttcgagtacaagtgaagaagaagaatcgcaggatggctgagtgcactgaagctcaggcagagattttgggtagtctggaaaaaaaagctacatcagagcgagatggaatgcttatttgacgaactcatgcgtgcgcacgacttgtttctagggctataaacctcccacagaggaaggtcttggcccctggctcttatatgtattaataatgtcataatgtatgtgaggctgtgatccgttctaatttaccatggtatgttttgcaactttgcaaatgatgtagcagtagcagtaataacctatagcattcttgtcattcagtgtactgggctcttaaaaagcctcaacttatgcttcaagctggcttataaaggtttgacacttttgagttaggatgtggaaggtatgcatcctgtcttcccactgatccgcttctcgatcagcaggtgcaaaaacaag

SEQ ID NO: 13622 - DNA, 107 bp, Oryza sativa
  Clone ID: uC-osflcyp141e04a1
gatgcaccgacgaagctggaccttagattttcgccttttttttttttgaaaagggcaacagaacatattatattcttctaaactacttcatgaggtaagaggaacac

SEQ ID NO: 13623 - DNA, 71 bp, Oryza sativa
  Clone ID: uC-osflcyp141e12a1
ttttttttttttttttttttttttttttttttttttttttatttttttattttattatttatatttataat

SEQ ID NO: 13624 - DNA, 56 bp, Oryza sativa
  Clone ID: uC-osflcyp141g04a1
aaaaaaaaaaaaggaaacccgctcccaaaaatagagggggggagaaaaaagttttt

SEQ ID NO: 13625 - DNA, 289 bp, Oryza sativa
  Clone ID: uC-osflcyp141g12a1
agaccgagcctcaatattacagcgtttttataccgaaggtaaagcatggtgggaaagtcgactgacataaccaagacgggccgattccaattacacttagccatctggggggaaactgaaagggacaaacgcccataactattacaatcacagcagataaactcttacgccagataacaagtgaatgatggtgacattaccctacaggacatataattgtagagagaggtaaaaacggaaacagtaccaggcccggaaggggccggacaagaaataagcactaggaaga

SEQ ID NO: 13626 - DNA, 89 bp, Oryza sativa
  Clone ID: uC-osflcyp141h08a1
tttttattgtttttttttctatttttccatttctcccaggctcccacccaacaatttatcaatctaaaaccatctctttatctctacat

SEQ ID NO: 13627 - DNA, 462 bp, Oryza sativa
  Clone ID: uC-osflcyp141h12b1
tgtttggtcgctctcgatttcgaggtgccttttatccaccgttcgagaaatgtcaagtcgccgccgagaagcgaagaggagatggcccgtacgaagcagaccgcccgcaagtccaccggcggcaaggccccgaggaagcagctcgccaccaaggcggcgaggaagtctgctccgaccaccggcggcgtgaagaagccccaccgctacaggccggggacggtggcgctccgcgagatccgcaagtaccagaagagtacggagctcctgatccgcaagctccccttccagcgcctcgtccgcgagatcgcgcaggacttcaagaccgacctccgcttccagagccatgcggtgctcgccctccaggaggccgccgaggcctaccttgtcgggcttttcgaggacaccaacctctgcgccatccacgccatgcgcgttaccatcatgcccaaggacatccagctc

SEQ ID NO: 13628 - DNA, 418 bp, Oryza sativa
  Clone ID: uC-osflcyp142a04b1
atcctccccattccactgcatccgggtcggcgtcctcctcctgctcctcctcctcgcagaatgcaacgggcaattcaagctatcgggtcacatggcagtctcctcaagtctgctgttctgcgacacatcagtgctccaaaaccatctattttacctgctgtatattcacgctccatgtcagtttcatctgctcaaatagaggagagtggatttgagactgccactgtggcagatattttgaagtctaaggggaagagtgctgatggatcttggctctggtgcactactgatgactctgtctatgatgctgtcaaatctatgacgcaacacaatgttggagctctggtgggtggtaaacctggacaggataaaacaattgctggtattggtcctgagagagaataccttaagaaaaata

SEQ ID NO: 13629 - DNA, 333 bp, Oryza sativa
  Clone ID: uC-osflcyp142a12b1
catgaaatccaaggacagagaagaaatcgcagagattgagaagatgcatgaacttattaagacctataacttgtttgggcagttccgttggatctcggctcagacgaacagggctcgcaatggtgagctctatcgctacatagctgatactcatggtgccttcgtgcagccagctttctacgaagcattcggtctcactgttgtggaggccatgacatgtggactccctacttttgcaacagtccatggtggacctgccgagattatagagcacgggatctcagggttccacatagattcttatcatccggatcaagctgcaaatctgatagc

SEQ ID NO: 13630 - DNA, 500 bp, Oryza sativa
  Clone ID: uC-osflcyp142c12b1
tgttcggctttgacttgcgcgatggcgcccgagtgccctcgatcgagtcgctcaaggctatgaatcccaccgagtcatccgtggaggtggtcctcatagatagggtggtcgactatgatctgaggcaactgataagcaccgcgattgacgtttctcggagccgcgctgactcaagggaaatcaccactcgccttgctggcattgtgtcctcaaagatggggggttccgtagcgtctaccgaagaacatgaactgtgtccccggtggagagactctgccgggttcctgaagattagttcaggttctgttgtgcttccaattgggaagttatcaatcggtctttgccggcaccgatcgttgctgtttaagaccttagcagacactatcagtcttccatgtcgagttgtgaggggatgcaagtactgcaaaattgctggtgctgcttcatgcctggtgcacttttgtaatgacagggaatatctgattgttttgatagggaac

SEQ ID NO: 13631 - DNA, 435 bp, Oryza sativa
  Clone ID: uC-osflcyp142d08b1
tgattgggtactacctcttcatctacttccagcccaccgacgtcaaggtacgattcgccacccttcttttcgttggatgcctcgttgtggtttggcatcggggtgaattagtggagctggaagcgagaaacgggatggttttcgaggcttctctgtacgagatgatacagtgatatgcattcctgaaaactcatcgtttagttctttcctttggtttgggcttgctgtatagggtagctggagttagcttgctttcatcgtataacagtaggattgtgttctaatgggatccttcgaattagccctgcatctctactgtggatgtgaagaataatcatctgattggatgtgatttatgagaagacgaatttgcaatttacgaatttttcggtatgcatgaggtcttttgaaatggaggtggggggtttgttttcc

SEQ ID NO: 13632 - DNA, 470 bp, Oryza sativa
  Clone ID: uC-osflcyp142e12b1
cgacaagtgaacttttggattatcacggaaaaaaaatactaaggacatcatcattataaatatcctacttggaaagttgaactcatatttttgagaataatttaacataacatcagcttggaagacacataaaaaggacgggaggactcaaaatcaggaagctaacgcgcgctctgtaaatgacaaccatcagcttccgccttaacgcataacactttagcattcttgttcaaacgtgcagacatgctccccaacgccatatggaatcaaaagcctcgctgtggtcgctcagctggcacattcactcgaagtgggcggccatccaattcctgtccatcaagggcagaaatagcatcatcgagctcctccttggaggccatggaaacaaaaccaaatccccgagaacgcccagattctctatcgtagacaaccgaagcgttaaccaccttttcatgctcgctgaacaattg

SEQ ID NO: 13633 - DNA, 375 bp, Oryza sativa
  Clone ID: uC-osflcyp142f08b1
cctaaggctactcgcctagcgcccgccacctaggccgcggcctcatcccccccacctcttctgctcctctccccaataaaattccccgcacgaatcgatccccccctcggatccggatcgcctcgcccaccccctctccgccgctcgtcgatcgcgattttttttttcttcgccggatttttttttctcccgatcggtggggagggctctctctctctctctcttcaccctagggttagggggagcgccgccgcatttcggtccgccgccgccgccggagtcgaggagctagggttttcgtcggtcgggggggaagaggggtgaagtttaatttttatgtcacgaatgctcgtttttaagaaactcactaacccc

SEQ ID NO: 13634 - DNA, 530 bp, Oryza sativa
  Clone ID: uC-osflcyp142h08b1
tcggtttactgtaaggggcattgacagttcttggagtgatggagctcctagccccggaatcaatgcgcaaaccgatgaaagcaatgccaatggcaggaggccatccctcgagaggaactattctgtgatagaaccatcggatgcgaacctcgctgatgaagttgagggagagagctctcctgagaacctgaagcggcttcttgagctcaacaagaagtcgatgagtgctctctacaaagagcttgaggaagaacgtagcgcttcggcgatcgcggctagccaagcaatggccatgatcaataagttgcatgaggaaaaggctgcaatgcagatggaggcactgcaatacctgaggatgatggaagagcaggccgatcatgaccacgaagcgattcagaatcttcacgacttgcttacggagagggagaaagaattacttgacatggatgctgagcttgagacctttaggaggctagtccaagatgaacaattcaatggcgggaaacatgatatcggtggcatattgaatg

SEQ ID NO: 13635 - DNA, 77 bp, Oryza sativa
  Clone ID: uC-osflcyp143c06b1
ccggggggcccggcctgactttccgggtcgacgacccacgcgttctgtgttttagatcgcggctatcgcgactaggg

SEQ ID NO: 13636 - DNA, 457 bp, Oryza sativa
  Clone ID: uC-osflcyp143d10b1
tttggaaggagaagacgaaggggaaaggaggagaggagcgaaaccctagggccaggcaggcatctccctcccgggatctcgacgcccagcaaccggaagccatcggcatggctatggcgctgcgctctctcgccgggaagctcaggccgccggtggcagccaccctccgccgggcgccggcgtcgagctccttccaccccgaggagaagctgagcagcatgacatcttctaagactaaaactcctgttgatgacaactgttttgaattgcttggggacaagtattctgaagagcggtctcggatttttgcccaattggttaaggaagatgcacggcgcacggaggagcagatcactgcatacaagatgctgaagagggcaatggttgcttctagcttgggcgcagcgattggaatttttgcccttctcatcagatataacgagtagtatatctgata

SEQ ID NO: 13637 - DNA, 213 bp, Oryza sativa
  Clone ID: uC-osflcyp143f02b1
gtttcattctaaaggaacaggacttaccattgtcggggctggtggccgcgtgttgtaattgatgcacaacaaacctgctcctaagaaaaatgcttagcgaccaccattatatatagccatgccggacacgacgacacggggttcacagaagctaggtatatatcgtatgcatgtcggacgctcactacacaaacctgtacaagaacgtggcta

SEQ ID NO: 13638 - DNA, 410 bp, Oryza sativa
  Clone ID: uC-osflcyp144a06b1
aaattctatttttaaagcttcttgacagatccaacgttccatcaacagtagctgaaagcactgatggggacttggacaatgatatgcttggcactgtaaagtcaatagattggaacgatgagctgaatgatgaccctggtgccaccgaggacatcccaaatattgataatgatggttgcgagcaggcatctgaagcaaagcaggatgcagctaatcgtgttgaagaaaatgaatgggataaactcttacgtgtcagatgggagcagtatcaaactgaggaggaagcatctcttggtcgaggtaagcgtttaaggaagggctgttttttaccgggaaaccattgcaaccatttcttatgaagcctttagcgaggactttgatgaggaggatgaaccaaagcgagaatacac

SEQ ID NO: 13639 - DNA, 410 bp, Oryza sativa
  Clone ID: uC-osflcyp144b02b1
gctgggccatgctcgccaccctcggcgccctctccgtcgagtggctcaccggcgtcacctggcaagacgccggcaaggtggagctggtggatgggtcgtcgtacctggggcagccgctgccgttctcgatctcgacgctgatctggatcgaggtgctcgtcatcggctacatcgagttccagcgcaacgcggagctggacccggagaagaggctgtacccgggggggtcctacttcgacccgctcgggttggcgtcggacccggagaagaaggagcggctgcagctggcggagatcaagcacgcccgcctcgccatggtcgccttcctcggcttcgccgtgcaggccgccgccaccggcaaggggcccctcaacaactgggccacccaccttagcgacccgctccacacc

SEQ ID NO: 13640 - DNA, 204 bp, Oryza sativa
  Clone ID: uC-osflcyp144c06b1
gcgttctcttccgtcagacttctggccattcgactccccatttcaccgtaccctaattccttactccttattatattcacgctcataagctctgaaaaacacctgaactactgcatctccaggacgtggaattatggcgatggacaagttgaacgccactagctgaaatctagtggaccatgcatgcttaataacctacctact

SEQ ID NO: 13641 - DNA, 459 bp, Oryza sativa
  Clone ID: uC-osflcyp144g06b1
gcatatacaagagcaaacttagtgcatcgatcttgcacgacagaaacttgtgatctgcagccccaactggatctatcatccacaatacagactgtccaacttgaaggaatacgctctgaagacatgaatcagataggtgttcagtccaactctgcactaagttctgaacagctcacccagcctgttccagtggcaccattagtgtttaattatcaaagatttagtgacgaacctctcaaaaatgagctggaaagattaaaacataccagcaatgttcttagtaaagttcatgaacaaaagagaaaacaactcctagtggagtataaccaagaaatggagaagctaaaacagaaatatgactcattacttcaaaaggaagattctttttacgctcagaggaggcagaactcgatactatctccggaaagtctttataaaccaatcactggctgagaattt

SEQ ID NO: 13642 - DNA, 470 bp, Oryza sativa
  unsure (1)..(470): unsure at all n locations
  Clone ID: uC-osflcyp144h10b1
gtgctcagtgaccctcgagtcacccacgcgcacggcggctcaggggcgaaccctagccgccgccgccgccacccaccctcctcctctctttgcctcgccaccgccggagttcgccgccggtcaaccgggcggggagccgagatggcggcggcggggccataccgcggcgacgcgccgtctccggcgcgagggaggcggggcagagcgcggcgaggaaggcggggcagagccgggcggagtgtggcgcgccggtgggcgagggaggccggggatccggcaccgcggtggccggatctggccgcacggcgcagggctgcggcggcagtggcgcgagggctgcgcggcggtggacggngtcggtggcgcgagggccgcgcggcggcggaggaggcggcgttgcgagggccacgctgcggcacgagggccacgcggcaatcggagcggcgtcagcgccagggccacgccgcggc

SEQ ID NO: 13643 - DNA, 102 bp, Oryza sativa
  unsure (1)..(102): unsure at all n locations
  Clone ID: uC-osflcyp149b05a1
tttaatttggggggggtgatagattattggggggttttcttnatatgtaaatacaaaaagagaaataatgtttatggatttttgagggaacacaccccgcgc

SEQ ID NO: 13644 - DNA, 434 bp, Oryza sativa
  Clone ID: uC-osflcyp149c01a1
tgtgttttcgccctttttttttttttttgtgagaataatcttgatggatcacatggtttctcattgatatatatggtagtcatacataaagatagatggtagccattctagactaagtacaagacatggtgttacaaaattggactaccagagagtttatattcgagatacttacctgtgtgccctttaaaagatgaattaccaattttttcgaagattccccttaataccaaggtcctaaagcacttttctgaaaaattttggccttggaggatttaggttacctaccagtagggagtttgcccatggtttaaaacaataattgacgacccatttccttcttataggatataaggaccagcccgtgtaaactctggatccactaagcaagtgcaggatcagcccatagtactaccggctcttatgatcagggt

SEQ ID NO: 13645 - DNA, 92 bp, Oryza sativa
  Clone ID: uC-osflcyp149d05a1
aaaaaggaaggctttttaaaattacagaggaatatgcaaacccccaggtggggggtaaaaaaaataaccgggatcaggggagaaaaattaac

SEQ ID NO: 13646 - DNA, 421 bp, Oryza sativa
  unsure (1)..(421): unsure at all n locations
  Clone ID: uC-osflcyp149e09a1
gatcagatcagcacttgcacagtgatttacggatagacaaaattcaaagttgaccgcaaacataacttgatactgcaggcagtacatgcatttcacttccgaccaagagtggggaattgggattggtctttngatttctggaggctggttggtagctgtccagagcgattggctccttcaaccattatccncaccccttgannaaccgcccaccgattccccccgccggccctcttgccaccggaccaacgtgccgcccattagtaacccttctcttcctttcaagctggttttttagggaaactccgtttggatgcttcacaagaccttctttagcaacgcttcattcacgtttcaagcattttttcttttcttctttcaaaggcatccctttgtcaggatcccagttttgatgaaaaac

SEQ ID NO: 13647 - DNA, 152 bp, Oryza sativa
  Clone ID: uC-osflcyp149g01a1
aagcaaaccaccaccagggattacactcatgatgctgaaacaatgactgatcagctttgcttagataagaaaggctcggcatatacaaggattagataaaagcagggatcaacttactgggatcacctttatttaagccccttattgcaact

SEQ ID NO: 13648 - DNA, 79 bp, Oryza sativa
  Clone ID: uC-osflcyp149g09a1
aatattaatcttttatatttaaatttatttataatttactagttttaatgttatttcattaacatattttaatagcaaa

SEQ ID NO: 13649 - DNA, 402 bp, Oryza sativa
  Clone ID: uC-osflcyp149h05a1
aaactgacaaatctattagatggaaagagcagcaatattagaaagctaagagtctatagaatatttgttatacaaaaggatttgcatgaaacagctgcatggtggatactggacacaaatactgaaccataaagcctaacaaacacccttaacaggttagtttcttgtagggaaccacttccttaacgaggtagttcctcttaagggaacattatacgcttattggcccgtttcaagaattggttgagccatcttgaccgattctttgaccgttgaaaaaccgaggcacctttcggaagatacccaagtgtagacatgttaaattccggcctttgtttttctgaaaacctaaacaagggcaaattaagagtttttgggattcagaaaatttgggcagaaagt

SEQ ID NO: 13650 - DNA, 96 bp, Oryza sativa
  Clone ID: uC-osflcyp150h01a1
tttatattgggtttttgaacaaacagggtacattctttaatactgaattagagggcaaacgtatgagccaacgtatgtaaattataattatgcata

SEQ ID NO: 13651 - DNA, 53 bp, Oryza sativa
  Clone ID: uC-osflcyp151a06a1
gaaaattgggggggttcttaaatttttttttttttttttttccctttttttac

SEQ ID NO: 13652 - DNA, 456 bp, Oryza sativa
  Clone ID: uC-osflcyp151a10b1
ttgctgtacgcgtgggcggcggcggagggtggcggcggcggaggtggggcggtgtacgacccgagctacgtgccggactcggtgaagacgttcgtggcgcacatgtacaggcacgtcagggacaagaacgtgtacgagatccaccagatgtacgagggcgggttccagcggctctccgaccgcctcttccgcgacgcgccgtggccggcggcggaggccgtctcgccctactgcgacggcgaccacgtcttcctcctcctctaccgggagctctggtaccgccacgcctacgcgcgggcctcctcgtcgtcgtcgtcgtccgcgccgctcaccgccggccagcgcgccgagtcgtgggcgaactactgcgacctcttcagcgtcgtcctccacggcgttgtcaacatgcagctccccaaccagtggctctgggacatggtcgacgagttcgtctac

SEQ ID NO: 13653 - DNA, 393 bp, Oryza sativa
  Clone ID: uC-osflcyp151b02a1
atataaatgtagttatctgatgtttatatttacaaaggcctaagcccaacaaacagcaccgatcagtgataacactttggtgtctaaaatttaattgaaaaagaacttccacagtggccacgcgcacttacaagttacaaccttgaattgtcaatgacactatggtgtgtattgctgtctggcaatacacctgaatttgtcgtcagagaaactggaggttctcatctgaacttctggacaccaatggcgttggggcttcttatctggctgataatctgtgacgactcatcaaacttgcatgctctctcgtacacgccggcagccacaaggtaaagctcccttttgtcgatgctcgggtcatcgctaagctcaccgagcagtgccttcagcgcg

SEQ ID NO: 13654 - DNA, 423 bp, Oryza sativa
  unsure (1)..(423): unsure at all n locations
  Clone ID: uC-osflcyp151b09b1
cggacgcgtgggcggcgtttcacgtcgtatcctccttgggggcatcgtcttggagaaccttacccatgcaccatttgccgcttgtggactcctgtgtcagctcgatgcgctagatgcctaggtgcttggcgaggccttgtccttcttggttcctttcttgtattggtggcatccagcttattcgtctgtctctgtcgggtggagtcgaaactgctacgtcgttggggtgcgacgaagcttggcnnaaaaaaaaaaaaaaaaaaaaaaaaaaaaaaaataaaaaaaaaaaaaaaaaaaaaaataaaaaaaaaaaaatatataaaaatataataataatatcaaaaaaaaaacaaaaggggggggcctttttaaaggatccaagtttacctccccgggtttgcacaggtatactttttttttggg

SEQ ID NO: 13655 - DNA, 113 bp, Oryza sativa
  Clone ID: uC-osflcyp151b10a1
tttttggttttttaatttttttgcggttttaacttattacttttttttttttttttttttttttttttttgaaaattgggcatggaccccaagaaccccaaaaactcgggaaa

SEQ ID NO: 13656 - DNA, 466 bp, Oryza sativa
  Clone ID: uC-osflcyp151b12b1
tcggttctctgggaggagatgaggaggggagggctccgtccaagctttggtctgtacaccatggttgtcgaggcgaatgcacggtccgggaggttggatgttgccacacagttgtttggtgatatggagaagtccggcttcttccctacgccagcgacatacgcttgtctggttgagatgcatgcttctgcagggcaggtggatgctgctatgcggttgtaccactcgatggcaaatgctggacaacggccggggcttagcacatttacagcattgctgatgatgttggcgaataagaggatgctggatttggctgcaaaggtattgctggagatgaaggcatcagggttcccgatagaggtgaccgccagcgacctcctgatgatttacatcaaggaagggtcgacggagcttgcactccggtggcttcggttcatgggctccggtggcataaggaccaacaatt

SEQ ID NO: 13657 - DNA, 308 bp, Oryza sativa
  Clone ID: uC-osflcyp151d02a1
ggttaggaccaagacattgggacaacatgcaattcataaaacgtataggattacacgtacgcacagatcgtgtacatactgaagaaaattaagatagaacatgcacacagggagtcgtgcaacataaagtatacagctgatactagagagagagttggagccgcttgcattgtctgccgcagcctgttaattttaaattaactttgttcactatatgcctgtagccaagtaacgttgctttaattacttagctgatcaaactccgatttgagccttagcatgttaagcatcgtatcgtatcgatccaa

SEQ ID NO: 13658 - DNA, 109 bp, Oryza sativa
  Clone ID: uC-osflcyp151d02b1
tctattttatcgatcatccgacgatcaaatcagtgatcttgtatatggcggctttgaacggtaaggtggtggtggcggtgatggtggtggtgatggtataatcttttct

SEQ ID NO: 13659 - DNA, 320 bp, Oryza sativa
  Clone ID: uC-osflcyp151d10a1
gagattcaggggtcaatgtattatttgacctcaagatcatttccatctaatacatttgcataggcaatttacaatccagtaaattcacctgatgacaatccctcactttccttagtatacatgcctcggggaaaagcatataaattaaacaggtcgggactccgaaggaatacatttgcaatgaactcagcagcacctaataaacaagttgaagagagaattttatatcacaaccagaagatacgtccccgaagagagaaaagggctaactgagaacagcaaaccaagaaaattagacgagcagttgcagcccgagagcc

SEQ ID NO: 13660 - DNA, 95 bp, Oryza sativa
  Clone ID: uC-osflcyp151e06a1
gagtggttaacacggaagcgggacaacaaaacggaggagacgtcgggaagtttagcgcgggggagagcgctaaaacaaaggaaggcacaatctca

SEQ ID NO: 13661 - DNA, 447 bp, Oryza sativa
  Clone ID: uC-osflcyp151e07b1
tgatacatattcatggtgaggttttattacagtgggcggtcaatggcccatttcatggatctacgggctttcatcctgcgtgcacgtgttttaaaggcttataggcaggccttgcgcatgacttgccgagctcctgtgcatgcatgcgaggagttgaggcaaactgtaagagctgagattgtaaaaaatctgctgttgcgaccataaacataagattaagttcttgatcagtgaaggtctgcaacgattaaaaggccttgatgagatgcttgacatgaccggaaaaaggtgacctgagccttatgtcggatatgaggttcaattacacggaagctgggttttgcctgagcttcctgcaaaacattcatttggtttgtgacctcctacacctgatattttcagaacccataaggcatctagccccatggcctcgggccttctgtatta

SEQ ID NO: 13662 - DNA, 165 bp, Oryza sativa
  Clone ID: uC-osflcyp151f02a1
ttttcgggtttttttttttttttttttttttctttttttttttttttttttttttttttttttttggggggaacttaaaagtcttttttattaaaaaacccgggggggggcactttgctcactatattgtcccttcggggttttggctaagtcttaagatggggg

SEQ ID NO: 13663 - DNA, 431 bp, Oryza sativa
  Clone ID: uC-osflcyp151f10a1
gagattcaggtgtcaatgtattatttgacctcaagatcatttccatctaatacatttgcataggcaatttacaatccagtaaattcacctgatgacaatccctcactttccttagtatacatgcctcgtggaaaagcatataaattaaacaggtcgggactccgaaggaatacatttgcaatgaactcagcagcacctaataaacaagtagaagagagaattttatatcacaaccagaagatacgtccccgaagagagaaaagggctaactgagaacagcaaaccaagaaaattagacgagcagttgcagcccgagagcctcagttcagccgccttctcttgttccggtgtagtcccacaccatccacatccaaagaacctaaggcatcatttcttcctctcctcctcagggatcttgaagaccctgcatt

SEQ ID NO: 13664 - DNA, 195 bp, Oryza sativa
  Clone ID: uC-osflcyp151h02a1
cggggaattatttgacttattaaacggggcatttcagtttactacatggaggatcttaacatattttcccaaaagggggctacttttacaaggttacaatctaaactttttagggcccaggattcacacaacctaaactttacaggtgggattaaacaggctttccccctccccaggaaggcctttttatagcat

SEQ ID NO: 13665 - DNA, 491 bp, Oryza sativa
  Clone ID: uC-osflcyp151h04b1
ctttcttgccccttcctctggccacgtgcgagttcgagattccaagtcccggtggtcggatttctcaaccccggcactggcctcgcacaggctgcgatccgctcgccaacaaggttcatgaaatcaggcgatgactacctgccacaatgcgaagacagacggtcagccgcctacacaataggctcctacactgccaccatcactgaatgcacatctggtcctcccttattttcgttggcttgtgtagagaagaaaaggtggaattgtggaaggtaatcgcggggagttttggttcattttttgaagatttctctaattggtacgtactaattaaaccaattggagttttggtctcgttactcactgtaaaaacatgatggtaaaaaaacagtttaatcctattggtactctcttatcccattgaacatttttgtcgtggggcattgactgttttcaaaaaggaaaaacagtggatgactctttcaggaaat

SEQ ID NO: 13666 - DNA, 371 bp, Oryza sativa
  Clone ID: uC-osflcyp152b04a1
cattccgatagatagcaacaagcagttcaaacaccataaccaaagcgaactcaattcatggtaacatcacggacgaagaacacctaacactggatggatggatagagggcttctcgactcgagagagccactggacacgataacgactcgactcgatgataagatgattctgacacggatagctaaggataactggccacgatgggccccaccaatcagttcctccagttcccgccggagtcgccgccgtagccgccgccacggctgccaccgtagccgccgccgccgccgccacggtcgccgccgtagccgccgccgccaccgtagccgccctcacggcgcccgtagccgccgtcgccaccttcttcgta

SEQ ID NO: 13667 - DNA, 275 bp, Oryza sativa
  Clone ID: uC-osflcyp152b12a1
cccctaccttagcttggatccttttttgcggcccgccttttttttttttttggttttttagcgcaacagggcatcatttttaccacttggacactgtgtacaaatatttccggctctccatacgatctgacactttcacctaaaaatttctgagagttgatttgagattctttacaaggtctacagtggtacaagatccattatcaatctgtgctgacatggtgaggtttaggggtgaatactttctttggccactgctttgggtatcaacagga

SEQ ID NO: 13668 - DNA, 528 bp, Oryza sativa
  unsure (1)..(528): unsure at all n locations
  Clone ID: uC-osflcyp152c06b1
ccagcncaccnaccnagcggcaggattagtttagagcttgccttcttttctagccatcgcctngctgnccatcgccctctacatcatcggcgtcgncgcctccttcgccgacctctgcgccaaggagttcgccgagagagcccacgaccggccgccgctcgtcggaacagttttccggcagctcaagaacttcgacagaatgttcgatgaacatgtcaactatgcaaccgcgcatcgcaccagcaggattgtgtatcccggtcactgcgaggtctttacttctgatccggccgtcgttgagcatgtcctcaagaacagcttcagtaaatacagcaagggggacttcctcactacagccatgaaggatctctttggagatggaatttttgcaacagatggggatatgtggcgtcatcagaggaagctagcgagctacgaattctcaccaaagtgttacgtgacttcagcagtgacacaatcagaaggaatgctgcanaactggcagagaagatctcatgtgcagcagct

SEQ ID NO: 13669 - DNA, 72 bp, Oryza sativa
  Clone ID: uC-osflcyp152c08a1
ttttttggggtttttttttttttttgtgtttttttttatattgtttttttttttttttacttttactgattt

SEQ ID NO: 13670 - DNA, 238 bp, Oryza sativa
  Clone ID: uC-osflcyp152d04a1
actaattagacatatatacaagcttggtaaagagctaagggatataagcgggcctgaagaacaaaaaaagaagaagaaagagaaaaacaacaagaagaggggaaagaacgaaaaacgacgacagaagaaaaattcaggactagctagaaagaggaggcattgctgcatacgggtagagaaaaggataggatcggatcggaaccggggaggccagcaaaggggccggacggcccagggg

SEQ ID NO: 13671 - DNA, 356 bp, Oryza sativa
  Clone ID: uC-osflcyp152d12a1
ccagcaaagaaggtctactaacttaattatcaacagaggaacagcagggtcccacttactactccttaatacataacaggcattccggcagctaagatcttacaggagactatatagagtcatccactaataacttacacaacagaagggatagcaaactggggattctttgcctactatcttgctcactcctagcagttgatcccacatttttgggtatcagggcctgggacacggggggggaatggatcgatacgaacccacagcaaggagaagatcgatgcaagggggatggcccaaacaacaacaatggtcggggtacggttctgccgacccatgagacccttaaggaaggg

SEQ ID NO: 13672 - DNA, 238 bp, Oryza sativa
  Clone ID: uC-osflcyp152e08a1
gaaggcaataaagtaagcacaactagttaacatattaagaaacaaaggcttccaacctggaacaatcttaaaggccaacgggttcaggtttaccaccgaaagggtaactgtaaacacaggccaagattacctgctcatggaaccccaaatatggatattcaggatccagcctaatgataaaaggaaccgtgtcgcatacctagataaggggacattctccccaaggacagaagaaaag

SEQ ID NO: 13673 - DNA, 570 bp, Oryza sativa
  unsure (1)..(570): unsure at all n locations
  Clone ID: uC-osflcyp152f02b1
tttcgtcttactcgtccgggcaactgcgtcaacccctacaccttcgncacccgcgacgcctttgtctggtacgtcaagttccactggaagcccacctgcggcgtcagctgcttgatggacgacgaggccacgctcgtcggcggcaagaaccacagccacgccacccaggacctctacgactccatcgccgccggcaacttccccgagtggaagctgttcgtccaggtgatcgacccggaggaggaggagaggttcgacttcgacccgctggatgacaccaagacatggccggaggacgaggtgccgctccggcccgtggggcgcctcgttctcaaccgcaacgtcgacaacttcttcaacgagaacgagcagctggcgttcgggccggggctggtggtgccggggatctactactccgacgacaagatgctgcagtgcagggtgttcgcgtacgccgacacgcagcgctacaggctggggccaaactacctgatgctgncggtgaacgcgcccaagtgcgcccaccacaacaaccactacgacggcgccatgaacttcatgcaccgggac

SEQ ID NO: 13674 - DNA, 336 bp, Oryza sativa
  Clone ID: uC-osflcyp152f04a1
tttttgggttttttttttttttttggtttttttttttttttttttttttttttttttttttttttttttttttttctttctttctttttttttcttttgttctatcaccaccaaaaaccggggttaatataacacccccgggggggggccaaaaaaaaccccccggcccgggggggaaaaaaaaggggcgggccaccccgggggggggaaagaaaaaaaaggaaccccccccggggaaggggaatttcacccggggggcctttaaaaaaaaaaacacgcccaagggaaccggggaaaggggaaccccccggggggggacccccccgaggggggggg

SEQ ID NO: 13675 - DNA, 536 bp, Oryza sativa
  Clone ID: uC-osflcyp152f10b1
ttaagtagtgaacactctaagagcagagaccaaggctagtgatctttatttgcctccatttgtgatcgcggacgagagtggcaaatctgttgggcctgttgtagatggtgatgcagttgtgactttcaatttccgagcggatcgtatggttatgcttgccaaagcactagagtatgcagactttgacaaatttgatcgtgttcgtgtaccaaaaatccggtacgctgggatgcttcagtatgatggtgagttgaagcttccgagccattaccttgtctccccaccagagatagagagaacatctggtgaatacttggtaaagaatggcgtccgcaccttcgcttgcagtgagacagtgaagcttggccatgtcacatttttctggaacggaaaccgatctggatactttgatgaaactaaggaagagtacgctgaaattcctagtgatattggaatcacattcaatgctaaacccaacatgaaggcacttgaaattgcacagaaagccagggatgccattcttagtggaaagtttg

SEQ ID NO: 13676 - DNA, 327 bp, Oryza sativa
  Clone ID: uC-osflcyp152g08a1
cattccgatagatagcaacaagcagttcaaacaccataaccaaagcgaactcaattcatggtaacatcacggacgaagaacacctaacactggatggatggatagagggcttctcgactcgagagagccactggacacgataacgactcgactcgatgataagatgattctgacacggatagctaaggataactggccacgatgggccccaccaatcagttcctccagtttccgccggagtcgccgccgtagccgccgccacggttgccaccgtagccggcgccgccgacgccacgggcgtcgtcgtagccgccgccgacaccgtag

SEQ ID NO: 13677 - DNA, 503 bp, Oryza sativa
  unsure (1)..(503): unsure at all n locations
  Clone ID: uC-osflcyp152h02b1
cttatcgataccagcagcagctcagccgccgccgatggcgtgcacgattatggccccaacctcccgcgtcctcgccggcaagacccccttcctcggacatccccgtccctgcaatgcccccctccgagacatagccgccgccggcaccggccgnatcaccatgagcaaggagctgtggtacggccctgacagggtgaagaacctgaggccattctcggcgcagacgccgtcgtacctgaggggcgagttcccgggcgactactggtgggacacggcggggctctccgcggaccgcgaggcagccgcgaggaacagggccctggaggtgatccacggccggtgggcgatgctcggcgcgctgggctgcatcacgccggaggtgctcgagacgtgggcgcgcgtcgacttcaaggagcccgtgcggttcaaggccagcgcccagatcttctgcgacggcagactagactacctcggcaaccgcaacctggtgcacgcccagagca

SEQ ID NO: 13678 - DNA, 437 bp, Oryza sativa
  Clone ID: uC-osflcyp152h04a1
cgagtctcacggggcaagcatagccatctgaccacaaaaaatgttgagccactgcacacggtgcagtgtcagttgtagcattcacaacataccgagtttctttttaggaggtaaaactctacgagtctcacagcatagtaaaacgtagccagctattactagatacgagtagcattttttaagtcgcaaacaaaagggatacagtcccggcttaaggggtgtaaaatcagcttcactatcttcatgttcgccgcaacgggaaacagagcacaatcatctttgggtccaaaaatttacggcaaacctttgcgacgacgttgatttgtgaaccaatgacgagtttcctagatgacatactctgcttactgttgcgcgcactgaactttctgggcacctccaggcatcttattggcctcatcatacgcctcctgagcagt

SEQ ID NO: 13679 - DNA, 436 bp, Oryza sativa
  Clone ID: uC-osflcyp152h12a1
ggaaaagggagaatcttagcacggtagaactcatcatcgatcatcatggccattgcttcatcaacgccttccagccattatcccccaacaatggcttctcgaaccccttgatatcacgcgttgctcctgaaggagccgagggccttgatggcgccggcccggaggatgtactggtggtagaacgccgcgatggcggcgccgacgaacgggccgacccagaagatccaatggttgtgccacgccttctcgttgttgaagatgacggccgctccgatgctcctggccgggttgatgccggtgccggtgatcgggatcgtcgccaggtggaccatgaacacggcgaagccgattggcagcggcgccaagaccgggacatgtgagtcgcgggcgttgcgcttggggtcggtggcggagaagacggggtagaccagcacga

SEQ ID NO: 13680 - DNA, 487 bp, Oryza sativa
  Clone ID: uC-osflcyp153a08b1
atcacaccacaaatatggcttcttccaagatgacgctgtttttcgacctcctcctcctcgccgcggcctcgccggcggcgctgggcgccttcgacgtgaaccagatgctcggcgacaagtcccagtacgggtcgttcctgaagttgctgacgcagacgaaggtcgcggaggagacgaaccggctcaagtcggcgtcgctgctggtcctccaagacaaggccatgaagccgatcacgtcgctccccgccgacaagcagcggatggccatggacaaccacgtgctcctcaagtacttcgaccccatccagctgggcgagatgaaggaccgcaccgccatgctccccacgctgctgtccaacaccgacaagaagctcggcgtcgtcaactacaccaaggccagcgacgggcagatgtacctgggcgcccccggcgcggcctgcgtcgccagctcgacaggtcgtggacggcgccctacgccattgcatat

SEQ ID NO: 13681 - DNA, 314 bp, Oryza sativa
  Clone ID: uC-osflcyp153b04a1
gcaacgcaatagcttaattatggctcaaatgttatgcattgcacatttgagtaggtacggtaaccatgaaccaccaaagtagataatccttctcttaatcttctcataatatttgacaggcagacttcaacagaaatggagagttcactacccgggtacaaaattcagaagtacagaaacacactaggcaaaaagacttcctcagaacttgaaacttgtaccgactaacttagaatgtcatctcatggggcttggcgccgtccctgagagagaaccgggcaccaagataggattttaggtctgggacaacctcg

SEQ ID NO: 13682 - DNA, 401 bp, Oryza sativa
  unsure (1)..(401): unsure at all n locations
  Clone ID: uC-osflcyp153b12a1
aaaaaggggaaatttaatacacttttatttgccagccagattgagttggcaacgaattcttaacaagaatgacaaaaaaaaaagggaaaatgaaaagagaaaatatcatcgagcttttggtcgctgttaaaaaaaactcgacacgacattacttgcaaaattaagcctagtaattagcggtagtagtatgctcgtcccttctacaaacaggcgagagagagagtgagaaaatcaaaaacgataaatggcaatgcgcgctcgatcaggccgccgggcgaacggctcagctagcagcgcggcatcttcttcttcttcttcttcttcttcttcttcttcgnctactgttgcggctggcccgccatgctgaaggattggctcttcatcgccgtcgacttctttcg

SEQ ID NO: 13683 - DNA, 528 bp, Oryza sativa
  Clone ID: uC-osflcyp153b12b1
ggcccatgcacacccggctgccactactcctgctactcggcggcgtggtggacgccgcggggccactgctccccaccggccaaatatgcggcgactggtactcctgcacctgccccaacgtcgagaaggtcgtctccaccgtcatcgagcgcaagttcaaggaggaccctaccacctgcggcctcctcctccgactcctcttccacgactgcttcgccaatggatgcgacgcgtcgatcttgatcgacccgctgtcgaaccagagcgcggagaaggaggcggtgccgaacatctcggtgaagggctacgacatcatcgacgagatcaagacggagctggagaaggagtgcccgcaggtggtgtcgagcgcggacatcgaggcgctcagcacgcgcgacagcgtgcgcctcgccgggggccccaactacgacgtgcccaccggccgccgagactcgctcgtgtccaaccgcgaggaaggcgactcgctccccgcccggacatcgccgtcccgagctcatggcgcagtct

SEQ ID NO: 13684 - DNA, 182 bp, Oryza sativa
  Clone ID: uC-osflcyp153c08a1
ggatcaaagatagatgtactactacgattgaaagagatgggggcaacagagaaaaaaaaaggcccattcaagctaagaacaaagtggagataatgcagaacaaagagttactataaaagggctaatgcagaataagaaaatacagattctggattaattaactatgcatttttaaaattaaa

SEQ ID NO: 13685 - DNA, 453 bp, Oryza sativa
  Clone ID: uC-osflcyp153d04a1
gatgtataaatccagcttgaactgcaactcaaattttatctgtaccaccaccagattaccaatttactgactttaaacaaatatcacacagatggcagcatcgccgtcatacagtcaacatatcacatccatccgacagcactttaacgcaccgaaaccatacaatccagaatgtcgggaagaggcccaggtggcttaacttactaatgtttgtggcacccagcaccatatcatgcacatcttgggaaatagtgttgacccacatagcctccggccattgcccttttaacattagcttcaaacagctttgggttgtcacggaggacagctgctgcttcatggttcaacggatcctcatcgtttggttgcgtaaaaagaaggttaaggccataaataacagtgttgatgttgagaacaggcttccaatcttcacgcaaaatgttcaggcataca

SEQ ID NO: 13686 - DNA, 385 bp, Oryza sativa
  Clone ID: uC-osflcyp153d12a1
aaacgataatgaacataatatccactttattttgattaattgatgttcttgtacaactccattattgaaaatatcttccgaaagaaattagaaactgcacgagcctctgcatcggcaaaattaaatggccgagagcaaatgaccgaaatcaagataagagtccatataaaacggtgtgaattcaggcacttcatagttgatagttcgcttagccggtgttctgcattccagcagcaattcccttcatggtcaggatgagggtgtcctccagccccggcgcatactcactggtcgggttcagcttcaccagctccgcagccggcttagaccagtccatgatctccttggacatgtgggggcgcagcgtgacatggtagtccgggtc

SEQ ID NO: 13687 - DNA, 460 bp, Oryza sativa
  Clone ID: uC-osflcyp153d12b1
tgttttgtttcacgcgtcccatcatgcggaggtcccactcatcttgccatcttgtgtagctaccagacacaatccatggatctctccgggtcactgtccagggtgaagtcattgagcagtcctttggtgaggagcacctttgcttcaggacactgcagcgtttcacggctgccactctggagcatggcatgcatccaccaattgcgccgaaaccagaatggcgtgctctgcttgatgagatggctgtggtggctacaaaggaataccggtccatcgtcttccaggaaccacgctttgtcgagtatttccgccttgcaacaccagagatggagtatggaaggatgaatataggaagcaggccatccaagagaaagccgagtggtggcatcgaatcactccgtgccatcccatggatcttcgcgtggacgcaaactcgcttgcaccttcctgtctggcttgg

SEQ ID NO: 13688 - DNA, 422 bp, Oryza sativa
  Clone ID: uC-osflcyp153e08a1
aaaaaaacaaagtactagttctcattgatttcattttcatcatcaacaacaacaaaactaattacatcacaacttatagaaccattacgcatgaactcagcagcagtagcagtttatccaggcttccatcagtcactgtgaaagttcagtgttcctcatggcctgaagaaggctgggtgagggcggccggtgccctggaaggaggtgttcttgaggtgctccggtgcgccctcgaacgagtgcttcctcgccagcgagaggatcttcttgtcggcggcgacgaagtatgccatcccagccgccgtgcagatgatcagcgcctgacccgtcgggttgatgttggccttcgcccatggcagcatcctcacgctcgccaacgttgggacggcggatgccaccgtcgccaccgccgcagccttggg

SEQ ID NO: 13689 - DNA, 361 bp, Oryza sativa
  Clone ID: uC-osflcyp153f12a1
gaacagaagctgctttactactacaagggatgcagcaccagaaagctgcaattttccccctttttttttcagtttttatacacagtgaagaaaagcagagagactaaactctgaaaactccaaggttatacactagacagcagcagcagcagcatcaccactcacccatggcgctctagcgaggctggtggatgacgtggcgggcggcgccgcccttggcggcgacgaactgggccggcttctcggcgtgcctcaccatcccggcgccgcccaaccttggcgagttgaggctgagcgccctgagcacgtcggcgtcgagggtgggagtcgtcgtcggcttggggtggacgggggggcgggg

SEQ ID NO: 13690 - DNA, 88 bp, Oryza sativa
  Clone ID: uC-osflcyp153g08a1
atacattatttaaaaaaagggcccttctcagaacctttaaaaaaaaaagcctaaccgcccaaacgggccgccacccccaacactaaaa

SEQ ID NO: 13691 - DNA, 218 bp, Oryza sativa
  unsure (1)..(218): unsure at all n locations
  Clone ID: uC-osflcyp153g08b1
ctccggtgaccggagaggcggtggtgtttggatcgggaggggagagatggtggcngangccnnnngcnattcattcagcccgtgccggtgacggaggtgccggaccaccagagcgaaaaccagggtgctccagatgtgctcaacgtggcggctgaaggcccgacctggaagaaaaaggattgatttggcatcttttccacttgctaatgttggcgcaa

SEQ ID NO: 13692 - DNA, 368 bp, Oryza sativa
  Clone ID: uC-osflcyp153h04a1
gttctcttgaacataatgtgcagtatatgcacatcgatcagccgtatacatgcaaatatttgcattagccataagccattacattaattagtagcagtacaaaactcggttcgtatgaaacaaccgatcgatcgaactcgacccaatttcacgtacttgatcgaatacaaattaaactgaaaattagcagtacaggtcaaaggtgatggtatactagactggtaatgcgccgtacgtgtcgtcacacattacgcctagccgtgcgtggttattgcgctatccaattccaaacttgtacgtggacggacgagcgcgtcgatcggcgtcgaccttgccaccggcttacttagggacatcggttgcctttg

SEQ ID NO: 13693 - DNA, 281 bp, Oryza sativa
  Clone ID: uC-osflcyp153h12a1
gtatgtatattattttgcttttatttttttttttcttttttttttatttcattttgtatttgcctggtctaacatcatttatttattttatagggggaaacaactccattttcaataacttttgtaagggcacccaacccccactttttacaaattttgttagattttaatccattcgaggcgaccatacccagtaaacaagcttggctaacaaacattacaaaagctttttacagtttatgaagcccaaaggccctagccaggtacacgctttgaaaaat

SEQ ID NO: 13694 - DNA, 174 bp, Oryza sativa
  Clone ID: uC-osflcyp154a08a1
tgtttttttttttttttttttttttttttttttttttttttttttttttttattaaataaattaaaaataaaaaaaaaaaaaaaaaaaaaaaaaaaaaaaaaaaaaaaaaaaaagagggggggaggagggggggggggggagggccggggggagggcccccaacgaaaccaaaa

SEQ ID NO: 13695 - DNA, 504 bp, Oryza sativa
  Clone ID: uC-osflcyp154b04a1
aaaggaagaaacaagctctgtgacactttattacatcgagcaaggaatagctgattatttattatacatcggtttagtaaatgaaataacgacaggatatactggacaagaattttcgaggtctgtctttctcaatcatggttttcaccatttatgacaaatggcctggtgtttctctggctctaaagcataaatacaaaacttcaagagtttcttgtctgggtcttaggtctgcaggaagctcgcgtacttcgcaccaaggaaaagcctctgcacgcagagcagggcattcttcctcacttcggcgttctcgtggttcatgagcttcatcactcggtccttcgccttcagatctgccaccacaatgcgcccagaagggtggtactgaaggaactgtgagaggtcatagcaggcgacagcaagagcagtcgtgtcggccgatgtgtcgatgattgtcataagcacacgtagaatctggaaatcattttcttcaaaattattaat

SEQ ID NO: 13696 - DNA, 404 bp, Oryza sativa
  Clone ID: uC-osflcyp154b12a1
tttttttttttttttttttttttttttttttttttttttttttttttttttttttttttttttttaaaaaaaatttaaatttaaccccaaaattaaaaaaaaatttaaaaacggttaaaggggtaacccataccattctcaacccttgccagggattgaaagcgggggggagctggggggttgggggagcactgaaagtggaaaaaaaagggaaacgcccccaaaggggaaccaaaacgtaaaggaatccgaaaggggggaaaaattggcgggggcaccaaaagggaaggggaacccgaacctaacacgcgaaaaaggcaaaaatgccaaaaaggaattggcggccccggggctttgaagggaaaggggcccccgcggctgccgggggaaagacactgacgccc

SEQ ID NO: 13697 - DNA, 476 bp, Oryza sativa
  Clone ID: uC-osflcyp154c08a1
aatccactccaacctaatgtttgcatttctttggttggcttgctcaacaacataggaaaaattcctgtgtttttcaatccataggtttgcacatgtattcctatagtattcctacgttttttctattcctacgttttgaaaatcctgtgaaccgaatgagccgaaatttaaaaattagattcgaccaaagtatatggtgatttcgtggtccattccacggaactaaattaagcaccacaatagcattccacaaagctagcatctatgcatttccacaacaaaaactgtgcgtatttgacgccttgacgggaaacatttcaatggtcttcagtgctggaaatatttttgtcaatgatctttgctgaacatgtcttccaaagttttcagccagttcatgtatttgcaccgttccttctcaaccaaatggtggctgaacatgtcttccaaagttttcagccagttcatatattgccacc

SEQ ID NO: 13698 - DNA, 517 bp, Oryza sativa
  unsure (1)..(517): unsure at all n locations
  Clone ID: uC-osflcyp154c08b1
gtgngtcgcgtgatatagnttagcatgagcctttggccgtttgtctttgtcatgttactgtatggagctccacttgctgatgtttagaatttaagaagatcggttaatcgatgatgataagatgattccattcccaaaaattgttttttgctaaatttattggcatgattaattttgttactagttgctcttcacctaaaagaatgttccagttatcctgaggtgttgaacttagttatttacctgtttggcaaactagcatactagtgatagaattacctgaacctagtggtagttagcctattttcctatgcgcatttgcattgatagtctattttagtgtgatagttacaactgcatttgcatgtttattttcgttggtatagtcagctccttctgcataggttgcttttagcgaattactggtatttgatttatgaagatagttgtttccttaacgttttgctttccttgatgtgttagatgcttagatgggctttggatagctaactcgatc

SEQ ID NO: 13699 - DNA, 298 bp, Oryza sativa
  Clone ID: uC-osflcyp154d04a1
ttatgctgtgtcggcttttttttttttttgggtttgtttttgaaaagaggattccttttctctacacagacttgcaaagaaatgatgcttcaaccacaagtacaacaaattgcatttctgcagtccaagaagttatcatatactagcagagaggagtttatgaaaatgtatcagaagggaagggctttgaaaaatgttacagacagacatattgcataacaaacaatgacccagaaaattagattgccttggaagaactttttgcttaaattctgcaccaagctggaccaataagtct

SEQ ID NO: 13700 - DNA, 108 bp, Oryza sativa
  Clone ID: uC-osflcyp154d04b1
ggttatcacaacgcccgccggcagcgaggcacaagcgggggcctttagaacagcgcacctccgttccgcccgccggagccggagacgcggaagcgggaggggcggagg

SEQ ID NO: 13701 - DNA, 524 bp, Oryza sativa
  Clone ID: uC-osflcyp154d12a1
acaatgctgtagacttgatacatgttcagttaacgcccgtttacagaagcaatctgtgcatccgtgccttacagtaagtttcacaattgtgtcccaagctaccaaattttgacaccccatgttccaatcctttgtgtatacaacttgagtggaggagatgggtggcgttttcgtcaggtttcagaatacagaatgagcaattggagagcatcaatttggcaacttgatgaataacaacagaggaataataatctctgtccttgctactcaagaatgtctgttggccacaactgtctccactttgagatctcatccttgctgcggagcttgctgattccaccgtagaaaccgtcggcctcattgccctgttccctgtggtccttccggatcaccagcgcctggctgcatcttgaaccaggtgtgtattggttgaactccagaacaacagtgtcactaagatgacaccgacataagtggtgatttagatcagatgactccaagtggacaacaactccataccacca

SEQ ID NO: 13702 - DNA, 428 bp, Oryza sativa
  Clone ID: uC-osflcyp154e08a1
agggaagagtgatgttgcaacataacatattgactgaacacaggcagcaaatccacacaagattaatatcgttgcacaagaggttgatagagcattacatatttagatgaggcacacaaccaaagaagcagcagctgctgaccaaagtttagacccatacatagggcaaccagtcattgcatacaagatgatactagtggattatggcagcttctctttttctcttctgattgagcagagagatgccaccgccattatttcttgaggtgagggaagcacgcggtgaggtcgctcttcggatgcttcgcctcagcatgctctttgcacttggtctcagaggtggtgcagatgaaagtctgcatgcatatcttgcactggatgttcatggccttcttgttggcctcaagctggctccccttggcgccctt

SEQ ID NO: 13703 - DNA, 400 bp, Oryza sativa
  Clone ID: uC-osflcyp154e08b1
ggccggaccggccggaccgacccagcgcgcattttctttaagcaaaaaaacactcggaggcccaggagcgaatcgaatcaactgctgctacgaagggggagaggaaggccgaggtcgacgagatgggcggcggcaatgggcagaagtcgaagatggcgagggagaggaacatggagaagaacaagggcgccaaggggagccagcttgaggccaacaagaaggccatgaacatccagtgcaagatatgcatgcagactttcatctgcaccacctctgagaccaagtgcaaagagcatgctgaggcgaagcatccgaagagcgacctcaccgcgtgctttcctcacctcaagaaataatggcggtggcatctctctgctcaatcagaagagaaaaagagaag

SEQ ID NO: 13704 - DNA, 533 bp, Oryza sativa
  Clone ID: uC-osflcyp154f12a1
caaaaaccacgatttataaagtgccggagatgaagtacacaaattaacattacatcgagttttaataaaacatcatgcgaaaagccagcaaaaacaaaaggcagcatacagctaatgaagctctactggagtagctcgcaaaaggtccgacttattttcagtagcactctactccatttcttccgaaagagtgaccatcttctactgggtgttgtacatgtgacggatcaggtcaacaacgcgagagctgtatccccattcgttgtcataccaagacacaagcttaacaaagttgtcattgagagcaataccggcctttgcatcaaagatgcttgacctgttgtcaccctggaagtctgtggaaacaaggtcctcctcaacgtaacccagaatacccttgagtttcccctcagactcctccttgatagctgccttaatctgatcataggatgctggcttctcaagcctgacagtcaaatcaacgacagagacatccacggttggaacacggaaagccataccagtcaactttc

SEQ ID NO: 13705 - DNA, 470 bp, Oryza sativa
  Clone ID: uC-osflcyp154g02a1
gtccaacaaagttaagttgtttttttatataaaaaaaacatataacacggttaattaaggttgggaactataatagaagttcaattcacgttgctgctaagatagttgggcaactaattaggtagatacgatacaagagttcatccgtctaaacatcgtagctaataacatggttcctgcagcatggacatgttccgtttgccagctagcactacgcctgaggtaaattaaacttggcagaagctacaacttcacaaatgcaccggctccagttcttgtctgccgcaacgttcctaaggcgtagttttcttctgccttaatggttgagagtaggtaggctgactgccacccaaacatcgtcactgaaaggaagaacggtcgcgccctccggcaataccaggtcaggacggcgtggatagacctggacctcgttagtaacaaggagcagccgcatccagtagaactgacag

SEQ ID NO: 13706 - DNA, 376 bp, Oryza sativa
  Clone ID: uC-osflcyp154g08b1
aactaatgtactacacgaattagctgacaaacatggctagagcttgcctgactacaggacaacttcagatggaacagagcagggacctatgtgcaaatcaactggggtatgccatgatggaagccatcacggagaaccagcaactactaacaagcaagcagagatgaatgctgctagggcagcttatgaacattccgaagacagaagaaaaaatgctcttgctttcactggtctaagaggaccgcattggggacaaggaacagacgcacatatctgctggacaagacaagatcgcagaacctgctctttcagttgcccagagaattaacagttgcaagcgccagtgcaactgatcgtgaatgcactcacttgggtg

SEQ ID NO: 13707 - DNA, 559 bp, Oryza sativa
  Clone ID: uC-osflcyp154h04b1
acgcggcccggacttaccggctcgattcacgcgaccgctgtagtagaccacgcgagcgagcggacatgggagcatggcttcaagccgcgggcaccctgattcatccggccaagctcggcggccgggcctactccgccgcgctgccatcgcgcccgtcttcgcacgtcgccagggcgtacggcgtcgacaccggtgccgacggcaggatcacgtgctccctgcagcccgacatgcgggaggacgccaacaagtgcgccgatgccgccaagctcgacggcttcgccctcgccacctgaggtctgctcggctcgggcgccagcgcggagggcgtgccgaggaggcttaccttcgacgagattcagagtaagacgtacatggaggtgaagggaaccggcacggcgaaccagagcccgacggtggagggcggcgtcgactgcttcgcctataaggccggcaagtacaacatgaagaagttctgcctggagccgacgtccttcaccgttaaggcggagggcgtggccaagaacgcgccacccgagttccagaagaccaagctcat

SEQ ID NO: 13708 - DNA, 460 bp, Oryza sativa
  Clone ID: uC-osflcyp154h06a1
aacccataaactcatcgctctattctagtccttccaaatgtacatttttttaatggaaatgtacattcataatactccatcaagatagattacattcaacaagtcatgcgctacgatgtacagcatatatatacaccactagcatgtcggggttgaaatgcaatctacagtttgcaatactcgtcagttgaatcctcttgacgtttggtactggcattcccaacctgctaaacctttgtgggggtgtcatcatgaacgaagtaatcttggaccagaatttgactcaatccatgaaacaattacgtcaacaagtgtattgacatcctttgagatttgtgctcgtagaacgcccgaatccgcacctaaagtgctacctacctccttagcaacagcctcccatggtgtccctgttgctagatttgtcaggagttcacctcctctgtttactgcatcggccatt

SEQ ID NO: 13709 - DNA, 446 bp, Oryza sativa
  Clone ID: uC-osflcyp155a10b1
ttgtgcgtgggccgcgcccccccgccgcttctgcggggcgcctttgagagaatgccgctcaagatgttcgcggagaccgggcgggaggccctggagaactacggcaaggactacggtcgcctcgttgtcatcagcgatgtcgccgaccagaaccgggcacttgtggatgctcctgacatggtcaggtgccagatcaacttcaagaggctttccctgaccgacatcaagattgacatcaaacgtgtgccgaagaagacaactttgattaaggctatggaggaggctgatgttaagaacaagagggagaatagctcatggggcaagaagctaattgtccagaagaggagagcgtcactcaatgactctgacaggttcaaggttatgttggccaagatcaagaggggaggtgctatcatgcaagagcttgcgaagcttacgaagactgc

SEQ ID NO: 13710 - DNA, 539 bp, Oryza sativa
  Clone ID: uC-osflcyp155f06b1
cactcttctctcctctctccctctcgcagccacagcacagcgcagcactggccgcctaatctctccgcactctctcccctcgccgctccctccactgccgcttcgtctcggccgacgacctcgtcgtcgtcgtcgtcgtcgtcctcgtgttcgccggtcgccgcgccgacgcggatcgccgtgccgctgtccagtgcgagagcgcaggcaggcaggcaggcgcagtgccagcaatttgcctccctcaccaggggcacatctacatgtggagttcattcccataaaagaggatgcacatggtatacctcacccatgacctctgtaataagctgcggtgatctttatatgcttcaccaactggtgaaaaatgggctcttttctgagaaaacagcccagtttcctcttaattttgttaattctgcaccttggtgctcgtgaagcaagagcactaagttcagatggtgaagcacttcttgccttcaagaggcagttacaacttctgatgggatatttctcaactggcgtgaacaagatgggat

SEQ ID NO: 13711 - DNA, 553 bp, Oryza sativa
  Clone ID: uC-osflcyp155g10b1
gatttagaaaaaaaaaagaacaggagaattatccccacttccagagtccaaacctccccgtccatggcgacggcgagctcgatccggccgccacgcgcggcgctagtcctcctcctgctcgcgctgtccttctccctcaccctcgccgcccacttcgagggctttggctccgacgacctccactccgcccacgccgacgcggcctcggcagacgacgaagacgacgaggggctcgacgtcgagctcccgccgccgccgcgcatctccctctccacttcaactccttcccctcccgtcaccaccaccaccaccaccacctccgctccaaaccctaaccccgatcccaacccgacgctgaccccgccgaaccccaccccgacgctcgatctctgggacgaggacgagttcgagggcatccctgtcccggaagcggcctcctccgacgaatcctccacgccggcggaagccgccccgtcagatcccgcggccgatgccgcggccgaggcggcgccagccccgccccggcggcccgcggagctgctccgcgcgtaca

SEQ ID NO: 13712 - DNA, 348 bp, Oryza sativa
  Clone ID: uC-osflcyp156a02a1
aacataattgttaatttacctttatttgcaactgtttacaccaaaaggggaaaaaaacgggtcccttgcaaaaaggagtataactttgcagggggaagacccaattaaactacaacccaatttgtattacaggaggggagcctaaaacgactggagtttcagcgtttttgaggcctgcagagacactgggctcgcgttgcaacaaaagataaggggggggcgcccacgggggcgccggcggtgaaccccgatgagccgcaaagaggtttctggacccggaagaactcggtcttggaacccgaggccaaataagcccgctcgcccaggctggtgatcaccttggccaac

SEQ ID NO: 13713 - DNA, 401 bp, Oryza sativa
  Clone ID: uC-osflcyp156a10a1
tttgttgtttttttaattttgggggggccccccctttcttttttttttttttttttttttttttttttttttttttttttttttttttttaaaggggccccccccctttttttggggggaattttaaaatgtttaaaacttttggccccccccaaaaaaaagggggggccccggccccccaggcgttctggttttaaaaaaaattggggggggtttggggcgggcaactaatctttcccccttcaaagggccctttcttttttcgaaacattgggggaaaaaggcttggggccttggtccttttaaatcttaacggggaaccggggctggttttccaaatttttttaaaaaagcctgggaacaggggggccctttgggttcacccttttaaaaagggcccc

SEQ ID NO: 13714 - DNA, 448 bp, Oryza sativa
  Clone ID: uC-osflcyp156a10b1
tttattcttggcggggaggagggggccaggccggcgggggttttttagggggcgcgggggcctatgttcctgtgcctgcacgggttccggactagcggtgagatcatgctgaagcaggtggtgttgaagtggccccccgacgtcacggtgcgcctcgaccttcttttttctgacgcgccgttcctcgccgaggggaagtccgactactagggcatcttatacccgacctactacgagtggttccagttcgacaagaattttacagagtacaggaattttcgacgaatgcctgaactacatggaggaattgatgattaaagaagggccttttgatggactgatgggtttctctcaggtctcgattctatctggcgcccttccgggcctccaagaacaaggtttggctcctgctagagttgctaagatcaagtacgctataatcataaga

SEQ ID NO: 13715 - DNA, 378 bp, Oryza sativa
  Clone ID: uC-osflcyp156b06a1
tttttgtttttttttttattttcccgggaatctttttgctggtttgatttttttttcgatgtatagatttacttcatttatagcctgaaaagcagcctagagtgaagaaagtccatgatagtatatcttgtttgttcatggaatgtctcctgttttagaatgagcaatggacacttcttcagttcttaattgtacacgacaccttgtctgctgcttgggttctgagataaattgccaaaaagaaacctgtctacacgaacaatgttttttccactttcaacttgtaaaatgacagatcatattattgtcttccatgatgatcatctatccctgaaacgcgtgatgttgggaaaaatcttttggtttgctttcctgccc

SEQ ID NO: 13716 - DNA, 451 bp, Oryza sativa
  Clone ID: uC-osflcyp156b06b1
ggctttgttttgttttgctctcggctttatatatggcatgggtactgatgatataatggggaggaacattaactgacttctgataacttcattgaaacatgtttaactcatacatttattccgcctagctgaataaaggctccatgtcataatgaaagttgacggcaaccatgcatgcagttatgtagacaagtaattcgtcctgtgaaattttaatcaagtattcatttgcttggatgaatattgttgaggaatattgctatatattccacatatttgatttactccagctgcttgctggctatttcttagagaaggggattattttacctccactgtacatacaactgaatatatgctacattgttaacttagcccttaaataatataatctgaacatgggggatatggagatctagacttgaggacctaacatactacttaggacact

SEQ ID NO: 13717 - DNA, 439 bp, Oryza sativa
  Clone ID: uC-osflcyp156c02a1
cctcaaaaccaaacctaaatatgttttaagtcgatacatatgtgctacaacttccaaatttctgtttttgcagcctgagcgagaaagagcaataaaaaatgtacagatatatatattcttacagaaaagcattgccggtgccaagcgtcctcacctactagtacaatacaacaccgtaatgcctatccctttgaagtagtattatcaggttctccgtacagatgccacatcagcaatgctaatcatcggcgtcttttgtaggatacggcgcaacgcggctctgtccagcatcaagattcgcaggcgacatacatcctggagaaaaagattacacaccagacaaaaatgcaggggggatacatcctgtagaaagaaaaaaaaaagcttcacaccagacaaaaatggagaagcacaagctagacgttgacatttcaaagag

SEQ ID NO: 13718 - DNA, 388 bp, Oryza sativa
  Clone ID: uC-osflcyp156c10a1
ccacggatcccaaatgttctcattgattgatagcgatatcatagaagcagcgacccgaattaagatttaaaaccaaccccaagaaggatcgcagatccaactccaccgaatcgatccaagaactccgcctaatccaaccaaaccatgggcgatctcatttcaccaacacgacacgaactcataaaaggactaacaccaccaccacctcctctttatttagggactcgacgactcaagacgactgatactggcaaagggcgaaggggaacagcccagatctaggagagctggccgcagtcggcgatgacgaccggcttggcggtgctcccgccgggggatcccaccttctcgatggccttgacgacgtccatgcccttgacgacgcggc

SEQ ID NO: 13719 - DNA, 95 bp, Oryza sativa
  Clone ID: uC-osflcyp156d06a1
atcttattcatcttatttttatttttttttttatccaaccaactccatccattataacttcttcaaacacacaccaaataatcccttaactaaaa

SEQ ID NO: 13720 - DNA, 392 bp, Oryza sativa
  Clone ID: uC-osflcyp156e02a1
gagagagatattacgagacatcaaatgacacaaaaaccaagaaaatagtaggcacaagttatatcatcagaatacatagcaactgcaagtgctcaaaaattgtgacaaagcatcatcttgtccacagaaaactgcaccaattaccgaagaaaaactagcagtaccatgtctatccatcacaacgacaaacacttcctcatctataatgttttaaggtcttataggggtcttatgcggtggtggcagcagccttggtggcagcagaaagcttggacctcctctttgccaagctctcactcctgcgttccctctgctccttgagcctctgggcaagcagcttctggtactcggcagcctcggacttctttttgggaattctttgcttcttctgg

SEQ ID NO: 13721 - DNA, 474 bp, Oryza sativa
  Clone ID: uC-osflcyp156e02b1
caagatcatgggaggctgtgacaagcaaggtttccccatgaagcagggtgtgcttacttgtggacgtgtccgccttctcctccacaggggtaccccctgcttccgtggatatggcaggcgtgatggtgagcgcagaaggaagtcagtccgtggttgcattgtcagccaagatctctctgttatcaacttggtgattgtaaagaagggtgataatgaccttcctggcttgactgacactgagaagcccaggatgaggggacccaagagggcatctaagatcaggaagctgtttaaccttgccaaggatgatgatgtccgcaagtatgtcaacacttaccgcagaaccttcactaccaagaacggcaagaaggttagcaaggctcctaagatccagaggcttgtcactcccctggactcttaaaggaagagggcgagaatcgcccagaagaagcaagaattgccaagaagaagttc

SEQ ID NO: 13722 - DNA, 114 bp, Oryza sativa
  Clone ID: uC-osflcyp156g02a1
ctgggggagtacagaatttattatatgagcactgctatgcaaactagctcacttgtatcattcaaaaacaacaaaatagatcacagttctatgcagatcttattttccgaccaa

SEQ ID NO: 13723 - DNA, 451 bp, Oryza sativa
  Clone ID: uC-osflcyp156g02b1
actgaggcataaagtgagagaccgtggggggatcgatcaccggagcggcgatcaatgacgacgctcaccgtgcccgccgccgtgccgcccgtcgccgaggactgcgagcagcttgcgcaaggcgttcaaagggtggggcacgaacgagaggctcatcatgtccatcctcggccaccgcgacgcggtgcagcgccgggcgatccgccgtgcctacgccgaggcgtacggcgaggagctgctccgcgccctcaacgacgagatccacggcaaattcgagagggcggtgatccagtggacgctggacccggcggagcgggacgcggtgctggccaacgaggaggcgaggaagcggcacccggcgggccgcgcgctcgtcgagatcgcgtgcacgcgcactccatcgcagctcttcagttggaagcaggcgtaccacgagcgcttcaagaggtcg

SEQ ID NO: 13724 - DNA, 285 bp, Oryza sativa
  Clone ID: uC-osflcyp156h06a1
ggcccaaaacccataaatttattggggaacccaataattcaactggccaaaccctggtttttaaaaaaaaggggaaaaaattttcaaacataaaactgggggctgcctaaaccggttgggaaaaaacatttaaaggggccttaaaacccccgggttttgcaacacaaaaaccccctcccccggccgggcccccggctccttggggggcccttaaccccaaaaaccccaggggggaacctcaccccaaaagaacactgatcaaaacaggggcttctaaaaagcccc

SEQ ID NO: 13725 - DNA, 312 bp, Oryza sativa
  Clone ID: uC-osflcyp157a02a1
ttttgttttttttttttttggggttttttttttttttttgcctccaaaacgtgtttcgttccaagggttttcaccaatcgtcatgggtccaaaacgaaagcaaattttaatcgaaacatacatcacagttttttttcacggtttattggggccaaccagccatggctggctgggccctgcctgctatggctcgatcggggtccactacttcgacttcttgacgggcgccttcacccggggcagcacgaagcccacggggacccccacgagcacgagcccgttcatgatgacggggatcctgaatattttcac

SEQ ID NO: 13726 - DNA, 327 bp, Oryza sativa
  Clone ID: uC-osflcyp157a03b1
cataatcctatatcgtgatagccgagttagttcagggaatgagtgttccttggattgtcctgtggtttcttcaatatcactgtatgactcttgcatggaagcaacagatagtgatcacaaacctataaaatctgtgttcaatttggatattgcttatgttgacaaacagacaatgaggcagaaatatgtggagcttatgagctcaaataataaagtggtgcatttgctttaggaacttgaagcattccctggagtaaatataaataattctaacatcatcttgcaagatcggaattcatctgttgtgaaattgcaaaacaaaacaag

SEQ ID NO: 13727 - DNA, 497 bp, Oryza sativa
  Clone ID: uC-osflcyp157a10a1
gttgtttgttcaaacggttgaattgaaggatgaccagggttcagtggttctcatgtattcttggtagacatcatcccaagttaaaacacaaaaaaaaagagaatccggacgacttacaattaaacgagaaatcgtactgacatcatcccaagttaaaacacaaaaaaagagaatccggacgacttacaattaaacgagaaatcgtactgaaaatcatgtgccgaaacagcgtaacattttctttgcctcaaggcgaacaatatacactgggaatcccacataactatctgcatacatctgaaggacaggaatagcacaaaatccacctgtaagtgtgattaatctactcttccttgaggcgtttctcagtctcctccaatgccttaatatccttgttgtacttgcaaatacggaaaatgcaccagtaaaggaggcatgctgaaacacaaagaatgacattcctctgggccttgaagatggatttctcaaagcggata

SEQ ID NO: 13728 - DNA, 524 bp, Oryza sativa
  unsure (1)..(524): unsure at all n locations
  Clone ID: uC-osflcyp157a11b1
tttggaagttgcaaagcgaagcccaccaacctcaaaaacccaaaccctagctctcctcgccgccatcccatggcgcgcctccacctcgtggtcgtggccatggccgcgctcttcgccgccgcggcggtggcgcagggcccgagcgcctccccgacgccggctccgaaggcgcagccaccggtggcgaccccgccgactcggccgccggccgtggcgccggtgtctcctcccgccgcccagccgccagtgacgacgcctcccccggattccgcgcccgcgcccgtgcccgccccgagcgccgccgcgacaccgttaccccaggcctcggcgccgaccgcggagccccccgtactctcgccgcccgcgccggctccggngtcgatctcccagtccccgacggaggccccgacgtctccgtcgtcaccgagcgccgcgtacggagtctccccctccgacgccgcgtagtcgccgctgggccggcgagcagccgtcgggtgttctactggatcccgttccgagagagt

SEQ ID NO: 13729 - DNA, 396 bp, Oryza sativa
  Clone ID: uC-osflcyp157c02a1
aaacaaatgtcctgcgaatcaccaggcaaaaaaaagggagctggtacaaagcctcaatacacactggagtaaaaccagcaacggaatttgcgctccacatttcgcgatgtgcagcggtctgagataaacagtttctatgtgatggaacttaaaagtcttttttattcaaaaacacgggagcgggcaatcgctcactatttgtccctctgggtattgcttagctttagttgaggcatgagtaagcgagcgttttttcctccgacagttcctgggcagtcgcgtccatcttcttccttgaaaactcgaggatcgggagaccctgaacaatcgaccatttgccaccactgcatgttactgggaaccagttgatcagaccagcgggcacaccatacgaac

SEQ ID NO: 13730 - DNA, 453 bp, Oryza sativa
  unsure (1)..(453): unsure at all n locations
  Clone ID: uC-osflcyp157c10a1
gtgttttttttttttttggtgttttttttttttaacacaaaaaggcaaattttcatacactccatcggacattatacaagctgaagcagaaataggaaaccagaaaaactgcatacagacttcagtaagattttgtccgcgactttcctaacaatacaagggaacaaagaagccaagttagcattccaggggttcttttcccacccaagaaaccagggaactgaaaatgctcccatgaaggacatttgatggggttgaactcattggttaccaccattggggccaccatatccttttcctcgccgctgttgctgattaccccgctgctgggcaatctgccggccaggggcagtattcgtctgctgctgtggaatggnccccaacctctggtggttcatttgggcaaagagcgcatccattggccttggggccttgttttggaccttctttccc

SEQ ID NO: 13731 - DNA, 390 bp, Oryza sativa
  Clone ID: uC-osflcyp157e02a1
ttggttgttgttttattttggggggaaagaagtgctcctttactatgattaatatttcaattaaaacataagcacttagctattatgtttccctgtttacatggtgattaaacacaacactgatcacggtcacacctaatctaaactttacaacgttttcatctacatttttgtacgctttctgggcataaaaaacaagcgaaagcgaactgataggcagacacgcgcagactgaatacaccaacgctctgaagagcggaagaaaacgccagtaaaaatacatgaagcaaaccaagccgccgtaaggcaacagaaacaaaagaaatttcgatcagaaatcaagcaacgccttttgatcagaaacattaagcaacgtgaatcagcaagtgc

SEQ ID NO: 13732 - DNA, 458 bp, Oryza sativa
  Clone ID: uC-osflcyp157e10a1
ggtgtttttttatttttttgtgttttttttttttttttttttttttttttttttttttttttttttttttttttttttttttttttttaaaaaaaataacccaaaaaaatttttttaaaaaaggggaaaaaaaaaaagggccaccacttaatttaaagcaaaaaaataaaaaaaaaaaatttaaaaaaggttaaaaaaaaaaaagggaaaaaaaaaaaagccctaaaaacaccgttaaaaaaggccattaaaaaaaaaaaactataaaaaggaaaaaaaaaaattacccccccttttaaaaaaaaaccttgaaccttgccggggtaaaaactttaaaatcaccgccaaaaaaaaaaaccccaatataaaaatttgggggaaaaaattaaccccaaaatccttttttaaaaaaaaaaatggccatttggaaggaaaaaaaaaacccaaaggtttttggg

SEQ ID NO: 13733 - DNA, 579 bp, Oryza sativa
  unsure (1)..(579): unsure at all n locations
  Clone ID: uC-osflcyp157e11b1
ttttaaaagagttcgtgcgaaaaaaaaaagaaagaagagttcgactgttcgagcgaggagggagaagaagagggggagagagagagccagcagctagccatggcggagcacaaggaggaggagtcgttggtggagtcggtgatggacaagatctccgacaagctccacggccgcgggggctcgtcgtcgtcgtcgtcggactccgacggggagaggacggccgacttgaaggccaagatctaccgcctcttcggccgcgagaagcccgtccactccgtcctcggcggcggcaagcctgctgatctctttctatggaggaacaagaaaatctccgttggggtactcgctggcgccacggccatctggctgctgtttgaagtcatggattatcatctcctcaccctgttgtgccactgtatcatcctcaccctggccatgctcttcctctggtccaatgcctcaactttcatcaacaagtccccttctaacattccttgagtgaagatcccagaggacctggctgtaatgttgctcgctcactgagattngagatcaataggggctttgctaccttgaggg

SEQ ID NO: 13734 - DNA, 309 bp, Oryza sativa
  Clone ID: uC-osflcyp157e12a1
gtgttttgtacctaatgtgtgtgtaggggagcccctcatctcagtggctagcttttgaggtgggaaagacccttgatgatgatctacacggtgttcattaactcagacatgcagagcatataggcagatagccttttgtgattaaaagtgctaattcttcgcggcaaattgatctcccagatttcattattcagaaaacgtggaagattgattggacaacaaaaataaatatacaggtgaagaacaagaccaagtacatactttttacgccgcccatttggagatgaaagtaagtgaccatgcacttgg

SEQ ID NO: 13735 - DNA, 458 bp, Oryza sativa
  Clone ID: uC-osflcyp157f08a1
gtggtttttttaactcaggcgttggtacattaatcaagcttaaagtttatttcccgtacataaacgcataggagacaaacacatttgggacccttggaggagaccacacattcataaacacatgatcatatcacacacattttggactgtgtccctcacgacacaagcaaagtaccaaaggaggagatcaattgcagcattgaggagaagcagcagaataaacaaacggggctctagccggagatctggatggacttgacgtcgggcttcttgggctcttccttgggcacggtgacggtgagcacgccattctccatggacgccttgatctgctccggcttggtgttctcggggaggcggaacctgcggaggaacttgccgctgctgcgctccacgcggtgccacttgtccgacttctccttctgctccctgctgcgctcgccgctgatctgcaggat

SEQ ID NO: 13736 - DNA, 441 bp, Oryza sativa
  Clone ID: uC-osflcyp157g04a1
tgtgttattctgatcccagggttttatttttcatatttatccgtaccaaactcttgacgtcacttgcaacatgtaccgtacgtgcatgcaatgtacgtacacaccaaacgttttattcgttattactttgtttattattcagtcctgatcgatgagccgcgcagcatgtgtgcatgtaactcaacagtaaaggttgccacccgggtcaacgccgaattggcggcagtagtctttgtagtagtttacccttgcgttgacggcgccggggttcttgccggtgcactcgagcgcaccgttgatggcccggatggtggtgccgtacccctgcaacatcacctggtgcacgttgttcatccagaaccatagcgccttcttgaaggagaatcgtctgttcctgtgccaccctgtccgggttcctcattcccgtcaacccgatgtttt

SEQ ID NO: 13737 - DNA, 562 bp, Oryza sativa
  Clone ID: uC-osflcyp157g11b1
gttccagcagatgtgggacgccaagaacatgatgtgcgccgccgaccccaggcacggacgctacctcacggcgtcagccatgttccgcgggaagatgagcaccaaggaggtggacgagcagatgctcaacgtccagaacaagaactcgtcctacttcgtggagtggatcccgaacaacgtgaagtcgagcgtgtgcgacatccctcccaacggcctgaagatggcgtccaccttcatcggcaactcgacgtcgatccaggagatgttccgccgcgtgagcgagcagttcacggccatgttcaggaggaaggccttcttgcactggtacaccggggaggggatggacgagatggagttcaccgaggccgagagcaacatgaacgacctggtggccgagtaccagcagtaccaggacgcgacagccgacgacgaggaagaggactacggcgacgaggaggaagacgaggttgctgcctaagccacctacctgcctgccattcctctcgctctcgtcatccatcgtagatgatgattgaggatgtgcttccttgcgtattattac

SEQ ID NO: 13738 - DNA, 454 bp, Oryza sativa
  Clone ID: uC-osflcyp157g12a1
ttgttttttagaaagccgaggcaaccactaaattgcttatcctccaaacgacaacaatacacatcagtaactctatcttcacaagatgatgatcatcatctagctcatgtggcagacaacacgtacaaatacaactcatacatcaccacaattcacgaagaacaagttacaagggaggggatagaaaggtacatgagcagttctgcactacagattgtccatcttttttttcctgttgaaaaatcctatactgtactgagaacacaaacaccgtaggacacaagtcttattcacactttgtaaacactacaaggctcaagctgatcaaggacatcacattcggggtgctgtccctttaatgggggcgatgaacatcaagtggccggcatcagggacctcaaaacaaccacacaaacagggaccttcaaacaaccgtgcacactgggggtggcag

SEQ ID NO: 13739 - DNA, 354 bp, Oryza sativa
  Clone ID: uC-osflcyp158a04a1
ttggtggtttttttttttttttttttttgcattagccataagccattacattaattagtagcagtacaaaactcggttcgtatgaaacaaccgatcgatcgaactcgacccaatttcacgtacttgatcgaatacaaattaaactgaaaattagcagtacaggtcaaaggggatggtatactagactggtaatgcgccgtacgtgtcgtcacacattacgcctagccgtgcgtggttattgcgctatccaattccaaacttgtacgtggacggacgagcgcgtcgatcggggtcgaccttgccaccggcttacttagggacatcggttgcctttggctccggggcgggcttggc

SEQ ID NO: 13740 - DNA, 179 bp, Oryza sativa
  Clone ID: uC-osflcyp158b08a1
ggttgttttttttttttggttgtttttatttattttttttttttttatttttttattatgtaacaatttgtttggttttgaaaaaagatgaaaacggaaagaaaaaaaaagaacaaggggaagacaggagcaaaaaaaaaataggagacaaaaaaaaaaaaagaacaaggggggattgg

SEQ ID NO: 13741 - DNA, 323 bp, Oryza sativa
  Clone ID: uC-osflcyp158c04a1
ttggtgttttaaaaagttcaaaattttagtgatttttattgtcttgaattttcaggatgttacaacaagtcaggggtagatctgaactgactggtgtatcaggttgcaccgccttcttaagtaaagagatgtgaaccactgggtgaatcaagctcccagccggcaatgccaatcgataagccactgctccaatccgttccaggactttataaggtccaaagtacctgaaactcaatttgtgacaagaacgtttggccatggttagctgaacatatggttgaagttgcaagtaaaccatatcaccaggggcaaactggcgtttt

SEQ ID NO: 13742 - DNA, 437 bp, Oryza sativa
  unsure (1)..(437): unsure at all n locations
  Clone ID: uC-osflcyp158c11b1
gcggcacgttgccaccacaggctacgcaaaattctctcccttcctcctccaccacctccactccgacgatcctcctcctgatcctgtgccggccggcgatggcgtaccggttgctggagctcacgctggtctccgcgagcgacctcaagaaggtcactctcttctcgcgcatgcatgtctacgccgtcgcctccatctccgggagcaacgtccccatgcccatgcacggcacccacgccgaccgcaacggcggcagcaaccccgcgtggaacaccgtgctccacttccccgtccccgcccgcttcgacacccgcgggctcgccctncacgtacagctccgcgcccggcgctccttcggcggccaccgagacgtggngacgtgntcgtgcccttcgacgacctcctcgccggcgcgcacgacggcggcgagccgaggc

SEQ ID NO: 13743 - DNA, 400 bp, Oryza sativa
  Clone ID: uC-osflcyp158c12a1
aaaagataatctacagtactgtattgtattattccagtctctgacttgatgaattttgacttacacttcaaccactgggctaattaattaattaattaagctagcaaccctgaagaagaccttataatgggagtaataattaaccaatgaagaaacagaaacaggaaagctagccccctgtataccgaatcaatcaccatgtactatgtacatgccactatacacacacactgacatgccacccgatgcaattgcaccatctttctgctgctgcctcgtcgtcgttcagtccaggccagggtccccccaaccacggtctcatcgccgcctttctcgagtcctcatctcctctgtctaatccaatccaatccacttaagacacttcttttaattatctttg

SEQ ID NO: 13744 - DNA, 468 bp, Oryza sativa
  Clone ID: uC-osflcyp158d08a1
gtttgtttagctgaaattttatattttatatttttctcataagcagcggttgaggagtaaacatgttcaaaactgttccagatgaagagtacaatttctacacaactgtcaagaagttctatttataaccagccgtgttttaagtgaacaagaaccacagctcaaaacaacagaagctgatacacagtcagatgactgaaaatatatttccccatcatcgtcgaccagaatgcccatctccgcaaggtcagatgacaagatcgaaaaatgatctccacatctacatggatacatcaactccatagcatcaccagtgctttcaacagtcatttcctcgatctcgatttcataagcaatgtttgcagagttctgccttgatgtttgcagctgcttgtcatactctgttctggatttgggatcacgtaggacctcccaagctttttgcacgctgaagaattccccatgctc

SEQ ID NO: 13745 - DNA, 178 bp, Oryza sativa
  Clone ID: uC-osflcyp158e12a1
ggaaacaaaccccaatcttttttatatccacaggagaaaaaaataccagaatcaaacaaactacgaacaagagcccccatctcctatatgagttttttttgggcccaacaaaaagtttttgggggtatgggaccctggggggacaaaatcatttccgatcgggggatctaacgatgcc

SEQ ID NO: 13746 - DNA, 379 bp, Oryza sativa
  Clone ID: uC-osflcyp158f08a1
tgtttttttttttttttttttttttttgacaccaactggattcttgtccttggtaaggtttaatggccaaagcggagaaattttagtttttgccctatgtacagacatatggacactttactgatggaaacctactgggtgaaaacaggatgatgggacgtgttaatttaccctgtgtaccattgtgagatagtcattgtggaatatgaaatttactccagagatactgtcctttcccttattaacagctatattccggtcccgtaaggcataagaactgcttgaactgctggtatgttcctcgctatacgatggaatacaggggctcgattttcatgctattggattcagctactgctacatgaaccgcgcagaggat

SEQ ID NO: 13747 - DNA, 72 bp, Oryza sativa
  unsure (1)..(72): unsure at all n locations
  Clone ID: uC-osflcyp158g04a1
tttgttgttttttaaaaatcgccgttccaccccccncctaaaaactacaacccacaacaaacataaccacaa

SEQ ID NO: 13748 - DNA, 427 bp, Oryza sativa
  Clone ID: uC-osflcyp158g12a1
aacaaagagattgaatatacattatatacattttggatccagtcccaaaacaatcgagatccatgcatatgcatgttccatgatcgagctactaatttagttaatcaaccgcggcgactgcagttggaatgtgtgagatgcatatatatatatatatataacaacaagtatatgtatatgaaaataaataatgggggccggcaattgatgcaggtgagtgagagatcgaagatccatatatagtgtgtagtacgtaggtccgggctgggggctggggcgatgatggttatagtacaggagtgaaaaattagtgcatcctgccctgctgcgtctgggggagaaggccggggatgtaagggacgccgaacttggggatgaactcctggccctggatgaagcctcacgggaatctttgacgtctgtagtg

SEQ ID NO: 13749 - DNA, 109 bp, Oryza sativa
  Clone ID: uC-osflcyp158h08a1
ttggtttttttttttttttttttttttttttttttttttttttttttttttttttttttttttttggaaggattttaaaaggggtattttgggggggaaaaggggaaaa

SEQ ID NO: 13750 - DNA, 379 bp, Oryza sativa
  Clone ID: uC-osflcyp159a04a1
tttgtggtttttttttttttgtaagggaaagaaacataaatatgttgaatcttgaccacctctaaattaatcatcacaaagctaggacttggccctaacgcaacagcgaacacacacaacaaaaacaaattattggtatctatgaagcaatgatacaacagggccggagcaccatgaaattatgggatgctcctggggaactgttgacaaataggggataatcctgtcatttacagagtcgcaaacaggggttcttcctttctctttccgttggggagattcctctttctcttgccatattatttcctcttaccggcaccaagggacagcagctccaggctgcggtggagaggctcgtcgcgggacccttttgcacggc

SEQ ID NO: 13751 - DNA, 411 bp, Oryza sativa
  Clone ID: uC-osflcyp159b08a1
ttgttttttttttttttttttttttttgttttttttttttttatttttgtttaactgaatttttttctttggatcaaaacaatgacaacttattatcactaccaaaactgaggggaaaaaagaagacgcaatgacaaaacctaccctttggaggagttaaaactacgaagtttgggggaaaaactgaatggcttccgctcggggggaaaaaaaaaactggggtaaactaccaagtttgcatgcaaactaaaatccctctttatgaagaaaacgatgaacaaaagggctgcaaaaatcaaaccggacttgggccgggggggatcggccgggatccggcgggacgatcaaaagcgtcgctgccggattcgaccgggatgcacttcaagaaggcgccgatgaccaagcggaccg

SEQ ID NO: 13752 - DNA, 428 bp, Oryza sativa
  Clone ID: uC-osflcyp159c02b1
cttcttgctgatcatcatatatctcttgtgagcttgagcaatgggggctctgccaagggctctagtcctcggcgtttgcgccgccgtcttgctggtgaacgtgctcgccgttgccgccgacggcgacgccgcggcggcggcgtccatggtcgtcggattggccaagtgcgccgactgcaccaggaagaacatgaaagctgaggccgttttcaagggtgttcgcgtggcgatcaagtgcaagaacagcaatggcgagtacgagacgaaggccaccggcgaggtcggcaagtctggcgcgttcgccgtgcccctcgcggcggacctcctcggcgacgacagcgagctgaggcagcaatgcttcgcgcagctgcacagcgcggcgtcgaaccagccatgccccgggcaggagccgtcgtggatcgtcaacg

SEQ ID NO: 13753 - DNA, 333 bp, Oryza sativa
  unsure (1)..(333): unsure at all n locations
  Clone ID: uC-osflcyp159c04a1
tttgttttatgagaactcatgcactttattaaaagaaagcgttttagaaacacaaagcatgagttacattaactgctccattaggagtgaaggaaagagctcttttagtaggcaaacatctctgganaaatgtgtaaatattagagaatcaaaagctaacagtgtagttgacttgcttgtgacttgaaggcatctgaactttgttgagtcttagagatcaaanattcaacttgtgacctgagaaattttaatttgaaaaattggctcaagacaatgccggngtttgatgagtctcgtctgacagattactatctactgtatctagagaaaata

SEQ ID NO: 13754 - DNA, 420 bp, Oryza sativa
  Clone ID: uC-osflcyp159c10b1
cttagacttccttcctttcttacagcggaacagaagacattccgcaattgttgaatatgtcttcagtggccaccgtttcaaactaacaattcctaaggagacttgcagcattgccttctctttctctggtgttagatgccctggtaaagatgagccctactcgaacgaagctattgctttgatgaggaggagaattctacagcgagatgtggagatagaggttgaagcagttgatagaactgggacattcttaggttccttatgggagtccaaaaccaacatggcttctgttcttctggaggctggtctggccaagcttagttcatttggcttggataggattccggatgcaaatgttctaatgagggctgaacagtctgcaaagcagcagaaactcaagatctgggagaattatgtaga

SEQ ID NO: 13755 - DNA, 459 bp, Oryza sativa
  Clone ID: uC-osflcyp159c12a1
ttgttttttttgataaccaaaaatttgaatcgttttattttgtgacggaagattccatccaggacatctcacaagtaccttgatccagaccaaatacatatatattagcataaagcaaaagagggttgcgttttccagcgcacttcaaagtgccagcttcactcgttgctgggttctccgcgctccagcttacaacggaagcaagtgttattcaccgtggatcgttatctaatccttattattgcataatatagcgtccatcttgatgagcttcgtcttggtgcatctcgtatttaggagacagggctagcagtaatgccccatatttcctttgcatactgagcgatagtacggtcgctgctgaatttgccacttccagctgtgttcagtatagacatcttgatccattttttcttatccttgtaggcttcatcaacctgggcctggtgcatcaatata

SEQ ID NO: 13756 - DNA, 410 bp, Oryza sativa
  unsure (1)..(410): unsure at all n locations
  Clone ID: uC-osflcyp159d08a1
gatcaaagcaaacgagacgagctttcttcttgcgatcaaaaacacagatgggcaaccacacagttaacacaaactagatagttccacacaaaactaacgatgataacgatcggatgatgatgatggtagctcgattagatagatagataacttggccatgagggccccaccgctcagttcctccagttcccgtcggagttgccgccgccgcggctgccgtagccgccgccgtagccgccgccaccacggccgccaccgtagccaccgccaccgccgtagccgccttcacggcgctggccgtagccaccgccgtcgtcaccaccaccgtagccgccgccaccgtagcctccgtctccgccgngctggccgtagccaccgccggctccgtcttcggagcggcgcgactgggc

SEQ ID NO: 13757 - DNA, 475 bp, Oryza sativa
  Clone ID: uC-osflcyp159e10b1
tgtttacaaacatgggtcatggggcactcctttagttcaaatggaccggcctgctgggctcaatgacattggtatggtagcttggaccttgaagatgtccactcctgaatttcctagtggtagggagattattgttgttgcaaatgatattacgttcagagctggatcatttggcccaagggaagatgcattttttgaagctgttaccaacctagcctgtgagaagaaacttcctcttatttatttggcagcaaattctggtgttcgaattggcatagcagatgaagtgaaatcttgcttccgtgttgggtggtctgatgatggcagccctgaacgtgggtttcagtacatttatctaagcgaagaagactatgctcgtattggcacttctgtcatagcacataagatgcagctagacagtggtgaaattaggtggggtattgattctgttgtgggcaaggaagatggacttggt

SEQ ID NO: 13758 - DNA, 250 bp, Oryza sativa
  Clone ID: uC-osflcyp159e12a1
acatgaaaaattactttaagtgctttattgaattattactgatcaaacaaacaatatatatacgtttacacttattattgtttttctactgagctggccttggcactctcaaggcctcagccagtatgtagcagcatcagatggcatgatctgcagtgtcgccattatcaggagcagtgatgaagcaatcacttgatcaggatgcacctgattggtgagccctctggatccaaccacgcctcaagaggta

SEQ ID NO: 13759 - DNA, 91 bp, Oryza sativa
  Clone ID: uC-osflcyp159f08a1
gggtggttttttttttttgggggggtcttcctcttttgttgttttggtagtttttttggcgcgggtctttcccccgcccgtcccccccctc

SEQ ID NO: 13760 - DNA, 320 bp, Oryza sativa
  Clone ID: uC-osflcyp159g02b1
ggtttgtttatttcagattacgtaggaaatatactttcattatactaatagttataccgccttttctcgataattaatagacacattgcttagtaatattttttttgtaaaaatctagaaagtgagaacaagcgcgaatttttgcaatagaaattttagtacaaggagagattctcttctgcttgttttatttggccttacaggttagtgtggatgtattggcatatcaggcaaggatggcttatctgagagccgcaaggatgggggaatttgtgctgacttatgaagacaagggtggagactggatgcttgttggcgat

SEQ ID NO: 13761 - DNA, 414 bp, Oryza sativa
  Clone ID: uC-osflcyp159g04a1
atcaacaaatgagattcaggtgtcaatgtattatttgacctcaagatcatttccatctaatacatttgcataggcaatttacaatccagtaaattcacctgatgacaatccctcactttccttagtatacatgcctcgtggaaaagcatataaattaaacaggtcgggactccgaaggaatacatttgcaatgaactcagcagcacctaataaacaagtagaagagagaattttatatcacaaccagaagatacgtccccgaagagagaaaagggctaactgagaacagcaaaccaagaaaattagacgagcagttgcagcccgagagcctcagttcagccgccttctcttgttccggtgtagtcccacaccattcacattcaaagaacctaaggcatcatttcttcctctcct

SEQ ID NO: 13762 - DNA, 335 bp, Oryza sativa
  Clone ID: uC-osflcyp159h08a1
ttgtttttttttttttttttttttttttctttttttttttttttttttttttttttttttttttttttttttttttttttttttttttttttttttttttaaaacaaaaaattggccccccaagggcccccaaaaaaaagggaaaaaaaggggggttacaacccaggggaaccgggggtaaaaaacccagggggggaagggttttaaaacccaaaaaaaggtccccccccttataaaaaacccgggaaaaaacaattttggggaaaaaaatcctggccccccacccaaagggcaaaggcctccaaatatggggggcccaaaattctaaacaaaaa

SEQ ID NO: 13763 - DNA, 465 bp, Oryza sativa
  Clone ID: uC-osflcyp160a06a1
tggggggtttttttttgcgggggcattaaaatgtatttcctccatttcccaatataagtatttctcacatacatattaatattaatgaatctagatatatataaatgtctagatttattaatatcaatatgaatgtgaaaaatgatagaatgatttacattgtaaaacggagggagcggattttttttccaccatgtgattaccatgcaaagcctaactctctgttggctgatccgggtcttgggccagttagcatcaagttcttcggcccatcaatgtgcatcggccaggatttgtgcctcccgaaaacaagccctgaaatatcaacaagccttccttgatttgttgtacctcttggcacaacacgtaaacgccagaagatcgaggcaaccgaggccggccgtcatccagaagaagcgatcaaggtgccccatcgtgagatcatcggggatccaccccggccgg

SEQ ID NO: 13764 - DNA, 501 bp, Oryza sativa
  Clone ID: uC-osflcyp160b02a1
ttgtgtttttatttttttttgttacagtaaatcactcgcaataatcaaatctgatttccagttctgcattaccaccaaatactccaaattcaacggatgcagttcaagtatgtttcccatttgcaagtagtattctgattttgggggtgcataacagcataagcaaacgatagaatacctttatgtacaggcaactacaacacaagtcagcacaacctttgcattgccagaaaaccggctagctgacttcagatggattaataatcagatctgtatacagcaaacccgttacaggggttagggaacaacacaattttctctcgcaagtgtaggaaagtttcatccgcaatcttatactatactctaaagacccacgagtttccggtgcacgtgttcatggagagagtgttcgtcgccgtcatggtgatggaatacgtatgtcaaaaccccaacgaggcacaggaccgagccgacaaggatcttgtcgtaacgttccaccca

SEQ ID NO: 13765 - DNA, 430 bp, Oryza sativa
  Clone ID: uC-osflcyp160b10a1
aaccaaaacagcataaacatcatatgtacaaatcagcacaaagaaacttcagccacgctacaagcagttcgctgggaggaggtaaagtctcttgtacactcaagtaatatattgcagtaggagcctctccaactgtttttccgtcaaaaaaaaacctgaggagagtgccgacgctgaaacaaaatttgacccaacctcacacctctgggaggagagtgccgatgctgaaacagaatttgacaaggtttaagagatcacacgatttcaaactgaggttgacgataattgcgctccattcctttggtagggtactttgccatatcaggtatccattgcctcggaggccgatgaagcattcttcttcttcttggtcttctttcttttcttggccttagggtccttcccctgcttggcggaattgctctccttt

SEQ ID NO: 13766 - DNA, 509 bp, Oryza sativa
  Clone ID: uC-osflcyp160d02a1
ttgttgttttttttgatgcgcagtcacaattcacaattgtataccgtcaggacacagttttgagctcccagtttttcccagggttactccagagagcgataatttatgaaactactagtgagcaacaagtcgataaacatcaaatgttcttcctactttaggttcagcaatatataggatatataaaaggataggtttcggcttagccatgcttcgagaggatgctctctgcgacgctacgagcgatgggatgatagaattcatgcgcctctgagaagatcctatgggcaagcatcttctcctccccggagcatcgagccagcgagctgtagagcgggcgaaggtacttcatcctccccacttgcttcaagcatttctcaacctcgttgaagtagcatctgcagccggtgggaattgcaagctggagaaacgcgactttgacctcgtagtcacagctttctgatagcttgtaccgctcatcgagagcagtgacctgtgaagcttcaaca

SEQ ID NO: 13767 - DNA, 495 bp, Oryza sativa
  Clone ID: uC-osflcyp160d10a1
gtggttttttggacaaaggggcgagactgatttgacacaaccacgtgtaacattgaacacaacgaacgaaatgactaattaagtattaaaaggcctagcgagtgtttttacctacaaactcacataccgatcactaacagtagcctttattggcattccttgcctgtacacaatgctggaagtgatctggaagtgagatgatggaactacctatcaacactaaacataggggaatagcctacagcctctccctacacaagctagaatggctggaatccttcacgtcagtgtaactgaaaagtaaaggtcttccggttagtgaatttttggtagcaaaatagctattttttctcaaaacttgcgaccttttcgggcagcgtttaattgctccagcaaatcttgtatggtagaagaagcatcctttagcttccctcgcagattttcctcttctaggtctcgtcgacctctttcttctgagaagatgtcaatcaatgc

SEQ ID NO: 13768 - DNA, 499 bp, Oryza sativa
  Clone ID: uC-osflcyp160e06a1
ttgggtttaaaaggaaagtgggctatatacacaatgttagataaaattggttattgtttttcatgcatcattacacaggtatgaatcatctgtgcaaaaacaataacgcatgcgtgacatttggccatagaagactatgcacatgttaatcaacagacaacacaatcttgaagtatttttcaagcattgcatcctttgagaagtcagtgaagtaccccttttcaacctcaagtccttgctctgctgctatctgttccacctgctgctgaacctgatcggcactgacatgatctggatccaggaagcatgcaatctctgtgcagtcatcaccatgggaaagggcaagcgcttgcactgtcgggagtcctccaccacgaccagtcacccttcgggtgatccttcttatggttgggatatccttcgatagtaccggcacattatagttcaggggtaaaggtgcagcaccgatcattatggcacctctttcacgagaaacatt

SEQ ID NO: 13769 - DNA, 530 bp, Oryza sativa
  unsure (1)..(530): unsure at all n locations
  Clone ID: uC-osflcyp160f02a1
gctcagccgcaccgggtccatccggaacgccgccgccatggcgaacgtcagcgccgggagcgtgttgctgagcgcgcacgccaccgtcggcgtcgtggacttgagccccacgaagtaaagcacctggttcagcgtcgcgccaaaaatggaggagaagaatatctggacaagtactttcttggtgatcaccatgccactcttcctctcgaagtagtaggcgaagggggcgaggaagacggcggcgatgatgttgcggtaggcgatgaggacgtaggggctcatgccggtgtccagcgccagcttggacaccacattcatgccggcgaagcccagctgcaccatcaccatggccagcgtcggcaagctctccctccccatctccctcttctctactctctcaactctcaactcccttacttctcgaccgtgctgcangaacttcagttcaattcctcttgagagagagagagagagagatttgtagggcggtggtattgatatgatcaagctaagctatagagagagagaga

SEQ ID NO: 13770 - DNA, 487 bp, Oryza sativa
  Clone ID: uC-osflcyp160f10a1
gtgtttttccaatcattgatggaaaatttcctttaaccagagcgccgtttgcaattcccgctccagcgctgatgacgatctctcgttgaatgccgagggggttcctcacactgtgtagttctgctggatcgtgtcgatgtccagccccttcagcttcaccaccgattcgacgtggcccttgagagtgttcagctctctcagcctcgcgatctcagctcgtctcttggcttgctcagcgatctcagagagctcgcggtagctgctcttgtcgttgaagagcgtgttggaggcgacctccggtggctgaaggccgtgaagtgttctttgtgcgggggcccatggtgcctccctctgctccctaccgtaatccttcttggtggtgaatgcaatcttgtttctaaggaggttgtcccaggcccttccactgagcacaaagcggatgaagaacttgacgatgtcaagagggaggttgacacaatgctgaaag

SEQ ID NO: 13771 - DNA, 495 bp, Oryza sativa
  Clone ID: uC-osflcyp160g06a1
tgtggtatctgtgcaagctgggcacatgtctcatcattcctccctcagcctaggaacagtttgtcctaaagctaagtataatgttttacaataattccacaacttgcatgggatacactagctggttttacaaagcttccaaagggaaggggaaaataatatattggtgtttattgatactctaagcagataaaaagaaaaagaaaaaaaaaaggaagcattagcttgctcagagaaactaagaagctaaagttggagtgagtgtatagttagtggcatgggctgatacatctccatttgacataatggttgcctgcaaaattgcccaatatcctttaagttagtatttgcacatcttgcttgagtatatctgatcacctaatgagctgactcttgaaccctgcatgtttgtatttttggccagtaccctaatcttacaacatgttggtaactcaaaatcagtaaaagtttattttctctgtagctctgagaatg

SEQ ID NO: 13772 - DNA, 341 bp, Oryza sativa
  Clone ID: uC-osflcyp160h10a1
ggctaaaggggggtggaaaaaaattaaaaaaaataaaaacccccggcaaaacggttttttctcgaacattttttttattttacaggccaccaaaacccacaagaaccccggccggttttggtgggttcgcccatggcccccggggggggggggaccccccggggggggccgtgcttgagcccccccttccaaacaacggtaaaccggcagaaggacatggggcccacctccgggggcccccccccttccaggaagggcaccacccccccggggaggaacccgggcaccaccccggggtacaatgggtcccccaaagaacccgggccccggacccccttggg

SEQ ID NO: 13773 - DNA, 268 bp, Oryza sativa
  Clone ID: uC-osflcyp161a04b1
ccctaattccctccacacacattaaccactgcacattacgcagtcagcgacagcgaggatggccggccgagccagctgcgtactcattctccttctcgccattgccggcttcggcgacgttcttgccgccggcggcgcgacgccattgtcgtcgtcgtcgcaggtgagcacgactacggtagctggattgaatgaggtgaaccgggatgcttgcgtgcatgaacgggtgcttcacgcagattgttcgggtgcgccttcggggtgcatg

SEQ ID NO: 13774 - DNA, 290 bp, Oryza sativa
  Clone ID: uC-osflcyp161b01b1
gctttaatacgagacctttttctcaggaacacgctgtcaccttacctccacgctcccctcccgcggcagctgaacagagacgagctcaccccacagtcccccacttatcccactcaccaccacctccagtttttgtcctgacaccagctaacagttaaaccggttgctgttattagtacgcgccaccacgacgcccacgcacattatcccttcgtgcaaaagcctatcaacagctaagccaaacagggtcaggagccggagccgtccgggagagggaacacttgagcgat

SEQ ID NO: 13775 - DNA, 433 bp, Oryza sativa
  Clone ID: uC-osflcyp161b08a1
cagcttactgccaataaccctaacaccgtggcttcttaactacacataagaatgttgcctgtcaagcatcaaacatgtacagcaccaaacatatctgtcttgggagtaatatgttatatacagcaacaccagactttacacaccaggcacgacctttcttgcaccaacaaacacactacgcacttgggagggtgaaagaagcaaagcaaccactgatgaacactttcacgtttgctcgttgtgaatcgaaaatttctttaggccccaaagcacccgatgagtttcttgggagcatggccggtggcacggtacttggctgccatctcctcggcctttaggacttcctcgccgcgctttgcctcgaccattgctctcttctcctcagcttccttgtggacgatcgcgactttgttcttcatcttctctgcatatt

SEQ ID NO: 13776 - DNA, 353 bp, Oryza sativa
  Clone ID: uC-osflcyp161d08a1
ggtgagaattcaaaaaaatacgcgcttaccccatcacaaaacaaaggtgagcacacggactacaccatgagtttagcataagtaataaacctaaaaaaataaagacatctcatactcttcaggctaacatgctctacacacaacataactggagtggaattcctgatgggacaagatcaacctaacagatggacaaggacatacagacacggcagaacctttccgggaagataagactgtaacaggggggttccgtgcacgttcaactgtcattgccatcagcggaacatccaacctaccgggaagcgcaaattcaagggcctctggacgacacctgtaggagggcagtgatt

SEQ ID NO: 13777 - DNA, 434 bp, Oryza sativa
  Clone ID: uC-osflcyp161e06b1
attgtgagttcacttatatgtctactcagatacttcactttttgggaaatgaaggtccaaagacatcagatcctagtaaatacatacgttatatatataacagagtgatacttgaaaatgctactgttcgagctagtgctgtaagtactttggcaaagttcggtgcattggttgactcactcaagcctcgaatttttgtccttctgagacgctgcctgtttgatggtgatgatgaggtgcgtgacagggccacgctttatctcaaattgcttggcggggaagctacagttggtgaaactgagaaggatgtgaatgaatttctttttggttcatttgatattccactagttaacctggagactagccttcaaaactattgaccattagaggcaccttttgaaaatttatctgcatctttgggaactaaatcacaa

SEQ ID NO: 13778 - DNA, 195 bp, Oryza sativa
  Clone ID: uC-osflcyp161f01b1
tgcaagcgcgccgcggacggaattggccgggccgcacccacgccgctctgttagtctaggacggcatcatcgccggtgctgctgttgctgcgggagatggtgcacccgccgcctcgccttctcctgcgatggacgtggccgccgcccaatgagggagcgcggaaagccactctgcgtcaacgacaaccgtggcaa

SEQ ID NO: 13779 - DNA, 213 bp, Oryza sativa
  Clone ID: uC-osflcyp161f02a1
cccctgaagatcgacgcagacccatttatatagaagaggatatttatatagatgtgtgtgtgagaatcaacccatatgacctaccaaaaagaaaagactgccaaaggaaggtgggcatgccaaacactcctctcctccttcacatgaaaaaaaccattatcatagaccatccatttgctgcgcctaaaacagctctcaaccaattccaagtcc

SEQ ID NO: 13780 - DNA, 281 bp, Oryza sativa
  Clone ID: uC-osflcyp161g03b1
gaaggcaaatgcattggcagaggcgacatgagcgagccatggtaaccagcggaaagcaggcggcgggcgcccgggccgtctggggtggattgggaaccaccggaaacggacgcgcgagtgaccttcgtattgctcatgtaataagagagctgatgaatggcggcactgtacagcaataaagagcttggggaagacagaagcgaggaccctgatcatggaaagagggcacaagctttaaaagagctcttcttgcctagtttgcgggactatgtcaagacaat

SEQ ID NO: 13781 - DNA, 366 bp, Oryza sativa
  Clone ID: uC-osflcyp161g06b1
gtttaatcaagccaagagtagggctctaggtgatgacaattcatcaatggttagctgggtgacaaaggactcagacacttcagcgatggcctggaggagtaagaagtcgctggcaggaattgccaaggagattgatgaatacttcttgaaagcagcggcgagtgggagtgacatcgtcatacttttggactcttctggtgggcagccagatccctcagagttagaggcaaacagaggtgcaggaaaaaattccaaatccgccaaggttttttccacaattttcttggagctgtgcattcaaatctgcgcaagctaatagacaatcctcaatgcattcaagggaagcctctggatatggttaccatg

SEQ ID NO: 13782 - DNA, 443 bp, Oryza sativa
  Clone ID: uC-osflcyp161h02a1
gggggagaaaagaaatatcgcctttcccatcgcaactggattagagttgaacatggtatcatgtaatttatatgaatagcacgcatccataaacatcttgctgccaagatactcgtaactcggacccaaaacgttccaactcggcctactcatggactacatttcgagttctcgataaaagcgagatccgaacagacctgatccaaaagccaacctgcgactctaagcagaaaccatacacaaacaaataaataataacaagtgaacgcccaataggtaaagatgaccctgacatcttccgactctgcccaaatgttctcaacatagctcatggctaacgacttttaacttccatagacgggaagcactgacaaacttacccttcccaccgagcactagtgttctggaggtaacacactgctgattactctgaggtggcagct

SEQ ID NO: 13783 - DNA, 296 bp, Oryza sativa
  Clone ID: uC-osflcyp161h04b1
cctgttttgtgacaagataatggggggattttgaagtgcaaactttaacttactcgtagccttcaaaaatataaactaactatcctaactaaccaaagctaacgttaatatgatgaaagactaattttgtttttggtataatgagtgcagaaccatttccattactgatttattgtgcataaattattcaatatgttaaagaaaagaaaaaacaaaactgctttgcttacatgtatagacaaacttagtgattctgtaccgcgagattaggttttagactcggtaaattttggaga

SEQ ID NO: 13784 - DNA, 510 bp, Oryza sativa
  Clone ID: uC-osflcyp161h10a1
acggacttgcgcggagggtgtttgtttaggaagaaaggggatgtgccatttccccgcaaacataggtgggcttacatgatgcgggaacatttcaaccaagcatgatgcatactcaaatgtaacacaaatatgtgatttggggggcaagtcacattggtcagattgcagaacggtattcaggagtgaggggggaagaagccagccacagagtaccagcagacacagaccttaacttacaccttggaaaatgcaccctgtcgacatagcgctgcgacatcggcgtctgaacattcctgcggaacttttgggggtcagctcggaggacagccggagcatcatgggttaagggatcctcgggattgggttggatgaaaagaaggtttaaaccatatacaatgggatggaatattaagacaggttttcagtgttcacgcagggtattaggcagacatttccgttaaggcaatattagggtgataaccttaggcgggcacttgaccttgggcggtt

SEQ ID NO: 13785 - DNA, 451 bp, Oryza sativa
  Clone ID: uC-osflcyp162a03b1
gtttgagtgtggcatgagcgacgacgaggcggaggggggcggtggttaggaggaggaggacgacgacgacgtggtcgtggtggtccccccgccggcggcggcgaggttcgttgtccgtgccgcggtcaaggcggcgcccccaactgcagatgggatgttgactacaaagcttgtccaacatgatggacctactgctagatcagcaaagcacaagaggaagaatcagtacagggggatccgccagcgttcctggggcaaatgggcagctgaaatccgagaccccagcaagggtgtccgtgtttggcttggaacatataacactgctgaggaggcagcttgggcatatgacgctgaagcccgcaggatccgtggcaggaaagccaaggtcaacttttctgatgaaccgctgttgctcaaagctcttcctgaagcaaacgctgccaagcagaga

SEQ ID NO: 13786 - DNA, 173 bp, Oryza sativa
  unsure (1)..(173): unsure at all n locations
  Clone ID: uC-osflcyp162a06a1
aaaaaaaacgccaaaggnccccacacggaagcaaccaaccnagcccacaaaagacagacaggaacccccccaagcccccccnnnncctgggcaaaaacgaagcagcaacaaaanaaaaccgcccaaaaancccggggcccccaagggcggggaacgacgacaaaaccgggggg

SEQ ID NO: 13787 - DNA, 298 bp, Oryza sativa
  Clone ID: uC-osflcyp162b02a1
ggaaataatggtaaaaaaaagaacggggggaaagaaaaaaaagaaaaccgggggggaaggggaaacgcgggggaggaaaccgggggaaaaacggagcccgaactcagaaaaagaaaaaacaaacctatagggggggggaaaaaaggcaaggcggtgccaccggggggggacaaccacgcgggaaaagggggtccgattaaacctaccgaaaacaaaaacggaaaaaccgggggaggcaaaggcgggggcccacgacgaggagctgaaaaggccgtatagcgggggggcaaacggggaa

SEQ ID NO: 13788 - DNA, 310 bp, Oryza sativa
  Clone ID: uC-osflcyp162b10a1
gggtgggcccttaaccaaaacaattttgtttattttttttattttgtaaatacagagttcattacgaacgggaacaaaaaaggaaaaagaaaaaacaatttgggaaaaaaaatatagggtgcggaaaaaaaaatttgggaaacaaaggtgttttaaaggtggaacaggttcgagggaattagaatacaaaagggaaacagtaatggaatttgtgagaaactgaacatcaaaaaaaatattggttgccaaataaaacaaaatgggtttaaaaagaaaaatggcctgaccaaaaggggtgaccctggaaaaa

SEQ ID NO: 13789 - DNA, 398 bp, Oryza sativa
  Clone ID: uC-osflcyp162c06a1
aaccaaaaatttgaatcgctttattttgtgacggaagattccatccagtacatctcacaagtaccttgttccagaccaaatacatatatattagcataaagcaaaagagggttgcgttttccagcgcacttcaaagtgccagcttcactcgttgctgggttctccgcgctccagcttacaacggaagcaagtgttattcaccggggatcgttatctaatccttattattgcataatatagcgtccatcttgatgagcttcgtcttggtgcatctcgtatttaggagacagggctagcagtaatgccccatatttcctttgcatactgagcgatagtacggtcgctgctgaatttgccacttccagctgtgttcagtatagacatcttgatccattttt

SEQ ID NO: 13790 - DNA, 586 bp, Oryza sativa
  Clone ID: uC-osflcyp162c11b1
tggctggccgccggtcccgccggggaattcctggtgggaccaacccgtccgcctactcgtccgatcaggggacaagcaaccttgatcttcttaccggacttcggaaatttgcagatgatgaaaagcttcatgctgagtgggcatcagctaagttggctagcaaaaaacgcctagccaagcatgtgttggatgtgacaggtgttacaatcgacccaaatagcctttttgatatacaaattaaacgcattcatgagtacaagagacagctgctaaacattttgggagctgtttacagatacaagaagttaaagggaatgagtgcagaggagagacaaaaagttacgccacgcactgtcatgatagggggaaaagcattcgcgacttacaccaatgccaaaagaatagtaaaattggtaaatgatgttggtgctgtggtgaacaatgatcctgatgttaataaatacctaaaggtgggtgttcatttccaactacaatgtatctgtggccgaggtgcttcattctgggagtgaactgtcacagcacatcagtacccgaggcatggaagcagtggaacgagtaatatgaa

SEQ ID NO: 13791 - DNA, 382 bp, Oryza sativa
  Clone ID: uC-osflcyp162d02a1
gggaaaggacggaccttagctttttaaataccagacttgatttacaaaagatgcccaataatgtttaagccaaccgagaacacaaccttgacacttaaaaaaatttggattaagccacatgcataccaaacgctttctaactgggaaaccaaattatttagcctgcaagagggtcaacgagatattgggcaagcttggagggatcttagtttttagggacatttttaggcacccttacggggtcaggtttaaacctaggtaccttaaccaacttagccaattgaaccattttatcattcctggggatattgggacctaaaatttttttggaggttggaaagcaacctggcgaaaaaacaaaaactttggatttatttggaaa

SEQ ID NO: 13792 - DNA, 323 bp, Oryza sativa
  Clone ID: uC-osflcyp162d10a1
gggaaaaaaaaaaggccataattttggggggccgggggggcaaaaattttgggaggaaaaaaaaaaaatttaccaggggttggcagggggggaaaatttgggggaaaggggggaaaaaattcccttttttttaaaaggaaaaaggggggaaaaaaaagaggggaaggggggggggttttcaaaaaaaattttaacccgggggggtccaagaaaaaaaaaaaaggcttttaaaaggggggaaaaaaaatttttaaaggggggggtttaaaacaaaaaaaaaaaggggggcggttaattttgggggggggtttttttgttttttt

SEQ ID NO: 13793 - DNA, 373 bp, Oryza sativa
  Clone ID: uC-osflcyp162e06a1
tttttttttttgttttttttttattttttcggttttgccctttccccttttttttttttttttttttgggccgggaaaaccttttttttttgcaggaagacccaaaaaaaagacccccgattttggccttagccataatcaaaccctggattggcaaatttttaaactttaacatcccaggaaaaaaatccaaaggttttgacggggtttttttttttaggggggggtgccaaaaaaagggtaagctaaaactggaattacaaagatggctaagggaggttcccattttaagactaggccatcaaggctgggggggggggagcccttggcccacggggaacaagggggaaagggttcctttgggggaacaatt

SEQ ID NO: 13794 - DNA, 420 bp, Oryza sativa
  Clone ID: uC-osflcyp162f02a1
ccttagagatgccgcctttttttttttttttagatgcaattatcagataatactgggttcctacaatttttgcaggtacaccaatgctctcgtacaaaatcaaggcgtagggtaggggcacagtaattgatatacacactaaatactctgcttaattacacactaattgcaaattaagtggtaattaatcactcaaagctaaggcagtgagcatgtaatcgcttcagctggacgagctctggagcttggacacgaagctggaggcggcgaaggcggtggagccaccgacgacgcaggcgagcgcgaccacggcctggacggcgacctcccatgggtactcctccgggacgaggtagacgacggcggggccggcggcgagcagcagcagcgcgacgccgagcagcgcgccgggggtgcccg

SEQ ID NO: 13795 - DNA, 441 bp, Oryza sativa
  Clone ID: uC-osflcyp162f10a1
acagtgaatagttacagttgctccaaaataacacagttacaatttggaaacaaaattacatagagagagagagagagaataaacaggatgacgatcgaattaagttacatgtatatatatttctactgaaattttatcaagcaccgaggagctgaagatcgatgagctagtgataatactagtagtggatgtcgttgacgagggcgcagtgcttcctgatctcgccctcggagccggtcttgacgccgaccatgcccagcttcgccatggacctcgcgaacacctggaagaacacctccggcgggctggacaccacgctggcgatgttggcctccgcggcggcgtcggtgacgagggcggcgtcggactggaagagaccgcggcgcctgaggaggccgcggtagtagcccaggtcgaaggtgaggaagctgcccgggtcca

SEQ ID NO: 13796 - DNA, 381 bp, Oryza sativa
  Clone ID: uC-osflcyp162g06a1
ccgaaaatataatctgacgagacaactgataattcacgcatttaaaaattccgtacatatgaattcggtaggttataagtaaacaaaaattgagcagtagagccactgaacaaaaattcagtagaaaattcagccatgctctattactactcagtttggggctttcctcccagttttccctcgcataccgcctttttggccgccgccctttttccccttgcccttagttcctttgccacccttaactttgctggcccttttgccctttttcatacccttatccaccaggattttccctttgccagccctcacctgaacgcccttttttgggacaacgaactcctttgggggcttttttggaatcgcctttttggaaatcct

SEQ ID NO: 13797 - DNA, 434 bp, Oryza sativa
  unsure (1)..(434): unsure at all n locations
  Clone ID: uC-osflcyp162h02a1
cactgaaaattatacagngactgagtactcgattacacgattgagttgttcagggttcagataggaaaaacatcttggggactagagatagagggaatcgacagatgcgcagcagtagcgcgcgggaaacaggacatcacgattgcgttgcatgtcgtcggctgcgcagcggcggcgcggggcttaagacctgctcttgaatgggatcgccctgatgatcacctggtggtagatggcagccagggcagcgccaacgaagggaccaacccagaagatccaatggtcattccaggcatggtccttgttgtagatgatggcagcgccaaggctcctggctgggttgatgccagtaccggtgatggggatggtggccaggtggaccaggaacaccgcaaaaccaattggcagtggggcaaggataggaacatgtgagt

SEQ ID NO: 13798 - DNA, 360 bp, Oryza sativa
  Clone ID: uC-osflcyp162h10a1
tttttttttttggtttttttatttttttttgttttgtcccttttaaaaatttttttttttttttttttttatttttttttttttttaaaatattattttatagtttttaaattttagaaaaaaaataaaaaagtcaatcgtgtgggggcatattaaagggaaaaaaaaaaccggaaaaaaaaaattttaaaaagtaaaaaaagaacaataaaaaaaccctagggaaatggggttaattttgaaaaaaaagaataaaaattgtataaaagaaaaccttaaaaaaaaaaagccaaaaagttaaaaaaaaaagtaaaaaaaaacttttaaaaaaatttcaaaaatttagcaaaagggttaggg

SEQ ID NO: 13799 - DNA, 415 bp, Oryza sativa
  unsure (1)..(415): unsure at all n locations
  Clone ID: uC-osflcyp168a08b1
tataacaatggcattttgtttacagaatcaggcctaaagggttcccacttcatagaattgtgtgcccagcgcaatattcctttgatattccttcaaaatattactggattcatggttgggtcaaaatctgaagcaagtggaattgcaaaagcgggagcaaaaatggttatggcagtttcctgttccaaggtaccgaaaattaccataattgttggtggaagttttggtgctggaaactatggaatgtgtggacgtgcatacagtccaaattttttgtttatgtggccaactgctaggatatctgtcatgggtggcatccaggcagccggtgtccttgctcaaatagagaagaacaacagaaaaagacaaggagtgnagtggaccaaagatgaggaagaagccttcaaagcaaaag

SEQ ID NO: 13800 - DNA, 384 bp, Oryza sativa
  Clone ID: uC-osflcyp168b02a1
ataaaaaaaagggggggaggaaatttagcaaaaaaaaaaaaaggggaaaaaaaccccaaaaaaaaattggggggaaacaaaacaaaaaaggggcaaaatagcgccaaaaaaaggggaaaaaaaaaaagggggaaaaaaaaaaagggctgaaaggggcccctgcccaaaaaaaaaaaaaaagggggaaaaaaaaaaaaggggggcaccaaaaaaaaaaggggcccagggacaaaaaaaaattttttttttccccaaaaccaattttttttttttccccaaaagggggggggggccaaacccaaacgggagggggaaaattttgaaaaaataaaccacaatttccaaaagggaaaaaaaaaaaattttccccggcgggggggaaaa

SEQ ID NO: 13801 - DNA, 331 bp, Oryza sativa
  Clone ID: uC-osflcyp168b04b1
ttaaaaatcaacccaaccgtcgacggatcgcgctggttagaacgatggccgcgtcagcgctgcaccagaccaccagctgcctcgggaccggcccttgccgaaatgagctcgtccgacgggtcggcgactccgggggccgcatcaccatgcgccgcaccgtaaagagcgcgcccgagagcatatggtatggacctgaccgtccaaagtacctgtgcccgttctcggagcagacgccatcgtacctgaccggagagttcccgggagactaccggtgggacacggcggggctatcggtcgacccggagaccgtcgcgaggaacagggagctgga

SEQ ID NO: 13802 - DNA, 235 bp, Oryza sativa
  Clone ID: uC-osflcyp168b10a1
tttttttttttttgttttttttgtttattttttttttttttttttttttttttttttttttttttttttttttaaaggaaaaaaaaaaacctttggaaaaaaaaaaaaaaaaacaccatttgaaaaagaaaaaataaaaaacccaaagggggcggaaaaaccaaaccttggaaagcaaacttctaaatttcaaaaaaagagtttttttttttttctttagctcgcccggtttttg

SEQ ID NO: 13803 - DNA, 442 bp, Oryza sativa
  unsure (1)..(442): unsure at all n locations
  Clone ID: uC-osflcyp168b12b1
ttttctgtagagggtacgaggctgcattaggccacctcatcgatgagacgcaagagtcaaagtcaccacttgacaccgaaggccatggcacgcacaccgcttctactgccgcaggatctgcggtccctggcgccaacctatttggctatgccaatggcaccgcccaaggcatggctgtgcgtgcgcatattgccatctacaaggtgtgctgggcaaaaggatgttatgattctgacatcctcgcgggcatggatgaggcgattgcagatagaagaaatgtcatatctctttccctgggtggtcggagtgaacaactctacaatgaacccacgttcgttggtgcattcaatgccattcgcagaggcatatttgtctctgctgccgncgggaacgacggccctgacatgtctactgctaataaccttgcaccatggatggtcac

SEQ ID NO: 13804 - DNA, 362 bp, Oryza sativa
  Clone ID: uC-osflcyp168c06a1
cttgacaattcgtttgttccagcttgacattattacaggactataaccgtgggggggaataaccaggaaaacggaaacaatgtgccaccgcccacgcactgacagagccaacacacaagaccgggagaaggctaacaccggaccggccgacgataagcatgactgaacaccgctggaccgacataggaacgcagacgagatcaccaaaacgagcaccctcacaaccaacgcaaagccaactactagcgtgtgcttgcaccaaccgatcgacagggcttggctaggggaagccaaaacgacgatttcaagaagagaagcgatcgaaaaccgccgtaaccgtgcgaaggggctcaaagaagccg

SEQ ID NO: 13805 - DNA, 171 bp, Oryza sativa
  Clone ID: uC-osflcyp168d02a1
agtgatgggttttaagagcactaagaaaatgtatatgcaatgacaaccaggtgaagccgggggacaaagaagagaggaaagcgggacaagcaaacgccccgaaaaaatgacaggcgaacaataagggggcaaacaagccaaactgattaatcaaacactgtatggtcaacc

SEQ ID NO: 13806 - DNA, 307 bp, Oryza sativa
  Clone ID: uC-osflcyp168d04b1
ttttggtgctgtcactactatggtctggtttttgctttggcatcacgcgttatgtcaaagctaacggacggaagttcacgaaccgtcctcgctttcacctatcgcgccattgatgcgaacaaaagggattatatacacactcatggccgactcacctttctgggcatgcatgtgtgctctcagttttgtatcaagtttaactttccctctttgtaagattttgcacatgttctgaccatcacggctttatattttcttgttgaatgggaacatcaggaattgattcgttctgaaataaacatatggt

SEQ ID NO: 13807 - DNA, 459 bp, Oryza sativa
  Clone ID: uC-osflcyp168d10a1
aactgaaagggtgggctggggtcataataatctcttcatgtctacaaagaatggatcatataataacagttccaatctgacaaaaacccctattcctaaacagatgggaggggctaggaaactagaaagaaaagagagaaaatgtgggcgtgaagagcagctcatagcaacatacaaaaaagcccaacatgttacaatgggggctgtttcaaaactaaataaatttcgcctcagccctacctagggactcaaaatttgcaagacatcgccattgccgcagcaacgttgatatgtctttggccctgaatctgtgttacgcagctaaatatcaatttcacaatttacataaaatagaagaagaaataaatcctagggaattcctaggccaaaagcaaagaatcgtgtaaagctcaagtggacgtgtagctggagtgcttaaaaaggttgttgagagctttt

SEQ ID NO: 13808 - DNA, 248 bp, Oryza sativa
  Clone ID: uC-osflcyp168d12b1
tttacctcctccacctcctcctcctcccccggaccggatcggcccggttcctcctcttccgccgccgccaccgccgccgcagataggagaagatggccgcacttgataccttcctctttacctcggagtctgggaacgagggccaccctgacaagctctgcgaccaagtctaagatgctgggcttgatgcctgcctcgccgaggcccttgacagcagggccgttggggagacctggcccaagacaaac

SEQ ID NO: 13809 - DNA, 414 bp, Oryza sativa
  Clone ID: uC-osflcyp168e06a1
ggatgaaaaatttgtggtgccttttattatcaaatcaacagaatagacaaattcatgtttctgtggcatggatgatacggtgaaaccacaaaagcacaactagaggctgggctcctgactggggaaggcacattcataggaaaaaaagatgaataaacacctacgaaagcgttcttttttgtttatcctcacctacgaaagggttgggtctcggtatctcttgaagagggattcgatgtcatcaagaacttccggtgccaaaggccgcggagcactggtaaatgcataaatgttctccttgaactgaaccatggtcgttgctccgatgattgggctagctgtgaatggacggtcacgcacaaagcccagagcaagctggactggagacaggccgagctttttggcaagctagac

SEQ ID NO: 13810 - DNA, 336 bp, Oryza sativa
  unsure (1)..(336): unsure at all n locations
  Clone ID: uC-osflcyp168f02a1
agagcggagcacactaagattcattcattcattcatttgatcaaagcaaacgagacgagctttcttcttgcgatcaaaaacacagatgggcaaccacacagttaacacaaactagatagttccacacaaaactaacgatgataacgatcggatgatgatgatggtagctcgattagatagatagataacttggccatgagggccccaccgntcagttcctccagttcccggcggagttgccgccgccgcggctgccgtagccgccgccgtagccggcggcaccacggacgacaccgtagccaccggcaccggcgtagccgtcttcacggggctggc

SEQ ID NO: 13811 - DNA, 373 bp, Oryza sativa
  Clone ID: uC-osflcyp168f10a1
caacggaccttaaataaccccataaaatggggggataaacccgaccaaccaacagaggaaggcattaaaaaaaaaaaaaaaaaaaaaaaggggggcttggtagcccttaagaagggagggggggaaaaaaaaggctggacaaaggttttggggaggaaaaataatccactgggccttaattataaccggaccgggcataaggggccctgggggagggggaaaataaacggggggactttcccgcggggccgggggccgccgaaggcccagccgggttttaagggggcgcgtggggggcaaacaaaccccgggaccccccggggacggggggggtttccgaaaacgggcccactgaaaagggggggggggggac

SEQ ID NO: 13812 - DNA, 155 bp, Oryza sativa
  Clone ID: uC-osflcyp168g06a1
tttttttgtttttgcgaaaaggaaaagaacaaaggcacaaagaatgaaaaaaaaaagatgggaaagggcccaaaggaaaacctaaaaaaacaaaactggaaaagatcaaaaacattggggctagaaaaaaaagggtcaaaacaattcaccttggg

SEQ ID NO: 13813 - DNA, 253 bp, Oryza sativa
  Clone ID: uC-osflcyp168g08b1
ttgacgcgtgggctccagcctccgcctccgccgccgccgtcagccgccgagctcctcccgcgcgctccgagcccatcatggcggacgtcgaagacgagacggaggtcgccgccggagcacagtcaaagaagaggacgtgccggaagcacagataccggagcgacaatctctaaactgatggcgaaacattcagcaaagagctgctaaagctgttgatgacaggtacactgattgagttccagataaacgtgga

SEQ ID NO: 13814 - DNA, 376 bp, Oryza sativa
  Clone ID: uC-osflcyp168h10a1
gaaaataccaggtaaactgtcgataaattatcatcaacttgtcacattatacaagcaagcaagcacccaacatcgactttattctgttaagtttctcaattataactatagtttctagaaaggcgcagccaatgctccaactttatcgcggggaatgaggcgcaactctgagccatgctttagaaacacattgcctgcactttgctgggggttgatgccaactccatcgttggtgatgatggcgctggtctggggcgggaccttgaactcctcggcggcgaacttgagcaccgcggtgaacggcgccgccttgggcacgctaaacactttgaaggggagcttgggggcggaggtgaggatgatcttgaacgacacc

SEQ ID NO: 13815 - DNA, 474 bp, Oryza sativa
  Clone ID: uC-osflcyp169a06a1
gaaataacaggagcagttgaattagatgaacaattagaattccctgaacctgaaacacataccgactgttgaattagatgaacaattagaatcccctgaacctgaaacacatacccacacctacaaggctacaactgacagcgtacaaaaattgcaggcagtgtccgtatagagcatggagattgaagaagtttcaaagctgcactgtggacgttcagacttcatagtgcaccaggtgcgtctcatctcatgcttatattcaagctgtttctcattgttctcctcccaacacccatattgccctttgtcatcatggcaacgaattccccgtagtcaatgcgaccatcattatcctgatcagcttctttaatgacgtcatcgaaaaaagcatttggcatggtatgcctctttgcaagcttgctgaactcattcaccgaatattaaccactgccatctttgtcgaataagaaaagc

SEQ ID NO: 13816 - DNA, 445 bp, Oryza sativa
  Clone ID: uC-osflcyp169b02a1
tttttgttttttttttttttttttttttttttttagcatccaaataatctgcccacagagattctgctctgctgtgtttgcactagcttaccgatttgagtcgatacagtaaggtaaaagagtcgcacaagcacttgaagggtacaagcctgggttccgcaccagaggatataaccaatatttgaaaggaacattttaaatggacaagaaattagaaacctactagagttattacaggactgggttacacagatagtcacacgattcagctccttggagcacagctggccaagtgagtcttgaagttctccagctttgcaagaacttcattttctggacggtatatcaggtcactcatgcgccatatctgcaatgttccacctccaccagtactctcaccattatcagacacactcacaatagttcaaggatccgaagaattcca

SEQ ID NO: 13817 - DNA, 130 bp, Oryza sativa
  Clone ID: uC-osflcyp169b10a1
ctttgttttttgaatgagggcgcaaactccaactaaaattactaggaatccttccaattcctgagagattggttgctcctatttctatttcacttttcggccattcaacaggaaagtcttcttttgggaa

SEQ ID NO: 13818 - DNA, 551 bp, Oryza sativa
  unsure (1)..(551): unsure at all n locations
  Clone ID: uC-osflcyp169c02b1
cttgactcctctctcttcgtctcagcttggagctcagtctttgatttttcttcttcttgttgtttgtgcaattgtgcatcgttgttagctgggaacaagcagaagaatggcggacagcacggcgacctgcatcgacatcatcctcgccatcatcctgccgccgctcggcgtcttcttcaagttcggctgcgggattgagttctggatctgcttgctgctcaccttcttcggctacctccccggcatcatctacgctgtctgggtcatcaccaagtaggaggagaattactacccttccaaggtgatggtgaattggtgatccggagcctatgattggttgtgcctggtgtaagcggcagttgtcaaagctgtgattttctggttctttggacggatgtgctcgctgtggtgatgtgtatgctgtacatctgttttggtgtttgtgcttaggtccctcttctgttacaacaattgttttctccctgttcttccggngtaccttctncagtttatcttctgcaccttctcgtncctgactttgatattaatta

SEQ ID NO: 13819 - DNA, 371 bp, Oryza sativa
  Clone ID: uC-osflcyp169c06a1
ttttgtttttttttttttttttttttttttttttttttttttttttttttttttttttttttttttttttttttttttttttaggctcaaggatttgggggcccaaccaaaagcccccttgggtcaaaaaatgggtgccccaatttttttttttagcaacatttgggcaagacttttggggatagcaaaccaaccccctgggggggggggactttggggggaacgggaaattggggcggggcctttggcaaagggaaaattttccaaaacccggccccaaatggaacagggtcaacttggggaaatatttaagggggggtcccacaaaaaaaaccttaatgggaaaaggggggtttttaccgggctaaaaa

SEQ ID NO: 13820 - DNA, 362 bp, Oryza sativa
  Clone ID: uC-osflcyp169c08a1
ggagggaaaagaggatgcacatccacatccaaccttattcatagatagctaatcaagtcattacacataatacagcacaggtacaaacacagacagacggacggacagaccacgggatatatgtcctaagattaatgggcttacagcaagttaggcatgataagagatattatgagcatgatgggtagggtacacctatgtatgtatgtatgttgctgggccacaccacaattataccatacatacaagcaagctaaactgatgcagagcctaataaccggctgtcacccagcaacgtcagttccttggtcgatttgattacacaatgcaaatgcgaatgattcctaaaaggcgtacattac

SEQ ID NO: 13821 - DNA, 465 bp, Oryza sativa
  Clone ID: uC-osflcyp169d12b1
caaaaaacctcgcaaaaccctcggccctcacccgccgccgtcgccgtcgcctccaccggtaaacggcagcatgagtcggcaccctgaagtgaagtgggctcagaggattgacaaggtttacataactgtacaattagctgatgctaaggatgctaaggtcaatctggaaccagaaggtgtattctctttctctgctacagctggaactgatgggaacttatacgaatcaaagctagagttgaacgacaaagtaaatgttgaggagagcaaaataagtgtaggtgttaggtccatattctgtattgtagaaaaagctgaggccaaatggtggaagaagcttgttcgagatgatcaaaaggcaccacactttgtgaaaagttgactgggacaaatgggttgatgaagatgatgatggggcttgatgtcaacgtggattggaatggaacttttcgaattttggtggca

SEQ ID NO: 13822 - DNA, 447 bp, Oryza sativa
  Clone ID: uC-osflcyp169e08a1
acaagttacagatctctcgatgtatatacatactatgatcctcgcctaatctcttcaatgtgtgcttcctcttcttactgtatagaagaatgaaataattggccgactagctgcgtttggtttccagtttcttcagcatttacctatgagcccggctacgttttgggcaatatcttttttggcctgcaatgagaccggtgaatcgccaatgtacataccgaacagagccctgcagaggtctttgctcttaacagcaccaatttgtctgccatcaatttctgttattagctggccatcagaagtttggcagaagtcgatctttgtacccgcaggaataggaatgtcttcattgaagtaagaaccaaaagttttcaagcaatgataatcagtgttgggattcatcttctggaggcgcaggccaagtgacttctcaatacatctcgcact

SEQ ID NO: 13823 - DNA, 388 bp, Oryza sativa
  Clone ID: uC-osflcyp169f02b1
aaccttttcggcgcaaggggacgggttcatggcgatcgggatggggttccagaacacggcggtggcggcgaagcaccaggcggtggcgctgctggtgcagtcggacaagtcggtgttcctcaactgctggatggacgggttccaggacacgctgtacgcgcactccaaggcgcagttctaccgcaactgcgtcatcacgggcaccatcgacttcgtcttcggcgacgccgccgccgtgttccagaactgcgtcctcacgctccgccaccccatggacaaccagcagaacatcgccacggcgcagggccgcgccgacggccgcgaggccacggggttcgtgctccagaagtgcgagttcaacgccgagccggcgctcaccgacgccaag

SEQ ID NO: 13824 - DNA, 518 bp, Oryza sativa
  Clone ID: uC-osflcyp169f04b1
ctgaaggagtcgacatcatggttgttagagagcttacaggaggaatatacttcggccaacctaggggttttggaaagaacgacaaaggagaagacactggcttcaacactgaagtatattcagcttctgagattgatcgaatcacacgtgttgcatttgaggttgctcgcaagaggcgcgggaagctttgctcagtagacaaagcgaatgtgcttgaggcatctatgctttggagaaaacgggtgacttcattagcttctgaattccctgacattgagctgtcgcacatgtatgttgataatgcagcaatgcagcttattaggaatcctaagcagtttgacacaattgtcacaaacaatatttttggtgacatattgtctgatgaagcatcaatgcttactggaagcattggaatgctcccatctgccagtgttggggaatcgggaccaggtctttttgagcctattcatggttctgcgcccgacattgctgggcaggataaggcaaacccattagct

SEQ ID NO: 13825 - DNA, 416 bp, Oryza sativa
  Clone ID: uC-osflcyp169g08a1
ttgtttttttttttttttttttttttttttttttttttttttttttatgaacaagatggagacccttcatgatctttgcattaatatactccaattttgcaaccgtacaatacaaacaggctactatttggtttttttttcaccaacttataccaaccaaccaagggttaattaaacatgttttggaagggactgacattttcactgtattatataagactggtgaaagaaaccccacatgacccaaatacaaagttaggatgacaacttcaacaacaacaacaacaaacaacccccggaaaaaaaaaaaaaaacaacaacaacaaacaacaaccggggggacgaaaaacagtagctgaagccgatccaaattcctttggtggagaattgcgtttggatcacaacaccttgatggc

SEQ ID NO: 13826 - DNA, 421 bp, Oryza sativa
  unsure (1)..(421): unsure at all n locations
  Clone ID: uC-osflcyp169h12b1
gctaaggctgagacaaaggcgaatgcatctgttatatatgttccaccaccatttgctgctgctgcaataatggaagcgatggaggccgaacttgaccttgttgtctgcattaccgaagggatacctcagcatgacatggtgaaagtgaaggctgctctgaacaagcaatcaaaaactcggttgattggaccaaattgccctggtatcattaagccgggtgaatgtaaaattggaatcatgccaggttacatccacaagctcaggtcgtgttgggatagtatctcgctctggtaccttgacatagaaggcggtgtttcaaacaacagccgtaggctgggngcagcaacgtgtgttggtttgtnggtggatcccttcaatggcacgaatttgtttgattgcttgaaaggtttgtggatgatcc

SEQ ID NO: 13827 - DNA, 470 bp, Oryza sativa
  Clone ID: uC-osflcyp170b02b1
gcagactttggcttgagtaatgttatgcgtgatggtcactttctgaagacaagttgtggtagcccaaattatgcagcacctgaggtgatatctggtaaactatatgctggccctgaagttgatgtgtggagttgtggtgttattctttatgctcttctttgtggtacccttccatttgatgacgagaatattcccaacctttttaagaaaataaagggtggcatatatacccttcccagtcatttgtcacctttggcaagggatttgattcccagaatggcttgtgtatgatcccatgaagaggatcaccatacgtgaaatccgtgacatcagtggtcacagttggtctccgcgttattaagctgtgccacctcctgacactgcacaacaggttaaaaagctcgacgatgaaactctgaatgatgttatcaatatggggtttgacaagaataggctaatcgaatcacttc

SEQ ID NO: 13828 - DNA, 532 bp, Oryza sativa
  unsure (1)..(532): unsure at all n locations
  Clone ID: uC-osflcyp170b04a1
nttttcttttttttttttttttttttttgttttatataaatttttggggggttttactcttttatgaaaaattttttttttttattaaaaaaaaaaaaacgccaacccttttttttttttttctgaaaaaaaacaaaggggcccctcgggaaaaaaaaaaaaaaggcccccacaaccccccccaatttccccccaccaaaaaaaaacagggaaaacccaaaaaccgtccccggaaaaaaaaacacccggaacacccccgacttttggggcaaacaaaaaccgggggaagggccacaaggggcacaccccccccggaaaaccccccccaaaaaaaaaaaaaaaaccgggaaagggccaaaaaagaaagagaatcccccccttaagcccccccaaaaaacccccccccggggggggaaaacaggccaccctaaaccacccccaaaaaaaacccccttgggaaaaaaaaaaaaagaccttttagggggaaaaaaaatcccaaaaaaaaaaccccccaccaaaaaaggggcccccc

SEQ ID NO: 13829 - DNA, 345 bp, Oryza sativa
  unsure (1)..(345): unsure at all n locations
  Clone ID: uC-osflcyp170b10b1
tacccacccaccctctcgccgtcgcagatccgatccaggaagagctcgccgccgccgctgccatggcgctctccgtggagaagacctcgtcggggagggagtacaaggtgaaggacctctcccaggcggacttcggccgcctcgagatcgagctcgccgaggtcgagatgccggggctcatggcgtgccgcgccgagttcggcccctcccagccgttcaagggcgcccggatctccgggtccctccacatgaccatccagaccgccgtcctcatcgagaccctcaccgcccttgcgcncgaggtccgctggtgctcctgcaacatcttctccacgcaggaccacg

SEQ ID NO: 13830 - DNA, 407 bp, Oryza sativa
  unsure (1)..(407): unsure at all n locations
  Clone ID: uC-osflcyp170c06b1
ggctaatttaattagcaccagaaatatggcttcttccaagatgacgctgctccccgtcctcctcctcctcgccgcggcctcgccggcggcgctgggcgccttcgacgtgaaccagatgctcgccgacaagtcccagtacgggtcgttcctgaagttgctgacgcagacgaaggtcgcggaggagacgaaccggctcaagtcggcgtcgctgctggtcctccaagacaaggccatgaagccgatcacgtcgctccccgccgacaagcagcggatggccatggccaaccacgtcctcctcaagtacttcgaccccatccaagtgggccgagatgaaagaccgcaccgtcatgctcccacgctgctgtccaacaccgacagaagtgnngcgtcgtccactacaccaaggc

SEQ ID NO: 13831 - DNA, 455 bp, Oryza sativa
  Clone ID: uC-osflcyp170c08a1
gggggaccgtaaatactatcttattgagagctgcatagatggaacaaatgtgctcatgtacactgggtataggattgggcacaaatatatatggatatccttattgcatccttatcctataaggattagtaacaccttgacatgcattccgggcaacttccaatgcatcccttcaggaaactctgatgatcatgatgatctgtcttgctggcacatgaagagctaccctcccaagtgacttgacagccaaggtacattgcttgctgtcctccatgttttgttcaggagacatcttgatccatcatgcggcctgaacactcatggaaccggttggtacatccagcaaggctccattgctgtttgcatggcctgcaggttgtcttgcaacgaaaaaacatgccccgatgacaatgtagcacaggaggaggagaatccctttaggcaatgagatgttc

SEQ ID NO: 13832 - DNA, 460 bp, Oryza sativa
  Clone ID: uC-osflcyp170d04a1
aaaagaaaatcgacatgtggcgtatttgtttctgacattttgcatgcaaaaagctatagtaattttactctgaactctgaagatacaacgccatgaagctaaacccaagcaaatcaaaccgtctgagccgatcgaattgcatcagaatccacacgcttcggtctcatcacagattgcacatgcgctctcagcatgtgtgcctctcagccgggctccctcgcggcgtccgtcgcgtcagaggcggcgatgcagatgtcggccttcttcagcgctagcgcgtgcgatgttggcggcgcccctcgcggtgtccgtcgcgtcagagacggcaatgccgaagtcggccttcttcagcgccagcgcgtcgttcacgccgttgccggtcagcacaggtggcctcctcgttgaatgaacctcacgatctcgtacttgtgctccgggaacacgccggcgttcaccggaa

SEQ ID NO: 13833 - DNA, 357 bp, Oryza sativa
  Clone ID: uC-osflcyp170d12a1
gatgcaggcttttagctgactaacaggttcaagacaagtggatccatcgtctatagtcctagtaggcactagtttatatatacttggacagactacagagccattattaggtgagaatatttttagatttaactggtttctataccaacagaaaacaattgggtaaaatcaatcagggtgcaatatccatcatcaataaggccttttcatcactggaatggcaaccttgagcaaaaatccaatcgaatactccataaagtagtgactccttgccacttgcttcatgaagaaccaggtctggttcaagcacaaaacttgttttataatcctttcaggcttgacaaactgtccaatgat

SEQ ID NO: 13834 - DNA, 538 bp, Oryza sativa
  unsure (1)..(538): unsure at all n locations
  Clone ID: uC-osflcyp170d12b1
gcgttgaagaggccaatgacaggtacgtggagcagctagtaactagtgctgaggctgcagttgaggaagttgttaggagagggattgagctttattttcactgttctttaggtggctcaccctgataaaattgctgttggtggtcattcatatggtgcattcatgactgcaaaccttttagctcatgctcctcaccttttctgctgtgggattgctcgttctggagcttacaacaggacactgacaccatttgggtttcagaatgaggacagaactctatgggaggcgactaacacctatgtcgagatgagccctttcatgtcggccacaagatcaagaaaccatatttgcttattcatggagagcaggacaacaactctggaacacttacgatgcagtcagaccgattcttcaatgccttgaatggccatggcgcactatctgnnttggtgatactcccttttgaagccatgggtattctgcgaggggagcatatgcatgttctgtgngagactgatagatggctgcagaagtactg

SEQ ID NO: 13835 - DNA, 53 bp, Oryza sativa
  Clone ID: uC-osflcyp170e08a1
cataaatacacacttaccggtacagatttttactcattttttacaaaacttca

SEQ ID NO: 13836 - DNA, 528 bp, Oryza sativa
  Clone ID: uC-osflcyp170f04a1
gctcttattgaatcgcggtaaagtattctaattcaataaaaatttcgcgggcgaatatttactctttcctgtcttatttgttaattcataaccttatcaaataagacaatttttttggtttgttccgccatcccacccaatgaagtattgggattcttttcaagaaaatcctatccagtcataggttctgtcgttcccactgcttctcctttaatggttaggtttgaatctcgcaatggagcttccaaaaaatttctttccgagtcaatttctcagttttattaactcgggacgctctttgttattccttgaaatttgtatttcttgtttcaatcaaattacgatttcgaattctctgttatttttattatattgatgctttatcacattgctttttatgatgtaattcatagaccatacatattggaatcctatatctttcttatttctcttccttctttctatcatccttccttttatctacatcccctttagttttgcttcacaacttagaatcctatttttttt

SEQ ID NO: 13837 - DNA, 349 bp, Oryza sativa
  Clone ID: uC-osflcyp170f12a1
aggggctcaagatcaggaggggtttttcagaaactcatctcggattggcagtagcactatctttacaagtttttttgacaaaccactagggaaaaaaaccagccatcatgatcaaaaggttaaaagagagtgcaaaccagcaacacagctctcaataagtgtttgtggtgtgtgtgtggcactggaagcaagttttgaaggaaagccttattgctgtttatgtacttggctggactaactttagccggaaaaagaggaaaaatttggatggaattgggaggagaggagtctatgatcccttggtgctggatgatggaattggtgcctcattttgaccaattccggctgt

SEQ ID NO: 13838 - DNA, 417 bp, Oryza sativa
  Clone ID: uC-osflcyp170g08a1
agttcaaacttgggacaccattcttacaggtgcgcaccagtttctgcagtgttatcagacagcagttacagtagtctacctcctcatgctgcagtgttaaaaaaaaaactctaacgctcctcgtaaccatattacaaaacaatcgagtatacaaaaatatcacaacatcaatgtttcatctgccctcttgcactcgcatagctatgttaaacagttaagggaagaaaccacaacaagaaactcatcttttttgtacatgctaatgccccctgaatagccgtcgtgtgtttcggccaaatgtgtgaaaccatataacagtacatgtgtatacggtataccacacaattggccggaaataaaaggagcatagtttggccaagaagctccaaaatatctttaaccttcgcatattatgct

SEQ ID NO: 13839 - DNA, 536 bp, Oryza sativa
  Clone ID: uC-osflcyp170h04a1
agcaatgtatactcgcattcgacaacatttgaagggcaataataagtcttaacatccaaatttaaaccgaacagaaaatagagttttaaacgactgacatagtgcacaaagcgagcagatattaacggtcaatgcaacaactgaaatgaccgtcgacaaaacttaacgagtactaaaagagctagatatctcaaatgcagatatggaaagcaccacttgaacgaggctcatttcttcttggcggcagccttggtcaccttggcaccggttgggtccttcttctccacgttcttgatgacgccaacagccaccgtttgcctcatgtcccgcacggcaaaacgaccaagaggagggtactcagagaaggtctccacaaccatgggcttggtgggaatcatcttaaccataccagcatcaccgttcttgaggaacttgggctccttctccagctccttaccagatcgtctgtcgatcttggtcaccagctcagcaaacttgacggcaatgtgggaggtgtggcagtccagcactggggc

SEQ ID NO: 13840 - DNA, 240 bp, Oryza sativa
  Clone ID: uC-osflcyp170h12a1
accataaaacttcaccacacagtctctacttcttagcccacataaataacaacacctaaatacacaccacctcccaaggcaccaacaaggatgacaaatactaaaccttctctaacggatgaatcttaaaacattcccaaggagccataaactcacacttacgtaccttccacacatgaagtaaactcacacaaatcaaaccaagcctttctttctttaactaccactttctgggcctaa

SEQ ID NO: 13841 - DNA, 412 bp, Oryza sativa
  Clone ID: uC-osflcyp171a08a1
gaacaaaagcgtttgttcaataaaaaaaaattgaaatatggttgagcattctcacatacttgaatgatactctaaaaagttacactgagcatatctaaagctcgctataacataaactaccgatctcaatgtcgggggaaccttccacggaggttatggaatggaggaactccatatgggctacgcataccttagatggacactgatccagatctgaattttgaaaggactatcgtcatgttgtctggtgttgaacactgacctcgccagttttattgcggaggccaccgttgactactccaagccctcgatgttggacatctagggcttgaccaagactagctttaccacgtttggcgtgttggtcacgttcaccctgtacacgtgaccattatcctacgggtggctttca

SEQ ID NO: 13842 - DNA, 176 bp, Oryza sativa
  Clone ID: uC-osflcyp171b04a1
aggttagtaggatgtgttacaccctgtactaaattaacttattctgtaacagaggaagtaatacactggtaaagggcaggatgttggattgggtttttatgaacttgtataaattaatcttgatcttttagtattccgtatttgtttactactggcctgcatgtgagtcagtccct

SEQ ID NO: 13843 - DNA, 265 bp, Oryza sativa
  Clone ID: uC-osflcyp171b12a1
gggtgaatcagtcgcattaggccaaacaaataccaccatccaacatgccaaccatattttacactaggaataccttcctaccccggaaaaaagggcaggaacaaaagaacattttttaaggtaccaaccaccactagctcaaagctagaaaagctttacaaaggagggaaagatggcagccatttccggcacacactggggcagccgccaggtgaggtcaagattttctgggggtgggaaaaaagaaccaaaacctaatttagac

SEQ ID NO: 13844 - DNA, 475 bp, Oryza sativa
  Clone ID: uC-osflcyp171c08a1
actagcactacaccacatttattagtacaaaaacagtacgatattatcgatcacacatgtacacatgatggttaacaacataataatagcaaagtaataacattccagatacacagcaaagggtttcaccaacgaatcaatccttctttcgacaaatatgtaaactactattgccccttctttttttttctttatttacatgtacggcaaaggatagagctcctcttctcggtgctcgcgaggctgcccacgccacatatatggaacttgatttcactgtgtctgaagggagactctgtccttcaagctttgtccacagcggctggtagcctcaacctattatgtcacacgggcaacaaagaaactaattctggataaaattgatagggcattcaatggtgagccctgtatgttagttatcatcaactcatgatagatcaaatgatccacggccttctaggatcgcataaagcaa

SEQ ID NO: 13845 - DNA, 396 bp, Oryza sativa
  Clone ID: uC-osflcyp171d04a1
atacacgacttaattcataataatataagaatccaatcgcaatatacagggggcacacatcttcttctcagttctcactcgattcgattcgtgggcaccgacccagaccaattctttcacggttaaaacagcgacaaggaaacgaaagaaaagggggggaaaaagaaaaagaaaaagtagaagacgaggcaaacgaactttgaataatcccggtttgagcagagcagcgggtggtggcggaggtgggttagccgcggcagcgggtgatggcggagcagccgcgggagtaggggttggcctggccgccagggcggcagttgtagtaggaggcgccgcggacggagcacggcgtggtgtcgcgccgcagcgcgccgtagctgatgtacccctgcccct

SEQ ID NO: 13846 - DNA, 340 bp, Oryza sativa
  Clone ID: uC-osflcyp171d12a1
atggaacatcacaaggaacccaaataaccgaagtttcgatcaacaacatttgcaaaattgccaccgcccaaaaaaattcagtccagtttttttagcaactaaaaacaagagcaaatttgctcaaattggcccaaataactttataaagcttcccaaatagatcactggaatagagcccaaaaagaaaagccccgagaattgaatgggtcaccatgcatgcgggatcattcttcaactcaagccctgcggttgccggatgaaaaacctttttggtctaccggggccttgcttccaaccaagtttttgtaaccctgttcccaggcatttagcttcccgtttg

SEQ ID NO: 13847 - DNA, 342 bp, Oryza sativa
  Clone ID: uC-osflcyp171e08a1
gcaaaaaacatcatcgggggatttgatcatcagttcacgagacccggggaagaaacaaaagctaaaaattaaaaccatcaacagcccgatcgggtttgcattactagatacccccattggagccttccttccctttttccatggatcgatatataaacccggccacgcacaaaacattggttcattccctacttgggctgggcgtaccacaccccttggatcttgacatccttgggccccttggcccccggggctgggtcccacgggtggaccccttcgaagaccccaatcacctcgcccgtctttggcttgcttttggggaccctccacgggaaggtgccc

SEQ ID NO: 13848 - DNA, 398 bp, Oryza sativa
  Clone ID: uC-osflcyp171f04a1
ttttgttcatcacatcacatatatataaatatataatcatcatcatcagcagcatgcatataaatacaactaatcgattaataattagccaatatataataataatgcatcacacacatatatatatatatatatatatataatcgatccatccatgcattcaccgaccgaatcaatggattggacgaattgggaattggggaatttggatggacaatgatgtgatcaccatcatcatcatcgtcagttcatgttgcgggagcagcgggtaatggcggagcagccgcggcggtagggattcgccgcctgctgcgacgcgcagttttggtagtaggtctggcctcgcttgttgcacggcaccttgttcgcgttccagcgcgagtagctgacctaccggt

SEQ ID NO: 13849 - DNA, 321 bp, Oryza sativa
  Clone ID: uC-osflcyp171f04b1
cggcggctgcggcggcggtttttctcacgctggtggtctcctgcctgcgcgcgtagactgtcgaggcctacagcggcgggggcctcggctacagccagctgctcaccacggcccacctcggcgccatctcctcctcgtcgtgcggcggcaggctggggcggcagtgctcagcggcggtgggggccgacggcgggctgctccggcgggcgctggcggcgaggaagccgacgaaccggtacgtcagctactcggcgctggacgcgaacaaggtgccgtgcaacaagcgaggccagacctactaccagaactgcgcgttgcatc

SEQ ID NO: 13850 - DNA, 382 bp, Oryza sativa
  Clone ID: uC-osflcyp171f12a1
tttttttttttttttttttttttttttttttttttttttttttttttttttttttttttttttttttttttttttttttaaaccccccaaaaaaaagcaccaggcttaattatttaacggggaaacacgctgtactaaaggggccaaaaaaaaccataaaaaaaaaaaaatgggggaacagcccccaagattttagttaccagtttttggcccccacaactttggttcccaagcaaaaaggaaacagtttctcaaagagctaaacttaacttgggcctttggaaaatctggggcaggaaggattaaaaaacattctaaacggtttggtggggaggggcttgaaggggggaaaaaaactaatggaaaccctccctttcgaatt

SEQ ID NO: 13851 - DNA, 524 bp, Oryza sativa
  Clone ID: uC-osflcyp171g08a1
ggtacagtaagatgctaactttctgaagcctcacacagtgacaaaagtatcacagatttcacagcctcatcagcaaaggggggaaaaaacttggtactggaagaagagcatgtgagcagtgacaaagttaagggcttaaagagaggttctacagagctgggtttagtttcatcctcaaattctcatccttctgctgttaggagcacgctggccctgcagtaggggcagtcgctgcgagagcgcagccatcgctcgaggcaggccgagtggaagatgtgcttgcaccgcagctcgaggagcccatctgcatccccacatctctccaggcatatagagcactccgttgaaggtcccgcgagttcgtcatcatctgttactctgcagcttgctacttcttgtgtaggagccggttcagaacaatgcgcgatgaacgtatgcttatctgcggtgttgaggtttcagctgtgctctctttgagtttgcagggagcgatcgatacgtagtgtggaagcacttgttagact

SEQ ID NO: 13852 - DNA, 256 bp, Oryza sativa
  Clone ID: uC-osflcyp171h12a1
ttgggtttttttttttttttgtttttttttttttttttttttttttttttttttttggatgaaagccgagggagattatattaaaaagcccggcccccatgaggggatggggccggagtccatgatgggatcaccctgatgatagatgatccatccaagctagctaggggtccatccaacattgatcgacacacgcacacactgacaacgaccaccacgggtttatttaggcgtcagagcaaaaaggaaggcccgc

SEQ ID NO: 13853 - DNA, 96 bp, Oryza sativa
  Clone ID: uC-osflcyp172a08a1
atgtttttttttttaattattgtttgttgtattattatttgtttgagcacgctgtcgaggcagtacttggtgtaagtgtgttttgaaaaaaaataa

SEQ ID NO: 13854 - DNA, 270 bp, Oryza sativa
  Clone ID: uC-osflcyp172b04a1
aaaaaaatatttttatagaaacaggaagttaaagttgggttttggagaccgggtcgttgtaaaaaacgatttcagtttggggggggtacatccagttaagcaaagctggccttgttgttggatttacaacggggtaagcaaaaaaggccatccgacgcctggtcgggcagaagagcaaaacaaaacagagactatttccggccgttacgttgggacttttaagatttcttctttttctggggtttgtttttggagctggggccggagttg

SEQ ID NO: 13855 - DNA, 336 bp, Oryza sativa
  Clone ID: uC-osflcyp172b06a1
tttttttttttttttttttttttttttttttttttttttttttttttttttttttttttttttttttttttttttttttttttttttttttttttttttttttttaaaaaaaaaaggggggaaaaaaatttaaaaaaaaacaatgggggggggggggtttaaaaaaaaaaaaaaaacttttaaaaaaattggttggaaaagggttaaaaaattttaaaaaaaaatttttaggggggggaaaaattttgggacccaagtaatacggggaaaaaaaaaaaaaacttaaaaggtgtgtaaaaaaaaggcaatttttggttaagaaccaaaggggggccc

SEQ ID NO: 13856 - DNA, 388 bp, Oryza sativa
  Clone ID: uC-osflcyp172c02a1
acttccatacaaccatagcttatatacaatgctagcaatattacacatccgtcaactaactcattacatataagagagaacatggatagttagctgaaaaggcgacagtacattacttccgtacaaccatagcttctgtagactgctaacgatattacacacccgtcaacttaggcactacaccatcataatagtgagatatctgacgatagtagccagactgccagagagccaaaattttggggacagtttcagcttcctaatccccactggtccataggcatcgtctgcaatttaaccagcaattcctatgcttttccctcactggcattgtcgctgtcatcatcgtcaattttgaagagttctaggcggctgtggctcaggcgga

SEQ ID NO: 13857 - DNA, 404 bp, Oryza sativa
  Clone ID: uC-osflcyp172c10a1
aacttgaacggagcacgggtttaacaggatacaattactatcagaagttaaaactctgagcacccaacaaaattaccacgctaaaatccgttgcacactgtatcatgaatccatgatcagctatgcaattacaggtctctgggataacaaaaattctcttccagctttaagtgttatctccggtacatgattatgtatgtgaccaaaatgactagaatcctcatctcagcagcaacaagcagatgcctcaacaaaacaccaaaaagggatcaatgacctccatctgatagattaaggatggcattactcagatgttccaacatgtccatttgagttatttgcaggtgttcccatgtattcagctgctgccaatattagaccagtaaatggaggtgaaggtcttc

SEQ ID NO: 13858 - DNA, 532 bp, Oryza sativa
  unsure (1)..(532): unsure at all n locations
  Clone ID: uC-osflcyp172c10b1
ctcttgcattttgataccaggaggattcggggatcgtggaatatctgggatgatattggctgcaaaatatgctcgtgagaataaagttccataccttggcatttgcttgggaatgcagatatcagtgattgagatgtccagaaatgttcttggcctaaaggatgcagacagtgaagagttcaactcagaaacaccatttcgtgtggttatgtacatgcctgaggtttcaaaaacgcacatgggaaatacaatgaggttgggttgccgaagaacgttctttcgcaggacagattgtcttacatcaaaactatatgggagccctgagcatgtagatgagcgtcatcgtcacagatatgaggtgaacccttctttcgttgctatgcttgaaaacgctggccttcattttgttggttgcgatgaaagtggaaagaggatggaggttgtagagctacaagaccacccattntacataggtgttcaattccatccagaaattaagtcaagggcctcgagaccttcacctncatttact

SEQ ID NO: 13859 - DNA, 395 bp, Oryza sativa
  Clone ID: uC-osflcyp172d06a1
gctatgaacaagacgctaatcaacatccagagctaaaacaaacaaggggatcaaagcaaatcccgaaaaaaaaaacacaggggaaagtccacatcttcttctcgtccccaacgcctccgtgtcaccaccacgtcttgcggatttttttttaccctgttctattcgctcaggcgtccacgatctcgccgtcgtccttcgacgccaggatcagctccgggtgcgccgccgccgccgccgccttcttgatcgtgccgtcgatggcgttcggccggccgagcgccttcagcgccaggtgcgccgccttctggccggagatcatcatggctccgaacgtcgggcccattctcggggcgccgtcgatctcggcgaccttcatgccggtgacgatcatgccg

SEQ ID NO: 13860 - DNA, 415 bp, Oryza sativa
  Clone ID: uC-osflcyp172e02a1
gtggtgagctccggcagggtgcgactgtccaccgaccgcctcgacgagtccggcgacggcgtcgccggcggcagcttccccctcgagcacctcctcgtgtacaggctcctgatcgatgagtcgccctcgtagccaccgccaccgccgcaaccgccatcgacgccgcacttggcgagcctcacgttcaccgacttgcccttcgccaccacgtagatgttgcagtagtccggcgcgcccttcatcaggctggacggcacgtcggcgttcttgaatttcttggtgaatgcatttctgttggatgcgccgagcgcgatgctctggatcttgttcacggtgatgaactctattaaggcctttgacacgtctgcctcttccagtaccaactccgatacatgcaccccattcctggtgcaga

SEQ ID NO: 13861 - DNA, 390 bp, Oryza sativa
  Clone ID: uC-osflcyp172e10a1
gcaatgaaacaatggcaatcacatatatgttgttccagattcacaactcaaacggcagccgaaatgaccaaaccggcaaaaaagaaaaaaaaacacacaattattagccgaaacgacacgaagaaacgagagggactatggcactgcaggaagtgatctgcaatgtgtggtgttgacaggggaagatgagaaaaaaaaattaaaccacaattaatcccatgcatgcgcggtggtggctagaaaaattgcatatggatctagtaatgtgactcgtttggctgagttaatttgttggtgaaatttgggaacggtgcgccacaatggatgtgatcgatcgatctacaggccctgctttacgaggtagtcaccgagcctcttaaccaccatgtt

SEQ ID NO: 13862 - DNA, 398 bp, Oryza sativa
  Clone ID: uC-osflcyp172f06a1
gacacaaatatattttattcagcgctgatgcggctgctaccccaaaattacaaaatttattacacaaaagacattgcggaaagctttgtacagtttcactacatgctctcgatcatctggatagggtaagacttttgctaccaagcgtctaagctaagtaattaagcgatacctttcttccaaaatatggcgactcccaaaaagagatctaccgggacctttagctgacagaagtgcaaattgactgctgggaatagagaccatgtatgggatgcacaaagtgctgcttgcttcttctacgttttgaaactactgtaaatccttctgtatccttctcactcttaggtaccacggtggccttctgctgtttgtcaagctctttgcgacctgacggactt

SEQ ID NO: 13863 - DNA, 446 bp, Oryza sativa
  Clone ID: uC-osflcyp172f06b1
gtcatgatcagcagcaaagaggttctttcaagtgaaccggaggaaatcggcaatgatgaaaaagctccggacagcaacagtgatgaaagcccaactgaatctaagaaaaaaggtggaagcaagctttcagcttcagcgcctacattcaatcctggatcactcttatcgatgtcgcacccttacagtacagtggcaatatatgatgctagcgtcgttcttcagccaataccaagtcaaccaatggagattctccctcacgccattgatactagggtaccccgtggtcctcggtccacattgtactaccgtactgggcataccttccaaagaaaacagggttacgcacacagccagagcaccattctgaggggtagcaactcccccccaaccatgaattctcatgctgccgagtttgttgcctggaaaaacttcgcaacaacctgatg

SEQ ID NO: 13864 - DNA, 372 bp, Oryza sativa
  Clone ID: uC-osflcyp172g02a1
aacacaacttttttttagatcaacaggcacgatttgttcatgggagggcagaacttttttttagaacagcacaatatccagacccaatccttggatgcctaaaaccaacaagggaaagaaaagaagcttaaaaccatttggggcagctaaaggccccaacgtcaagcttgttcagtcagtctcacagcatggtccagcaaaagacaaagcattggcctacaggagaagacagaacaggattcacatttaaagttcaatgctttcctaaataaaacttgctactcggcatccgattagctggataagtttccccacgatgagtttttatatgctctgcatctgggagaaagagatcctgaacgggttaccctc

SEQ ID NO: 13865 - DNA, 384 bp, Oryza sativa
  Clone ID: uC-osflcyp172g10a1
aggagaaatcaggctactacatttacaacaaaaactctcgggtcaattacaagatcgaggatatacaagcgaaacttcatttttgtttcgattcgtctcctgttttgtctctcttcttgttcttctatctatctatggtggtttgattttttttttgtattagacatagtaaatcatgccgacctcgagggtggaggcgtgagggatggtgacggcgtagttggggccgcggctgttgcggcggaggaagtcgtagcagaagttgatgaccagccgccggaagaagctggagccgttcttggccttgacgtaggagtggccgaggatgaacgccatgccggcctcgcgcgcgtccatcagcttctgcagctcctcccgcacgcc

SEQ ID NO: 13866 - DNA, 329 bp, Oryza sativa
  Clone ID: uC-osflcyp172g10b1
tcgatattttcccaccgcctaataatccccattaccgtctcctctgaatcgttggatttgatacccccagggattcagagagagagagagagagagagccaagaaaccctgtagctgctgtaggaggagtaggagtaggagtggttttgcttcctctgttcttgggtggggattgaggaatgaagagcccgtctcccgtggatcctgagtcgccaagatctcccgattgcaagggagggagcagacccaagaggaggcggttgccatggcggatgacgatgagcctggcgtaccagagccttggggtggagttcggcgacctgagcacg

SEQ ID NO: 13867 - DNA, 376 bp, Oryza sativa
  Clone ID: uC-osflcyp172h06a1
caaaagtcaaaacacacagcatttgatcacatataggagaaagtattttacatggacccttcggggttccggacaaacacacaagtagagcgaaacgtaggcatttacaagaaccgggttttcagttttccccatgagcaaaacagcaacgtggggacagcgtatcatacattcgtgctgctacagatcgaaaggcagcacataccctcgacagggtttttacagtttccggtccacaatacagattacaccatacagacacacgaggtcgtaggggacactcgggacattcaggaatcaggactattcacctgaacctaattaaattctttggacctgaatcttgctgctttcacaactagcagtttactgattc

SEQ ID NO: 13868 - DNA, 518 bp, Oryza sativa
  Clone ID: uC-osflcyp173a02a1
tttgttttttttttttttttgttttttttttttttttttttttttttttttttttttttttttttaaaaagaaaacaaattcttcaaggcgaactggtagaacccaaagggggctggccccaaagggtccagaattccggggggggcttcgataaacataaataataattggggggggggtctgtttggggttgccccccccgtagggggggactagaacccacccgggtcgggcatggttcctgggggctgaactatgttggcccccctcaaatttgggacatgcttttccaagggctttttgggatcctgccggcccacatgggcaatcgctggtttttaaggggggaggtaatcctcctccggcactggcttgttatatttgggggctgggttcaacatttcctgaacaggctgctcattggttttcgaatgggggtaaaaactcttaaaaatcaatccatcggcccattttttttggggaaggtaagcaacattttctcctccagttcattttt

SEQ ID NO: 13869 - DNA, 393 bp, Oryza sativa
  Clone ID: uC-osflcyp173a10a1
aaaccaaaggtttccataatttaacaggtataccatactactaccctgactaaaccccataaaggaaaacacagcacaaaactgtacactcaaatatttagagacgcaatgaagtgttcatgccaggtttttttggcagaaactggttcattttaagagcctggttgctagtcactacaccagggggcccaagagacagagacaggggcccatcatctcctgtatcagaaccggtaagattatgcttttttgaggccatataaggggacagtgccagttgaggagaagggcccttttcttccttcaggggtgtcttattcagattattacgggggtctggggggtcttcattatttgaagattgggcatggatcacatgatccaagattgggt

SEQ ID NO: 13870 - DNA, 477 bp, Oryza sativa
  Clone ID: uC-osflcyp173b06a1
caccatgagttatgttatattatcatcatacgggaccagatgtatcatagctagcagaagagagcccgaaacatcttcggatcaagcaaccaactgcaacattgcttaatgcataacatgcttaaaggtagttttgttacatccgcacatagtgaagtaacacagacaggtagctggtttatcatttttcaggcattacagattggtatcagcctcatttcttcccgctcttcttcagaccagagcctcccagtgcacccttctgtcctgccttggccttaagctccttcagggccttttcctcatctttcttcttctgcagatacgcgagatcactctcgtcgtactccttcttctcggccttgggcgccttgaggggcttggccttccctccttgcttcgacatggctgaccggatcggcgagggcgagtcgagaaaccctagctcgcgcgccgcgactactaggaggagatggc

SEQ ID NO: 13871 - DNA, 492 bp, Oryza sativa
  Clone ID: uC-osflcyp173b12b1
gggggttgggtgggtttcccgtctccttccgattgctgagtagcattagcaaaggagcaaaggaaaggaacctcgatctccatctccatctccgcccccaaaccctaacacacacacgccgactctccaaaccctacacccccccaacccccaaccccgccgatccccccgctcgccgccgatgggtcgcaagaagaacgtcgccatcgatgacgatgagtactccttcccgcaggaggacgccgcccccgcccccgccgccgacaaggacaagcccatcaagaagggcggcggcaagaagggcaagaagggcgccaaggccgccctgcccgacgacgacgactacgagccccccgcgcccccgcccccgcccggggacgacgacgacgacgaggagcccatcaacctcgtcttgaccggtaagaagaagaagaagaagggcggcggcggcgccgtgagctccttcagcgccttcgacgccctcgcggccga

SEQ ID NO: 13872 - DNA, 390 bp, Oryza sativa
  Clone ID: uC-osflcyp173c02a1
cccgggaatagttaaagggaaattcccattcataacagctcccagtaaaaagatccgaaaaaaacccaaaggcaactggggctaaaaacagtaagacaatgggggctttggttaaatcaatataggccatattgaataagaatggcatatgcggatttaaggcagggttacccggaatgggtaaccttataaaattcaatagggaaaatgccaatgttaacctacacaggaggcctaattgggatcaacaaagggccttccaagaaaggacctttcaactcagggctactgaaaagggaaaagttgtaaagggcacaaatcctaatctaagacttgcccttatcatggagggcacgtttgttgggccaggggacacttttataaccctta

SEQ ID NO: 13873 - DNA, 336 bp, Oryza sativa
  Clone ID: uC-osflcyp173c10a1
agcgggaaaaagaaagacgaatctacataggatcaaaattggggccatcagcaggcccccattagcataatcctaaaaaaccgcccaaaatatatggaaccaaaagaatgggccatggcataaggggatagcttactccaaaggggggcagccatattcactggtatgaagaagggggccctggttggcactcccaaccaggtcctctatgaaaaggagaaaacagcgcaatttaatgggggacttagggcatgacaagccggggggaaactcatgccgacaggtctaattttttaaaaggatactgctggccagcaactacttttagaagctggg

SEQ ID NO: 13874 - DNA, 465 bp, Oryza sativa
  Clone ID: uC-osflcyp173d06a1
aataaatcgcacataatagtaactatgatcttcaaattcacaaattctccatatgaatattacatacatgcagaatgtgaaggaaaattaaccaaacttggaagcaccagcgggaagcaacatatggcggacatagttcaaaggaatggagaccatatgcatggatacatagtacataatagtgcagtagaatctatccacgaggcgaaatgcaggatgcgaaggctgaattcgttgatctagtgctggaccgaggcggccatcttgtacgcgtatctacacttcagcgccacctcgcgcgcgccgccgccgccgatctcaggcgttgctccggtaggacccgagcttggcggcgctggccctcagcacgtactggtggtaggcggcggcgatggcggcgccgatcagggggcccacccagaagatccattggtcatcccaggccttgtccttgttgagataacc

SEQ ID NO: 13875 - DNA, 504 bp, Oryza sativa
  Clone ID: uC-osflcyp173d12b1
aaatgaaacattttgttccatttcattgggtgaaactggcatacttggttgagcgaatggtgtaggaatatgttctgaaccttttggctgagtcatgaaagcagcattagctgttggattctcttccaagtatgccagtttcacccaatgaaaagaaacattttgttccatttgcctctccaccgccatttgctgttccctctctagtggagaaaaatgagtccattccgtcaccttctccatctcctccggtgaagccaacagatccaggaatgttcaggacgattgatgaagtgaccccacctccaacagctactgattacttgttcttaaaacaaccagaacagttacacttaacctctgctgagaacattgcaaacattgacttggatgatgtactttctgctgcccagacagctgtcgaaacagcagagcgagctgcatcagcagcccgtgctggtgcaaaccttgcacaactgcgcatcgcaaatctgaaagagaata

SEQ ID NO: 13876 - DNA, 475 bp, Oryza sativa
  Clone ID: uC-osflcyp173e02a1
attgcaaaaacatcatcttcttcttcatcttcttagtgtacacaacaccaactcgatcatcatctcgtcgcactaaacccatcttccccaacccaaagacaacgaactcgctggccacaaatccatccaaccacaattaaccactgctaagctacggtcccccacttcacttgccggggacgaagttggtggcgtacgcccaggcgttgttgttgacggggtcggcgaggtggtcggcgaggttctcgagggggcccttgccggtgacgatggcctggacgaagaagccgaacatggagaacatggcgaggcggccgttcttgatctcctcaccttgagctccgcgaacgcctcggggtcatcggcgaggccgagcgggtcgaaggcgccgccggggtagagcgggtcgacgacctcgccgagcggcccgttcgcgatgcggtacccctcgacggcgcccatgagcaccacctgc

SEQ ID NO: 13877 - DNA, 432 bp, Oryza sativa
  Clone ID: uC-osflcyp173e08b1
gttgcggtggtggagtgtgcgcttttttttttttcgctccgaacttgtcggtgtacgtttttacgttggatcccgtgtctgctctggcttcaccatcaccactatgtgttttttaagtagtatagatagattagtaatccgaacacagcctccgagtcaccccaaggactctctctctctctttctctctctccctgacttgggtggcccactccagaccagagtcgagtcaggctggccatggccatggccatggatgccttcggctccgtgttcggcgaggccaagccgccggtgacgatacggatgcgacccgtccttttcaacgcccacgcccacgcccatactgatgatgtctcccaactctgccttctggccaccgacctccactcccacgcctgggaccgttccttcttctttccgacatcgacg

SEQ ID NO: 13878 - DNA, 459 bp, Oryza sativa
  Clone ID: uC-osflcyp173e10a1
tttgtttttttttttttttttttttttttttttttttttttttttttttttttttttttttttttaaaaaaaaccaaaccattaatcctacttaaaggggctttccaccttctttacatttgggaacccacataataattcattattacccccatcatttttttttcactaggggcgcacaagaacaccaccaccttcaagaaataaaacctacctcggcggggactaggcggggataggaaattccgggggggggggggggcacagggggggatcataacataactgggttagctgggcctcgacggggcagtaggggggagtttggaacctgaagccgctggcgccgggggggccattgccgccgggggggaccaggaaggccgggcaggtgacaaaaagggggtaggggccggagatccaggtggcgacctttcaccggacgcgggcggtgatttt

SEQ ID NO: 13879 - DNA, 430 bp, Oryza sativa
  Clone ID: uC-osflcyp173f06a1
aaccaaaacataggagggttcattttttcttctcaaagtaggggagcatttttccttttttcaccattacataagcttaagcaataacagataacaaatcctcctcctcctttagggaaaatattcaaacacaatacccttataagtacttattattaggaaagtagcgtgcatgggcataaatggcaacggggggcaggttaagaatcacaatgctgagcagcggggaaacaaaacaccataatgggacagagcaaaagcctccgaaagggagcttttaggccgaaggcttctcccacttggggggcttcaccacctcccaggtgaagtctgggtcgtcccttccgaagggaccgtaagcccccgttttgaggtagcgtccgttgccgcctttcttgaggtcaagggtgatgatgatcatgccaggcct

SEQ ID NO: 13880 - DNA, 433 bp, Oryza sativa
  Clone ID: uC-osflcyp173g02a1
tttgtttttaaattaagtaagtatagataacaaagcacatcattgcttacaaatcgacaatacattattaattaatcccaaccgaatataaaaaagggagccaaaatagaagacgatataaaatgagtgattacactcgtgtacatggtacacttagggctaactacggatacacctccagaacatctaatacactacaagcacgcagcaaacgtacataaatacttatacatacatttctgcaatacttattggatctgctaaattaattacatttacttggatgcctgcagccggagctccggctacagtacttagatggactgcacggccttggccatgccgaaggcggcggcggaggctagagcgccgataacagcggtctggaaggcgcttgagaaagggcggttgccagtaaaccggcccttgacat

SEQ ID NO: 13881 - DNA, 325 bp, Oryza sativa
  Clone ID: uC-osflcyp173g10a1
aatggatatttaagaaattttggtttttcctttttttttttttttttttttttttttttttttttttttaaaacaaacacccccaccggggcggaacgacccttatccccttttttttgggggccatcccaaaaattcccgcccccaaaccaggggagaaaaagggggccaaaaaaaaaagggggggttaaaaaacaccagcaaccccaacagccaaagcgggggggatgggaaaaaaaaaaggggcgatggggtcaaggggggggcgaagcccccggcaacaaactgggggaccccgcccggaaacctggcccggccccggggg

SEQ ID NO: 13882 - DNA, 487 bp, Oryza sativa
  Clone ID: uC-osflcyp173h04b1
gtcgtggggtaccgcatcgccggcgggccgctcggcgaggtcgtcgacccgctctaccccggcggcagcttcgacccgctcggcctcgccgacgacccggaggccttcgcggagctcaaggtgaaggagatcaagaacggccgcctcgccatgttctccatgttcggcttcttcgtccaggccatcgtcaccggcaagggccccctcgagaacctcgccgaccacctcgccgaccccgtcaacaacaacgcctgggcctacgccaccaacttcgtccccggcaagtgagcgccgccgccgccgtgctgccatggcgacgcatcgccttcagctaagctagctaggttgacgacgatgcgcgtctctgcaggagagtgtgcgtgtgtgtacgcggtgcagtagatgtacgtacgtgtaccgtatagatgtacgtattcgtgtggaccgcgtggatggatgtacgagtattggagagaaggtgagatct

SEQ ID NO: 13883 - DNA, 516 bp, Oryza sativa
  Clone ID: uC-osflcyp173h06a1
tttgtttttttttttttttttgttttttttttttttttttttccaacaatgggaatatgaattattttctgaatccattacaatcactttgttttgcatagagcagggttggagccaaggccaaagccagatgatcagaatttcagaagatccatatatgtttccttggcaataactttttaccttagcagggccattttcagggtcaccatgggttaacaggccaaaacttttttaaggctttgggcactggtcgaaaaggctactacctttttcctttacattcaaaactatgggacaggggaacaacatagaagcccgacctaaagaaaaacccctaaaccagggggtttgagagaacatatttgattgggtcctttaacggcaggcgcatttaatatattttggaagagcttgggggaagtttccatgcaacctcatgggccgcgttctatgggcttaacgacggcgttgggccctagtccgagccatggttggctctaaggctcctttttg

SEQ ID NO: 13884 - DNA, 511 bp, Oryza sativa
  Clone ID: uC-osflcyp173h12b1
gccaccaattatctatggtgatgtgagccgccccaaccccatgactgtgttctggtccaagttggcgcagagcatgacctctcgccccatgaagggaatgttgactggtcccgtcacaatccttaactggtcttttgtcaggaatgaccagccgaggtttgagacatgctaccagattgctcttgccatcaagaaggaggtcgaggaccttgaggctggtggtattcaggtcatccaaatcgatgaggctgctttgagagaaggtctgccactccgcaaggcggagcatgctttctacttggactgggctgttcactccttcagaatcaccaactgcggtgttcaggacaccacccagatccacacccacatgtgctactctaacttcaacgacatcatccactccatcatcaacatggacgctgatgtgatcaccatcgagaactcccggtccgacgagaagctgttctccgtcttccgcgagggtgtgaagtatggtgctggcattggc

SEQ ID NO: 13885 - DNA, 481 bp, Oryza sativa
  Clone ID: uC-osflcyp174a02a1
gcagtaagagagggatttattatttaactggattacttccatctcttgtaccaaattcacgcaaaacatatactcttttattattcaatgagaaaagcaatgagtgcaatggtgcttttttatcatttcaggaggaacttcttgaaccaatgggcagagttcttggggtatctcttccttccgtcattgtaatctacgaagtttatcccaaatcgaactgtgtagccgttcgaccactcgaagttatcaagcagcgaccatgcaaagtatcccttcacgtttgctccatcccttatagcacttagcagggaaaggaggtgcttgtggtagtattctatcctagcgtcatccttcaaggcttcttggagtggtaaggtcttattgttgaattcatcaacgccattttcagtgatgtagacggtaggattgccatagttctccttaacataaagtagcaagtcacggaagccttgaggggtga

SEQ ID NO: 13886 - DNA, 414 bp, Oryza sativa
  Clone ID: uC-osflcyp174a10a1
aattaaatgatctctttgacctctctctatatatttctttgctgctacagaattgaagagcagcctgacggtgctacatcatgcagtcgattattcgatcgactaggcagctgcgacgctgagggagaagggcaatggcgcatagtgcggcgaggccgagtagtcgttggccttgagggcttcagatccacagctgtctgcatggtcgtccattagcatatggtggcacctgcactcggagctgcagaaggctttctcccccctgtacatgtagatgtcgagcccatcaagcctcttgtcacacaggaagcaccggctcaagaagtcagccgccggcgccggctcctagtcggcttccacaagccagctcgtcgccaccgtcggcgaacccaaagtacacccgcttcctcacgc

SEQ ID NO: 13887 - DNA, 481 bp, Oryza sativa
  Clone ID: uC-osflcyp174b06a1
ttttgttgaaaccagtaatcccacatctcatcagattattgtaggcaccaactgtatacctgggctcactccacattaactaacaaaaatgacaaaagaacgcaccgaaaaaaatgtggaggatcaacaacccagtagtactgttcaacattgctaaatctacgagctactacaactaaattcggatgctgacacagttgatccatcttacaacagcaggacatgccaatcctagagatagtacacagcaaggcaagaatgtacagaaaaagttttaacatggctaattgatacagatcttacaaaccaaatggcatgcatatcttggagcttacagctttacctagtgttgctcagtagtgcaattgctggaaaaaaatacactgagcaggattccattcagttcagatcaccctgattatctagaagcttcacagtagctactgcatctgagcaacatccattcatcaccctcatctag

SEQ ID NO: 13888 - DNA, 504 bp, Oryza sativa
  unsure (1)..(504): unsure at all n locations
  Clone ID: uC-osflcyp174c02a1
aaatacttaatagtaatagactctttgatggagtattacaacatgcagcagtggcattaatacgccagtacattaattaagttacacatatgcaggctccattttggtttcttttaatttatcgtattacagaatttctgtagccttgcagatgatcacttggatatcatgtactagtaattaacaataggatgcatacaaaagatggcccaacgacaacagaagatgcgtgcatctgacattgtctggccttatttgttggtagtaatccaattaattaacaagagatgatgcattcttgtgccttagtttcttcacatgcttggcttcacgttgagcctattcgcaatcttcacccccaacgactcatcacactgggagaggtagttgacccagatggcgcggagctcaggggagactttggggtgcgcgagctcgccggcgaagcggcggatgaacctctcctgtctatccggcgcccacgacctgtacctctncccgggc

SEQ ID NO: 13889 - DNA, 380 bp, Oryza sativa
  Clone ID: uC-osflcyp174c10a1
tttgttttttttttttttttttttttttttttaagcaatgtttaggggccttcaattttgtttattaatacttgctctatccggtcaacagccatatatttgagttgtaattctgttagttgcattggccaaccactgctacctggggagatactccatcatggaatatttagttataatcaccactggatatactccctcaattatttgggaataaggaggctttttttcttttttcttcccaaatgttaggcccatattgcatgttgaaagttttttattatgtccgcaacaacgcgcgggggattatctagttaagttaatggatgaaccatttacatctgtttaatcctaaagggatgcttgagtattgaaaatct

SEQ ID NO: 13890 - DNA, 406 bp, Oryza sativa
  Clone ID: uC-osflcyp174d06a1
ttttgttttaaagcctcagaacacacatatgtgtgtgtgtcccatatatatattgctcaatacaattcagagtgacatggtatacatagcttgcatgcgtagtagcccgggacttagcctagctaggtattgagtacactacggcaaaactgccaagaaccggagagagaaagatcaggaggctaaagagacagagagagtgagagagagaggtgcgtcgaatttgacggcggctcaggtagaaagagtggagcaagtggatcatatctctatggtctatggatccctcaatcttgatctggagtcgatgagcgagtcctgaatctcctcgagcgtcctccctttggtttcaggcacgaccatcaccacgaacaggatggtgatcaagctcgccgcggagaacatg

SEQ ID NO: 13891 - DNA, 505 bp, Oryza sativa
  Clone ID: uC-osflcyp174e02a1
ttttgtttttttttttttttttttttttttttttttttttttttttttttttttttttttttttttttttttttttttttttttttttttttttttttttttttttttttttttttttggcccaaaaaaaggaaaaacaaaaacatttggggggggtccaagggaaaaaaaggggggccccggaggcctttttttaaaaaaaaaaagggaaaaccccccgtttttttaaacccccaaaaaaaaaaatttgatccccagctttttgggggggggaaccaaaaagggttttttttccaaaaaaaaccaaattttttttgggaaaaaaaaaaaaagttcaaaacaaaaaaggggggggtttcctaggggaaaacccccctgttttttttttaataaaaccccccaaaaaattttaaacctttttgggaaaaggtgtgggaaaagcaataaagccccttaaaaaacccctaaaaaaggggggcaaaatggttttggaaatacaaaagcc

SEQ ID NO: 13892 - DNA, 255 bp, Oryza sativa
  Clone ID: uC-osflcyp174e10a1
tttgtttttttttttttttttgttttttctttttttttttttttttttattttattttatttggggacagagaaaaaccaaaaaacccccacaaggggaggggggcgaacaccagggagaaaaaaaggagccaaaaaaaaacaacagacccagaaaacaacaaaccccggcacaaccgcggaacgaaggctctgccaaaaggggaagcccaaaagggggggaaataaaacaccacccccatccccacattaaaag

SEQ ID NO: 13893 - DNA, 551 bp, Oryza sativa
  Clone ID: uC-osflcyp174f12b1
ggtgattgtcgatagctcccttgagttcctcatccttgctagcgatggactttgggatgttgtaagtaacaaggaagctgttgacatggtgaggcctattcaggatcccgaacaggcagcgaagaggcttctccaggaggcgtaccaaaggggtagcgccgataacatcaccgttgttattgtccgctttttggagggaacaacgactggtggtggaccaagtagggaggccgccagcgaccaaaactcatagtttctcccaggcagcagcatggcttgttcctgtctgtcatatctgatgctcaaggtagacgattacagtggcggcaccacccaccatgctgtcaagaactgacccggcccgaatttcgtcctcgctttcatgctcctggctgaccttaggtggtgatggtggtggtaatgtaggagcagaatggcgatggggccagtgttggtacatatgatatgatcgaaggtgtattgggtcttatatattactttgcaatgagattctattgcttgtgttccatgctaggtcttttttttttttt

SEQ ID NO: 13894 - DNA, 494 bp, Oryza sativa
  Clone ID: uC-osflcyp174g02a1
ttttgtttttttttttttttttttttttttttttttttggcccaaaactggatatatttttatggtcaaagtaaaccaacaacgatgaaaacagaattaagtttgttttgcaaaataaggagccctcgattgctgaatgtacaaaattttttgggcatttaaaaatttggatctccagtgcaacaagaatgtttgagaagcagtccactgtcagtagctaaacactgcaccttagtgttttccacatgacaggggatgaaacattttcccaaccaaaaggtaccttgggccttcctaaaatgcagcctaagagtttaacaactttttgctttaaatcttgatgttgaagtagtcaaaatcaaaagggggcagccttacatatccattttcaccaccactcgagaagctgttaacaccgtattatacatgaagaactgaagctcaaagcaaaacactttttgaacaacataaattaaccctggcatgtgagaaaa

SEQ ID NO: 13895 - DNA, 460 bp, Oryza sativa
  Clone ID: uC-osflcyp174g10a1
tttgttttttttttttttttggttttttcgatcctccaatccaaagttgcattttgatattcacagggtatatttacacatgcattcactcatcgaaagttcgaaacaaggaaataaaatttatgagaaaggtcattttttataaggctttatgagcggcctgcagtgacattttttacatcagcggggctgtacgaaccacgtgccttagttacagactgcagattctgaagatgaccatactgcgacctgagggcgaagggctactagattactggttactcctacagtagagccatgttattcctgaagcctaacctgagtttagggctggaattatatcataggactcttagatggaggccaggatatccagtttctgtcttgtatttgtcgaaaagatcttgcaaggccacagtaaattgttcatggacttcatttatctcatcaatggtaggct

SEQ ID NO: 13896 - DNA, 570 bp, Oryza sativa
  unsure (1)..(570): unsure at all n locations
  Clone ID: uC-osflcyp174h04b1
aaatacctgatatatatgactcttgcaagtatgacctccttcataactcacatctcaaacttaatggtttgagtgatctcttcagagtttctcagtcactagctgatggtgtaattccaaatgagtatggaataaatgcgaagcagaaactcaaaattggttcaaagattgcacgccgtttgttgggcaagattctgattgacctgcataacaccagacgagaggttgctgctgctggtggtgaatctaatgcatgccatgatccaacaatagtgccttcttcaaaacggaaggataggggttactatggggatgttaagaatgagggttttgatagacctaactcaaacaagaagtcaattgatcttgatgattcgcacaaagaaaccaaatactgcttggatccaaaatatgccaatgtgatggaacctgaacgacgtgttcgaacaaggctctattttacatcagaatcacatatacattctctaatgaatgtacttcgatactgcaattttgatgaatctatggactgaagagaaagtcttngtctgcaaaatgctctagatatct

SEQ ID NO: 13897 - DNA, 505 bp, Oryza sativa
  Clone ID: uC-osflcyp174h06a1
ttttgtttttttatttttttgggttttaatttttttttttttttttttttttttttttttttttttttttttttttttttttttttttttggaaaaaaaataaaatttttgaaaaaagaaggaaaaaaaaacaacaaaaaggaaaaaaaaaaaaaaggaaaaaaaaaaaaaaagggaaaaaaaaacaaacaaaaaagaaaaaaaaggggaaaaaaaaacgggaaaattaaataaaaaaaaaccgggaaattggaattttaaaaaaaacagacaaacccgtttaaaaaaaaaggggggggggcaaacggcgatggaaaaaaaaaattcacgaatttgaaggaaaggagaaacccgaaaaaaaaaaaaaggggggccaaaaggggggggggaaaaaaaaaatggccgacgccgggaaaaaaaaaattttaatttggccccgggggggacccaaaagggtttaaaaggggaaacggattagctgggccccgaaaaagaacccgagcgg

SEQ ID NO: 13898 - DNA, 551 bp, Oryza sativa
  Clone ID: uC-osflcyp175a02b1
gttgtctttgggctgaaacttttcggagcagatttaatggctatccctggtctttacagatttgttcaggagaccataaaaaagcaagttgcgagcatgtatttgtggccaaagacattggaagttcccataatggatccctcaaaagcttctaagaagcctgttggaattctacttgtgaaagttttaagagctcaaaacctgcgaaagaaggatctgttgggtaaatcggacccatatgtgaaacttaagatgtcagatgacaagcttccgtccaagaaaacaacagtgaagcgtagcaatctcaatccagagtggaatgaggatttcaaatttgttgtgacagaccctgaaactcaggcactggaaattaatgtctttgattgggaacaggttggcaagcatgagaaaatgggcatgaacaacattctgttgaaagaacttcccgcagatgagactaaagtcatgactgttaacttgcttaagacgatggatcctaatgatgtacaaaatgagaagtcccgtggtcagcttactctggaggtgacata

SEQ ID NO: 13899 - DNA, 466 bp, Oryza sativa
  Clone ID: uC-osflcyp175a04b1
gtaaatgaaagaaattaaaaagaaaatcacggcgcgtgagcttgcagagacagcaatggtgagagttgctgccgccgcggcggtgctcgtgctggcggcggcggcggcggcggcggcggccatggccgccgagccgcccaccgatgacggcgcggtccgggtggcggcggggctgacgaagtgcgtgtccgggtgcggtagcaaggtgacctcctgcttgctcggctgctacggcggcggcggcggcgccgccgccgccgtgacggcgatgccgttctgcgtcatcggctgcaccagcgacgtcttgtcctgcgccaccggctgctccacctcgctctgattaagtactaatgaaagaattaaccgcgctaattaataataaatcgcacctacgtatgccacatgtggactcgcttgactaattaaatactgccatgccaatgcgattagtggattatgaaaagag

SEQ ID NO: 13900 - DNA, 534 bp, Oryza sativa
  Clone ID: uC-osflcyp175d08b1
tttttaaggcctgtagttcctaggatgcgcaaattctatgaaggtggctttcaacctacaatgactcgaagagaagctggtttaatcctaggtgtcagggaaaacgcccatcctgagaaggtaaaagaggcgcataagaaggtcatggttgctaaccatccagatgcaggcggtagccattaccttgcttcaaagatcaatgaggccaaagatattttgttagggaagacaaaaggaggggggtcagccttttgattattacaataataatgcaccatatgttctttcaatgaaatggtgaattttggtatctgtagtctgaggacttgaaaggtaggcttaaatcttgatgcgtgactagaaatttatggacagaaaatgttagcaggtctgtccactgtttgacatttcagtgcccggtcgtgttcgctcaactggttatcgaataactgatataacatggaaatgggtactacctgtacgatgtatcatatctctcaataattataaaacttctaccactctctctctctt

SEQ ID NO: 13901 - DNA, 470 bp, Oryza sativa
  Clone ID: uC-osflcyp175e12b1
tttttatagtgcagattgtcggtgatgacctccttgtcaccaacccaaccagggtggcaaaggcaatccaggagaagtcatgcaatgctcttctgctgaaggttaaccaaattggatctgtcactgagagtattgaggccgtgaagatgtcaaagcgtgctggctggggtgtgatgaccagccacaggagtggtgagactgaggataccttcattgctgatttggctgttggtttggccacgggtcagatcaagactggagcaccctgccgatcagagcgcctttgccaaatacaaccagcttcttaggattgaggaggagcttggtgcggctgctgtctacgctggtgccaagttccgcgcacccgtggagccctactaaacttgatggtgaatatcatgcggttcatgcccactgttgtgggcatgggttttgtgaagacaggatgcttatctctatccgtaattgac

SEQ ID NO: 13902 - DNA, 497 bp, Oryza sativa
  unsure (1)..(497): unsure at all n locations
  Clone ID: uC-osflcyp175g04b1
tatanttctttgcttctcatgttcttaggaggagcttatgagggtgcagttagaaacaacaacacaattaaatcagctgaaagaggttcatggagcttggttgccaccttggttagtgacacacacagctcgtgctaaggaaatgatgttaagtcactggaatgaacatgggaaacctgctgttaacagtttattgcagaaggcatcagagaaatcagttcaggcaaagaaatgggccgagccacatgtagaagctgccaagacgaaatggatacctgttatcaaggaaaaatgggttaccatgaagacaaacgcagagccttatgtgcaaaaggtctcagcaaaatctatagagctttatcaagcatctaaggatgttgtcttacctcatgttgtgaaagcacataagaatgttgattccttctttcaggaagccaagaaagtttccaatccttacattgatcaagttgctaaggccactaagccacatgtcgaga

SEQ ID NO: 13903 - DNA, 434 bp, Oryza sativa
  Clone ID: uC-osflcyp175g12b1
tacctccttcctcctcatcctccccaaccactgcatccgggtcggcgtcctcctcctcctcctccttctcgcagaatgcaacgggcaattcacgctatcgggtcacatggcagtctcctcaagtctgctgttctgcgacacatcagtgctccaaaaccatctattttacctgctgtatattcacgctccatgtcagtttcatctgctcaaatagaggagagtggatttgagactgccactgtggcagatattttgaagtctaaggggaagagtgctgatggatctcggctctggtgcactactgatgactttgcctatgatgctgccaaatctatgacgcaacacaatgttggagctctggtggttggctaacctggacaggataaataaaatgctgggattgccactgagagagactaccttaggaaaatcat

SEQ ID NO: 13904 - DNA, 325 bp, Oryza sativa
  Clone ID: uC-osflcyp175h08b1
tagtaaggactggaggggtggcagggcggccagttttaacatcattcccagcagcactggtgctgccaaagctgttggcaaggttcttcctgatttgaatggcaagcttacgggaatgtccttacgtgttcacactgtcgatgtctcagttgttgatctcacagttagaatcgagaaggctgctttatatgatgctatcaagagtgctataaagtctggatcagagggaaagctcaagggaatcataggacatgttggggaagacctgaatactactgacttttgtggtgacagcacgtctagcatcttccacgccaaggctgga

SEQ ID NO: 13905 - DNA, 496 bp, Oryza sativa
  unsure (1)..(496): unsure at all n locations
  Clone ID: uC-osflcyp176a04b1
ttaattcctagggttcagcagcttctgcaggattgcttcaatgggaaggaactctgcaagagcattaaccctgatgaagctgtggcatacggtgctgccgtccaggctgctatccttagtggagaggggaacgagaaggtgcaggatcttcttctccttgatgtgactccactgtctcttggtctcgagacagcgggaggtgtgatgacagtgctcatcccaaggaacaccaccattcctaccaagaaggagcaggtcttctccacctactccgataaccagcctggtgtgttgattcaggtctatgagggtgagaggacacggaccagggacaacaatctccttggcaaatttgagctgtctggaatccctcctgcccctaggggagtccctcagatcactgtctgctttgacattgatgccaacggtattctgaatgtgtctggcgaagacaagacaactggccagaagaaccaagataccatcacanatgaca

SEQ ID NO: 13906 - DNA, 506 bp, Oryza sativa
  Clone ID: uC-osflcyp176a12b1
gccgcgccggaaccggccgggaccgacccacgccgtttgtttgctccccaaaccaagccaaccccctcgacggccggaacacatcggggggacgcagacatggtgctcgaggcgacgatgatctgcatagacaactcagagtggatgccgaacggcgactactcgccgagctgatgccaggctcaggccgactccgccaacctcatctgtggcgccaagacctagtccaacccggagaacacggtgggcgtgatgacgatggccggaaagggcgtgcgcgagctcgacactcccaccagcgacctaggcaagatactggctcgaatgcacggacttgaaggtggagctgaagcacatctggctgcagcaatgcaggttgctcagctggctctgaagcatcgccagaataagaggcagcaacagcggattatagcttttattggaagccctgtgaaatacgacaagaaagttttgggaacaatcgggaaaaagcttgagaagaatat

SEQ ID NO: 13907 - DNA, 448 bp, Oryza sativa
  Clone ID: uC-osflcyp176f08b1
tcgttgagcgggagaacaacaagcggagggagcggcggcgtcgcgcgatcgccgccaagatcttcgccggcctacgcgcccacggaggctacaagctccccaagcactgcgacaacaacgaggtcctcaaggccctctgcaacgaggccggctgggtcgcagagcccgacggcaccacctaccgcaagggatacaagcctcctgaacgcatggaagtgattgggtgctccgtatcaccaagcccgtgttcctcgtatcaaccaagcccgcgggcatcatacaatgcgagtcctactttctcctcattccctagcggcgcatactaccccttacttccttaccctaacaacatggccaatggtgttgatggtaatcctatcctaccatggcttaaaacactgtccaattctccatgatcaaagaaacatccacagcttcccccactatt

SEQ ID NO: 13908 - DNA, 496 bp, Oryza sativa
  unsure (1)..(496): unsure at all n locations
  Clone ID: uC-osflcyp176h08b1
tcgttcgccgcgaactccggaaccgaacgccacacgcgccttcctctcacttaatccgccatgcttcctcctagggttgccccctcctctctggccgccgccgccgccgccgcgcctacctatctcgccgccgcggcctcgacccctgcttccgtctggctgcctgtgccgcgtggagccggagccgtggcagtgtgcagggccgccgggaaagggaaggaggtgctcagcggcgtggtcttccagccattcgaggagctcaagggggagctctccctcgtcccccaggccaaggaccagtctcttgctaggcaaaagttcgtcgacgaggtgcaggccgncatcaacgagcagatcaatgtgggagtcaatgcattcgacgcgtaccactcccttttcgcctactttgaccgtgacaacgttgctctcagggattcgccaattcttcaaagatccagcgatgaagagagggatcacgcagagaaactcatgaagt

SEQ ID NO: 13909 - DNA, 399 bp, Oryza sativa
  Clone ID: uC-osflcyp177a04a1
cgacggcatgcgcacgcgcacaagcgcggggccccctgagcgggcgcccccttttttttggtggttttcaagacagcagggttctgcatcttttttctactgccgcattcattagtttgggagagggtgctgatacttgcttacaggctctgaccaacaaatacgggtaaatctacgacaacactccatctgcagatagaatcatgcaggcaaggggtaaaaaaccatcatgaagacaagttcgagcgataccgattacaggaaacatggatatctttcttattaacaatagtatcgcaagggagctttaaagagccttagatatatatatcaggaccgatccactccatacccggggccttctgtttgccggggggaggggctaccggattgcgcctg

SEQ ID NO: 13910 - DNA, 276 bp, Oryza sativa
  Clone ID: uC-osflcyp177a12a1
ttggtttgtggcggttggaagtaggccataaaacatggtacacacattcttgttttttcttgggggacccgaatttgggggaatttctacaaaaatttagcttattttgaccaattgacaaaatcttggcaaaatttaacgacatttaagaaccttgccctttgggccttaacatccaaaccacctgtaggtgtgcgcctggccaacgcccaaatcctcttggccggggcccgttggcgcctagcccccttcttggcggcggctgtaacttttcct

SEQ ID NO: 13911 - DNA, 331 bp, Oryza sativa
  unsure (1)..(331): unsure at all n locations
  Clone ID: uC-osflcyp177b08a1
tgtttttgctactcaataatctttcgatatttcaccgagggtaatgtatggtaggaaaatcgccagacataacagagccggccagactcaactcaaactcaaccctatgatggtaaactgtttgcgattaacgcctccgcctatgacaatgtttggagataaacgcttccaccaaaaaacgaatgtcggggagtgttctcccctacaagaattattattgttttcaatgttaaaaaggcaaaattcaccagatcccgttagtgcaggaccaggaataaacacttgttcgtcatgacttcgaggaggtgaaggtgnctcctcatcacattgt

SEQ ID NO: 13912 - DNA, 304 bp, Oryza sativa
  Clone ID: uC-osflcyp177c04a1
tttgtgttttttttttttttggttttttttttttttttttttttttttttttttgttttttttttttccccaagaacaacctttttttttcaaagaaaagggccctttctcaacctttaaaattttttttttttgaaacctccaagcttccaattttttttgaaggacggggttaattttttcccaccatttggatcaaaccccttcttgccaaaccggccggtcagccggtcgcgtggaaaaaagaaaaaattcttcactggctgaacatattagttggccaatgggcccaaccgtgtattat

SEQ ID NO: 13913 - DNA, 271 bp, Oryza sativa
  unsure (1)..(271): unsure at all n locations
  Clone ID: uC-osflcyp177c12a1
cagaatcaaattattttgaaaacaaagcatctgcaaaattacatcaaattacaaagttacaacataattggccgcaaaagcctcttccagaattcattggaaatacaagggattacaataaccgtggaaccacgttctaaattctagctcaccttgctaaaagaagcaaagatacagatctgaatgagacagctcaacattgtggtacaatcctctagtagaactagggtacaaaaancccctttttnntgntcccacatccatatcttca

SEQ ID NO: 13914 - DNA, 367 bp, Oryza sativa
  Clone ID: uC-osflcyp177d08a1
tttgttttttttttttttttttttttttttttttatctgaacaaaacaccttaagtacatagtcatattgtacaaattacaaaaggcgatctgctctcgataactttacgagattgattgattcgttcattcacaaggcaattaacaccttaaattttacaacaacaacatcatgagcaatagctgaaactttgaaagcagaactccagtctgtctgtataaccagcagcagcaggcagcaaagcaaactgttcgatcacattttgacagggaaccttttgtacaggtccgggttgtcgagcctgggcttggcgatgacctggaaaaacacacctattgatgctctttgtgggacacattttttttt

SEQ ID NO: 13915 - DNA, 316 bp, Oryza sativa
  Clone ID: uC-osflcyp177e04a1
tttgggttttttccagattttccgctttttttggtcttttgtgccttctcccgttaatataaagtggggtttgcagcagtgaaacaaatttaccggcaaaaaaatattggccggatcatatggaaagcctcgagatggtacaggtagaacacaccaaaccactagtaggttggatgtgcgaataattgttcctcaatatgtggctgggttggccctagttgaaatcaggcttctcagggtaagtgcagccagaacgctggatgataatagggctcgcatacacatcggagggcctaattgccccttttttttttga

SEQ ID NO: 13916 - DNA, 308 bp, Oryza sativa
  unsure (1)..(308): unsure at all n locations
  Clone ID: uC-osflcyp177e12a1
tttgttttttttttttttttttttttttttttttttttttttttttttttttttttttttttttttttttttttttttttttccaaaatcgaaaaaaccaaaaaaaaagccctttttggaaggatttcccccccccaggggggtcaacccaacaaaggaaaggcccaaattgggggggatttgggggttcacccaagggaaaaacgaaagccccaaagcccaagggccaaggttttaaaatccaaggggtgttnaatatccctctgtgaaaaaaagaaactnnacgtcactagaaaaaaaaacttctt

SEQ ID NO: 13917 - DNA, 430 bp, Oryza sativa
  Clone ID: uC-osflcyp177f04b1
tgcaacttaagtttttctatagctcctagcaagctagcgatgggttcctttgagatggcgtgggcggccacctccgtggctcccttccaggggctcaagtccactgcgggcctcccggtgaaccgccgctccagcagctcgagctttggcaacgtcagcaatggcggaaggatcagatgcatgcaggtgtggccgattgagggcattaagaagttcgagactctgtcgtacttgccgccattgacagtggaggaccttttgaagcagatcgagtacctgctccgatctaagtgggtgccttgcttggagttcagcaaggtcggattcgtctaccgtgagaatcacagatcacccggatactatgacggtaggtactggaccatgtggaaactgcccatgtttggatgcaccgatgccacccaagtgctta

SEQ ID NO: 13918 - DNA, 372 bp, Oryza sativa
  Clone ID: uC-osflcyp177f08a1
cttcaaaaacttctgtaaaaattcaccattttgaaggtgcgtacactgatagaagaccaaaaatgaattgggaaaaaaatacaaatgttacacatctatgtggccggccgaccaatccggcccaattaacacaacacaaagaacaaacgggcctccaaaacagaattgattgggcccaattaaattggtaatagttactccgaaatatttgaatcactttggtggcgggaggatccttcaatcgccgtagatgaagttgtgactcaccgcgccgccgctgcacttatctactcgcctttgccggtgtgcttgaagcacttggcgtcgccggtggacccgagtgtactcggagttcatccacagacagctgct

SEQ ID NO: 13919 - DNA, 295 bp, Oryza sativa
  Clone ID: uC-osflcyp177g12a1
tgtgttttttgcaacaccgggggtataaatcccaactcgatgatgcaaatagtttaagcataaccatagaatttacacagacatgttaaatatgagccaacaaattcatggcagcaacatgtaacaccacacatcaaaagtttgcaacccatcaggcacgcaggaaacgtccacattccacagacaagctaacactagcatgcattggcctaattgagactctaaagaagagactcatgctgaagcatgatagaatcaataacggggagtttaacattcccaccatattgaatca

SEQ ID NO: 13920 - DNA, 278 bp, Oryza sativa
  Clone ID: uC-osflcyp177h01a1
aaatatttatggtattttaaagttttgggtgttaaaccttttttttttttttttttttttttttttttcttttttttttttttattatttttttttttttttggaggaaaaaaccaaaaaacaaacaaccaagaaaaaaggggggcaaaaaaaaaaaaatcggggggggtttaaataaaaaaaaacccccatggaagggggcaaaaaaccccaaaccaatttttttaaataaaaggggaaaaaaaaaaagggggacccctccttttttaaaacccccc

SEQ ID NO: 13921 - DNA, 368 bp, Oryza sativa
  Clone ID: uC-osflcyp177h09a1
agtatcaaggttgtattcactttctaggatttaatcacctgtacaaacattttcagatttcacaagaacatgcacaagaattagctagctaacctctacttctacatgacatcacaaccgttgtgaggaaccctcttcttatacacgtaaacgcgcgacacgaacacgaacgcgacgagctcgacggcgcataggccggcgaggagccagtagaagtagtcgaggtgggcgcggttgaggttgttggcgaaccagctcgccccgctcttcttggtggcgccgtcaatggcggagatgatgaagctgctgaagaagtgacccaccccgaatatgctgaggaagaaggcgagccccaggctgcgcagcgc

SEQ ID NO: 13922 - DNA, 463 bp, Oryza sativa
  Clone ID: uC-osflcyp178b01a1
tttgttttaggtaatgacacaggaatcattgtaggacaaaaaaatagacatgatattcccattctaaggcacatctccgttgtccaattagtaagattcgcctattataagtacacaaaactgacgcacagcaacactgaagaaggccagcagaattatgttcagacatgaaccatttttgcttgggtgacatttgctagatcattcagacagcagggaagaacttgttcagattgaacggtaacgagtagaattcttcgctcctcgcgtctttcttgaagctcctgaatttgtcccaccaatggtagcctctatccttcctcaccgtgttattgtgcgtctcgatcgtgttgtcgaggaagtaggccacaagacccgcgacaaacggctttgatgagaacggcacgtttatcatatcattgaaccatctggcaccagtgtgcactggtccataaacctgcac

SEQ ID NO: 13923 - DNA, 501 bp, Oryza sativa
  unsure (1)..(501): unsure at all n locations
  Clone ID: uC-osflcyp178b06b1
ggaactctgtgaaatgcatgccccttgggaagaaaccaaaaaatctcatccatggtggcaagtagctgatgtcgatggtttggcttcccttgtcgctgaaagagcaatggaaaacattgtcaacaatgatctgccaagacccactcagacagtccgggttcatggacctcaagtgaagggccctgaaaacaaggatgattatgggatgtctgttgtttctgggggccaagagccagatcctgtacatgacactatggagtgcagctacagtgtttcaagcaccaccaatgacatgaattcttctgacgggggacgttggcagcaccacgaaagaaataatgtgtccggggatgcacggngttcttatagttccaccaacagtacaccgggcagcaagccaacatatcaggatgcttctgagagagccaagctgctagatgctctccggcactcgcaaacacgtgctagggaagccgagatagctgccaagaaagcgtatga

SEQ ID NO: 13924 - DNA, 440 bp, Oryza sativa
  Clone ID: uC-osflcyp178b09a1
tttgtttttttttttttttttggttttttttttttttttttttttttttttttttggttaccaagggaacatccgatgccgatttaattaaattctcaacaggggggaaccccatttacaaagaatttgaatatgcaaatgcgggggggccagcttcagaacgataaatatcataaagatcatctggcccacaaaaaaaagggtaatccttcccttccctggcaccatttattcaatcagccatatcagcagccccatcagggtctcccatttctgaatcggcagcagttcgttttttggaccggtgagacctgataaacttttcgatgcgcgacttgggctctgtatccggtatcaacatgtcttgggtaaggggagaacggttgaacggatcagtactgtcacttagcaagggcctaacaataacgggacgatctatt

SEQ ID NO: 13925 - DNA, 432 bp, Oryza sativa
  Clone ID: uC-osflcyp178c05a1
tttggttttttttttttttttgttttttttttttttttttttttttttttttttttttttttttttttttttttttttttttttttttttcccacccaaggggccccctttcctttggaggggaaaaaaaaaaaacccccttcaaaacccccttggggaaaagggaaccttaaaagacaaacctttgggccccggatcccccaaaaaaaaaaaaaaaacctttgggccccggggaaaacaaaacaaatttccttggataaatgtggcccaaaaaaaaaaagggggggcctgggccccaaaaagtttctcgccaactcccccccaattacaaacagggtcgggaggggggcttgggggaaacacaaaaggccggggggacaacccctccgtggaacccccaggaaacctttaaaacccccaaaaaggccccgg

SEQ ID NO: 13926 - DNA, 462 bp, Oryza sativa
  Clone ID: uC-osflcyp178d01a1
ttttgttttttttttttcattcggaaattttattcgaatgacatataacaattccgatataattaagcacgcgtgattgagtgcacacgtacgtgtgtccacccacgtattagacgactgatcacgctcgttttattgtatgttattattattttcctggatacaatttagtagaggtatatatatagtactctctccgtttcagattgtaagactttctagcatcgctaatattcgtttaaaagttaatgaatctaaacacatatatatgcctagatttattaacatctatatgaatatgagcaatactagaaagtcttacatagtgaaacggaggaagtagtatgcatgaaatcatgggcagaagacgactcggtagttgctgttgccgttgcaggagcgcagcttggagtcgtcggaggggtactggtacgcgtccgggcagctcctttccctgcacgt

SEQ ID NO: 13927 - DNA, 452 bp, Oryza sativa
  Clone ID: uC-osflcyp178d09a1
tttgtttatgttgcaatttacagcgattatgatttcataacaaccttgcatatatattacacaaggtaaaaaaatgtaaaggttcatccgcaagcacaagtcttatgtcccgcgatctggatgcaaatgcttcagcgaacttcctgaagcacacagacctaccaaagatcatgaagcatcgctggatctcaggtggctccgaacaaacggcgtttctctctggacctgtcttcacagtgtatccaattcttcaacgaacatggagtgggctcattgagagccagatcctgacgcacaagtcgtggaagaagtttcatttacaacagcagcatggttgggggataccgtcctttgattatttgcgtctgaaggggagcaagcactatctgcaggaacagcagatggtccagtatcgtcctttgtttctagccgttccatcatgcgagataccg

SEQ ID NO: 13928 - DNA, 335 bp, Oryza sativa
  Clone ID: uC-osflcyp178e02b1
ggcccgacccacccatccggcccgactctgctctaacccagacaccaagcccaaaggggggggcctttgaaaacaaaccgaccctgacacacccaatagaggcagcatatactaagaccaaaactaaggtcagcacattgcccctgcaacaactacccgacacaccagtgggcaggagctgaaacactcagctccaaagctaaagagaaccaaagaagcgaaaacgacaccggctcatcttcaaatgggaagccatcagaaaagcgaacaggcagccctgcataccaggcaaaccaatgccaaaaccagaagtgaaagggcaggactggtctagt

SEQ ID NO: 13929 - DNA, 462 bp, Oryza sativa
  Clone ID: uC-osflcyp178e05a1
ttttgtttacaaggaagactgcgcttgggcacatataataactcggctatcaaaacaaagcacaaatcattcttgtctgacgaacacacgcgaacatgttaaaaacactctcgaaactgttggttgaatggcgtggaccctccatcctcagcgctcgaggcacaggctcagctagtccgagctgcttaaaccctgcagctggtcaggatacacgcacgccatggtcggcaagcaacttaaccccaactataacaaagggtaaaggcctcagtagccggtgtgctgctgccacccctggtgagacggctgtgattgggcattctggaaaccgttcaggcctccctcggccgggttctggtggtgctcttggctttgagaatggtagaaagctggatacccatggccaccgaattgcgagtgctgctgcggttgctgcgcctgacgaaagccaccctgctgact

SEQ ID NO: 13930 - DNA, 274 bp, Oryza sativa
  Clone ID: uC-osflcyp178e10b1
atttgtataacaccactacagacttccagatgcgggggggatcatttctagggtatgttctgtaaccaccgccatcatagaggcacacaccagaaccgggaagtaactcaaagaccgaacttcgctcacacattgggcgtgacatgcacatacgacagcgccatgctagccacgcgatgtccggccaggagcgtgctaaactccgcgcttggggcaaggggactgactgagatcttgagggagatctacaacgagaaaggcaagggggtgctcc

SEQ ID NO: 13931 - DNA, 471 bp, Oryza sativa
  Clone ID: uC-osflcyp178f01a1
tttgttttttaacaccctgtgtagctattatttatagactcccacaccatgaataacaaagggtcctctcagcaacatattcaccatacacaaagcaaactcatcaaaagtcaacaaattactggggaactttctattacgattaaacagcctatgccgatattcacatttctttatatgaaaaggcaaacgtaggtaacataccaaacagtaccatgcatagagaagaactgtgatgattaactaggtcataaccctgccatcttagtatcttggacccatactacaagaacgggacagacgcaaattccccatctcacgttcacttccaaccgtttctccacctgaagaagctgagatgtactgcttcctgcaggcaggacagcgcccatctgcctcaagaattctcttgtggcagaacagacacagatgaaaaccgcaggggcaagggaggaagcttgaatctgttgg

SEQ ID NO: 13932 - DNA, 409 bp, Oryza sativa
  Clone ID: uC-osflcyp178f09a1
ggcagaaagtaaatattttaacttaataacatccagagtacataacccattctcatgtcatcatgctaaagttgtttaatcataaaaaaacagctatgcgtctgcaaacataacataggagctctcagggaacaaaaaagggtagttctttcagtgtagaaccagcaacaaagaaagacttgctctaagctgaggcacccttgcccttcttcctctggagcttcttcatgtagaattccagctccttgccctcaaggatatagccatctgctcggccacactgcccagggcgggaagaaatgcaggccagcaacctcccactgccaaactgttcttcgatgtgggcgtcaagtgtgcgtccctgttggcgcttctcaagcttcctgacaacatggttgcttttcttcgc

SEQ ID NO: 13933 - DNA, 338 bp, Oryza sativa
  Clone ID: uC-osflcyp178g02b1
gctgggtttttctaatgcaaaaatctacaaatgtgaggggggggagatgttaaagaccaatgtgctacaaggcctacggaagcggaaaagaagatagccctctatgcgatgcgcctggatccgaaaacactagaacgaaactcccgagacatgcttcttttgatgactgcccggggcaccacattcttatggctacaacgcttaatggagctgctaacatgggcggagctcttcatttgagcgcagccaacgaaagttgtccacagacccagacatcagagcatcttgctgctgatgaaatgatgcgtcagcaacatataatcaatctgcagaacaag

SEQ ID NO: 13934 - DNA, 453 bp, Oryza sativa
  unsure (1)..(453): unsure at all n locations
  Clone ID: uC-osflcyp178g05a1
gtaacaaggaaattactacagattgcctcggcaagaagctgccaagctggagtacgtagttagctaggtccaagtctggacaagatgcaattcatcaacgtaggattacacgtacacagagcggtgtacagagtcaagaaaattaagatagcatgcacgcacggagcgtgcaacataaagtatacagagatagagagagagatgaccagcgctgcattgatatgccccagctgttatttttactgtagctattattttggctagttgatcaactgcgagccagcatcgatcgatatatcgatcggtcggtccaagcaggattaatcgatctagctgaccttgctgcagtcagtggagaggctgatggggaagccgacgttgacgccgcacttgccggggatgccggcggcggcgccgaggttgagagacttgatggtgccngcgagggtcttg

SEQ ID NO: 13935 - DNA, 204 bp, Oryza sativa
  Clone ID: uC-osflcyp178h01a1
tttggtttttttaaatatttgggttttaactttttttttttttttttgggcaacaccggttttttttttcttattttttatttcttattttttaaaacatagccaaaaaaatagcgggcaaaatcaagaatctaccagaggtaacccgtacacaactatttttttcccccccccaaaaaatataaccaaaataacccccccggg

SEQ ID NO: 13936 - DNA, 284 bp, Oryza sativa
  Clone ID: uC-osflcyp178h09a1
tttgtttaataaaaaaaacaggggaatcttaaaccctttatccatatccctagaatgcaaacgctctactgaggaatccaacaataagcaacttgaactcaaaagcgaaggagaaccgctgatacccttgctcctaaaccgcaccaacgctttgactatctgggtgccgagaattgcgtaaatatatctagttagcctgaaacatgcccgaccatcatataggcattacctggcatactgctttgacaagataatcaccgatctaatatagtgctgagatcacc

SEQ ID NO: 13937 - DNA, 303 bp, Oryza sativa
  Clone ID: uC-osflcyp179a05a1
cccccaaaaaaaaaattcaatttttttcagaggccgggcgggccaattcaaaatggcaaacctaacaaaggggaaaaaaagaaaacaccccccctggaaaccattccacacacttaaaggcccctttaggggggggaaaaaaagggaagcccccgcgatttttgaacaaagggggggaaaaaacagggcccccacactttactttttatccagggaaaaaaagatttgaatccgaagccgggccggggggtcaaaaaatccggggctatgccaaaacccaaaggcgtttcacgggcccccaaa

SEQ ID NO: 13938 - DNA, 94 bp, Oryza sativa
  Clone ID: uC-osflcyp179a08b1
tctttctctctccactccactctcgcgttcttgtggagtttttctccactccgggaaggaaggagtgggtgggtaggtgagtggagtggagcgt

SEQ ID NO: 13939 - DNA, 148 bp, Oryza sativa
  Clone ID: uC-osflcyp179b01a1
ttttgttttttttttttttttttttttttttttttttttttttttttttatttttttttataaattgttgcttaagccagtttcaggtcacctgatggcaagctcacaagaacagacaggcacgcacacacatacaaaactataaaac

SEQ ID NO: 13940 - DNA, 497 bp, Oryza sativa
  Clone ID: uC-osflcyp179b04b1
cctttcctaccctcttctccccggccgcgcccggggccggtttcgtcggacgtcgcgatgcctgctccccgcttactccgggtgctcctgctgctcgtcgcgctagcctgcgccacgtcgggggtcgggtgctccgacccgcggttcccgctacctcggccgcgtccgggagctccaccgcggggagggtcgccccgcggccgagcaggaggccgtggcgcgcgggctcctagcgctccttcttccgtcgcactccgggagcttcgatttcagggtcatctacgcggaccaatgtggtggaaaggcatgcttcattgtggacaaccatccattgtttgatggagaagggactccacaagtacttttacttggaacaagtggggttgaaatctctgttggtcttcattgggacttgaaacattactgtgcagcacaatgtttcatgggataaaactggtggggcccattattatcagtgccaaggcctgggtcactac

SEQ ID NO: 13941 - DNA, 411 bp, Oryza sativa
  Clone ID: uC-osflcyp179b09a1
gaattgtataatctgagatatattgcagctatagtttgcgttgtataatcagaacggaaatggaatgaatcctaatacacacatctaacttttgattaggaaacactgaacaaactgcaactgcagctaggcactctggaatgttcacgcaactgaaaaaaaaaaaagtaggacttgcctccaaaccatttaagatcactatgctccgagtctacccgcgaatctcacacctggctctctacaatatgatgttgaacgctccattgtacatatcaagcagagcagcatgccctctttgtgtttcctgcagcgctgtcaatgctgatagttttaccctgggaaggcagcggagcagaagcagcagctgcttctttggcggccagtgctttcctgttaacaatgccatagacc

SEQ ID NO: 13942 - DNA, 404 bp, Oryza sativa
  Clone ID: uC-osflcyp179b12b1
tttatttacttgcctgagtctatgcttaaatgggtgggtttatttgagtgtcacgtgggttcagccagcaaacaaaggacagtgatggtgatcgtgtcacccaaggccttggaaccgtgtggagttttattttagcacggtctccactttgacaagattgcttagatattgctcttaagtgtgccattcactcttaagatgaagtcaggggaaaggcagttagattggttacaaaaaaactctatgaactaacatacgcattataaagagttgagcagtttgccatcgacagtcttttggcaattgctaataaacatggtgtggagactgacattaatttcacattcttgaaagaatcttcacctgagtttgaggcaggctatcaggaaacttcggtttggggc

SEQ ID NO: 13943 - DNA, 437 bp, Oryza sativa
  Clone ID: uC-osflcyp179c05a1
ttggggtttttttttttttttgggctgttctttgtttttgttctttttttattatcttatttttattaaagcatgttgttttattcttaaaacaagcaagaccagacgagcaaaacccaacatacgggcccgcagccaaaaggacaaaaaatccataggggagaaaaacgaaataatgaacaaggcgcaggaacggacccatgaaagcaagaccaaaaaccaagctgggctccaacggcttggcaccccaggcgccggggataccattatcatgcgaaccaggtgccgaaggaatgccgacccaggagcatgcgaaagtgagcccgagaacagcgctccaagaacggcccccaccccgggacaccatgctgggtcacactgaggctgggcaacctgaagccaccatgccggaaatgtgcaagccagtaggccctcaa

SEQ ID NO: 13944 - DNA, 446 bp, Oryza sativa
  Clone ID: uC-osflcyp179d01a1
tttgtttttttttttttttttgaccaaaacataggaggtttcatttcttcttctcaaagtagtgtagcatctttccttctttcaccattacataagcttaagcaataacagataacaaatcctcctcctcctctaggtaaaatattcaaacacaatacccttataagtacttattattaggaaagtagcgtgcatgggcataaatggcagcggggggcaggttaagaatcacaatgctgagcagcgaggaaacaaaacaccataatgggacagagcaaaagcctccgaaagggagcttttaggcagaaggcttctcccacttgaggggcttcaccacctcccaggtgaagtctgggtcgtcccttccgaagtgaccgtaagccgccgtcttgaggtagcgtccgttgccgcctttcttgaggtcaaggttgatgatgatcatgcca

SEQ ID NO: 13945 - DNA, 502 bp, Oryza sativa
  Clone ID: uC-osflcyp179d04b1
ggatcattcaagatggcacaccatggccaggagggggggtttggaccatcctggaggtgagtcaggttttccttggtcacagtggtggccttgataccgagggtaatgagcttccccgcctggtctacgtatctcgtgagaagcgtcctgggtttcagcaccacaagaaggctggtgccatgaatgctcttgttcgtgtctcagctgtgcttaccaatggacagtacatgttgaatcttgattgtgatcactacatcaacaacagcaaggctctgcgggaagctatgtgcttccttatggatccaaacctaggaaggagtgtctgttatgttcagttcccacaaaggttcgatggtattgataggaatgatcgatatgcgaacaggaacacttggtttttcgatattaacttgaggggtcttgatggcattccaggaccagtttatgtgggaactggttgtgttttcaacgaacctgtttattgggtatgaacccccaatta

SEQ ID NO: 13946 - DNA, 426 bp, Oryza sativa
  Clone ID: uC-osflcyp179d09a1
gcagttggaatgtgtgagatgcatatatatatatatatataacaacaagtatatgtatatgaaaataaataatgggggccggcaattgatgcaggtgagtgagagatcgaagatccatatatagtgtgtagtacgtaggtccgggctgggggctggggcgatgatggttatagtacaggagtgaaaaattagtgcatcctgccctgctgcgtctgggggagaaggccggggatgtaagggacgccgaacttggggatgaactcctggccctggatgaaggcctccacggtgaactccttctggacgtcctggtaggtgagggactggacgcccttccacttggcgcgcttgctcatgtcggcgccggggccatggttgtcaacctccgcgtagtagagggtgtccagggcgaagttgccgttccac

SEQ ID NO: 13947 - DNA, 437 bp, Oryza sativa
  Clone ID: uC-osflcyp179e05a1
ttttggtgaatttcttttatacaatatatataaaagattacctagaatctacaagcagaagatagcttcaaagcctaataggatagcctgataccggtatcatatgggccgccgttatgcagttgggctttggcttgaagcgtaccttcacaccttgaaaaagcacaatagcgataccaatataagcatcgcatgagactatgagatggacttctctaaattgctactaataaaattgttaacctatagtattatatgtttcagctttattataaacttcatcgcttgtctccacatatccctcaaattggggacgatctgtttgttattaagaagcaccaacaaaggcttcagtttttcaccagaggcttcattcagtcaaagcttgggaacaagcctccttccatgggaacgtctaggaggtaggtccaaatctt

SEQ ID NO: 13948 - DNA, 154 bp, Oryza sativa
  Clone ID: uC-osflcyp179f01a1
tttgtgttttttttttttttggggttttttctttttttttttttttttttttttttttttttttttttttttttttttttttttttttttttttttccccggaaacccaacttttttttttttttcgggaaatttttggggcccccgggggccc

SEQ ID NO: 13949 - DNA, 404 bp, Oryza sativa
  Clone ID: uC-osflcyp179f04b1
gcatgttttcaccacaggctacgcaaaattctcgtggtggcttttttaccacctgcgctggcgctatcctcctcctgatcctgtgccggccggcgatggcgtaccggttgctggagctcacgctggtctccgcgagcgacctcaagaaggtcactctcttctcgcgcatgcatgtctacgccgacgcctccatctccgggagcaacgtccccatgcccatgcacggcacccaccccgaccgcaacggcggcagcaaccccgtgtggaacaccgtgctccacttccccgtccccgcccgctttgacacccgcggcctcgtcctccacgtccagctcctcgcccggcgctccttcggcggccaccgcgacctctgggaccggttccggcccttcgacgacctcctc

SEQ ID NO: 13950 - DNA, 441 bp, Oryza sativa
  Clone ID: uC-osflcyp179f09a1
ctcatcaaaacttgcacagtaaaaatggacggatgtactttgacatagcatatgtttcgccattacaagccgctctgcagttcaactacttcaagataagaggcactaatgacaggcatcactcaaaaataaactcaaactagcacttctgtgaaggataataagatgggatgaaaaatgcttccagaacaaccagtcccagtcccagtttttagataagtagcaacatccccttttgatattttaaatcttgttgaacgcaacgatgtcgcagctctggacaaattcgttgatcggctcttcagtcagatgttcttcgataaggctatccacagacaccaagtcatcaacaatggtcaacatgatctgcaacttcttgatcccgtaacccacaggcacaagctttgatgctccccaggtgagaccctccatctgcacact

SEQ ID NO: 13951 - DNA, 410 bp, Oryza sativa
  Clone ID: uC-osflcyp179g05a1
ttttgttttttttttttttttttttttttttttttttttttttttttttttttttttttttttttttttataataaatataatataatttagaaaaaaaaaaaaaaaaaaaaaaaaaaaaaaaaaaaaaaaaaaaaaaaaaaaaaaaaaaaaaaaaaaaaaaaaaaaaaaaaaacaaaaaaaacaagcccaataaaaaaaaacaaaaaaacaactaaaaaaaaaaaaaaccaaaaagaattaaaaagggaaagcccctttaaagaataaagctgaaaaaaagaaacatttaaaaaaaaaggcccccataaaaaagaaaacaaacttaaaaccaaaactgaaaaaagcaaaaattgggaaaaacaaaaaaggcaaaccaaaaaaaaagaagaaaatgaacccaaagaaaat

SEQ ID NO: 13952 - DNA, 389 bp, Oryza sativa
  Clone ID: uC-osflcyp179g08b1
ggaagtccggagttggaagcgatcgatggcggctactattacgggacgagttgttgcactcggcgcggtggccgtggtggtggcgctgacattcctcgccggcggcgcggacgccgactgctacgacttctgcttcaaggactgcatggccagggagaacaacatggtcgactactgcagctacgcctgcgacaagacgtgccagccggacaagcccacgctgtactcgtcgtcgtcgtcgtcccgcctcgccggcgacatggagtgccaactctcctgcgccttgggctcctgccaccgcctcctttcggacggcaagggcgccgtggaggcctgcttcgggcagtgctacgacggcttgaagaccacggtggcggccagactgccga

SEQ ID NO: 13953 - DNA, 210 bp, Oryza sativa
  Clone ID: uC-osflcyp179h01a1
ttttgtgttttttttttttgggtgtttttttttttttttttatggacacttatttccatcatgctttagcactttaaccaaacaagaaaccggaggcaaactgcagtgcaatttagtttgctttttactttcactggggcccaaaaatcttgtgcttgccgtacttgccatgcttgaaatttcttttttacaattgctcaccatgggggc

SEQ ID NO: 13954 - DNA, 510 bp, Oryza sativa
  Clone ID: uC-osflcyp179h04b1
cggacgcttgggtgagtgcagatcactcgacagcggccggtaaagaacttataaaagagggtgaggaaaacatgaacacggataattcagcagctgtccatgttgagcctgtagctgatgagaaaatggaggatgaagagcctgattatgaagaagatcctgaagaggtagaattatatgaagatgatgaggagatggatgaagctgctgctgaggaactggtagaacagaatgaagataatttgaatgataaggccaagcaggaagtaactactgaagaggatggaaacaagaacacagaggagcgtgagtcagaaaacaatgctaatatgcttgaaaaagctgcttcaggagaggacaaacagtctgtagttgaaaaatctgcttcagtggagggcaaacaatctgtatcggagaaaggtgacaaggcagttggtaaggaggtaaagacaactagatcacaaaaaggtgattcaacaaaagatgaggtcgttgataaagagctgctgc

SEQ ID NO: 13955 - DNA, 329 bp, Oryza sativa
  Clone ID: uC-osflcyp179h09a1
tttgtttattaataaaatttgcgttacacttgggccataggcaaaaacagttctacacccatggacatatggagaaagagggccatggacaacaaaagcataactggtgtcgccttaaaaccaacatatcataattaacagtacaggtatttgcacaacaatgcgcacctggcctgcgacacgacacactacacagcttgaaagctgacagggaaataaaaccagaccatcaggacggaggttggatcaacatatgccaatagtacctacccacatatattacgacacaatatcaatgattcggccaattgttgaaccaagccatgcta

SEQ ID NO: 13956 - DNA, 513 bp, Oryza sativa
  Clone ID: uC-osflcyp179h12b1
aattatatttacctcctccacctcctcctcctggcgggatcggatcggcccggctgctcctcctccgccgccgccaccgccgccgcagataggagaagatggccgcacttgataccttcctctttacctcggagtctgtgaacgagggccaccctgacaagctctgcgaccaagtctcagatgctgtgcttgatgcctgcctcgccgaggaccctgacagcaaggtcgcttgtgagacctgcaccaagacaaacatggtcatggtctttggtgagatcaccaccaaggctaacgttgactatgagaagattgtcagggagacatgccgtaacatcggttttgtgtcagctgatgtcggtctcgatgctgaccactgcaaggtgcttgtgaacatcgagcagcagtcccctgacattgcacagggtgtgcacggtcacttcaccaagcgcccctgaggagattggtgctggtgaccagggacacatgtttggatatgcaactgatgagacccct

SEQ ID NO: 13957 - DNA, 98 bp, Oryza sativa
  Clone ID: uC-osflcyp004a04b1
gtatattgcgtatacattgaattaacttcagaggttaaataattagccaaggttaaaattgtcccgtgcacatatagcttgtgagggagaggcactta

SEQ ID NO: 13958 - DNA, 254 bp, Oryza sativa
  unsure (1)..(254): unsure at all n locations
  Clone ID: uC-osflcyp004b08b1
ttctaatttncccatagacgcgcagtccaattcgactcgtgctgtggtgcgactccggccggggtgggggacgccatgagccgcacgctcctctcccacatcctccaccgaccgccgacgctcctcgcgtataggggtggttggcgaggaggatcgctcccgatccgcctacgcactcttcgactcaactgcaccgtggctgaagctactgtactcggacactaggcgcttgctcctcagtctaggaagaaaag

SEQ ID NO: 13959 - DNA, 293 bp, Oryza sativa
  Clone ID: uC-osflcyp004c12b1
gtttgccataggtaaatgatagataaaggtactagatgtaaagctcacgatgaacgatcaatatggtcgcgagaacgcacttgtgtttttgtagatcgacatcgacgaattcgacatgaaacacctgatgttggtctctcagagagccgtctgcaatgtgaacgtcgtggtgatcgccgccgcgttttttgagatctgcgccgacactgccgacacgggtgtagtgctggaatcatggggcaacgttgtatttaactctgtagcgctagaatctaatgtgggtgggatatgta

SEQ ID NO: 13960 - DNA, 335 bp, Oryza sativa
  Clone ID: uC-osflcyp005a05b1
ttaattggtttctgggagctcgaatcaagaaaccaagtcgacacctcttgccagagaaggtgaacagttgcctgaaaagtcctgttgttgcaattgtcgggagagcatttccagggattctcaggtgcacgatcaaagtgcgatggctagaccagtgccagcttttactggaaggccggttccacagttgaacataggtttgcgtgcgtcttcatcgttcagcacatatcaaagaaccagcacaaaggcaaatccttgcttagattcacatgatcagacattagctggtaaggtttcagctgagcctaccatgacccacccatttttatccacag

SEQ ID NO: 13961 - DNA, 455 bp, Oryza sativa
  Clone ID: uC-osflcyp005b01b2
tttttgtgtttttattttttgggggttaaattcactgtcataatatattagggggtcctggagcaaagtttggtacaggcaatcttcagagaaaaaacaaaatgggggaacatgaacttacaataaccgatgaatgactcaaacaatttccacgaactaaccgtattaaccaatgttggcaacgtgagccacagttttctaaacacaaaaaaaaaatattctattgatcatttccattagcaaaacaaaatgcctcccagatcccatgggcaaactacatgtattattggacttttatccttgctatccaatcaggctccatacagtgcaggatttgttgcaattgtccccgatgtagttccccgtcatatattagccctgggcatccaccggaatgagaaaggacaggcatatttaccggattctaaaatattcaaggctttgtgcgttttttg

SEQ ID NO: 13962 - DNA, 385 bp, Oryza sativa
  unsure (1)..(385): unsure at all n locations
  Clone ID: uC-osflcyp005b09b2
tttgtttcaaaactacaaaggtgatcgcaagccagtacacacctactgggcgttggcgttgccaattttccacaatcaagatggaatacatgaaatcgaaaggtggtacatgtcatatttgcgtgggtcgctaggcctacaaaataattaagtacattgctctctgctaggctgctagcacagaagatttaatatcctctgtatgggcaaacctccagcttatctacactggtgatccgcgggcatcttgctaccgtgggaatgcgttgttcaatgaatcagtagaagatgcagcgatatgccacacatcgcctcacaaggatgtcgaggcatcttgaaatcaaaagnatcttctatcttcttttgactggagttctggatctgg

SEQ ID NO: 13963 - DNA, 299 bp, Oryza sativa
  Clone ID: uC-osflcyp005c05b2
tttgtgtttttttaacgacggggggatcattattagattattatatatgaaaaatatataagtagcgcccatagtacactacatgttaacgttggaactcaccattacattatatagggcccgtacccttgcagcaagaaaataaacaaagctagcagggaacagtaactctctagatcttcccatacatatcgatctcagctggagatgatcaagctagtaaataggtgatcttggagcaaactactggggtgctgatggggaaggcgacggaaacgccacattttctggggatggag

SEQ ID NO: 13964 - DNA, 445 bp, Oryza sativa
  Clone ID: uC-osflcyp005d01b2
tttgtgttgaaacacaactgagggtttattgatatatgttggatgaatccaataaaaccgatacaagtcacgaaaaatcagactagatgaatccttcgagatcacatgagcaaaagctttcgacgaaagctgtcctatagtcgtggaagcaataacacttgataaagataggaattcagacacgagaggttgcagactataagatgtcatcaaatctccttgaacgccgcgaagagatcaccgttgatgtagtcgttgtccacaagactaaccaagaagtagctcttctggaccttgtctagtatctccctagatgagtcgccctcagggaacaggcaagcccaaccctttgaccaaatttcgaaagcttcgtctttccaaaccataaagctggctgagtcaacgacagttggctggactatttccttgccagggaaaacacccc

SEQ ID NO: 13965 - DNA, 380 bp, Oryza sativa
  Clone ID: uC-osflcyp005d03b1
tagatagaaatcaagcaagcacgacgagacgagacgagggagagaaggcgaagagggggccgtccgcgggcgtcgtcgtgttcctccccccctctctctcctctcctctcctctcgatctccatccttccttccatccattcctccccgcacccttcgcattgctctcgtcgtctcgattcggtcgaggatctccaggaaaagaggcggcagcgatatgggttgcttttcatgctgcggagccggtgatgtcggcacgacgaagaagcgcgacgatccttacgtcccgatccctgatccaggtggtcactctggacgtagcaagcccgggcccccagccccttcgcgttcttcccccaccagctgacatctgccatttgc

SEQ ID NO: 13966 - DNA, 462 bp, Oryza sativa
  Clone ID: uC-osflcyp005d09b2
tgggttttttttttttttggggttttttttttttttttttttttttttttttttttttttttttttttttttttttttttttttttttttttttttttttggggggggggaacaacacaaagagacccgagaaccaggaaaaagggggggggcaaaaaaaaaaattcggtggggggggaaaataaaaccttaaaaaaacctccccccccaaaaaaaagggttggggggaataacaaaacaatccctggggcaataaaaaaagggccgagggggttcccccaaaaaaaggaaaaaattccccccggggttttcggggaaaacctaaaaaaaggggaaaaaaaaaggggggggggtccaaggggggaaaaaaacggtgattttcggaggggccccccccaatttacacaccccccctggggctttggggggcaattaaagcactgggggtggaaggaaaaaggg

SEQ ID NO: 13967 - DNA, 374 bp, Oryza sativa
  Clone ID: uC-osflcyp005e05b2
tttttgttttggcaaaccataatggactccatgcatctttattttccatataagtttcaagactgacaactgtacctcagtaccaatggcaatctacatgtatggggctgtgaaattgacttcaaaatggtagcacttaaatttgttgtaagtagtatagaggtcagggttgctatcaatcagctaacccaaagaatagaaggcagctcaattaacccaactgcatcatatattcatatatggtgttattttttagataggtggtactcgaagcatcctagagttctggtgggggcaggcagaactgatagaactgtatcttcaatggcaaatcaaagattactgttgcaataatgccaccagatcatataccc

SEQ ID NO: 13968 - DNA, 233 bp, Oryza sativa
  Clone ID: uC-osflcyp005f01b2
tttgtgtttttttattggtttgttttttttttttttttttttttttttttttttttttttttttttgggttttttttttttttttttttttaaggggcaagaagggaaccacccccaacccctttctttttgaattaaaaaggcccctcatcaaaaacaatttttatgaaaaactattgataattaccaaacccacctttggcctaaagggaaatgagcggaccccggggggc

SEQ ID NO: 13969 - DNA, 418 bp, Oryza sativa
  Clone ID: uC-osflcyp005f09b2
ccactggaattgtagggataatatatgaacatgtcccattggggcattcaacaatctgcaatgttcgacaagacttgatccatttgcggacttttattcccaacaagaaaagattaaccagaatattcaacaaaagtaacaacactgaaaccatcagatggtagcaattgtacacttgtatgagactctgtttctgctagcagaggaattttacaacgatgcaggagatgtcgtctttgcttttccggttcacggcctgctccgttagatgcttcgcagctgcctgagcatccttgaagtccttgatttcatccaccgcctcttggttggacatcaccttccataatccatcacttgcaagaattagaaaatcagtattctcgtctataggttcctccaccacatctggctctgagct

SEQ ID NO: 13970 - DNA, 303 bp, Oryza sativa
  Clone ID: uC-osflcyp005g05b2
tttgtgtttttttttaaccacaggaaattgtccttgatgtccatttcacatttataataaagtctcatacacacatgaaatgtccttcttgccctttgattaggtcacctaataacaacacaaaagaagaggcacaaacactttggacacatgtagagagactagagagagagagcttactagagctaacttaatgaagacttgacacgctagctatagctatagtagactagtagtagtagttgcaatgcatgcccatggtggtggcgtcgaggagcggcggccgcagctggggcatcatga

SEQ ID NO: 13971 - DNA, 316 bp, Oryza sativa
  Clone ID: uC-osflcyp005h09b2
ttgtttttttatttcggaagggtgtcactgatcttatctcatcttcaattcttcatctcaagatcacaaaacaacaatgcagcgcgaaacattggagcatcagaatgtacgcttgtttcttgctcagaagagtggcttgtcgaccatggtccgggggaaggcgtagcggaacctggcgttgtaggggagccactcgacggcctgcgctgccttcctccggccgccgccggcgtcgacgcacagccgctggatggcgtcctgggtggcgcgggcgttagcgttgtctcgcgcccacgccaggagctcggtggcgccc

SEQ ID NO: 13972 - DNA, 237 bp, Oryza sativa
  Clone ID: uC-osflcyp006a05b2
tgtgtttttttaatttttggttttcctaaactacatatttttcaaaactcgtttaaatcccaacacaactcaaggttcactcaaggttcaacaataaatttcctcttagccttcaaaagaaaaaccataaaggtaaacatctctcctactctacacaaaacatctctatcttcttttccttcatccagcctcctcgtctttaacactgaccatactaagaccctcctctactgctac

SEQ ID NO: 13973 - DNA, 264 bp, Oryza sativa
  unsure (1)..(264): unsure at all n locations
  Clone ID: uC-osflcyp006b01b2
tttgggcttttaacccccttgggtttaaactttttttttttttttttttttttttttttttcttttttttttttaaacccaaaccccctttaaaatccccccattagaatatgcctccatatccttaaatcccantttcacaaataaaccccttaacaattccccnncaaatcccccctatccaatttttaatttcccacaattacccccccccctttcttttttccctcttaaaaacctttnttcttaaataaatccnttaat

SEQ ID NO: 13974 - DNA, 477 bp, Oryza sativa
  Clone ID: uC-osflcyp006b09b2
ggtgtttttttattttgatggtaaaggacaggtgatcattgataaggcacagaatgcctgattgcctgtaggcttttgttcaatgttgacatgattccacacatgaaagatcagtagtacaaagtatgcacactgctatataagctactatgacaaaactgtgtccagaactccagacgccaagcgtgaccctgaaacactgggatgcaacaatcctattcttttttgtcacaaacccacgattttttttcttgtattcagacaattgtgatgcatacaacaaccaagagtacacaactaaggcttgccactagctcttgcgcaggtatttgctcacttgggctgcaagcgctacagatttggcattgatgtcgttcatcaggtactccctttcggcgcgacggcgttgctgtcgttctctcttggctctctttggggccaaccttgcttctctctccacataggctagcctgaact

SEQ ID NO: 13975 - DNA, 468 bp, Oryza sativa
  Clone ID: uC-osflcyp006c04b1
taatttctgttcaagagaggataccattttttgtggtgtttttgatggccatggaccaaacggccatttggttgctaagagggtgagagatcttctgcccattaagcttggtgcggatttggggacggatgaaggacgacagacatccactagcagcatcaaaagcaatggagatgaaacaggatcccctggaaacatgggcagagatgctgagcagaacggagagtacccagagatcttcacagcattgagaacttcatttttgagggcgttcaatgtcatggatagagatctcaagttacataaaagtatagattgttttttcagtggaacaacagcagtggcagtgctcaagcagggacggaatcttataattggtaaccttggggacttcgcggccattttaggcacacgagataaagatattcagctatggctgtccaattgacagttgatcttaaacctaac

SEQ ID NO: 13976 - DNA, 310 bp, Oryza sativa
  Clone ID: uC-osflcyp006c05b2
acactatagaagagcttgaggtgagcacctcgaagctgatccttaggcgctttttgtttgttggaattaaaagacaataaaaatatatgtgtaaggaatgacaaatgtaaaaaagtattaggtacaaagtattggaaaaatttaatgcacgataaactggaggatgccaaaatgtaatccggaacaaacaggtactgggtatgcttggtgcccgacatgtggcaatcggagagtacacttgaatctaacgaacgatataccattgtgatgagaacaatgaaaactcaggtaatgaagatgaggtgcatgt

SEQ ID NO: 13977 - DNA, 459 bp, Oryza sativa
  Clone ID: uC-osflcyp006c12b1
tctttgacgcgtgggattccagccagtgacaagatatatgaatacatactatttagaggaagtgatataaaggatttacaagtcaaatcctctccaccagctcagcctactactttacacaacgatccagcgattatccagtcacattatccttgtcctgcctctacgagcttaccgcctcctgcaagcacagcagctgatcctgcctcacacaatggtcagtcaggaattcagatgcctccaccattgccccaatttcaacctggggccagtttaccatcatggaactcatcacctatgccatcatctgcaaatggcgctcctgctagcacaacaacagctgatcctggctcacacaatggtcagtcaggaattcagatgccaccaccgttgccccaatatcaacctggggccagtttaccgtcatggaactcaacacctatgccatcatctgcaaat

SEQ ID NO: 13978 - DNA, 368 bp, Oryza sativa
  Clone ID: uC-osflcyp006d01b2
ttgggttttttaaacaattggtgtattattttttaatccttacagcattccaacaatagtaaaaaaggaccaatgcatcctatcacataattgccaatcctctactttcatctacatagttccccaaaaaaatgcttctctgagctgcaccacattttaaactcaatacggtattctgtgcaggtttgccaaaacaaaaaatgctaatgatctcgccccatcaaccactcaaaggattctgtcgaggtcgctgataaaattggaggctatagatgtcagcttctttccagtttctccagccatattcttgagggaagacagatcttgagatgcctggaatgatatttctgtgatgagatccgcagcac

SEQ ID NO: 13979 - DNA, 500 bp, Oryza sativa
  Clone ID: uC-osflcyp006d09b2
tttgttttactgctgcacgttgaggtagttgagttgcttgtttccattgaaatagtaaatacaagtgaactcaagttgtacaaatagtggatgctatcaaatgtgatgttttctccacggagctacttggactaatggattaaacattcacaaaatgtgtcattttcggtccacagcgcatcaaaattttccaaggaacgacaggctcacaaagaagttcctctttgctgataggagtacggcatacgccgacaaagaaattttgttgctgcttcttttgttgatgcagttgccagatggagctgcatgttgctactcgtagaaccgttaatgctggttctttgctttggaaagtgctgtgctctcaccaagaaccgttatttctccaggtcatccaatgaaggttcaacttcatatgcttcatgctaagctgcttatatatgctatttttcttcagcagcaagccagcaaccagattgttctcacaacatgtaatccct

SEQ ID NO: 13980 - DNA, 492 bp, Oryza sativa
  Clone ID: uC-osflcyp006e04b1
ttgtttgttcattttctgtgtgttgatgcgctgtatgatggtctgatgcaggatggtcgttagataatgaaagatatgattagttgttctctcccagataacactcttaatgtgatgagtaaatttcattgtatccttgtatgtatctgctagttgaatttggaacgccgattttacctttcctagcacatgtagcagcgaataaatttctgaattgtataatattggaagatttatcaacctgaacctctgtagctcattcaagaagcttattcttgccccccgtcaatgcattaacaaagtgcatagactttgtagttgtggtttactgttacaaacttgagctaacatttggagcagaagagttggagcacatggtgttacatgatcagttttgtactcataaaccatctctagggagctttcatatttccgtttatacttgatttgggttcttggcttatgatatcaaattgcatctttttatgttta

SEQ ID NO: 13981 - DNA, 525 bp, Oryza sativa
  Clone ID: uC-osflcyp006e05b2
ttttgttattcaaatgccgcacggtcaaattgatttaacattcttgagatgtaatacagtaatcggttttttcccaccttaacacagtaattagagcttaatgatacagtctacaaccatcaattcatagctcaagagagattatgcgacgaggtcttctggctgcaggcctcccggtattcatctatttctttgggttcccaaagaatttagagagccgcacaggtccttcctcctcactatcactgcccctgtgcttggatcttgacctgtacttcttatccttttttgtcctcttcgatctggaccgtgacctggactttctcgaatccctatcctcatcatcactgcttgatgattccgacgatgaactggaacttgactctgatgaacttctatgctggaatttgtagcggttttatttcatcagttcatctattgtagttgacttcgaaatatcctaaagttaagggtatacctttctcctctttttactccgttctttgcatctttatccttcttctc

SEQ ID NO: 13982 - DNA, 456 bp, Oryza sativa
  Clone ID: uC-osflcyp006e12b1
tcgtattgatcgattgattgattggctaggcctctccaacaattttggttcccggaccgaggttaattcttgagcgctaggtgggggcgaggcgtcggatccagccatgatggtggttgatacggtcagcgccagcacctccctcgttgcccaccacctgttcgaccaaaggtccaaggcaaaccaccacctccgccggactctccatgtcgtctcctgccgccccctgcccactcacttcgccggtcgccgccttgtggccagggcgcccaggcagcatcaacctcgcctcgcggactggaccgtcaaggcgctcgcatgggggtcaccaaggaggccagccctcacagggagtaccggggatcccggtggaaggcgctgacatgggcgattttgggatcaccaatccaaaacgacgtggtctcccggaacagggcgatgatcccagctgcacaa

SEQ ID NO: 13983 - DNA, 60 bp, Oryza sativa
  Clone ID: uC-osflcyp006f08b1
atgccgacgcacatagcatcttttaatagtgtcacactaaaattaaaattaaactgggcg

SEQ ID NO: 13984 - DNA, 445 bp, Oryza sativa
  Clone ID: uC-osflcyp006g04b1
gtatgttcccaacgccccaccttattcatggagacggaagaattgacatgaacatggcatcccctcacttgatgcagagggacagaagagttgacatgaacatggcctccccacacatgatacagggggacagaagagttgatatgaacttggcatcaccacactttatacaaagcgacagaagggttgatatgaacctggcatcttcgcatctgatacaaggggacagaagagttgatatgaatatgacatcccctcacttgatacaaggtgacaccagagcggatatgaatatggtatctactgctcagaatggaatgcactcttttgatttggtgaatgtgaacctagaaagtggtcctttgccaatggctgcaactgatttcatggcaatgcattagcacccacccggttacccatcaaaacaacttcttaatatgagaga

SEQ ID NO: 13985 - DNA, 429 bp, Oryza sativa
  Clone ID: uC-osflcyp006g05b2
tttggttttttaaattttttgggtttttattttttttttttttttttttttttttttttttttttttttttttttttttttttttttttttttttttttttttttttttttttttttttttttttttttttttttttacccccaaaaaaaaaaaaaaagtttttattttcctttttttataaaaaaaaaaaaaaaaaaaattttcccccccccccccaaaaaaaaaaaaaaaaaaaatcccccccccccataaaaaaaaaaattcgcaacccccccccccactttttttttgcgccccccctgggccaccccccccttttaaaaaaaaaaaaaaaagggtcttttttccaaaaaaaaaaaaaaaaaaaaaggggtttttaaaaaaaaaaaattccccccattttcccccccccccaaaaaaaggggggt

SEQ ID NO: 13986 - DNA, 235 bp, Oryza sativa
  Clone ID: uC-osflcyp006h09b2
tttgtgtttttaaacaatcaagggaaaaagcccactataataaaatagacaattatatatatggggtcccttggacgaaaaaaaataacatacaataacagatattctagacacaatttctctcagaaggggaacagccttactaagttagaataaatatcaccattatttactttgtatctctaatattactccaagcaaaacaactacaggccccggtactccaaaaagccct

SEQ ID NO: 13987 - DNA, 467 bp, Oryza sativa
  Clone ID: uC-osflcyp006h10b1
tcgttgactacggcggtggctcctccgacctctcgatgctcgtcggctcgagcggcggcgggaggaggacggtgggcgacggcggtggcgaggcgccgaagctggagaacttcctcgacggcatcttattctccgacgtgcacggccaagccgccggcggatacctctactccggaagcactgtcaacggcgccggtggttacagtaacggcggatgcggcggcggaaccatagaactgtccatgattaagacgtggctccggagcaaccagccgtagtctgagtcatcgccgccgcagcacgctgatcaggacatgagcaccgatgcgagcgcgagcagctacgcgtgctccgacgtgctggtggggaagctgctacggcggcggccccgggggcaccgccagcttgcatgggcagagcctggccctatccatgagcccctggtccgtggcatccactgcaagggg

SEQ ID NO: 13988 - DNA, 349 bp, Oryza sativa
  Clone ID: uC-osflcyp007a05b2
ttttgtctattgatgcctcaagttattttgatatttgtggagcgatttatttcatatccatcatgtttgatttcctccatcgagctaagcatatatataccgatggagaggatacagcaattatcaggtgatgttatgacatgtacagtacaggtgcagcttaatttaccatcagagagtggaggtgaatgggttcactcacttgacaagccctatgctgaggatgcctaaagaggtgtgcggccaatccttgtccttggccttgatcagcatcggcctgccccatgacacccaagcctcccatgggatcctcttgtcccagctgctcccccactccagcaacagattc

SEQ ID NO: 13989 - DNA, 388 bp, Oryza sativa
  Clone ID: uC-osflcyp007a06b1
atcggttatggcctcacggatccagcaatccagtacaaagcttacaccgaagatgccgggccatggcgccgtcgtacgtcttcgctggcctcgcgcaggcgccggaggaccccatcctcggggtgacggtcgcgtacaacaaggattccagttctgtgaaggccaatctcgcccttggttcatggagcgccatggcagggagtcggcgcaatccgacccggcggaggcggcggcgaagccttcgggccccgccaagcccgtgccgccgtacgggaagcgtggcgggttcgtgccgcggcggtcggaggactttggggacggcggcgccttcccggagatccacgtcgcgcagtacccgcttcggatgggccggcgcgacgagaagggc

SEQ ID NO: 13990 - DNA, 154 bp, Oryza sativa
  unsure (1)..(154): unsure at all n locations
  Clone ID: uC-osflcyp007b01b2
aaaaaccggcggaacagcaacccaacgcccgaaaaaacgcaggcaaaaacaaacaaagccangaacccaaaacaacaaaagccaccacaaaagggaaaccccggggcacccaaaacaaccaaaaaggcacaacagccgggaagcccgcagggcg

SEQ ID NO: 13991 - DNA, 406 bp, Oryza sativa
  Clone ID: uC-osflcyp007b09b2
tcacatgcactcatacataatcttgcatccataataccccccccccttctttttttgtccttttaacccctttgtttaaaccccccccatcatttcttatatacaaaatacctaaataccttccaacacaaatccactatatccataattccacaccttaaatttcacaaaaacaaattctccacacaaccaaataacctactataacaaaactaaaaccaaaactccaaactccaaactataccctaaaacactcacaaacaacaatccaattcttttttttcacaaacccaccattcttaatctacccttcactacaatcacaatacctacaacaaccaacattccacaaccaaacaaacccactacctctaacacatctatatttccactcaaactccaaacc

SEQ ID NO: 13992 - DNA, 305 bp, Oryza sativa
  Clone ID: uC-osflcyp007c05b2
ttgtgtttttttaaaaaaggggggttgtactaatcctgaacatggcagtaaaacacttgtcaaaggaactaacaaaatggccttcaacagaccacaaatctacattaaatcaatgcttgagcagcgcaaagacacaccgaatgggagcaaagccaacgctggggtcgcccgttacaactgaatctttggcgtgttacaagggtcctacccggccacacaaggaaaggccaggttctctagcgaccctgggccagatgccacatgaaacaacaaaggggccactagggtgaggatcctattcttct

SEQ ID NO: 13993 - DNA, 329 bp, Oryza sativa
  Clone ID: uC-osflcyp007c06b1
tcgctgacgcgtggggaaagagagagagacccataccaatgccaagaacaagaaatcagagagcccaagcaaaaaatccaatccgaatcccctccaaaaacccaccaaacaatctcctccatctccaagaacaagaacaagagagcatcctagaacattaggggataaaggaggaggagaagaagaccaagaaaagtttcgagaggagagggaggagagttcaagaacttggagagaaggggatggatccggtgttgctggacgacattatacggaggcttatcgaggtgaagaatttgagccggggaagaacgcgcagcttttggagt

SEQ ID NO: 13994 - DNA, 471 bp, Oryza sativa
  Clone ID: uC-osflcyp007c07b2
ttgtttttttaaactatcttgtttaaacttaaaacttttcttttttatcatataccactaattttttattctctaatattctttaatactctttcattccatcattcaaaaatggcaaagagcacaaagtcagataaagctatagagaactaggactccaggagatgggggccaaatgacaaccatggcgcttaaaccacctcctccatcttgctctcaccacatactcctccaacgacaacatgtcggcgacagcctcagcagactcgtcctcgtcgatgctcaggccgagcttgagcatccgctggatcctggtgccgaaagtgttgggctcctcaaggctgaagccggaggtcaggagggcaccctccaagagcatcatcaccatttccttcacagacttgtctttcttgtcagcatcagcacgcttgcggagctcatccatgatggaattctccgggttgatctcca

SEQ ID NO: 13995 - DNA, 404 bp, Oryza sativa
  Clone ID: uC-osflcyp007d03b2
tttggtttttttatttttgtggggtttctttttcttttttttgggtggaaaatcccaataaattgggcctactagctatgcataagacccagttggacccatcgggagctcctctggaaagagggttattaacaatccaacaacgtcaacctatggagacagccagccagaatccccttataatggttccaaatcaacctagcctaaaaaggaaccgtcagaagaataccaagcccaagattaaactaatagcacatcagatctatgcgcatgagtcagaaatggcccccagccacgttctgaaagaaaacatacctatatacgctgttcatttctaccagtagcctttgcacgttcagatgtgcatggccagaaatgaagtaaaggcgatccaaataatactc

SEQ ID NO: 13996 - DNA, 221 bp, Oryza sativa
  Clone ID: uC-osflcyp007d11b2
cccctttattttttttttttattatttttttattaatatattaatttaaataaaaaaaaaaaaaaaaaaaaaaccaaccaaaaaaaaaaaaaaaataaaaaaaaaaaaaaaaacaaaaaaacaaaaaaaaaaaaaacaaaaaaaaacaaaccaacaaaacaacaaataaaacaaaataccacacctcttctccccccaccccccccacccttccactcccc

SEQ ID NO: 13997 - DNA, 316 bp, Oryza sativa
  Clone ID: uC-osflcyp007e06b1
tcgttccccccctcctctcttcttcctcccctcccacggcgactcgccgccgccgccgacgccgacgccgatccggtctccgctccaactccggcgagattggatttgggggcggagccgatccgatcggggtccatcgcacggaggaggaggaggagggggtgactcgtcgatgcgcggccagatctgcggcggttgctcggtgggaggtgccttggcgggcaacatggacgacgcggtcaagtgcttttgcattgggaaggccgaagtggacaccttacaaagtgtccgcactcgcaagttatctcttctaggc

SEQ ID NO: 13998 - DNA, 282 bp, Oryza sativa
  Clone ID: uC-osflcyp007e07b2
ttgtttttttaaaaaaatgtggtatcacacccacatatttaatctttcaaaatcccaatatactctaatattcattaatcctttaccccaaaaaaaaccctcacaatctttcacactaactaactattaaaccaaaccaagtaagctcaaacttacacatctaacgaccaacatgcatatatatttctagctagaacattgaccacaaatcatacacatagaaacctttaaattacagccttaaatcaatgcacccctcctttcttcataaaatgtcacatc

SEQ ID NO: 13999 - DNA, 435 bp, Oryza sativa
  Clone ID: uC-osflcyp007f03b2
tttgtttttttatttttttttgtttttattttttttattttttattattgaaaacaaaaaaataacaaacaaaacaaaaggaacaaaagaaaccaggaaaaccaaaaaaaaggaaaaaaaaaaaaagaacaaaaaccaaaaaaacaaaaaaaaaggaacagggaacaagggccacaagggaaaggaggcacaacgaaacaggttccgaagggggcaaagaaaaccgaacgaagaaagccacaacacaacaagccacacaaaagaagcaggaagagaaaggcagaagaaccaggacaaaaaggccagccgggcaaggcggccaaggaaataaaggaaacaaggaacaggaaaaaacggacccgcaacacctgaacctaaacaagttaagaggaggaaaggagccaggggaccgcggaaaccaggccacgcaggcaa

SEQ ID NO: 14000 - DNA, 222 bp, Oryza sativa
  Clone ID: uC-osflcyp007f10b1
ttttctcttgggccacgactcccgcggtaaggcgcgggcacggttgcaacttccagggctcgcccatcggcgtgttcatggacaacacccgcctcgccatcgctgtcatcggcaagctcatgctcgcccactttctctcatctcattaactacttttacaacaactgcctgccattcaacctgtggggcggtcgcaacccgagctaggactacgggttcaag

SEQ ID NO: 14001 - DNA, 465 bp, Oryza sativa
  unsure (1)..(465): unsure at all n locations
  Clone ID: uC-osflcyp007f11b2
ttggtccttgaccctcttgtttttaacttttttttttttttttttttttttttttttttttttttttttttttaaccactataacggggggacaaaaaggatttaaaaaaaagggcccttcaactgctgaaaaaaccggcccaaagctaaaaatccagggttaaaaaattcccttcccagctaatccaaagtgggatcttagcaaaccattccgnccttatttctcacccctatcagaggcccccctcaaaaaaaaccttggaaagtcaagttcccnnaatccctatccccaaagccctgnntaaaacccatcactccccaaaaactaccccactttgcccgcccccaacccccctatgttttcttagcccattggccaaaattctcaaaaaccaaaaactgacccggggcaaaccacagccccaaattggggaaaaaatcggaaaccaccccccccaagttcct

SEQ ID NO: 14002 - DNA, 138 bp, Oryza sativa
  Clone ID: uC-osflcyp007g06b1
tcgatgatcaagagatcgatcatatcgtattttggggtaatttagcagctagctagcgttagctgcaagctattagcgactgcatgctttgatccatccatctagctaattgtcgaatccatctaagcttaacggctc

SEQ ID NO: 14003 - DNA, 380 bp, Oryza sativa
  Clone ID: uC-osflcyp007g07b2
cccccccccttcccttttgtccttttacccccttttgttttaaccccacaccaacaaaaaagcacttcttttcataaaatcagtatttacctctaccatacaacctaactaccatgctacatttccttatgctacaaaaacctccaaaggagttcatattaacctttttccacacaaaacatacttcccttgaatgcacttaaagatctccataaaaagcttaacttataactgatctaatcaaaagcatcagctcactttgcatccttccttctaacatttccaaatcagaaacattggaatgatctccatcatgccaatccaacattacctttatcttctaaacatgctttgattactaaaattcaactaaactcctt

SEQ ID NO: 14004 - DNA, 360 bp, Oryza sativa
  Clone ID: uC-osflcyp007h02b1
ctcatctccatctctctcagctctcacagctcactgcatcaatggccgcggccaccatggcgctctcctccccggtgatggcccgcgcggcgccgtcgacctcctccgcgctcttcggcgaggcgcggatcaccatgcgcaagaccgccgcgaagcccaagccggcggcgtcgtcggggagcccgtggtacggcgccgaccgcgtcctctaccttggcccgctctccggcgagccgccgagctacctcaccggcgagttcccgggcgactacgggtgggacaccgcggggctcttcgccgacccggagacgttcgccaagaaccgggagctggaggtgatccactcccggtgggcgatgc

SEQ ID NO: 14005 - DNA, 388 bp, Oryza sativa
  Clone ID: uC-osflcyp008f04b1
ttacagtttttactggattagcccaggaagctgtagaagtttgctccacatctcttcagaatgcaagcaaggtcattgcaaaaaaagcaactgcaatggatggacagcttttcctaattaagcaccttcttattttaagagaacagattgctccatttgatattgagttttctgtcacgcataaggagctggatttctcccatttgctggatcacttaagaaggatcctcagggggcaggtctcgttatttgattggtcaaggtcaacatcacttgctaggacgtttcctccccgtgttctggagaaccaaattgatgccagaaaagaattggaaaaaagcctcaacaccacctgtgaagagttctattattgtccattacacaatta

SEQ ID NO: 14006 - DNA, 215 bp, Oryza sativa
  Clone ID: uC-osflcyp008f12b1
tcgtccaagcggagacacacgcgccagacgtagtgtgaggggataacatgcgacggactgagcgagagacggtcccccgctcggatccagcagcgctcgcacggatccaccagtggcggtggtaagagagcctagtggcggatttgacgacggtttgtggcggtggaggatcctcctgacgggctcatctgtcaccttcttctagatctccattg

SEQ ID NO: 14007 - DNA, 97 bp, Oryza sativa
  Clone ID: uC-osflcyp009a07b2
catacacacttacataaacttttatcctctatgcgcccccccttttttttttttgtgttttttaaaaattatgcgttaaaaaccatacccttattta

SEQ ID NO: 14008 - DNA, 426 bp, Oryza sativa
  Clone ID: uC-osflcyp009b03b2
agcgtggaattaaagccgctgctccaatttaccatacgcagcatttgattacaggaataccaaaaaactactaccgatgacaggtattaattattaaaaagcacaggttcagattattgcgacaaaagtttttgatacccgtaagattggacgcttgatagccaaaccacactcagaaccctaaatatgcatacggaggatgtccaatcggatcttcagccaccaccagaggcagatcagtacttgtagtccttgacgtgaaggctctcagaggcaccctcgccgagcacagcatcaccctggtatgtaccaagggtagcctcagagttggccttgcacctggtgatgaaggccttctgcgccttcaccacgttctccgtcttgccgccccaggccttgagcgtgctctgctggagagcacggccg

SEQ ID NO: 14009 - DNA, 137 bp, Oryza sativa
  Clone ID: uC-osflcyp009b09b1
cactcactatatggaaagctgctactcctgcagctaccgctccttaattcccttatctacccactcttctcttttccgttagcgatcgacaggatgacatggctgatgaagcggcgtcattttttcctaccttatcc

SEQ ID NO: 14010 - DNA, 377 bp, Oryza sativa
  Clone ID: uC-osflcyp009b11b2
tttggggcattccaattcttgggagtgaaggttttatctttttttattgtattgtttttattttgtttcaaagcggggcttcaaatgaaccaataattcaaagaaagccgcaagggaaggggcaaaacccccggtgaaaatcaaggggcttcaaaggtaaattcttctaccatctgataaaaaatgaaagcgcattcttccttaaacaagaaagggggctaataaaacaccaaccaaaagttttgaacctacttggaaggttgctaaaaccatccaaaggtccattttcacaggattttttgcaaaaagcatttaagcttctccctcttgggggtttcgtggggagatttccttgcacaaaaattgaccagaccttt

SEQ ID NO: 14011 - DNA, 137 bp, Oryza sativa
  Clone ID: uC-osflcyp009c07b2
tgggtgttttttaaaaaacatgttgttttctccttgttttctattaaataccattctctcttataccaacaagcatttcaaacaccataaccaaaactcaccttccttttcacaaaattcactcgactaataacacc

SEQ ID NO: 14012 - DNA, 476 bp, Oryza sativa
  Clone ID: uC-osflcyp009d01b1
ctccaatccaagctccaacaatggctaaaccatccttgctcctccttcttcctctgctcatcttctccatcggcgcggctctcgcccgcgccgatctcatgctggacaggttcgagcagtggatgatcaggcatggccgcgcctacaccgacgccggtgagaagcagaggaggttcgaggtgtacaggaggaacgtcgagctcgttgagacgttcaactccatgagcaatggctacaagctggctgacaacaagttcgccgacctgacgaacgaggagttcagagccaagatgctggggttcagacctcatgtcacgattcctcagatttcaaatacctgctccctgacatagcaatgcctggagagagcagtgatgatattctgccgaagagcgtagattggaggaagaaaggggcagtggtggaagtgaagaaccaaggagattgtggttcttgctgggcgttctccgcggtgg

SEQ ID NO: 14013 - DNA, 406 bp, Oryza sativa
  Clone ID: uC-osflcyp009d03b2
ttttgtggtttttttttttttttggttttttattaaataatttttttttttggaaacaaaagggaactttttagggaggtatacaaaaaaaatgggagcaaggataaaggtacctgaactccaaaaaaacaagggggcacaaaaaaccctagccagggctaacggatccagcccaggcaagaggtttccatgcatttgtccgaaacaagtaatcaaccaagtggatgctggacggaacatgactagcgactagaacaaccgttaaaaaaactcccacccaaaccgatgatgcacttgctaataagcaggttggagatactgaaagttagcttgaaaaaaggagtcgtcattttaaaggtcttcagggaacaaataaatgcttggagcaacaggctgggtatggggg

SEQ ID NO: 14014 - DNA, 456 bp, Oryza sativa
  Clone ID: uC-osflcyp009d11b2
ttttgtttttttttttttttttttcggaagcatcacaagctttactgaaagtatgaaactacaccaacgatgttcagtgtaagaaactgtacaaaagaactttgtctttggatatccttgacaccttacatccacacacgtccagcttacacgttaactgttggctagatacaatttagaaaacataaatacgtgtgctacatgataaacgcagcttatctagatctgaagcaaaatatgatccctactgacaaactctacaatgtacgaggtccatggcctaacctagcacacgaagttagcctgtatatatatgcaacaccaccatacactgctgactgtaggtcagggcaatcatactttcactcttcaaacaaaatctgacactgaccaccaggataaccgtggcacagcaatctcctgaagtttggacagccctagctcccttggacacca

SEQ ID NO: 14015 - DNA, 488 bp, Oryza sativa
  Clone ID: uC-osflcyp009f01b1
tcaattcttgagctcaatcagcaacaacatctatctccttcttgcttagttaagtccttcgccctcccaagaagaagaagatgtcttgctgcggcggcaactgcggctgcggcagcggctgccagtgcggcggcggctgcggcggatgcaagatgttccctgatgtggaggccacagccaccaccaagaccttcgtcctcgctgctccatccaacaaggcgagctctggaggaatggagatggcggtggagagcggcgagaacggcggctgcggctgcaacacctgcaagtgtggcaccagctgcagcggctgctcctgctgctcctgcaactgaatctatcgtggtcgtcgcccggctgcatgaggatttatcggatggatgctgctactgacgatcagagcttggaccgaagccttaatttgcttgcattagtacccagcttatatggaggcaggccttgccttttgctctgacgcctaaataaaa

SEQ ID NO: 14016 - DNA, 371 bp, Oryza sativa
  Clone ID: uC-osflcyp009f03b2
agactgaagttcagggagttgtccacctttatcttcatatgttttagttagctaagctacattgtcagataagattacttgagcatcacgtacggttgtgacatgaacatcatgattcaggtacaaaaaaaactgtctcaacgatgcatcaaagtatcaaacatgtaaaagaccgaaggaatctgccgtcgcaaggaatcatgcaaaagactgaagttcagtgagttgtccaccttatcttcacacctgccctctcctcatcctattcaccacctgccctcccccccccttctctagatcctcatcctcccgaggtttctttggcacaactggttttgctttgatgttgcgaaaactcagaagtgtcttag

SEQ ID NO: 14017 - DNA, 527 bp, Oryza sativa
  unsure (1)..(527): unsure at all n locations
  Clone ID: uC-osflcyp009g05b1
tgaataaaaaaggaaaaaaaaacaaaacacaccaagccaaataaaagcgacaatgggatcgctcaccaccaacatcgtcctcgccgtcgccgtggtggcagcgctggtcggcggcgggtcgtgcggcccgcccaaggtgccacccggcccgaacatcacgaccaactacaacgccccgtggctccccgccagggccacctggtacggccagccctacggctccggctccaccgacaatggtggcgcgtgcgggatcaagaacgtcaacctgcctgcctacaacggcatgatctcctgcggcaacgtcccaatcttcaaggacggcaggggatgcggctcatgctacgaggtgaagtgtgagcagccggcggcgtgctcgaagcagccggtgaccgtgttcatcacggacatgaactacgagcccatctcggcgtaccacttcgacttctccggcaaggcgncggcgccatggcttgcccggngaaggagaccgagctccgcaggccggcatcatcgacatgcagttc

SEQ ID NO: 14018 - DNA, 458 bp, Oryza sativa
  Clone ID: uC-osflcyp009h01b1
ctcggcgccgccaccccgcaccaggtaagggaggaggagtaagaagatgtcgcacaggaagttcgagcacccgaggcacggatccctcggcttcctcccgaggaagcgctcctcccgccaccgcggcaaggtgaagtcattccccaaggatgacgtcaacaaaccatgccacctcacctcctttgtcggttacaaggctggaatgacccacattgtgcgtgaggtcgagaagcctggttccaaactccacaagaaggagacctgtgaggctgttaccattattgagacacctcctattgtcgttgttggacttgtggcctatgtgaagactccacgtggcttacgcagtctcaactctgtctgggctcagcatcttagtgaagaagtaaggagaaggttctacaagaactggtgcaaagagcagaagaaggctttcaccaagtatgctctcaagtatg

SEQ ID NO: 14019 - DNA, 385 bp, Oryza sativa
  Clone ID: uC-osflcyp009h03b2
ttttgtgtaaaacctctctagaggagggaaaccggaccatatatttggtagcactttacaactagggctgttcagatcagccatgtttttttgttttttgttcttccaatcattcatcgaaaatttcctttaaccagagcgccgtttgcaattcccgctccagcgctgatgacgatctctcgttgaatgccgagggggttcctcacactgtgtagttctgctggatcgtgtcgatgtccagccccttcagcttcaccaccgattcgacgtggcccttgagagtgttcagctctctcagcctcgcgatctcagctcgtctcttggcttgctcagcgatctcagagagctcgcggtagctgcttttgtcgttgaagagcgtgttgga

SEQ ID NO: 14020 - DNA, 471 bp, Oryza sativa
  Clone ID: uC-osflcyp009h09b1
tctgtagaacacacagggtcttatctttgttgttgatagcaatgatcgggaccgtgttgtggaagctagagatgagctccacaggatgctgaatgaggatgagttgcgtgatgctgttttgcttgtgtttgccaacaagcaagatcttccaaatgctatgaatgctgctgagatcactgataagcttggactgcactcccttcgccagcgacactggtacatccagagcacttgtgccacaactggtgagggtctgtacgagggcctggattggctgtccagcaacattgctagcaaggcttgaggcttggaactccgaccgtaaaacttcgagctgactaggagctatgcatgtatctcattcatacgtaggacgaacactgtttcaatcttgttaggtgtctttcgcaaggccaatatttttgtaatgatacctcactccatcgttatcttcttcgtattatttggacc

SEQ ID NO: 14021 - DNA, 387 bp, Oryza sativa
  Clone ID: uC-osflcyp010g02b1
gtcgttcgcgccgcaggcgcctgctgccaaggctcaggtggttggatggccaccaattcgcagctaccgcaagaacacgatggctactaaccagctgaagagcagcaaggaggatgctgaagcgaagcagggccaggggttcctgtacgtcaaggtcagcatggatggtgccccctacctcaggaaggtggacctcaagacctacaagaactacaaggacctgtcaactgcgcttgagaagatgttcattggcttcacaactggtgagatgtctcgggttaccctgcttgcatttctctttgtaattgcatttccttttgatgtggatgctcttacaattacatcgtctaggatgcctgtgactaggaaccaatatatgcttgatct

SEQ ID NO: 14022 - DNA, 501 bp, Oryza sativa
  Clone ID: uC-osflcyp010h06b1
ttgattttgggtttgctcatttgagtgctggtgaccttctacggagtgaaatttcaactggcagtgagaaaggggagttgatcttaaatataataaaagaagggaagattgttccatcagagattactgttgaactgattagaaaagctatggaatcgagcgatgctaaaagggttcttattgatggtttcccaaggtgtgaggaaaacaggatcgccttcgaaagaataactggaacagaaccagaccttgtgattttctttgactgccctgaggatgagatggttaaacgtttactaggccgtaaccagggacgagtggatgataacattgaaacaatcaagaagcgcctaaaggtgtttgagagtctaaatattcctgttgttgactactacacttcaagaggaaaggttcacaagataaatgcaaccggaactgaagaagaaatctttggagcagtccacaagctgttttcctccttaaggttttgagacttttgtc

SEQ ID NO: 14023 - DNA, 373 bp, Oryza sativa
  Clone ID: uC-osflcyp011a01b2
gggggatgaaagcagaggtagattatattaagaagcctggcacgcatgaggagatggagcaggagtacatgatgagatcaccatgatgatagatgatccatccaagctagctagggatccatccaacattgatcgacacacgcacacactgacaacgacgacgacggttttatttaggcgtcagagcaaaaggcaaggcctgcctacatataagctgggtactaatgcaagcaaattaaggcctcgatcaaagctttgatcgacagtagcagcatccatacgataaatccttatgcagccgggcgacgacgacgatagattcagttgcaggagcagcaggagcagccgctgcagctggtgccacacttgcagg

SEQ ID NO: 14024 - DNA, 513 bp, Oryza sativa
  Clone ID: uC-osflcyp011a09b1
tcgctccctactacaaaaaaccaaaccatcaccacaaaaagcatcaaggcgagctcgaatcccggcggcggcggcggcggcggaggagagccatggcgtgctgcggcggcggaaggggggagggggcggcggcgacggagtcggaggcgtacctggagggagaggcggtgagggaggcgcgggagctggtggcggagctgtgccgccacttctacggccaagggtgggtcaccggaacggggggcagcatcaccgtcaaggccaacgacccggcgctccccctcgccgatcagctcatcgtcatgtccccctccggtgtgcataaggagaggatggtggcagaggacatgtatgtgcttgtcagcagatgggaaggtgctctcctcacctgtatcaaagccatggccaaacaagcctccaaaatgtactgactgtgctcctctgttcatgaaggcttatctgacgagaggagctggggcctgtattcatagccatgggatggaaacttgcatt

SEQ ID NO: 14025 - DNA, 434 bp, Oryza sativa
  Clone ID: uC-osflcyp011a09b2
ggggttgacagtaaacaaaataagtaacaactttcgcaacaacaattttattattcctctttgctaaaaagagctacaaaaccgtcgacggatggcacaataatgcaacaatatgcccacatttacaaatttatttattttgccaccattccggattttccatttattatttgcattgttcttacatatgctaggtagctcgccatcaaagcactcctgacattgtctttgcgtaccttcttcagatctcactaaacgacttgatagtccggaaaccatgattcttagggagcggtgcatttcccgggcgaatggagattatttcctcaaaacctgcactttttgcagcaacagctttttggaagaccatcggtgataaataagaatctgagcaggactggccaccccaagtgattgcgaaatcttaaagtagc

SEQ ID NO: 14026 - DNA, 511 bp, Oryza sativa
  Clone ID: uC-osflcyp011b05b1
tccttttccttggatactgataacagtgggacaataactcttgaggagctaagatctggtttaccaaaacttggcaccaaaatttctgaatcagaaattaaacagctgatggaggcggctgatgttgatggaaatggaaccattgactatgctgagttcatatcagcgacaatgcacatgaacagattggagaaggaagaccacatacttaaagcatttgagtattttgataaggaccacagcggatacataacagtagatgagttggaagaagctctgaagaagtatgatatgggggacgataaaacgattaaggaaatcatcgctgaagtagatactgatcatgatggaagaattaactaccaggagtttgtcgccatgatgaggaacaacaaccctgagattgctcccaaccggcggcgcatgttctaactttctttacaattgttgaaagaatactgtttgtctttcctcattatattgcaagaaccccttaagaggcttgatcatc

SEQ ID NO: 14027 - DNA, 72 bp, Oryza sativa
  Clone ID: uC-osflcyp011b05b2
aaaaaacccttcccggaattataagtaaaaattgttttacaacccccggtctaatacaaaccgaacaagggg

SEQ ID NO: 14028 - DNA, 207 bp, Oryza sativa
  Clone ID: uC-osflcyp011c01b2
gccggcggcggaggtggggctgggcgccggcgcgtcggccgcggagacggcggagatggcggcgaccgccaggacggcgaggatggcgagggccttagatccggcggcggccatcacttcgattcggtggctggtcgtcggcggcggcggagagaaggttctagaaggcggaggaataatggggagagagagagaggatgttttgct

SEQ ID NO: 14029 - DNA, 398 bp, Oryza sativa
  Clone ID: uC-osflcyp011c09b1
tctttccccgctccccgcgtaccgtctgcgagccagccaaacaccggcaccgccgcgctactcgagcacgggaccgcggcacggggcgactccgcaagcaacaagccgaggagaaccccgagcgctgccgcccgcatcaccgtcggatggccgtcggccgccgccggtggggcgataggcggcaagatccagatccagcggggcgggatcatatacaccgcgcgccgatggggggcgccgtgccagggctgtgccctctggacataaagggccgtgtcctagtctggcgcgactaccgcggagacgactccagcctccaggctgagcgcttcttcaccaagctactggacaaggagggcgactcggaggcgcactcgccgggggtctacgacgatgcc

SEQ ID NO: 14030 - DNA, 334 bp, Oryza sativa
  Clone ID: uC-osflcyp011c09b2
aaacggggcttcaaaagcaccgcccaggtatttaatttataccaattaaactaaagatttttgtggtctacaaaagggggaatagttcgacccccacaaaaataaattaatacttgatacaagggaacaaaaaaaaagttttttttcaaagctatactttgatgggaaaccctacaaataaccatgggtaaaggataccctataccaggaggaacatccgggcacaaaaaaacccttgcatgggttgaatctttttaaagaactttccatggagaacgtcccaatgcccaactttatgtttgttttatggagcataaaaacatgtttttttggg

SEQ ID NO: 14031 - DNA, 476 bp, Oryza sativa
  Clone ID: uC-osflcyp011d05b1
tgtccactcgcctcctctctcgcgcggctttccatttccatctccccctcctgctcctacgtctccgccgctcctcacttcctccactcgatttcctttcttggcctctcctcctctgacacaggggtgtgcaggtttgtgtttgcgcgtggcgcgtccgccatggctcgcggcagcggggccggaggaggcggcggcggtggtggcggggggctggagctgtcggccggggtcggcggcggcggcggcgcgcgtggtgggggaggcggtgaggcggcggcggcggtggagacggcggcgccgatcagcctcgggaggctcatcctctccgggatggtcgccggcggcgtgcagtacgggtgggcgctccagctctccctcctcaccccctacgttcagacactcggactgtcgcatgctcttactttattcatgtggctctgcggccctattgctggcatggaggttcaaccatg

SEQ ID NO: 14032 - DNA, 450 bp, Oryza sativa
  Clone ID: uC-osflcyp011d05b2
gatgatgatggaagctcactttcacttagttcactgcacttttcctgaccattcattacacactaattaccaagcacactgcacacacacacaacacaaaacagttttacagttccatattattctgcatgatctgcttattctcttctaccgaggtggcaacaaagacgtgggccccagctgcagggccacctcaccccttcctaattaacagcccttaattaattaattaccctatgtaaaaaaaaagagggggctcctttgatccattgcaaacgagaactacaaagctcaccacttccggcggcgctgctccggccgccgccgtcgacgtagccggcggcgagagcggggcggtcagtgaccgccgtccatgctgaccgaccggaactggcgcttggagatcttgggccgcaggaatattccggcgacccccccgatgagcgcgaa

SEQ ID NO: 14033 - DNA, 378 bp, Oryza sativa
  Clone ID: uC-osflcyp011e01b2
ggaaagcgaacgggggaaaagttttttttttaaaaaaaacaacacctttcgggggcaaaaatttacgggttacaaaaaaccattcgggcccaaaatttacaacctacaaatccctaaacattttggaagaaggcatttgcatccgggggtatggggatgcctcccgggggggataagcattgccccccctttacaaatccagaatttttcctttccccccaaaagggggggcaacccctaagaccccattttcctaagggccctggagggggggttccggggccgaaaaccaggggggggagaaaagcttccgctggcagaaatgaaataggggggggaatgggtttttgaaacgggacccccccaatgggggagggg

SEQ ID NO: 14034 - DNA, 269 bp, Oryza sativa
  Clone ID: uC-osflcyp011e09b2
gtgggaaggtgcaaagttccaggggaataaccattttcctaagagaattcacgttttctgtgggcttgaagtcaacttacattttatatattttccattcacaccttacagattgataagagtaattcctactccaaaattcttcttttatgaagcagaccgaaagagatgaagggcatttatatttcatggggctatgttgctctaaataaaattgtacacccttaagctatttccattttccagtttgtgagtgttgtttccactta

SEQ ID NO: 14035 - DNA, 447 bp, Oryza sativa
  Clone ID: uC-osflcyp011g01b2
gaaactagaaacaaagaaaactttaataatagcctaccaactaacactgtaacatccgtgtttcggacctgctcatcagcagatgccatacagtacatgatgaagctcatttcaggtgaaaccaatctagggatgttacgcaaacaatgcaagctcaagcatgacacacaagtaaaaccaaccattctgtagcactgcctgaagctagctgcttacaattggcagtcacggtttcatcatgcccagaggagcatgagaaacttctgactaaaacaaactttgttcaagcatcagcacacagcacaacacatgcccatcaaaggttgatgcccaagtggaagaaatgtgcagatcgaggaaagaaactaaaatttacctaaataatcgcatagttattttgtaacatttcttgggccgaggtaagctcgatcacaactttggacgagt

SEQ ID NO: 14036 - DNA, 216 bp, Oryza sativa
  Clone ID: uC-osflcyp011g03b1
ttcctgccattaaaatctcatgctctgtaaactgcatatcatgaaatttcagcaaccccgtgttgaattgaagacggggcaccactgctcctctcgccctcccctgctacacttcccgtttccctgggaggcggaggaggaggggagagacacacatactctagctcccctgtataccatcactcagccgcatagctcgcttcgttcattgggctc

SEQ ID NO: 14037 - DNA, 359 bp, Oryza sativa
  Clone ID: uC-osflcyp011g09b2
acacgaacagcaacggaacattacattaacacggattagagacaggtgaattacaatgtaattgtatctagccatgcacagtgccaaagaggcagcaccgctagaataagacgcaaacgaatccgactaacaaaatacgagtcaccaaacacactgacaatattctgagtattttgacagatccaccaataagacgaatacagcaccatcatgtcacagagagaaacatattgttccacaaaatacaccctactcagattgttcttataagcaaaagattaaacccactactaacactacgacgcatggtttatttgtcaaaggagtcgccgaggggaatttaagccctttttaccacg

SEQ ID NO: 14038 - DNA, 450 bp, Oryza sativa
  Clone ID: uC-osflcyp011h05b2
gaaaccaaccgatgccatgcttgcaaaagggaatcaacatgccactttgtaggttgtagcaagtagcaaacccactttcctttccagtcgatgcatcaatacatcaaaaatgaaaagttgaaaatttgttaattgaaatctgaagggcaagaagcccatatgtttttgctatgacagatcaatctgcaacagatcggtgatcgaatcagatgtcgaacaagacctcatcgtgtataaggtaatcttgtggtgaaaagcttcgagcgaacaatgcttcaggctttggccaagataaagttactcccacggcctttgaagcttccgtgaagaaatgctacaaaaacagatctaaatgcgctgtttacttgaattttgtcaaggtaatgtgagctgggcttcttgaacttgatgtgcatgctcaagaattaatttgcattcattccactttca

SEQ ID NO: 14039 - DNA, 479 bp, Oryza sativa
  Clone ID: uC-osflcyp012a01b2
acagccacaaaaaaaaaatgcaagttacattttagcattacaatggctgcacgtccgcaacaatagtacactccttaaccaatacaaccaggtctaaactagtcattcaacaacccaaccggaacaatagttcacttatgaactaggcacttattttgttttttttttatagaaaccaacatataaatagttttttaactgccaactacagcctcagatcaatggaattgaagcctccaacatgccgacatagcaatgttacttcgggtcggaacggagtttgtgcggagtaatttctgggacaactctgtagatgtgcacttttatgttatccttctggacaagcttgaagacacacacatcaaacttttccagattgttgccaacagcaaatttgccccagccaccactgaaagaaccaacagaacgatcactgtagtagacatagttaacttcccaagccttcccttgtggatccc

SEQ ID NO: 14040 - DNA, 478 bp, Oryza sativa
  Clone ID: uC-osflcyp012a09b2
ttttttttttttttttttttttttttttttttttttttttttttttttttttttttttttttttttttttttttttttttttttttttttttttttttttttttttttttttttttttttttttttaaaaaaaaaaaaattaccccaaaaccaaaaaaggggggaaaaaaaaaaaaaaaaggggaatttttcttttgggggaaaaaaaaccacccctctttttttaaaaaaaaaaccttttttggggggtttttttttaaaaaaaaggggggaaaccccttgttttttaaaaaaaaaaaacctgggaaacccatggggaaaagggttttccaaaaaccggggtttaaccccggggttttttaataagggggggttttaaaaaaaaaaaaccccctccccacccctgggggtgatctggggaaatctaaaaaaaaagggtttcccctttaaaaaaaaaccgggttttttttttggttgg

SEQ ID NO: 14041 - DNA, 341 bp, Oryza sativa
  Clone ID: uC-osflcyp012b03b1
agcacaggaccggggcggcaccggcggaggttgcttcaatgaccatccctaatcgcgcagcgcatgcggagcccgagctaccggaaagcagtccgtaccggagctcagtcgcccttgatggtagccgatcacgcgtcgcgcgggcggcgtaccctgaaggacatcctgcagacgagatccgtcgagaggatgcagcagaacacaaacctcggcgtcgtggaagcgcttgacaaccctaactggaaccaaggaaccggagttgacctactgagggagagtagagaactcgaaaatgggaacatagcatgggaagagggaaaaccaaatgctgttatccacaa

SEQ ID NO: 14042 - DNA, 380 bp, Oryza sativa
  Clone ID: uC-osflcyp012b05b2
cggagaaagtccagggtcgataaaaattggttcacttgtccaaagtaccgataaaaatacattgctacatgacacggagagagccatgcccaccacttatttggacacacagagggcaaggctgcatagaaaatcaagcaacacaagctgaactcacggccccacctgtcagccttttactggtcgaggcccgaaacttttgtgaaaaacagcaacaccccgcttgctgaagaagacaaattttttcccacccaaatcggcgacccgggggccggggacctacggggaggtcgtctccccccccggcgacattgagatgagggccatcaccccaaaagggggtgctttttctcgccggtggactcctcggcgctcttggg

SEQ ID NO: 14043 - DNA, 524 bp, Oryza sativa
  Clone ID: uC-osflcyp012c07b1
ttccgaccacctctacgggaccggggccggtgggagaagtcggggagtagggcggggacgttctagcccaacccgcccccaacccgccccgttgccaaccctatggcgagcgctgcgcgtgtaaataagggccaaatgggatcgacgcgagtggataaggttggtggagatcgcgctagtggatctgtggaaataggcggccggctcggccggctcggctcgctcgtgtcggttcagtttggtaggcactggttgtttaaagaaccagcacctgtaatatattaataggtgtaagttcttttaaaaaaccagtacatatagtattggtaccggttttaacaaataaaccggcacctttaattattaattattaaaggtgacggttctttatattttcatcatgcgaggtgcaaaatgcctataagtgtcggatttaaatgaaccgacacccataagagcgacccctatgagggttttttagtcagtgtgatccaaacatgatggatgcaataaaacctgtgtgg

SEQ ID NO: 14044 - DNA, 376 bp, Oryza sativa
  Clone ID: uC-osflcyp012c09b2
aaggaacaaaaatggggggtccatttggggtttttttaaattaagggattaaaaaatttttggggccttggaaaagaacacttgggaataaggggctaggaaaaaaaaaagggggggaaacaaaagaggggccaacgacaacaaaagaggggggcatttgaaattgggggggcttattggggggggggcccccaattaattaaaaaggggggggggttttttggggcttagttttttaaaagggtggggttaaaggggggcctttttggaatttttacccccaaagacttataaaactgggggggggggttgacccaaaagggggggggcttaggggggaacttggggggggggagatttccgggaaaagggggga

SEQ ID NO: 14045 - DNA, 397 bp, Oryza sativa
  Clone ID: uC-osflcyp012d05b2
ggaaaaggaatatatccattctatttatgggttcactgggctatttcctctacagctatatgtcttggggtctcaaaacatctaatatctttcttttgggtaatgcaatatctacacaactgagcacccaaaaatttggtggacatatgcagtactcataagcgggaacaacagcagcagagtataaaaatatctgcactgatgcaggaatttgaaaaaatggctgaaggaattgaagaaccatcaatttaatgggaagaatgcgcaactttgcaaggggcacgctggcgaatatttttacgagatcagcccgttgttagggcttggagctcacccaaatgggctggtataaggggccccaggggagggttctgtgggttctttgcatatgcaacat

SEQ ID NO: 14046 - DNA, 398 bp, Oryza sativa
  Clone ID: uC-osflcyp012d11b1
actggccaaccgctcaactaaacgagcgtggatcatctcagggagtatgtatcaataactcaatgtgcccgcgaacatgaaaacattacttatgaaggcggctccgcctttagcatatcacggccactgtgcacgcgtcgtcgagacccggacagtcggaatctgtcccatgcttagaacaaacagtccgactgtggatagcactctgctccgaagacatgtataacacaaattagcactttcgagctacagcataggcctaccctacgtactggcgcttacagatccaaacggctaggacttaccgactcactgcacataccgggccgaaaatcgtccagtactggcacatgaaaacagacagctacacagtgccttaggctaggatctgtcagggt

SEQ ID NO: 14047 - DNA, 502 bp, Oryza sativa
  Clone ID: uC-osflcyp012e01b2
ttttttgtttttttatttattttttttttttttttttttttttttttttttttttttttttatttttttatataattaaaatgttatagataaaaaaaaaataaataaaaaaaaaaaaaaaaaaaaaaaaaaaaaaaaaaaaaaaaaaataaaaacactaacttaaaaataaaggcggacaaaacaaaaaaagaggaaaaactactattaaagaagaataacaaaaaaaaataggaatacgttgttaaaaatcaaaaaaaagctaaagcatctaaaaaaaagaaaccacattcttgcatgaaaaaaaaaaaaaaaaagcaatagaaaaattaaaagaaatcagggaaaaaatgttaaaaggggaaagaaaaaaaaaaaaatttaggaagggaaaaaaaaaaaagccaaacacttctattccgttgagaaaagggaataaaaaaaaaaagaccaatagaaaaaaaaaaaaaattaaaaaaaaaaaaaaatttccttgggaatc

SEQ ID NO: 14048 - DNA, 292 bp, Oryza sativa
  Clone ID: uC-osflcyp012e09b2
aagcaacagatgcaaatgctgaggcagggagcaacttttacatgacggggggtcttttctctggttttacttgggaagaaaaaaagggtctatgggggaagttaaaaatggaatgcaactaacaacagcaacgggtgtgtcagaggtgaaagatctagacacataagccaccacaacaaccacaagtaagaggggcttgtttcgtttcctacacgcgcaagcacaacgacaagttttagaaaacgcaaatgaaaaatcatcaacttggaatattttggatgcaacaaatatt

SEQ ID NO: 14049 - DNA, 515 bp, Oryza sativa
  Clone ID: uC-osflcyp012f03b1
ggtatcgacaagcgtgtgattgagaggttcgagaaggaagccgctgagatgaacaagaggtccttcaagtacgcgtgggtgcttgataagctcaaggccgagcgtgagagaggtatcaccatcgatatcgccctgtggaagttcgagaccaccaagtactactgcacggtcattgatgcccctggtcaccgtgacttcatcaagaacatgatcacgggtacctcccaggctgactgtgccgtgctcatcattgactccaccactggtggttttgaggctggtatctccaaggatggccagacccgtgagcacgctcttcttgctttcactcttggagtgaagcagatgatctgctgctgcaacaagatggatgccaccactcccaagtactccaaggcccgttacgatgaaatcgtgaaggaagtctcatcctacctgaagaaggttggctacaaccctgacaagattcccttcgttcccatctctgggtttgagggtgacaacatgattgagag

SEQ ID NO: 14050 - DNA, 456 bp, Oryza sativa
  Clone ID: uC-osflcyp012f05b2
aaatacttaatagtaatagactctttgatggagtattacaacatgcagcagtggcattaatacgccagtacattaattaagttacacatatgcaggctccattttggtttcttttaatttatcgtattacagaatttctgtagccttgcagatgatcacttggatatcatgtactagtaattaacaataggatgcatacaaaagatggcccaacgacaacagaagatgcgtgcatctgacattgtctggccttatttgttggtagtactccaattaattaacaagagatgatgcattcttgtgccttagtttcttcacatgcttggcttcacgttgagcctattcgcaatcttcacccccaacgactcatcacactgggagaggtagttgacccagatggcgcggagctcaggggagaccttggggtgcgcgagctcgccggcgaaacggcggatg

SEQ ID NO: 14051 - DNA, 350 bp, Oryza sativa
  Clone ID: uC-osflcyp012g01b2
ggaaggaaaagtttttgacaaattaaataaatggggggggcccatttttagagggagagagagagaacccacccatatgattgattatgcgggggggcgttggaaattggcggcgccctccggggggtgaaattttgggggacaaggggcaggcttggaggaggccccggcaacgggaaggtacttggggggggggacaacctctttaatggcagggcccatgggggcctcccccgggaggaacaagggggcaaaggcaagggcctggaaaaggcccttgggggggaaagccccccggaaaaaggggttccccaatttggaaaaaaatttttgtcctaaaaggggggggg

SEQ ID NO: 14052 - DNA, 405 bp, Oryza sativa
  Clone ID: uC-osflcyp012g09b2
aggaacaaaccatggaaatttgaatttacatcaccataacaccttaatttgatctaaaacttaacaacaaagcacaaatgctaaataattaccctgagctcaaaaattcaaactacaaactaataatgctctcaggagcagattcggacatagatacaggaacatacaagcaggctcactcacaacatgcgaagattactcctgaagaaaagatcaaatctgcagagacaaagtcgatcaccgtgtgtccctggagcggctggcaacatgcctgagcagagcctgccctgactgatgcgcgaaatgcttttgcctcagctgcacgtacggttagcagaggctggacaggatgtgtgctggctttcagaaggacattaccttggaccacacctgaacgtttttttt

SEQ ID NO: 14053 - DNA, 401 bp, Oryza sativa
  Clone ID: uC-osflcyp012h05b2
ataaaaatcaaatatcttagatggtggtattacattgcaaaccaaaagaatacaatggatttatcaaacagcaagattacatcaatgaagaaacacataggagcaaataatttagccaggaaacacctcttgaactagtagtgataatcatttgccttcttgaagatctcagcctgggaagaagcaacgccatcagaggtcatggccacgacgatgcaatccttaacctgttgggtggtaaaagggaatttcttgttcacaatggagttgaggtatgcagctggttccttgcggggcaaagcaccagtaccatcagttccagtgtttgaaagtgcatcatgaagattttttagctttttgccagtgatcaaactgcagcagtcccgagtgttttgccaatg

SEQ ID NO: 14054 - DNA, 507 bp, Oryza sativa
  unsure (1)..(507): unsure at all n locations
  Clone ID: uC-osflcyp012h11b1
tgataattcaatctctgaacctttggaatctgatggagccaatggagctacagaaaatgttgttcccttggcaagtgagaagtctactgacaacaatgatgctatgaattcagagccagtgaattcagaaccatatgaagcatctcctgctaataatgctgaaaagggagatgtgatgcagcagagtgatgagaacaatggtgataaacaggagaatcaggatctgttgtctccaatggcagaaacagcaggaagtgacagtacctcagtcacatcgatggaagatgttcaagaagcaaaggatgctgctccatcagagacagatgatgctactggccaccctcctgatctgtcaaatgacaaagcttgtgctggaaatggaaatggaaatgtcttccaaaatgcanagtgtgtcttgacaacttcgacaagaaaatgaagagagtgcatctgcaactacaggaagtcacttgcagctactaatactgacgaagggaatgcttctac

SEQ ID NO: 14055 - DNA, 218 bp, Oryza sativa
  Clone ID: uC-osflcyp013a01b2
ggactcaaacaacaaagtgtgcatgtatttatgcattccttgctggttaccatttgcgcaagggcacaagaatgaaacattacaatatcaaaacaaaaacctggactacatctgctctcccaaaaaaaatcataaatcaaagtaaagaagattgtcctctacacaatcttacgtgcgaatttacaacatttctccccgttgctttgcctttgtttcta

SEQ ID NO: 14056 - DNA, 350 bp, Oryza sativa
  Clone ID: uC-osflcyp013a02b1
gattgggaaattagtaaatatagctttagattatcccaccgaaccagctttgttgaggtggcagcaagcccttatccaaccggcatgcgagctggtgagtcacttagctttcattaaaaattcacacatatattagcctcggtttggtcgtgcagatcaacacaggcagcaagcagttgcagtagtagtagcaacagcaagagcacagccatggcgcagaagcctcagccgcaacagcagtagcagcaagcagttcgtccggaaaaccacctcaaaagagagaaatggcagagcagtagctagtagtccggcaccacagtcacaccatatctcaatagtagcagccatag

SEQ ID NO: 14057 - DNA, 482 bp, Oryza sativa
  Clone ID: uC-osflcyp013a03b1
tccctgttcaagctgtcgtcggcgttcgggttctggtgggtggtgcgcgtctacggcgtgccgctgctgatcgtgaacgcgtggctggtgctcatcacctacctgcagcacacccacccggcgctgccgcactacgactcgagcgagtgggactggctccgcggcgcgctggccaccgtggaccgcgactacggcatcctcaacaaggtgttccacaacatcacggacacgcacgtcgcgcaccacctcttctccaccatgccggactaccacgccatggaggccactaaggcgatccgccccatcctcggcgagtactaccagttcgacccgacgcccgtcgccaaggcgacatggcgcgaggccaaggagtgcatctacgtcgagcctgaggacaacaagggcgtcttctggtacaacaacaagttctaactggtgctgctgtgaaatcagcatcacacatccatagccaagcagcaaac

SEQ ID NO: 14058 - DNA, 431 bp, Oryza sativa
  Clone ID: uC-osflcyp013a03b2
acgcaaaaaagttgtcattccattcgacgtttagttattccgccatgaacaccacaagcgttttacaacagcaagcaacggacggagccaactcaatgacagacaaaccgcacaagacacgtcgtccacacggacgccgaccatgacaacacctaaaccgaacaatggcggagggaaaaaaacgatggaaataacacgacagggaccaaggctgcgacaccggagctcagcagctgacacatacatagactacaaatccacaggcatgacacacgcctgatccgcctactttgcacttgatggcaactctagcaatggcactgcaatagccttcctctgtgcccaagtgccctctcctatctaaagagactaaccatagatagatgcatggatagatagacgattgttcatgggttggatggatggatgga

SEQ ID NO: 14059 - DNA, 77 bp, Oryza sativa
  Clone ID: uC-osflcyp013a11b2
cgtccatatatttttctttttctttttacttcatttacactttccaaggaccggcaccaatttttacaccataaaaa

SEQ ID NO: 14060 - DNA, 428 bp, Oryza sativa
  Clone ID: uC-osflcyp013b07b2
ggatgaacacgaatttccatttaaaatgtgaagttgcttcatgcttcaaagaagcagagtccaacacatatataatcatcgaaaaagaaaggaaaatcctctcaaaactctaatgcctgttactcacacagtaacatgttacaatcacaaaatgtacaattgcagcacaggcaatttgcatccttgtcgcctgggctctgcaatttcagacaaccatttttttcttctgttcctgtctgcactcgccgcccaatcagatcagcacccagacaaggcagcagcagggcctcaacctcaagttcgccatgctgacgatttctcctgatcaacattctcttcccaccaagtagcattcttgtatcctcttctgagaaattctagtgagcttccttggtcttcttgcaaaccaagaactcttaacagttctt

SEQ ID NO: 14061 - DNA, 355 bp, Oryza sativa
  Clone ID: uC-osflcyp013c03b2
ggggggaaaaaaaaattggaaggtttaatgaaaaattatggagggaaaaaaaaggtaaatgaaaaaattttgaaaaaaagggaggggggctcaaaaaaaagaatagacaaggggggccaaaccatttaaaacgaaaaggaattaaaaaacgtcaaaaaacattggggcaaaaaaaaaagagtttataggccctaggaaaattggggaaactaaaataaaaaggcaccttttttttaaaatttaaaaatagcaaaccaaggtttacaaaccaaaagggaaaccccaatttaaaaatgtaaaaatttttgggtttaaaaaaaatccctaaaggaaattggactcaaatttggttttg

SEQ ID NO: 14062 - DNA, 426 bp, Oryza sativa
  Clone ID: uC-osflcyp013c11b2
ggctggaaatggatatattccccaagcgtgacaacaacttttgagtgccagtgtgtgtgtgtgttcccctcccctccctgcttaattacatcatctctaacgtaaatgattcgtgatcttcaacgggaggaaaatgacgctctcttcgacctccagagcggttttcctcccgagacaaaaagcacaaatccaaagctccccaaaaggctgtacaaaatggcaaaaagaagaaaaaaaaagggagatcgaatgatcccacatcggaatccgacctcgaggcgacggtgtatatgagcgtctgaccgtgctagctccggagcgcgaccgcggcctcgtgcacgagcgagccggtggcctgcgcgacgccgtgcgcggagctctcggcggacttccgtggggagccggactcggacatgcggcggacga

SEQ ID NO: 14063 - DNA, 504 bp, Oryza sativa
  Clone ID: uC-osflcyp013d01b1
ttcttcttcctcctcctcgcgctcccccgattcgaagcgtgaagagaggagcggcgcttgcgagaggagagagatggcccgtaccaagcagaccgctcgtaagtccacaggaggaaaggctcccaggaagcagcttgcaaccaaggctgctcgtaagtctgctcccaccactggaggagttaagaagccccaccgttaccgccctggaactgttgccctccgtgagattcgcaagtaccagaagagtactgagcttttgatcaggaagctgcccttccagaggcttgttagggaaattgcacaggacttcaagaccgatctgcgtttccagagccatgctgtccttgccctccaggaggctgcggaggcataccttgttggtctcttcgaggacaccaacctgtgcgctattcatgccaagcgtgtgaccatcatgcctaaggacattcagctggctaggaggattcgtggtgagagggcttaaattcccctcggcgactcctt

SEQ ID NO: 14064 - DNA, 424 bp, Oryza sativa
  Clone ID: uC-osflcyp013d07b2
caccgtgacaactgacaagcaaaccttgaattaagcatcgtaaccagttaacactagagagtgacaaatgaaattacaaaattgttacaacaatatacgccagccgatcatcagagcaaccaagaaagcccgggttgcttcttcatcgccactccgacaagatcacctggcctttcactaatgactcccgtatcttacctttcctggaagtcagttcaggatggattgcagagttcttccatcttttgtgttaggatttacgcctgcttcatgctgcagctgctgcagtctggtttccgcctacccagtactgcttcacagcatacagcaccttctcacgcaccatggggccgtcctcgtgatcgaccagcctcgtgttccatttcatgccgagggcgagcctgttcaccttcgtcaggatatc

SEQ ID NO: 14065 - DNA, 503 bp, Oryza sativa
  Clone ID: uC-osflcyp013d09b1
tcgttccttccttccttccggttgcttccgccgatcgacttctcgccccccaaatcgattcgccccccgcctcgatcgatcgattccgcggcagcgccccttcgatcggttggagatggccaggacttccttcaagctcgagcacccactggaaaggaggcaagcagaatctgccaggatccgtgagaagtactcagacagaattccggtgatcgttgagaaggctgacaagaccgatgttccagaaattgacaaaaagaagtaccttgtccctgctgatctcactgttggccagtttgtctatgtggttcggaagaggattaagcttagcccagaaaaggccatctttgtctttgtgaagaacacattgccgccaactgcttctttgatgtctgcaatctacgaagagaacaaggatgaggacggcttcctctacatgacttacagtggcgagaacacattcggctctgcgtaattcatcaactgttgctgctgctgtaaat

SEQ ID NO: 14066 - DNA, 262 bp, Oryza sativa
  Clone ID: uC-osflcyp013e03b2
attgtcaatcttctaaaatgaacaatcgggaaaaccacaaagacctacacaccaactggcagcaacaacagtggaaccacaagctatcaaaggtacaaagggcaagaacgggaggaagcaccaccccttgggggggatgtgctggtccccaaaagaacagaaggaaaacaggaaaagggagagaaagcaagccacgtagcgacagaaggaaaaaaccaaactaaacaagggagcaggaaaaaacataagcaagaaaaaggcc

SEQ ID NO: 14067 - DNA, 426 bp, Oryza sativa
  Clone ID: uC-osflcyp013e11b2
gtgcaagcagactcaaatctcatgacccatttcgcttccattcacatattatgatgataatcccctttttacatgagcagaatgccctagtgcatgagaggtcaacaccactacataaaagcagccaagagtaactgggacatgggaacacaaaaacatcaacggactacaagcaatcactggagatcttataatgttttaagatgacagcaaatctggagagccagaaacgcacaggtttttcacggttgcttattgcatctttctggcatggtggataccacccgttgccctgctgcatgccctagtcagctgtccagctctgctccacgatctcacgaaccttgcggttgtactctcgcttgttctcactaaacagtctggcagcttctgagtttgctggagagttggggtttggatcacaca

SEQ ID NO: 14068 - DNA, 428 bp, Oryza sativa
  Clone ID: uC-osflcyp013f07b2
ataggttcataacattatttggccatgcattattgcccacttcttttcacacttttacactgctgcatgcactgcagccatcttttacatattccacaaaaacaggggaaaaacttctctcctctccctcttttctggagacaaagaaagcagaggagaagcaaacagatcagtcgtagtactagtacaacattagcacactctccctccagctagcgcatgtaatataatacaccagctgcgccatatacatatactatcagttcatcatcgatcgcatcgtgtacgtacactacaggttgtgtacgtacaaggatcccctcttctgctaagactttttgtctgcatcgatctactacgtacacgtacgtatattatacggtggtagtacaagcatgcatacgtttatacatccttggctacaaaat

SEQ ID NO: 14069 - DNA, 332 bp, Oryza sativa
  Clone ID: uC-osflcyp013g03b2
tttttttttttttttttttttttttttttttttttttttttttttttggttttaaagaaaaaatttaaatttaaaaaaaaaaaaaaaaaaaaaacaaaaaaaaaacaaaaaaaatttaaaggaaaaaaataaaaaacaaaacccaaaaaaaaaaaaacataaaaaaaagaaaaaaaaggggaaaaaaagacaggaaaccaaaaaaaatttgggaaacaaaaccaaaaccaaagacaaagacaagcaaaccccaaaaacatcccaaaagaaaaaactaggaaaaaaaacccccggacaaaaaaaaaaacctcaaaaaaaaaaaactcagggag

SEQ ID NO: 14070 - DNA, 467 bp, Oryza sativa
  Clone ID: uC-osflcyp013g05b1
tagagatccaataaccaaaagcaagaacaccatgagagccccatccttcttcttcctctccctcctcctcctcctcctcctcatccacatctccatccattgcaatgctgcagattcccagctaggttcagagaaggtcaccaacctcctcttctacctgcacgacaccctcagtgggaaggatccaactgctgtcccagttgctcgtgctgagaacgctgtacccaagcctgataatccggtacccttcagcacgatctatgtggtcgatgatctgctgacagaggggcctcagagagaatccacggtggttgggaatgcgcaggggatgtacatttcgacagccaagaaagggctcacgcttgttcttgggatcgatttcgagctcactgatggcccctacaaaggcagctcgttcgtcgtgtactcgcggaacccggtcatgcaggggaatggcagggagctcg

SEQ ID NO: 14071 - DNA, 431 bp, Oryza sativa
  Clone ID: uC-osflcyp013g11b2
acaagctccagttgttgattgttcgttgtagacaagcaacaatctacacaggcaatgttatcaccaaattctgataaaaagttccaaatctaagttgacatttcatggcgatcctttattcagagaagaacgtattcaagaatgatcaacacggggagctgataatttctacgaaacgggttcacagtataccacacccggaggaatccaaattatgtttgcagtttaccacccagaccagtcacagatcgattaatatatcgacatcacctataataacactacaaccaccctaatgtttacattgttcacaatataccgatttcgtcacaaagacatatctccaatttctgcatttcctttacttgccgtagtaaccttgtggaggagggtaggagccctgaggcgggtaggaaccaggtgggggataa

SEQ ID NO: 14072 - DNA, 468 bp, Oryza sativa
  Clone ID: uC-osflcyp013h01b1
tttggttcgatctctggccggtgaacgctgccatgtcgaagtgggaccgccattggatggtgaggtggttctaccacatcagccagttgcatcgccgctgattgaggcgaagggaaagagagcggtcgctgagacgtccgcttcagaatattcgctctcggtaccccacttcgcccctggcgacttcgagacgcgagcggacctccttccttttgtggagggggtaagcaatcttgtactgcccgccagtgccccgagcttgttcaccgaactgaatgagttcgacgaggggtgctctggtataaaaagcctggctgctcgggtacgaacctgctttttttttccacttttttatcttttactcttcctctatcttgcttttacaattgacacttgttctctttcgcgctcgtattttgcgcccagatcctcgcggctcactgctcaacggagcgaaccgtgcgagct

SEQ ID NO: 14073 - DNA, 227 bp, Oryza sativa
  Clone ID: uC-osflcyp013h07b2
gttagctataatatacttccctttggagtttggaactaaagatttatgtccaaatttatggtttttacagaggaaactagaggattttttacgttcacctgtagctggcgcgagcaataatgccttcgatcgcatcaaagtccgaatgaagtggaaactccattgttgatgacgtgcgacgtccgcaccagatccagatatgttcatccattcgacaggaaagtttg

SEQ ID NO: 14074 - DNA, 235 bp, Oryza sativa
  Clone ID: uC-osflcyp014a03b2
aaaaaaaaaaaaaatttcagaatccttttttgggaagggctggaaaacggaaaaaaaaaaatgccccgcccttattggccaggtaaaaaaaaggggttttaacggcccttaaaaaaaagggggttttaaaccccccaaaacgccccataaaggccaccccccaaaatttttcaaaaaactccaaaaaaaggaatgttggaaaaatttttacccccattcaaaaaaagggggggcc

SEQ ID NO: 14075 - DNA, 313 bp, Oryza sativa
  Clone ID: uC-osflcyp014a04b1
gtttaagacatcatccaaacaatcagctatcaatgctctcaccagtgctttcgaggatcctacgaaaagtacaatacctaagtctgtaaaagcgagccccgaggcagagaaggcaatacaggaggaaggctcaacgatcggtgaaagtgaaaacgagccagaagatgatgagaacagcacaatctacccatatgaacgtttgaccaccacatctgatgatcctgctcctgacattgatgttaccaagcgagaggtctacttatcatcagatgagttcacagagagttttgcatgacagggcatcattaaaaac

SEQ ID NO: 14076 - DNA, 358 bp, Oryza sativa
  Clone ID: uC-osflcyp014a11b2
gcgcacgaccaaatttggtcatgaagaacaataaaattgtcccaaaccaaacacctcgactcctctgacatatacattattacaacagacttacaatatgtcacattatcgtgagatcaaaccatttcatttccagcatcgaaatgaagctttgtacttttaattattattatgtttacagtttagagtatttcttgagcgcctcccctgcatttttcacgctctccggcaccggcagattgcagagaagagtcaccctggattcagagatctgagcccccttttcctttggggatggatccaatttccacaggtttaccggccacacctgggtggagcggccgacctggagcggggc

SEQ ID NO: 14077 - DNA, 198 bp, Oryza sativa
  Clone ID: uC-osflcyp014b07b2
taggatgcccgcttttcagaagctttgctcctttttagcggcccttcttttttttttttttggtatacaaaatgtagcacaagtctttattgagcaattaatcttttgttgatgttacaaattaattaaatgcacatgcatgatctcaaactataacaaataccttagcaataacatagcaaagcttactaggctagt

SEQ ID NO: 14078 - DNA, 68 bp, Oryza sativa
  Clone ID: uC-osflcyp014c04b1
tttttatgtacccacaagaacctgttgaacaggagacatcttaggctaaagcatcctgggggctcact

SEQ ID NO: 14079 - DNA, 357 bp, Oryza sativa
  Clone ID: uC-osflcyp014c11b2
agcatacaacacgatgtaccaacgggtaatatctttcatcatttgggatttcgactggttcggaaacagataccactactttccaggttataaagaaccttggcatgggtaaaagagagttgcataacaggctaacaggctagagcaacagcgagcggtaaaagatggggagaccaggggaagagagagagagagagacagaggcaagccgggggaagggctgttctttacaggacccttcttcattcatcttcccaggcattttttcctaccataggcccaaattgcttttgctgcactggtaacgtccagcttttgacggggcagaccaattgggggcaacaacgccacctttga

SEQ ID NO: 14080 - DNA, 253 bp, Oryza sativa
  Clone ID: uC-osflcyp014d07b2
aacaggacagagctatattctgcatgcgctgaataacatgttcaagatgacagacccacatgaaaaatgtcagctcagtacgggctggaacacaacggaccaatttacaccagatgcccacacatgctaattgactaagggtgccttggtcttgtcaggccacaaatgtattcaccaaccaattaccatcaactttttatgcggttttactttcgctttttcaaaaatttttatcttgtcccaggggatttgc

SEQ ID NO: 14081 - DNA, 246 bp, Oryza sativa
  Clone ID: uC-osflcyp014d08b1
tttccgatgagcttcaccatctaaagaggcggtggaaaataagaaacccactctttcgcttttaacatgttgagtgaagatgtcttaccctatcatgcgacgagagatgtactggatgaagctgatgacgaccgactacaaggtggagatggtgaacgatgggatgcaggagttcttcgtggccttccgggggcctactgaaaggatttattaagggggggtctggaaggcttgagtggcattgcc

SEQ ID NO: 14082 - DNA, 394 bp, Oryza sativa
  Clone ID: uC-osflcyp014e03b2
ggcaacaacagccattccaattttaaatcgacactgagtccaggttcacatagacatttaactcatctgaagtatttttgaaactgtacattattgtaaaccaggcattttaaagccatacattgcttgtggatacaagaacactaacaatacagatatcgcgagcagctcaattcgaatttgagccggttcgcacagaagccacgcagattcaaccatccaattcattcgagtgactggaacctcgaccgctgaccaagaaatcttcgttcgctggattccaggaaataatttcccttcacagcatctgtgtctcataacatgaagccacgcttccttcatcactgatatttgatgacattcctttggagtctgacattcatgcctcctcttc

SEQ ID NO: 14083 - DNA, 381 bp, Oryza sativa
  Clone ID: uC-osflcyp014e04b1
tatagtggcaaaagaagttaccctcaaatgacttgaaaattgacttctgagttctgaccaccacaattttagcagctaaactcatggctctcaattgtaattatttatgtacctaattcgatctgtgctacttccattgactagctgcaacaaataaaccacaccttcatttcaaaaaaaaaaaaaaagaaaaaaaaaaaaaaaaaggaaaaattagaaaaaaaaaacaaaacataaggaaaaaaagaaaatgccaaaataactggaggaagatagagatcaatagcatataaagaggggggccgctttaggagctcaaattgtaaatgccttgatttggacagtcaatgtttttttatgggggccctaaaattaaataca

SEQ ID NO: 14084 - DNA, 407 bp, Oryza sativa
  Clone ID: uC-osflcyp014e11b2
cataaaagttttttttttcttttttggaatggaggtagcacgttcagagtagagatggagcatcactgatcaattcactgctacacacccaacgtaaaatgcatgatcccgtgttcgacttatacaggcaatgcttcgtattgagtcggaactattccgtcctctaagaattaattaacttggtacataattaagcagcatcaatccgaaaatcggatgagagcagacttgagacggtaaaccgatcgacacggtaaaaattaagaagtcgcaattacgaagtggaccataataatagtatacgatccccgctgcgcagctgacttgctttagcagacgccgttggtcttcttcttggccagcacggccctcttccagagggagatcacctcgcgctgcttctccat

SEQ ID NO: 14085 - DNA, 63 bp, Oryza sativa
  Clone ID: uC-osflcyp014f07b2
ttttgggggtttaataaatttatggtttttttttcaaattttttttttttatatttaaagggg

SEQ ID NO: 14086 - DNA, 336 bp, Oryza sativa
  Clone ID: uC-osflcyp014f08b1
tcctgttcaaaccccacaagcgaatcctagggtttctcgcctggccggcgcatcgccgccgggaagtctacgccgtcgtcgtgatgttggagctgaggcttgtgcaggggagcctgctgaagaaggtgctggaggcgatccgggagctggtgacggacgccaacttcgactgctcggggacggggttctcgctgcaggccatggattccagccacgtggccctcgtcgcgctgctcctccgctccgaggggttcgagcacctacccctgcaaccgcaacctcttcatgggggtgaaccttaacaacatggccaagatgcttcgctgcgcgggcaac

SEQ ID NO: 14087 - DNA, 61 bp, Oryza sativa
  Clone ID: uC-osflcyp014g11b2
ggggttaaaggggaacccgcaattcttatttataaatggcagagggaaaaaacagaggggg

SEQ ID NO: 14088 - DNA, 361 bp, Oryza sativa
  Clone ID: uC-osflcyp014h07b2
agagttgtacccaggtgcatagctgcattatgcagtcccatctgctgtacattatttgtacaaatatattccagctatcacaaggctaggcacaaaattagagacaaactaaccaggccctacttgatacaatgccgtcgatcaatttacagtagctcatatacttctctgataccgagatttcagagaagcctgacctttctcttcattaggagcatttggcaccggaccaacaaaatcagcatccccactgctcggccagactagaggaatcagcttctgctgatatgcattcgtattatcgcatatgccaagctggatgacaaacgttactgtgcagcctcttcctgttccttcgcta

SEQ ID NO: 14089 - DNA, 472 bp, Oryza sativa
  Clone ID: uC-osflcyp015c04b1
ttttagttcgtcatacttgccagcgatggactatggaaggtaatgaagaaccaggaagccgtcgatcttgtgaagtcgatcaaggacccccaggcagcagcgaagcgactgacgaccgaagcgcttgcgaggaagagcaaggacgacatctcctgcatcgtcatccgattccgctgctgaacacccgcttcgcaacattgtctctgcgtttctcttcgttccgattgaatttgtgtggcggtgctgaaaaaagatggtttacctatagtatgtagctgttgtgaacagaccctagagatgagatatgttagcaaggacaaaactggagatgttcaaacttgtgggttcagtagcgagtagtgagtgtgtgcagggtggtgggcgcgcaggtgaattcgtctgtgcatacatacaccagcgtaaactgctgatcaatcgaacgggcgtgcaggttgttgccgttgggtaaaaa

SEQ ID NO: 14090 - DNA, 277 bp, Oryza sativa
  Clone ID: uC-osflcyp015c12b1
tatagtggaagctggtgcgccggctggcaccgccccgccggaatcggcgggaccgaccacgccgtcgttgagctacaacaagcagagctgcaggtgagtgcaaacaaacaagaactggctaccgccacgaacgctgctgagatcacccacacgctagggctgcactcctagaccccgtcggcactggtacatccagagcacatgtgcgacctgagccgaggggtcgcatgaggggctagacatggctaaccaacaccattgccaacacggctggaag

SEQ ID NO: 14091 - DNA, 381 bp, Oryza sativa
  Clone ID: uC-osflcyp015e04b1
tgctgcgcctgctggtgccgccgcggcgttactgccgggaccgacgcctcctaccatgcattggatggtgcaggagcgggaggtgaaacgactatcggtgaataagctgtataccagttaaaggctatgcttagagacagcttgtatggaaagacataatcgggtctagagcggaactaacacatgggggatgcgtcaaaaaagctgtaccacgtgccaaactacaacctattatttactctggatgaagcacatcaccaaaggctgggtgtctgtagatagtggacatgtttggaccattgtgccaagactgcaagaagtatatacacatgctgaagatggccatattagaactcagtttgacacaagtagaagactagg

SEQ ID NO: 14092 - DNA, 563 bp, Oryza sativa
  Clone ID: uC-osflcyp015h02b1
gccgcgcacagtgaaccggctcgaccgcacgcctccttctttatggaagattacaccagacaaacaaactagctagcccatggcctctttgtcctctttacggctcgccgcggcggaggcagcactgatggctgttggctcctgtgccactgagctcacctttaaggtcgctgagggctctagcgccaaagagactagaggcttgtcactaatgttgccatctttgagggtggaggtcacagaaaaccggacggcaaggactcgggtggcgcctcaagggagtcgtctgtctaacaccctggacgcttaaaaagtgcaagtcggccgatcaaggggcccccttttttgaaccgtttactctgtcaagaaatggcggcttacccgggtcgtcgacgatgtcatccctgaaagcttttacagctggctctgagtacaagagtggaatccaactctaagtaacagacatgtgaactcttgtggggtcacatgccaaatatgaacatctaaaaaattcccttttaaaaagaccgggtcatgtttgagtgagcaaaaaatattttttt

SEQ ID NO: 14093 - DNA, 112 bp, Oryza sativa
  Clone ID: uC-osflcyp016b10b1
tcgtcggcgggcgcggaccagaagcggatcaggggacctttgaggaacttccccgttcgctcaccggaccctgtcgacgccagtgaagaggacgagagtaagcgaccccaaa

SEQ ID NO: 14094 - DNA, 298 bp, Oryza sativa
  Clone ID: uC-osflcyp016c06b1
tttgtttaccatctccactactgatctcaggctgttttactaacaagggcgctgtgccacgaggagctgcccctgctgctgtaggagccgccgaggaccctgaccgcgggccgccagtgtcgagggaggaggcgaaagctccgtgtcaagtacacattccaggggatgcacagaaaaggttggaaacgtcagcagcacaaccagagccaccaccactgccacagagacggtagcgactacctaagggtgcgcgagaccaagggggaagaggaatgaaacaacagcaccggagagtgtc

SEQ ID NO: 14095 - DNA, 426 bp, Oryza sativa
  Clone ID: uC-osflcyp016h02b1
ttatcaactcatagcatcccgcgactactggggtgactttttggcatggtcttgggaacagccgcgcccaagaagatgattacgaagattacgtgaatgtgcacgatctgaatatgatcatccatgtttacggacttgcgagccacgtgctatttatgaaaggctgaaggatgctgcttccccagatctaatggtgggttatttagaacaatttcttggtggggatgaaaaaaggcctgacctcccccctcgccttgatgaagggctgccactgtgcttaatatttggaggcgatggaagacacatggctgccttttcacctgacaatgacagtgcgggcaccagtctcactagtgagggcgtgccctgatcaatatgggaccgccttgttgctgtagagaacgcccaactgcgttaggcttggcg

SEQ ID NO: 14096 - DNA, 421 bp, Oryza sativa
  Clone ID: uC-osflcyp017a03b1
catggagtcgctcatcagcaggaacaagctggtcagggcacagaccgagagggagatcctcggcctccttgatcatccgttcctccctacgttgtacacgcacttcgagaccgacaagttctactgcctcgtcatggagtattgctccggcggcaacctccattcgctccggcagaggcagctcaacaagcatttcaacgagcaagctgcaaggttctacgcatccgaggtgttgcttgcgctggagtacctgcacatgctaggcattgtgtacagggacctcaagcccgagaacgtccttgtccgggacgacggccacatcatgctcttcgacttcgacctgtcgctgcggtgctccgtgtgcccgatgctggtgaagtcgtcgtcggtgcacgcgggcgcccacggcgtcgtgaagggc

SEQ ID NO: 14097 - DNA, 487 bp, Oryza sativa
  Clone ID: uC-osflcyp017a05b2
ttttggttttttataaagtaacaatatgactgcattatattacgccactgcttatgtggtgaggcgtcttgtggcgcctcaagaacaggtacatttcattttccatactaggtaggacttggggcccagagtcgttatggtgaaggaaaaaaatatgctcccacatgatgtaggtcagtacaactgtgaaaaaaaaagttacttctatatgaaggatcactgggttcatttcagctttgaacctgcccggtggagataatagattggttaagagctggcttcaaaaaaaggatgctgcagtcatcttataactgaggtggtcaaacttgagggcagcaaaaaaattgtcaaccttcagcacaagggttacacagatcgacagccaggaacattgttaaggcccattgttcgaagaatgagtttgggtatagcaggcggaattgcaagacccatgctctggctgaactattcgagagcctaacaagtt

SEQ ID NO: 14098 - DNA, 328 bp, Oryza sativa
  Clone ID: uC-osflcyp017a06b1
tttatcgcgttccaggacaccctgtacgtgcacgcccggcgccagttcttccgcaactgcgtcatctccggcaccatcgacttggtgttgggcaactccgccgccgtcttccagaactgcctcatcatcacccgccgccccatggacaaccagcagaactcggtgacggcgcacggccgcaccgaccccaacatgaagtccggcctcgtcatccagaactgccgcctcgtgcccgaccagaagcttttcccggacaggttcaagatccccttctacctcggccggccatggaaggagtactcccgcctcgtcatcatggagaggacca

SEQ ID NO: 14099 - DNA, 417 bp, Oryza sativa
  Clone ID: uC-osflcyp017b01b2
tttttgttgtttggcaataacaacataacagtacgcaatgtcaaatctttacatacggagctgatacggctcgtcaaaattttttctacatatatacacacatctaggaactattcaccatatttctctacatccgtaacacgcatgcttccttcagcaaactaggctacgtaagggcaccgcatctgatcgcttaatcaattttacattggatgatgaaatcctagctttcgtactggagtacatccatgtaccaaaatggacctgcgaatgggatggcaaatatgcagccagggtacatctgcacaccatcgatttataccttggttgatattgaaccaacaaggcctttattgatttgcaaagacctgtactaggatagcctttataattacagacctttggtaatcaattttt

SEQ ID NO: 14100 - DNA, 416 bp, Oryza sativa
  Clone ID: uC-osflcyp017b09b2
ttgtgtttactcgtgaaatcacgtaaatatataatttctgaaggggcagaattcacgtctgttgatattctgtgatagtctccatgttttttcgttatccacttagtttacatacataacaacagatgcctaacactgttacaggagaacgttaaatgctctgtttcttcaacagtatcatgctggcacaccattcaactcttctgggatctctttgctcagcactggaaggtgccccttctcctggaggctcttcaccgtctcgtagagcgagtcgctcacaggtatgaagtggaggccaagatcctgcagcttcttgttggacatcttgtacggctgcttccgtgggttcacctcctcagagcaccttgtgggcacaggatactcggggaaaagcttgccaaggatgtggacga

SEQ ID NO: 14101 - DNA, 453 bp, Oryza sativa
  Clone ID: uC-osflcyp017c05b2
ttttgtttttttttttaccaggaacaataaaccaaagctgacattattacaaataatcaaacaaataatcaaagcatatttgtccttcagtttacagaagaaaacctgtagttgcagaatactcctgggtcgcagtacagcaattgcaggaatttgggatgacgggatgttagactttttacaaactatatatatcccagaatttttgttgagcttttttcacatgaaaaccaagcaacctacctacaaagaaatccgtggttaagatttacatttctgtactcaccagtttgaaggaacaatttgcaagggcacattggggatccctggactgatctaatggattggatggtactgagggatcccccgtttaggtggaagtttccttaatatgaacaggaccaaagctgaaggttcaatctcaaccaacaagtagtagaagaagtttaggat

SEQ ID NO: 14102 - DNA, 460 bp, Oryza sativa
  Clone ID: uC-osflcyp017d01b1
atgaaatcagcaaggttgttaagatccaggaagagcttgacattgatgtgcttgttcacggcgagcctgagagaaacgatatggttgagtactttggtgagcagctttctggttttgcatttactgccaatggatgggtgcaatcctatggatcccggtgtgtcaagccaccaattatctatggtgatgtgagccgccccaacgccatgactgtgttctggtccaagatggcgcagagcatgacctctcgccccatgaagggaatgttgactggtcccgtcacaatccttaactggtcttttgtcaggaatgaccagccgaggtttgagacatgctaccagattgctcttgccatcaagaaggaggtcgaggaccttgaggctggtggtatacaggtcatccaaatcgatgaggctgctttgagagaaggtctgcccctcccaggcggagcatgcttcta

SEQ ID NO: 14103 - DNA, 465 bp, Oryza sativa
  Clone ID: uC-osflcyp017d01b2
tttggtttttttttttttttttgttttttttttttttttagatgaaacactggtgatttccactcagtttacaatacaaatacaccgacagactggcttaaaaaccaccaaattcattcaaagtaaaatgggtatgagtgatcttggccccaagagactgactaaacctaaccacagacaggggatccactggacccagatttttcaaaaacaagatggctttgatggcattcctcctcaaaatcgaagggaacttgctgcaaaggcgatcctcactttgcgctagcgagctgggtgcggatgagcttggcggccaaaaccatgttggtgagggcaggctttaccttggtgtacttgcgggtcttgagaccgcagtcagggttcacccagagaatgttagtgtcgagcaccccaagcattttgttgatgcgggccgcaatctcctccgtggacgggatcctgggg

SEQ ID NO: 14104 - DNA, 427 bp, Oryza sativa
  Clone ID: uC-osflcyp017d09b2
tttgttttttttttttttttttttttggttttttttttttttttttttttttttttttttttttttttttttttttttttaagaaaaaaaaggaaaaaaattgatttcaacatgcaaaaaaggggtagctttttttatggaaaaagggccaaaagggcgggatccgggaaaaaaaaatttttttacagggggaaaaaacccaaaattttaaaggtccctagcccaaagaacaagggaaaccttttccatttccaaaactcctaaatttttgaaggggaaatggttaaactttaaaggaagggagccaggcagccacaccggaaaaaaaagggtcgcccgaagcaaaacgatgctttggacaaaattttcgcccatttattcttgacaagaataccggggaagggaaaggtcccgagaggtttttggg

SEQ ID NO: 14105 - DNA, 91 bp, Oryza sativa
  Clone ID: uC-osflcyp017e05b2
caaacattcgtggaccccaaacttattttcaatttattaatgttttaaataactgaaatcaatattggcaaatatcaaacacgtgtttaca

SEQ ID NO: 14106 - DNA, 380 bp, Oryza sativa
  Clone ID: uC-osflcyp017f01b2
ttttgtttttttttttttttttttttttttttttttttttttttttttttttttttttttttttttttttttataaaaaaaattttaaattaaaaaaaaaaaaaaaaaaaaaaaaaaaaaaaaaaaaaaaaatttaaaaaaaaaaaaaaaaaaaaaaaaaaaaaaaaaaaatggaaaaaaaaaaaaaaaaaaaaaggttgataaaaaaaaaagggctaaaaaaagtaggaaaaacaaaaactttgggaaaaaaaaattttggggctgatccaaaaaaaaaaaaaatggaaaacaaaaattaaaaatggggggggcccccacagggggggaattggaaaaaaaaaaaatattgagaaaaaaaacgcttttagtggggacct

SEQ ID NO: 14107 - DNA, 308 bp, Oryza sativa
  Clone ID: uC-osflcyp017f05b1
gaaagcaagatccattatgtaacatatatttaggtatacatacacatgaaacacgacggcactactagccccacaagcggcctctagtttgtcgagcaaacaaacacgcaaccaggggctttttcttcgctgcctttcagactataaacaaagcaaccaaagcccacagcttcctcctgaagctgaaccttacggaaatttcgggatgagaactcctgatcccgaaagggtttcttcttcattatcatcttcatcttttcttttttttacagggagttatgtggcagtaaccatcgcacaagttatgt

SEQ ID NO: 14108 - DNA, 465 bp, Oryza sativa
  Clone ID: uC-osflcyp017f09b2
ttggttttttttttttttttttttttttttttttttttttttttttttttttttttttttaaccaacaaaagaagggcattaattaagccgggataggtcaggggttgaagaatacaggccgggttttttttgggggggtttagggggggttagactggattccaacacaaggggaccacggggggccaggggcaacacggccataatttacattcaggtttttcagggggaagtaggggggggaggtaaaaacggggggaactaaccaacacaggggttttttaggtttaagggaaaaaaggccccacccacctaccgggggaggcaggcgctacaaaacatggccatgggggggaggcgccctggcaccataagggattcagctcatgggcatttcatggggtttgacggaacctaccgggagaaagcctgggggggaaagggtggggccattggattggtgt

SEQ ID NO: 14109 - DNA, 404 bp, Oryza sativa
  Clone ID: uC-osflcyp017g05b2
gaccccaaatgttcttattgattgattgcgatttcatagaagcagcgacccgaattaagatttaaaaccaaccccaagaaggatcgcagaaccaactccaccgaatcgatccaagaactccggctaatccaaccaaaccatgggcgaacttatctaaccaacacgacacgaactcataaaaagactaacaccaccaccaccttcttcttatttagggactggacgactcaagaccactgatcctggggaaaggcgaaggggaacagctcatatttaggagagctggccgaatttggagatgaccaccggcttggcggtgctcccgccgggggatcccacctttttgatgggcttaacgacgtccatgccctttattaccccgccgaacacgaggggcttcccct

SEQ ID NO: 14110 - DNA, 426 bp, Oryza sativa
  Clone ID: uC-osflcyp017g09b1
gttcattactttgcttttggagctcttgtatctgaggaactctcctacaaactcaaagagttgcccaaggtccgctgggttcttccagactcatacctggatgtcagaaataaggactacggaggagaaccttttataaatggggaagccgttccttatgaccctaagtaccacgaggagtgggtgagaaacaatgcgcgtgccaatgaaagaagccggcgcaatgataggcctagaaactttgacaggtcaaggaattttgagaggagaagggagaacatgcagaacttccagaacagagatgtgcctcctggccagggattcaacagccctcccccaccaggtcagggcccagtcccgcctcgtgatgctccttcgatgcaccatgctcagggtaatgttcctccaccttcaccaccaaatgca

SEQ ID NO: 14111 - DNA, 212 bp, Oryza sativa
  Clone ID: uC-osflcyp017h01b2
tttggtttttttatttttttttgtttgttttttttttttatttatatgtttttttttgtttttatggttatccagcaaaaaaaatcaaatggggaggctaaccaagaaaaaaagaaaagaaaaaaactcaagaaacaaactaaagcagaaaaaaagaaaagaaaaaaaaaggaggcggaggcaaaagtaccaagcatagggcaaacaggaca

SEQ ID NO: 14112 - DNA, 466 bp, Oryza sativa
  Clone ID: uC-osflcyp017h09b2
acactatataagagatatgcggtggcatgcgcagcgcgcgcgtgcgttggaactcttgagagggggccggcctttgttgttgggtggttgtgaccacccaggcggtatagagccggcaggagacagtggacagggaggggatacatacaaccatttttctcaccaatcattaacagcaaaaattgtgatcaagcataagaggtatgtgacggatggtccggataatactcaaacttggaaacaaggacctggccttaatggcaaggataccaggccgagaagtataacgcctaacatccaaccggggaactggaaccagtcaagtcaaaccatacgagggaaaaagacgaatggtggcgatcacctagtgcaagaacgcacacagctgcaagctaaaaagatagctgccactgtgaatgaggagataatggtggggtccagtgacagcacagtaagttgactgggc

SEQ ID NO: 14113 - DNA, 331 bp, Oryza sativa
  Clone ID: uC-osflcyp018a06b2
tttttgtgcagaaaagtttggggcgtgatttctcagggctggcctaactggggactgaccaaaactcttccagcctgattgtgttgtacattatggagatctatcaggcaatttcaaagttaacacaatatgacagatttcctctttgactgaatatccagtatgaatagaccaaaatgcccctacctacactggtttccaaacatgtgggctttatcaataagactaaacacaatgggacatttttctgatcatgccaccaggaggagcaccaccaagatcagcgtggcggcaggaaatcaccgaacgcgggggaccgaaaagagctctg

SEQ ID NO: 14114 - DNA, 357 bp, Oryza sativa
  Clone ID: uC-osflcyp018a08b2
ttgttttttttttttttttttttttttttttttttttttttttttttttttttttttttttttttttttttttttttttttttttttttttcaaaaaaaaggtttggggggggttaaaaggggaaaaaagattttttggaaaaaacggggggaacaaagggaaaccccaaaaaaaaacttgggggggagcccaaaggttaaaaggttacaaggaaaagggcaaaactgggggtaaccatggttctcaaaaaggaaatcccaggggggcccccgtgggaaaggtttttttttaaaaaaacaaaaacacggaagctttgggcgggaacaaaaaaaaaaaaactccccgggggggccccc

SEQ ID NO: 14115 - DNA, 391 bp, Oryza sativa
  Clone ID: uC-osflcyp018b02b2
ttgtttttttttttttttttgtttttttttttttttttttttttttttttttttttttttttttttttttttttttttttttttttttttttttttttttttttaaaaaaaaaaaaaaggggccccccccttttaaaaaaaaaataaccagggcccccccagggggggcccggggggtttcaaaaaaattttttaacccccaaaaaccttttttaacgggggggcgggggggtttaaccaagggttggggggaaaaaaaattttgggggggaaactggggggcccctttttggggaaaaacctttttacccccccccaattaaaccggggggggggggggggcccccgcccctttgtcccccttcccggggaccaaaagggtttggggccc

SEQ ID NO: 14116 - DNA, 415 bp, Oryza sativa
  Clone ID: uC-osflcyp018b10b2
tgtttttttttttttttgggagctgaaaaactcagtttctctatattctcaaaagctaactactaagtactaaccaacagattccaagaatctgtagtgggctactttctacatagtacaggactacaggtacagcacatgagaattgaacagggcacacctgcacattttttcatccacggcatcatccagttctacctcaaattgtgcaacacacgcccaaaaccaaccacaatatcaggtacattttgacatgatgagttctcaagttcttcggcgaaatctagaaaagaattatgggacgctattgatcgtcctaaaagaatatagcaacagatggatcagactcagataagctgccttcaaagtttaccttgcagctaccaggaaattgcagcccagcttggtcacagct

SEQ ID NO: 14117 - DNA, 383 bp, Oryza sativa
  Clone ID: uC-osflcyp018c06b2
ttttgtttttttaatcttttgtgttttttttttttttttttttttttttcccttttttttttttttttcgggctaagaaaccttgaaaatgatttcaaaaaattttacaaattcgtaattccccttcaacctaaaaaaaaaaaacggaaaaaaaaacattttttaaaacccccctactttttttgcccctaaggaaggagtaacccccaccccggtgggaccaaaaaaactcaaggcaaaccccggcggggaccctacgggatgagcccccccccaaggagtactatgttctttttaaaaaaaagaaaagcaaccccgggtatcccacgagctttctgtcccaagccaaacccaaaggctacagggggccgaggccctggttt

SEQ ID NO: 14118 - DNA, 324 bp, Oryza sativa
  Clone ID: uC-osflcyp018d02b2
aaaaaaagggtttaaggggggaacatgccaagttgaaataagttccaagagattggtgttttttggacaacaataactaattttttgttaaacagtttagttggtggggaaaaattttacaacttataagcaatccatgcctgccgggggccctttaccagtttttaaaggccattcgcagaatttttaatcgcacagggggttttttataaaacttaaaagagggtcatcccaaaagagggttacataaagaagggcctagtaaaaagggacatggcccctagcaggggctccccctccaaacaaaaatggcaaaagaaaagg

SEQ ID NO: 14119 - DNA, 402 bp, Oryza sativa
  Clone ID: uC-osflcyp018d06b2
ttttggttttttgatttttttggtttttttttttttttttttttttttttttttttttttttttttttttttggcccccggcccacaaaaaaaaattcattttttcccaggggcggggtatagcccccggcccgatttttggcccaaagggaaccttttttaagggggggaaagaattccctaagccttggggaagccccaaatttggtgcattggggaaagcccaattctaagggggggcagggttcacaaacaggttcccaacatttccctggggaaccctccaaaagggttttgcctttttttttttaacggaaaaaaaggggcctggtccggcccaattaaaaactcgttgccccccaagggaccgtttttggtgaacccaaccaacccggttcaggg

SEQ ID NO: 14120 - DNA, 413 bp, Oryza sativa
  Clone ID: uC-osflcyp018d10b2
ttgtttttttttttggcctgtgaagatccaccaaatccacatattacattataatcataattatgaatactttccttgaagagcatcattacacaaaatcctttgcctcccctcttgcatgctcaagaaaaacctaccaattttctcctccctacccttaacaaccaaaaccagccccacctaacacattgccaaagcaccattttgccatctggtaatccctctaccaccaacagctacaagaaagagcaaatatccctgtcccctacagcaggcaattaagattgaattgcatacattaacagtgacaacaatggccctacatgattgaaacattacttgatggcttctggtcctacccacactaccacaacaaccctcttcttattcctagatcagaagcactggtactg

SEQ ID NO: 14121 - DNA, 376 bp, Oryza sativa
  Clone ID: uC-osflcyp018f02b2
ttgttgttttttttttttttgttttttttttttttttttttttttttttttttttttttttttttttttttttttttttttttttttttttttttttttttaaaggggggggaggggcccccccccccaaaaaaaaattttccgggacattcaccaggggggccggggtttatccccaggggggggcaaaaaaaaaacccccaaaacgccttttttttttttaaccccacttttggcagggggaccaagaaggggaaacccctttaccccagaaccccttccactgttgggggccccctttgacctggggaaaaaaattacccccccccttggcaaaaaaaaaaaaattccctgcaaagggggtttttctccccgg

SEQ ID NO: 14122 - DNA, 454 bp, Oryza sativa
  Clone ID: uC-osflcyp018f04b2
atgcacccctccttcatcttggatcctttgtgcggccgccctcctttttctgtgtttttttaacttgggggggacaactttatttagtcattagggcctgtaattccttccagagatgaacaacagcttttagggggctactacaggtataactggttacatgcatatacagacgggaacacccaataattaacctcaactccttaatgaacatccagggataaaacaaacactaggacaacaattacgctggggatgctctgaatggaagaaaatccacattttattatgacccccaacgcctccgtgtcaccaccacgtcttgcagattttattttaccctgttctattcggtcatgcatacacgatctcaccgtcgtccttcgacgccaggatcagctccgggtgcgccgccgccgccgtcgccttcttgatcgtgccgtcgatggcgttc

SEQ ID NO: 14123 - DNA, 399 bp, Oryza sativa
  Clone ID: uC-osflcyp018g04b2
tttttgtaattaaccatcacgggagcatggcatgcaaatatatttatatgcacacaattgcatgcatatatatcagtaggaagcactaggtacgtgctgatgattacacaaagacacatcctgatccttgctcataattaatttcttgcaaatcatatgtagcctgtagggtagggggcagcaggcaaacacatatataagaatagcttaatcgctaggtttgtttttttgagatcaatttcattttaggagaatcatatatattatcgctaggatcgataccaatgacttcaattcattcaaggttgctcccatgattcacggtgcatacggcagctgtttggccgacgacgacgacgatgatcatcttaagcattgaggtggctcagcatccatggc

SEQ ID NO: 14124 - DNA, 401 bp, Oryza sativa
  Clone ID: uC-osflcyp018g12b2
ttgtttttttttttttttgtgttttttttttttttttggaagaaacaacacttttttatactcttttcaaaagtagggttcacatccgtacgaagaaattggatcaattggcattttgtttacccaatcattagaatatactaccactcgtttttgctatactgggtagaattcatagccccctcaaagagttcaagggattaatactactaattttaggactcatgactttgataggcgtgtaactgaaaacaggctaccttttttccaaaggtcctcactttccgtttctgtctgaatttgttcaatgcagcttctcggtaacagaccccattctgatacaagttattaccactaccggtcccacttccattggcacctccagccccattttcatccac

SEQ ID NO: 14125 - DNA, 345 bp, Oryza sativa
  Clone ID: uC-osflcyp018h02b2
ttggtggtttttttttttttgtttttttttttttaattgttttttttttgttgtgggcagcaaacaaaattggaaaccaccaaagattggcaccagcagctcccagggacgggaatttcggtttgattgcctttggcaggcgatacccatcttatagtgggaatttatttgtgcaaaaagggcacacctgaaaagctggcgctccaaagtggacaattttttcaaggccaaaatgataaaggcaaagggccccttggttggctatacccgcccctataacgaatggtcccagggaggctttggtgggggcggcgcccagggggtcccttggttcagattttttgg

SEQ ID NO: 14126 - DNA, 389 bp, Oryza sativa
  Clone ID: uC-osflcyp019a02b2
ttgtttttttttttttttttttatttttttttttggactcagaacatccaattttttaaccgaatagaaataaacgagttttaaacgactaacatagtgcacattgcgagcagatattaacggtccatgcaacgtgtaccatggccgtgggcaaaacttaacgaacgctaagatttttcaaatgcagccaggataaccaccacttcaacgatgctcatttcttcttggcgggagtcttggtcaccttggcaccggttgggtccttcttatccacgttcttgatgacgccaacagccaccgtttgccttatgttacgcacggcaaaacgaccaagaggagggtactcagagaaggtctccacaaccatgggcttggtgggaatcatctta

SEQ ID NO: 14127 - DNA, 418 bp, Oryza sativa
  Clone ID: uC-osflcyp019a10b2
ttgttttttacattactggagtttgcgaatattcatatagcctcaactctcaaatgtgcactacaatgtcgccagtagagacagacaatgtctgggagatatgaatacttgcttcactaataggcagcctcatccaactacatgtcaggggacgaattctacagataacgataccacgagcagggtccagatctcactcaggtgtttctcttcttgtgcgtcttccactgcttcagcaagtaacttgctgcctctggcataggggcactccggttctgcttgaagttccacagctcagggacaggatacatgccactgggattgtattcattcatttcaacaagggccttaacgacaacgttgcaagcctcatccccatattgcgccctcaaagcctgcagcttcccatcatcttcct

SEQ ID NO: 14128 - DNA, 346 bp, Oryza sativa
  Clone ID: uC-osflcyp019b06b2
tttttgtttttttaatcttcttgttcccaactacctacttaattttttttttcttttatccttcttaatcattctttttttttttttacattttcctatttttacttcaaaccaaaaaaaaccaaactctttcttccttccccactccattaaaccccaacaacaacaaaaccccccaaaaaaatttctcactataaaaactaaaaataaattcccaccccccccccccccccccaattaaaacaccccccccaaatgcctcacccccaccaattttatttaaacaaattcaattccctgaggatcctacactaatttacactatcgaaccccacaaacttactcc

SEQ ID NO: 14129 - DNA, 400 bp, Oryza sativa
  Clone ID: uC-osflcyp019c04b2
tttttgtttttttattttttggggttttatttttcttttttttttcccataaatcctacttaaacaatattttgaaaatgggggggccattttgctccatcccagtatgtgggaggggcccatggcctgcttcattttgccaagactatgaagtcacaaaataccactacaaatttatcttttgccggggccacaaggacactgggtttatgtttgggctagataaattattaggggctaaatcttgccgggtgacccaatgcaggggctggactgtccattgctggacctggaggccactctatgggagcgagccggccttaaaggttttggggactacatcggaaacaaagcaatcgccactgtactttacaaggaagcggccggataaggggccctt

SEQ ID NO: 14130 - DNA, 400 bp, Oryza sativa
  Clone ID: uC-osflcyp019c12b2
ttgtttttttaattgcacgggaacaacacgctttgatcgctgcaaacgttgatgtacgatgcggccaatgctagtagcttttaccatgcatacactatttagcccgttccatacaggacgtattagcaaggggaacttaaccaactttatgtaggcagccagcgcgcagcacagcatgcatcatcatcacaaaccctgtacaactgccaaaaagaaaaacttcacagcttcatgtcctttttcaccacctaagctgcttcacccccttcttcctgacgaccgcgtcgaggctgccgtcgaccaggctgatctggtccatcagcgaccgccggatgtggcccggcggcgtctcggtgatgccggctaggtacacgtcggaggagaggtcgaacttgagtgt

SEQ ID NO: 14131 - DNA, 399 bp, Oryza sativa
  Clone ID: uC-osflcyp019d07b1
attacattgaaagctgatttcttttcatctcttctgattgtgaacggaccaatttaggtggtgcgggatgccttctttgatatatctccccgcttggactccgtcttgagaaaggacagtgtccggtgcttcttccgtttgttcgcggaatgtactgcggccatggcatttaagtgtaacatcacctcagaaaccttatcctgcattgtcaggcataatgccttgcgatgtgcgaaaactgtattggagggcaaggcacctcagctcagttgtatgcatgccaatccaaactgcattaacccatatggaatttttccactccatgaagctgctgaacggttctctgttgacatgatcaagttgctgttctgccatggtgcttcagccaatttacacaca

SEQ ID NO: 14132 - DNA, 383 bp, Oryza sativa
  Clone ID: uC-osflcyp019d08b2
gttgtttttttttttttttttggtttctcccttctcttttttttttttttttttttttttttttttttttttttttttccaaggaaaagccaagggggggggcaaatgggcattcccgggcccccccccttaatcaaaccccaagaccgaccggccggggcccaagggggggccccaacccacaaccggggggggtctgattttacaaacgcccccccggcaaggggcctttacccccccccccagctttcctaaagaaagggggaaccaacaaaggggggccctttcctttttcaaaacccccccaacttgtttcggacgggggggcccccccggaaattccggcccgggccctgggggggccccacccttcccccaagggg

SEQ ID NO: 14133 - DNA, 409 bp, Oryza sativa
  Clone ID: uC-osflcyp019e04b2
ccccctcaacgtggtttctttacacccgggggggacgaacgacaccgaccaccagcgcctagatgtgccgacctccgagcaatccatgcccaagggacggttatacgaaggggagcctgtaccagatagcaaatcatcagatgcccagacggaactgacagagaggatcactcatgaaatgaatggaactgcaatctaaaagggaaagaatttaacagagaagatggcgaagatactatacaggatgacttcaccctctgtaatcttagcagtcaagtcccatattataattatgatgtcgatcttattaaagatatacaattttctcacagcaacaatgttcaccgaagaacaaaacccgctattgaagttagatgcaaagaagggctatgctctgacacatgcacga

SEQ ID NO: 14134 - DNA, 436 bp, Oryza sativa
  Clone ID: uC-osflcyp019e12b2
tcatccactcctacttaatctagcatccataacagccgccccccttttttttttgtttttttacccctcttgtttttaacctctcctttttttttttttttttttttttttctttttctttttatttttcctttatcaaataccacccctaccttctttttaaaaaaaaaaccccaaaccccccccaatttcaaccctcaattcctttactccaacacaaaaacaccctaaataccaataacacccccccccccctttaaaaaaaaaccacattaatatcccccccccccccccccatacaaaaaaacaaaaaaccaaaaaaccaaacaaatctcctttctggggaaaacaccccataccttttacttaaatcccccccccccccaaaccctagcccccccaacccccacaaaaaacccccaaaatttccccaaaa

SEQ ID NO: 14135 - DNA, 395 bp, Oryza sativa
  Clone ID: uC-osflcyp019f08b2
ttgttttttttttttttttttttttttcttttttttttttttttttttttttttttttttttttaacaaacccaaactggttttatcacaatggtagcccctgacaatggaaagaggaatctagggccaagggggtcattggcggggggaacaaaaaattgggtggaccacaacacccaccaggggggccaacaaggggggctttcccttttggggcgggggaaaaaggaaaacctcccgatgggaagggaaactgaataattttaggaaaccatgatgatgatgggtaggctccttaggaccccccccgcccttaggggtttggtgctcccattttggccactggaagggtaactcggaatcggtttaatccttttgggtggcctcgggggaat

SEQ ID NO: 14136 - DNA, 379 bp, Oryza sativa
  Clone ID: uC-osflcyp019g03b1
gttttgcagattttcaacatgacagagatatatgcagacatcattgtggagcatcagtacgtagagtgtacctcatcagtcatccaagcattggcattgttccgggagaagtaccctgggcatcggaaagatgaaatagatcaatgcatcaggaaagcaacagaattcatcgagaagttacagaatgatgatggatcatggtttggatcatggggtatttgcttcacgtatggaacatggcttgcaatagagggtctgtcagccgtggggcagtgttatgatgacagcacctgcattcggaaagcctgtaagttttttgtatcaaagcaactaacaaatggtggatggggggaagagtcatctctccattcaaaaccgg

SEQ ID NO: 14137 - DNA, 260 bp, Oryza sativa
  Clone ID: uC-osflcyp019g12b2
gttgtttttttaaaatccgtgttatcaaaccccacaaataccaccattcaacatgtcaaccatattttacactaggaatacctttctaccccgtaaaaaagggcaggaacaaaagaacattctctaaggtaccaaccaccactagctcaagagcctaggaaaagcctttacaaagggagggcaaaggatgggcaagccattctccgggcacaccactgcggcaagccgccaggtgaggcccaagatttttctgggggcgg

SEQ ID NO: 14138 - DNA, 420 bp, Oryza sativa
  Clone ID: uC-osflcyp019h07b1
tgtaatattgccagaaagaaacatgaaggacttggctgaggttccagcacccattctctctggcttggagattctgcttgtgaagcgcatcgaggaagcacttgaccatgcttttgaaggtggatgccctctgagaccacactccaagctatagcatcaaccaatctgaagatggcgtttgatctggtatactttcctgctggttatgtacctattttggagattcatccataaaacaaggttcagatttccatgaaagagcaactattccacgaggtagaatctcacgccaaacgcaggcttgcagcgctgctgccaatcaatttggttgagcaacattcggaatctgtatacgagttatacaaacagatgtgagttctgccttctggtgggcctgggtcccactgatatatatagagg

SEQ ID NO: 14139 - DNA, 334 bp, Oryza sativa
  Clone ID: uC-osflcyp019h08b2
aaaattgttgtttttttaagtaacgcggagagaaggccaaaccctccacactgcttgactcaaactttatgtcacacaacagaaacaaaaacgacgaatggcacacatgaaagactgaaagttggcactaatacagcactgaaataccgaacagaaggcacctacccataagacgcgagtggaatcacatctgaccctcaaacgtgcgatgagcgaatacccttatatatacgactttgccactggcatagcccatatctacagattttagagagctaatcgcaccagctttgacgacaagataaaacaggtaagtgacactccaaataaagcc

SEQ ID NO: 14140 - DNA, 485 bp, Oryza sativa
  Clone ID: uC-osflcyp020d01b1
tcttatgacccaaacgtgtctgcaacaaccatctctcttcctagtgcagcgagaagccggaagagaccggacgccatctggctgatcagtaccagcagcacataatggcggaagaatctctctatgtttggatcaaagcccatgacatagtatgtcatgcaaatccacacagcacattctaagaatgatattgggattttgagcacccatgtaggtaatgcatacgcccatgatggatagaaaagcaggtccctctgcttatagaatatcggcagctttgcaatgctcatggcgagctccgcaaatccattgaacaaatgtgtgactaatccaaggaacatagcacccaggaagatcgcaccatcttctacactgcgtcgatgcatctttgtacgcaggaagaccgtcattccgatgcttccaaggattatgagctggtacagatgtacctttcgtcagattttatttatggtcccgaagtagag

SEQ ID NO: 14141 - DNA, 477 bp, Oryza sativa
  Clone ID: uC-osflcyp020e05b1
tttttcacaccacccaccaactgagagctggggaggctttgcgagcggacatggctgcatcgctccaagccgcggccaccctgatgcagccggccaagctcggcggccgggcctcctccgccgcgctgccatcgcgcccgtcttcgcacgtcgccagggcgttcggcgtcgacaccggtgccgccggcaggatcacgtgctccctgcagtccgacatccgggaggtcgccaacaagtgcgccgatgccgccaagctcgccggcttcgccctcgccacctcagctctgctcgtctcgggcgccagcgcggagggcgtgccgaggaggcttaccttcgacgagattcagagtaagacgtacatggaggtgaagggaaccggcacggcgaaccagtgcccgacggtggagggcggcgtcgactccttcgccttcaaggccggcaagtacaacatgaagaagttctgcctggagccgacgt

SEQ ID NO: 14142 - DNA, 489 bp, Oryza sativa
  Clone ID: uC-osflcyp020f09b1
tcgtttctccccaatctcgcgaggctctgggcgtctttatcgaatcctctcgcgtcctcaagatgcagatctttgtgaagacattgaccggcaagactatcaccctcgaggtggagtcctctgacaccatcgataatgtcaaggctaagatccaagataaggagggcatccccccggaccagcagcgtctcatcttcgctggcaagcagctggaggatggcaggacccttgctgactacaacatccagaaggagtcgacccttcaccttgtcctccgcctccgtggtggcatgcagatctttgtcaagactctgaccggcaagactatcacccttgaggtggagtcttctgacaccatcgacaacgtcaaggccaagatccaggacaaagagggcatccccccagaccagcagcgtctcatcttcgccggcaagcagctggaggatggcaggacccttgctgactacaacatccagaaggagtccaccc

SEQ ID NO: 14143 - DNA, 321 bp, Oryza sativa
  Clone ID: uC-osflcyp021a03b1
gtattttaaaaaaaagagaaggcgaaaccccggatgggacgctatggacgacgccgccctccaccgccgctcgccggaagaacgcgccctcctctccccggcgctctgcgaccgcctcgtcaccaccaagccctactcgtagaccaccgcgccaccgccgccgacgtcgaaggcgtatgctaacaccaagacgttcttgatctacaagtgggaacccgactcccacacaactaaaccccacctaaaagactacaaggaggagcctcccgactgcggtccgggggggctcgacctgcagctaaagatcaaaaactaacagga

SEQ ID NO: 14144 - DNA, 414 bp, Oryza sativa
  Clone ID: uC-osflcyp021a04b2
tttgtgggttttttttttttttttttttttttttttttttttttttttttttttttggtttttttttttttttttttaacccaacatgggggcaaattattccccaatgaaaaaaatttttttaaaaaaacttaatcttttaccgggaacaaaaactaccggggcttaaaaaaaccggaaggttgcaaccccccccgcaaggggccaatggggggtagctacttatccttcccgaccccttttacaagggcatttttttcggcttcggcttcggctttggcttggccctgagcaatttttcctttggaattaatccccctgggctttttgagctccttaactaaagctgggagggacccgtcggcattgtcccccaaactcttgggcggaagggttttggggaactcccccggg

SEQ ID NO: 14145 - DNA, 319 bp, Oryza sativa
  Clone ID: uC-osflcyp021a12b2
ttgttttaatatcaatttgggtcttgtctgaacaattcactgatttcaataggagttttcaggaaacgatgacgaattacagcaaactacaacttcacacctcactaaccacgaagatatacatccaaatatccaatacacaaggaaaccgagatgagattgctcctcaagatggctcaaaatcgggctgtaacctgggagaacaacgatttgaagtcttttgttggtgtgcctgtgccttcaggctttgaagccaaatcaaatgccttgaactttgtctcttcatactgcagggcctgaacacaaacttcagcaacat

SEQ ID NO: 14146 - DNA, 519 bp, Oryza sativa
  Clone ID: uC-osflcyp021b07b1
atctataaagccgcccccgtctccgcaaggtgatcgtattcaatcagtttattcgatcgccggatacccgaggaagaagaagaagaagaaaagatgagctactacggccagcaacctcccgtcggcgtcccgccgcagcaaggttacccggggaaggacggctacccgccgccggggtacccaccggccggctacccgccggcgcagggctacccaccggctgggtaccccccgcagcagggctaccctccgccgtacgcgcagccgccgccccagcagcagcagcacagcagcggcccttccttcatggagggatgcttggctgccctctgctgctgctgtctcctggacgcctgcttctgaggatagaggcgacgggtgcaagagagctgaagagatttgtttcatggagctgatcaaaccgaactgctatgagaaaatgctggtagatttcgtgttcggattattaccctgtattcgccttggttatgaacctctctgacctgatttatttgatca

SEQ ID NO: 14147 - DNA, 526 bp, Oryza sativa
  Clone ID: uC-osflcyp021b08b2
ttgttttgcatccaaagaaatgaagcttaaatacgtagttgatgatatagctgcatcctctttctttaagcaccctattacaagcatattaaattgtacaagcaccttacttttaccgggcaaattgtcccattgctactttgttgttttcatacgactacttgggacagattattattacttgcctaataggacggatgttagaaatgcatatgttccaataaaataacaaaaggatgcagtagcttgtttggggttcatggtgaaatttctcgagggtttgcaagcagatggagaccattgtcgatatggagagtgaacattgttttatagattggctccttggattcatcttccagtctgaacttgaagaaatgtatcagggtagcagccatgatcttcatctgcctgtgtgcaaattctttccccaagcagatacgtggcccagcattgaaagacacaaacttgaacgggctctcttgctgataaactccattcacaagccatctttcaggccttgactcct

SEQ ID NO: 14148 - DNA, 258 bp, Oryza sativa
  unsure (1)..(258): unsure at all n locations
  Clone ID: uC-osflcyp021c04b2
gaaanaaaggggataattncattatgatatccagttatccacatatatggacaaagcggacaaatgccggcatttcatccgctaatgggaagaaaaggaatgaagatatttggtttatagctatcagggaaaaagacacaaaaaaatgtacatttgctgatttatggtcagcactatgcaaccatggtgatctcaaggcgcaagtatatatcatgtctgtaaatatatttttttcaaaaaaagctttccatttcattt

SEQ ID NO: 14149 - DNA, 512 bp, Oryza sativa
  unsure (1)..(512): unsure at all n locations
  Clone ID: uC-osflcyp021c12b2
gttgttttttttaatagcaaacacaccaagcactatataaataccaccacattgtatatgtacatatctagcagagcacacaaaggctcatccttattaacaccaacaacatgatgagcttccaatgtagcattaccagatgatagggcacatacaaatcacaccagaatgcgcttccaatcaaacccaaatgtttaggccttgcgaccagtagtatacacatataccattggttctctctctgaaagaaccattttacagttgcaagatgcaatgttcttgcttatttgaggtagtttcagctttctaggccgcaaccgcctcgcgcagtttgctgctgtccgctgatggcgtcaagctgtcgtagtattcaacaaggaccttccagccacccgggcacatgaatccgtcaggggggctttggcagttcttggcaagagtacgcatntttgtgccagagatgaacaggaaatcatctttccttgatggatcgaaaaagtccattttctttt

SEQ ID NO: 14150 - DNA, 520 bp, Oryza sativa
  unsure (1)..(520): unsure at all n locations
  Clone ID: uC-osflcyp021d08b2
tgccgccgccgccgcggcggtggccgcggtggaatcggatccgaggaacgaggtggaggaggacggcgaggagttcgcggtgtactgccggaggggaaaggggaggagaagggtggagatggaggaccggcatgtggccaaggtcgccctcggcggagaccccaaagtggccttttttggtgtattcgatggccacggcgggaagagcgcggcggagttcgtcgccgagaacatgcccaagttcatggccgaggagatgtgcaaggtggacggcggcgacagtggcgagactgaacaggcagtgaagcggtgctacctgaagacggacgaggaattcctcaagagggcggagagngggggcgcctgttgngtnaccgctttgctgcagaaaggtggcctcgttgtgtctaatgccggagattgccgtgccgtgctcagccgcgccgggaaggcagaggcgcttacctctgatcaccgggcctcgcgcgaggatgagagggaaagaattgagaatctgggt

SEQ ID NO: 14151 - DNA, 89 bp, Oryza sativa
  Clone ID: uC-osflcyp021e04b2
ggtttgtgggggtttgcgaaaattggggtggggttggcgtttaactgtgcgtgtttttatcatgagcttgggtttgtttttgcttcttt

SEQ ID NO: 14152 - DNA, 269 bp, Oryza sativa
  Clone ID: uC-osflcyp021e11b1
tcgttttcagctagaattactccaaaaccgggagggtctacatctaacttactgaggggatcacccggtcgcccatcgagagaactgacgaggaaggcacagaggcattaacaaccggacaaagagctccaccaactgtcactggtgaaatgactagatggccgagttcacgaggtactacggcaactacctatcataaaaataaacacaccacctcattatggagatacaaactgtactaccatcctcatggagagaacacaaggacg

SEQ ID NO: 14153 - DNA, 286 bp, Oryza sativa
  Clone ID: uC-osflcyp021e12b2
gtggttttgtgaacttgggtttcctgttctttcttcaaccttacccttaaatgctcagtattgtccttttcatcatcataacacattattttgttcttatcactctcacggatgtaaacaagcatgtaagcatttgaatactttgcgaatttaaatggttcttttgttgaaactcggatttatctttgaggcattctttttttcacccccgttttgctcttcaagggcacttcatagtatctttcttttagttacacgctcatcatctaatttatactcattgatc

SEQ ID NO: 14154 - DNA, 525 bp, Oryza sativa
  Clone ID: uC-osflcyp021f08b2
gccgatcgcacagcagctttgtgcggtcggggtggtctcggtgccgatggcgaggaagcagcatatcgccatattcaccacggcgagcctgccatggatgactggaactgccgtcaaccccctcttccgagcggcctacctcgcgaaggccggggactgggaggttacgctggtggttccatggctttcgaagggggaccagctgctggtttatcctaacaagatgaaattcagtgtgcccggggagcaagaaggctatgtgcgacggtggctcgaggagcgaattgggctgctgccgaagtttgagataaaattctatcctggaaagttctcaacggagaaaagaagcattctacctgctggggacatcacccagactgtatctgatgataaagcagaccttgcagttcttgaagagccagagcattttacatggtaccatcatggacgaaggtggaaaaacaaattcagaaaagttataggtgttggtcataccaactatttggagtatgtcaagagagagag

SEQ ID NO: 14155 - DNA, 500 bp, Oryza sativa
  unsure (1)..(500): unsure at all n locations
  Clone ID: uC-osflcyp021g04b2
ataaaaccaaccacattatatagtaaacattggcttcagagttcagatccacaaggttcacagccactatagcaagtacagataaggtagaagctaagtaacttgttccagcctcatatagcagttacagatagatagtttcactgccaaatagtacttgagacttcagcatctaagctagacacagcacatactaacatactaacatagctatatagcgcaactagaagcgcccgacagacacatgccgcttcttggatgtccagaatgtttattccatttgtccttatatatacaggcaccagttgctacaccccaaacccctcagtagaactcggccgacacgggcatgtcatcgaagctccaaaggtccatgctactggccacatcctgagatccatcagagctcagaagggtgtcaatcgactcatccgaaccaccatcgatcagaaatttcatgtacgggttcaggtnagaangatcaatgctagcattcccca

SEQ ID NO: 14156 - DNA, 509 bp, Oryza sativa
  Clone ID: uC-osflcyp021g12b2
tgtcgccgcgcggcgtttggaggccgggggggaatcggatccgaggaacgaggtggaggaggacggcgaggagttcgcggtgtactgccggaggggaaaggggaggagaagggtggagatggaggaccggcatgtggccaaggtcgccctcggcggagaccccaaagtggccttttttggtgtattcgatggccacggcgggaagagcgcggcggagttcgtcgccgagaacatgcccaagttcatggccgaggagatgtgcaaggtggacggcggcgacagtggcgagactgaacaggcagtgaagcggtgctacctgaagacggacgaggaattccttaagagggaggagagcgggggcgcctgctgcgtcaccgctttgctgcagaaaggtggcctcgttgtgtctaatgccggagattgccgtgccgtgtttagttgtgttgggaaggtagaggtgctcacctctgatcaccgggccttgtgcgaggatgagagggaaagaattg

SEQ ID NO: 14157 - DNA, 427 bp, Oryza sativa
  Clone ID: uC-osflcyp021h08b2
acttaacaatgtttttcaaattaataatcaataatcattacacagcgtaaacataatcgagctagattgcaaaaaatacgagcatgcaatcaaatcaactacaggtgattaaattaacgaactgcttattttgttacgacgtcgatcaatcgcctccaaacggtagccagttactgttgtaaaacacacaattaaatgagcttagagttcgtcgtggtggcggtgctcctcgtcatcatcatcttcgtcgtcgtcggtgaccttcttgatcttcttgggcgccgggttcggcgaggtcttgatggggtaggatgcttccatggcgatgccgcagagtccctccttggcggacacgtcgcgcttcattcggatgtagcccttcttaccccagtctgggccccacgagttcctgacgatccagtacttg

SEQ ID NO: 14158 - DNA, 193 bp, Oryza sativa
  Clone ID: uC-osflcyp022a04b2
cttaaacgttggaactgtcaaagcaaaagcagttctggtgcaagaacataaaaaggagctttcttgctgtccttgtttccacagcattaaagaataagcacagcacccttaacagccaatgacactaacacacaaacagttcctcttgttttcgaaggttggactaaccatgctacctatttctagcctaaat

SEQ ID NO: 14159 - DNA, 501 bp, Oryza sativa
  Clone ID: uC-osflcyp022a11b1
tttcgtttggaaacgcccctaacgactaactggaggggccccccccaaatcttgagatcgcacgatggatggacatacaaatggcactaatggttcctgctctaagccatgcgagccattaacagactactgcatccctgattacattctgaatcctgactctgaacaagtcctcgttgatcaggcaccatgttgccctgtagtagtattcatcaactctagaagtggcggccaactcggaagcagtttgatcaaaacgtatcctgagcttcttaataaagcgcaggtttttgatttatcagaagaggctcctgaaaaggcgcttcacagattgtattgcaactttgagaagctcaagtctaaaggctaccctactgcttttcaaattcagagcaacctaaaactaaatggtgctggtggcgatggcacaccaagtttggtgcttggtgtagtttagtgaccttaagctttttaacccaccttctattgcaactgtgcctt

SEQ ID NO: 14160 - DNA, 398 bp, Oryza sativa
  Clone ID: uC-osflcyp022b02b2
ggaagataaacaaccttaacaacaaaattggggggggttctatagagagaaacagagctacttccatacacgggatagaaccaaccaactgaaatgatgaaggggtgaaaaacagaaagaaggccccggaccccaacacccaggacaccgccgcgcgccgcgtaacccgagcccaatattttgaccccaaccacggggctggctatataacacaccggggagaacaccgagccacccccctgttacaaacggggttgcctggcaccctaaaaaggggcaccaatgccacaaccccggggccggcgacggggcccccctccctttaaaccgcgggggcgccccaaaaagggacgggtaaaagccgtcccccggcggaagaatgggagggcccgcctccg

SEQ ID NO: 14161 - DNA, 347 bp, Oryza sativa
  unsure (1)..(347): unsure at all n locations
  Clone ID: uC-osflcyp022b10b2
gacgaagatgtcggccgcctcaacgatcttgccggcgctgtccttggtgaggcagcccatgaagccgatgtcggcgacctgcacctggccgcagctgttggggcangccggttccagtgcattccgcacccgcccgggngcacccgacacgaagcttcttccaccttggcgacgttcacccagctaagcgcccgtctgcctttcgttcttcgatggattgggcctgggcccgcagaacctggntttgccgggtgcaacggccgaacgagggccccttttgaagccagcagccgaacggcctggcgggtgaagaaactttcttgaagccagcgggcttcgggaggagc

SEQ ID NO: 14162 - DNA, 476 bp, Oryza sativa
  Clone ID: uC-osflcyp022c03b1
gttaatctctgttggaagacctaaatggttggaatctgtggttgattggtatgatcaagatgaggaggcaaaacagttgctggctcaactgataatcaatctagtaggggtagaacatttcaccttgactaatggagtaatcaggttctagggaaaaatctggctgggtaagtttgttgaagcacaacatgcagtacttcttgctatgcatgccagtgggctaggaggacattctagaataacagccacctataatagaattaaaaatctattctattggccgggaatgaaaaaagatgtttaccagtatgtgtcatcctgtgacatctgtcagcaagccaaacctgaacattgtaagagtcctggtaaactacagcctttaccaattccagagcaagcttggtcaaccattagcatggatcttattgaaggtttacccaagtcagaaggctttgatacaattcttgtagtggttg

SEQ ID NO: 14163 - DNA, 146 bp, Oryza sativa
  Clone ID: uC-osflcyp022c06b2
aggacattaaatccactggcttataaatcatataagtcaataaactgacttaaaagtctaggccaataagcctaagccccaaacaaagagggccaaaattccctggaaataaccacgaaatttcctacaccgtccaagggatgccc

SEQ ID NO: 14164 - DNA, 472 bp, Oryza sativa
  Clone ID: uC-osflcyp022c11b1
gtgtgttcttctgcaattaatttaccttgtctttctccatttatatcacctatgtcaagtgggctacctgctccgataaaagtagctgctacagctaaaggtccctttgttcctcctgagaacctactaagatttcagcctgagactggctggaaaggctcagcagccacaagtgcatttcgtcctgcagaaccaaggaaaatttttgagatgactctcagcgcacctggcattccagtttctgatgctgcagataaacaccgcccagcacttgacattgacttaaatgtagcagatgagcaatttcttgaggaagatatctctcagagttctgttcagacaactggttcggaatctggcaacactagaagaagcaatggtcctgtacgaagtgttggtattgaacttgatttgaacagagctgatgaagttgcagagaaccattttgtgtcgacactcccacagggtcgaa

SEQ ID NO: 14165 - DNA, 392 bp, Oryza sativa
  Clone ID: uC-osflcyp022d02b2
agaccccttcaagactcgggcttttattaagttgaggggagggggaattttttagtctgaagaacagacaggtttttacccgacatttgaatggatcatgtattcagtactcatgtatgcagcaggagcagctgagtctgaggaagggctaaaactggcacaatatttgcctatgctggtctttgggttttacagaaagatgatctcaaacgatgtcttttttacaatcatacatgtatacgggtaatttttttcgggcacacacactattttttgcgcccagttgacccctgtaaaggcgatggccaccggtgcatcagtacacatatgaaatgttcgcccacccgggaaaggggtgccggttcaaatattatcaccagcatgcgcgacat

SEQ ID NO: 14166 - DNA, 405 bp, Oryza sativa
  Clone ID: uC-osflcyp022d10b2
atactagtatagtacagtttttacattagtttgaaggtgaaacagtacagagagcaaaattctacataagatagcatccataaactgacaaggaagtccagacttgctttgtagtttataccagatgaaagaaaagggttaaaattacaaaagaaagttaaaaagaaacctaacccccaaaaaagcctggtactttcttcaagctgccattttagctttgctttgctcaaagggcaattgttgcaatgacaccctccaaattatgcagtcctgtgctcttcttattctttttcactctagatcccccaggttctaaaactttttacatgacagagcaggcattcgggttttcgtcgctgaagatctgcgacgggtggtgcgaagggtgcgaacggtatggcgggt

SEQ ID NO: 14167 - DNA, 382 bp, Oryza sativa
  Clone ID: uC-osflcyp022e06b2
gtgtattaaatatggtcccatttaattcaatggcgcatgcaggaagtttcccccctcatggctgagtcccagccaacaaaaataaagtatgtccaccccaaaaaaatcgccccatttacaacaaatgattcgattattggaaaagacacattagtaccaccacggcaacatttaagctaggataacttggtttaaacttttgtgtaccaaaaccaactaccgatagtgtaagcagctggaacgttattatctccactcgagcaaatgataactccgcatattaacctccaactgaagacctttatattccaatctgcttttcgaacttctggatttgattcaagaatatccatgtcatcatcacatggggagcaatcctgac

SEQ ID NO: 14168 - DNA, 453 bp, Oryza sativa
  Clone ID: uC-osflcyp022f02b2
acaagtacattaactaaattgttttattccttgacctgacatgactcatgcacgctagtactcctcccgagttggatcgtaattaaccacgcaactaaattaaccgaagtcgtaattaatgcatgcgattatcgttgatgatcgagattaattagcctaacccctgattaattaaggggttaattaattagctttgcgggtctcgagtccgaatccgaatgggaagagcgggtcgtagtgctcgtcgccgacgttcatcggcagctgctccaccgaccggaaccacgtcctcgccagcttcccggtgaactcgtagtcgccgaacagcacgtcgctgacgccctgcccctccgtccccggcagccacgccgccaccagcgcgttgatggcgtccatgtacggctcgatcaccagcggccgcccggagaccaccaccaccacgcaccttacgcc

SEQ ID NO: 14169 - DNA, 433 bp, Oryza sativa
  Clone ID: uC-osflcyp022f07b1
ttgacgcgtgggcaaacccctctcactcccactaccatggatccttgcaagttccggccgtcgagctcgttcgacacgaagacgacgacgacgaacgcgggagctccggtgtggaacgacaacgaggcgctgacagtggggcccagggggccgatcctcctcgaggactaccacctgatcgagaaggtggcgcacttcgcccgggagcgcatcccggagcgcgtggtccacgcccgcggcgcctccgccaagggcttcttcgagtgcacccacgacgtcaccgacatcacctgcgccgacttcctccggtccccgggcgcccagacccccgtcatcgtccgcttctccaccgtcatccacgagcgcggcagcccggagacgatccgtgacccgcgcgggttcgccgtcaagttctacacccgcgagggcaact

SEQ ID NO: 14170 - DNA, 459 bp, Oryza sativa
  Clone ID: uC-osflcyp022f10b2
cacacggacagcaacggaacacttacattaacacggattagagacaggtgaattacaatgtaattgtatctagccatgcacagtgccaaagaggcagcaccgctagaataagacgcaaacgaatcagactaacaaaataagagtcaccagacacactgacaatatgctgagtatttttgacagatccaccaataagacgaatacagcaccatcatgagaaacatattgttccacaaaatacaccctactcagattgttcttataagcaaaagattaaaacccactactaacactacgacgcatgcttcatttgtcaaaggaatcgccgaggggaatttaagccctctcaccacgaatcctcctagccagctgaatgtccttaggcatgatggtcacacgcttggcatgaatggcgcacaggttggtgtcctcgaagagaccaacaaggtatgcctccgc

SEQ ID NO: 14171 - DNA, 466 bp, Oryza sativa
  Clone ID: uC-osflcyp022g06b2
agcaaaggtaccagctgcaatagtgacaggcaaaagttacatgcttcctttcgttcatcatgtgatgcagaagcttatgaattacatgggtgattttatgattcatattcagaaaaaaaatgatgattttacaccaccctacaagaatcatcagatcatgcgttttgttttctctttttcactgcgcaacaatcataatccttggacacttagatcctagtagacctcaacgtgccattgcttgttcttcttgagctgggatagcttctgctcccagctctcccctctctgctccgccactttcttgagggtgtcttgaatcccaggcatcatccccttcaaaccacagaagtagatgtgcgcgccgccatccaagagcttgaagatctcgtcgctgtactcctcgatcttgtcctggacatacatcttgccagcgttcttgtttttctgctccctgcttagcgct

SEQ ID NO: 14172 - DNA, 379 bp, Oryza sativa
  Clone ID: uC-osflcyp022g11b1
tttcggtagaatgcgatcatctggggcaaccactcattcactcagtaccctgatgttaaccacgtcactgtgaagactcccagtggagagaatcctgtcagggaacttcgtgatgatgatgagtggttaaatacggaattcatttttaccgttcagcatcgtggtgccgccctcatcaaggcgaggaagcaatccattgccctatctgctgccagctctgcttgcgatcacatttcgtgactgggttcttggcacttttgacgtaacatttgcctccatgggtgtgtcctctgatggttcgcatggtgtgcccgctgagctgatctactcgttcccagtaacatgcagtggtggccaatggacgattgttcagggtctc

SEQ ID NO: 14173 - DNA, 491 bp, Oryza sativa
  Clone ID: uC-osflcyp022h07b1
ttcaaagctgatgctgacaaaatggcaaccggactaatcaagcttgctcaagaagacccatcattccacttctctagagatgaggagaccaaccagactgttattgaaggaatgggagaattgcaccttgacatcattgttgacagattaaagagagaattcagggttgaagcaaatgttggagctccgcaagtcaactaccgtgaaagtatttccaagatttcagaagtacaatacgttcacaagaaacagtctggtggatctgggcaatttgcggacattattgtgcgattcgagcctttggaggctggaagtgggtatgaattcaagagtgaaataaagggaggggcagttccaaaagaatatgtaccaggcgtgatgaagggaattgaggaaagcttgcccaatggtgtccttgctggttaccctgttgtggacctccgagcggtgcctgttgatggctcataccatgatgttgattcaagtgtcct

SEQ ID NO: 14174 - DNA, 531 bp, Oryza sativa
  Clone ID: uC-osflcyp023a05b1
tgctggccgcctgcgggaccggcccggaacgcccggctggaccgacgcacgcgttatctttaaaaagtatggcactacaaggatgctgcgggaagtgttcagggcccattcacacttttacagcgtctgcaagtgggcagcttatttcccacgtgacctgagaatatggctaacatttgagagtgaacaaaactcactgcttttgaatgaagctctctcgaaacaacaaagagatttcattcaggcttgtcccaaaggtggcactcataggcgcacatgggaaggcgttcagcgctatcgaggtggctcacgtttgagtggaaatcactcttcctgtgctatagggtatgaggcgaccgagtcttgtgggcgggatcaagcactatgtagcgtatcgtgcattagcttgagaaggcccacaccttcccgcgcggaaccttgtcattcatgactagctcagaaacacataaggatccttatatgttgcatgggcaggcacagcataagggtgattattaatgtaacatcccg

SEQ ID NO: 14175 - DNA, 398 bp, Oryza sativa
  Clone ID: uC-osflcyp023a06b2
tcgcgatctagaaccagctttgcgtttgcactcctctcgatctccattcgtttttgagttcctcgtttgctccgcctctctttcactcatgggcaagattaagatcggaatcaatgggttcggccgcatcggcaggctggtggccagggtggcgctgcagagcgaggatgtcgagctcgttgccgtcaacgatcccttcatcaccaccgagtacatgacatacatgttcaagtatgacaccgtccacggccagtggaagcatcatgaggtcaaggtcaaggactccaagaccctcatctttggcacgaaagaggttgcggtgttcggctgcaggaaccctgaggagatcccatgggctgcggctggtgctgaatacgttgttgagtctactggtgttt

SEQ ID NO: 14176 - DNA, 455 bp, Oryza sativa
  Clone ID: uC-osflcyp023b02b2
aggtcaaagaaaaaagaaatccatgcaaatctgaccaactgacagcgaccatgcatggacagcgtcgtcgccgcaccaacactcgccgctcacgcgcgccgccgcttgacactattatactccgcgccgcgcggcgccgtcgccgtcggcggcgcgggtcagcgacgtgaacgtgaccaccggctcaagcggcagctcctccacgtcggcggcgaacgtgtcgtaccgccggaacagccccgccaccattagccgtcccaccggcaccaccatgtccttcccggggcactgcttgttcccctccgatggcgtcccggtctccggcccgttcgaccacaccacgtgctccagcagcggccgggcggcgcttccggcgccggagacgaaccggtcggggacgaactcgccggcgcggtcgaacaccttctcgtcgcgggtggcgagccgctggtacc

SEQ ID NO: 14177 - DNA, 255 bp, Oryza sativa
  Clone ID: uC-osflcyp023b10b2
caggcgcaaatacactgcgcatttacgataaactggcggtgctaggctttagctagctttaaccggcaatgagaaaccaaaatacccaagggattttctttagaaaaatgccacttggtagtaacaacttgtagctgaaaattacatcaaaagtgctctatacttggggcataaagcacagtacttcactgaaattttgacttcctagaacgttgctttgttacaactgaagatcgcataaacatgatttaatta

SEQ ID NO: 14178 - DNA, 385 bp, Oryza sativa
  Clone ID: uC-osflcyp023c06b2
tttggtttttttttttttttgggttggagtagaatgcatatgcccttgagaagggggagatgtggtgaagttcacagttacagctataccaaatcaccagacatacaataccagcttttcccaaataaataagacaataccagctttccccaaataaataaattataaagaaaaagaaaatactagcagccagccagcaccttgcatatgctggggttattttactactactcaaatcgtatgcagtatgatatgattgatagagcaagaaagggaggatgatggatggatgatcatagcctggagagcttgagctgctgcttgagcaaagggcggaggtgctcctggtaaccgtccggaacatccgtgtcgttgagggggtcct

SEQ ID NO: 14179 - DNA, 455 bp, Oryza sativa
  Clone ID: uC-osflcyp023d02b2
aataatagtagtagtagaggtaattcacattacaagttcttataacacgctaataatattacaagacataataataataataatgctactactactgtttacaacctgtaagatcagcagtagaaggtaataacagactttagaagagcaatggacgccacggccggagtaaccgaccagtgaccggccaccggagacgcacgccggacacaaaaacgccggctgccggtagcatcggcgtctccggttgaggaagaacaccaaccaaccctagcatctacagaggaaacaagtccggagagagatcgatctacgtacacaaacgaaccaaaccaaaaggattagggactataaaactgctaatccatgcccgtccgtgcggtgcagaatgtctaaaatcccatctgcacggcggcggcggcggcgacgattaggctaacgacggcgtgagtact

SEQ ID NO: 14180 - DNA, 397 bp, Oryza sativa
  Clone ID: uC-osflcyp023d10b2
ggacctgcggtgctacagcgcgtcgtacgccacgtcgtacaagccgggcgctggcgcggcagcgggggcggcggcgggggcggggacgaacacgacgacgaaggtgatgaagcgcgccacgagcgccaacgcgtggtcgcggccgggcggcggtggcggcgtgcagcggagcgggagcaccaagacggtggcgttctccgccgccgggtggggccaggggggcggcgggccgacgcccgggttcaacctgcggagctaccgcgcgtcgtacgccgcgttgtactcgccggtcgaggacccgagtccggcggagaagaccggcggccggggccgtggcgccgggacatgggccttttccgcggggcggttgttggtgaacctgggagggtacacgccg

SEQ ID NO: 14181 - DNA, 404 bp, Oryza sativa
  Clone ID: uC-osflcyp023e06b2
tttggttttttttttttttttgtcaaaaacactaccaaatgaacatttggtaaggcttttaattaaacaattagatactggtacaaactgacatatacatgtctatatatcacacaacacttagatagctcctctgtgcttccttattctgcagtactcttgagttgtaggaaacaactagagacttaaggcaatgggggcatataaagagtcttctcaagaattgaagggataatcactccttccatagttgaatttcacattttacaatcttccaataaataatgcaactgcgttggttgcaaataatagccatggtcacagccacgtatagtttagcttcgagaaggtttaaaaggctttttattcgaggtaacacacttttaaagaaagctcatgtgctt

SEQ ID NO: 14182 - DNA, 530 bp, Oryza sativa
  Clone ID: uC-osflcyp023f01b1
ctctctctctctcgcctgctcgcggttgcctgtgcggtcgtctcgcgatttctcctcctcctcctgggatcatggcgatgtggagggcggcggcggggcatcttctcggccgcgcgctcggctccagggccgcgcacacatcagcaggcagcaagaagatcgtgggtgtgttctacaagggcggcgagtacgccgacaagaatcccaacttcgtcggctgcgtggagggcgctctcggcatccgcgaatggcttgagtccaaggggcatcactacattgtcaccgacgacaaggaggggctaaacagcgagctggagaagcacattgaggatatgcatgtcttgatcaccacccctttccacccagcctatgttagcgcagaaaggatcaagaaggcaaagaacctcgagctgcttctcacagctgggattgggtcagatcatattgatctgccagcagctgctgcagcagggttaactgtggcagaggttaccgcaggtaacactgtgtcggtggcagaagatgagctc

SEQ ID NO: 14183 - DNA, 504 bp, Oryza sativa
  Clone ID: uC-osflcyp023f02b2
gtcaaggccagcagcgactgggtcatgaacagcatgatgaacggcaccgacagctacggcgtcaccaccggcttcggcgccacctcccaccgccgcaccaaggagggcggcgcgctccagagggagctcatcagattcctcaatgccggcgccttcggcaccggcaccgacggccacgttctgccggcggaggcgacgcgcgcggcgatgctcgtccgcatcaacaccctcctccagggttactccggcatccgcttcgagatcctcgaggccatcaccaagctgctcaatgccaacgtcacgccgtgcctgccgctccggggcaccatcaccgcctccggtgacttggtcccactgtcctacattgccggcctcatcaccggccgccagaactccgtggccgtcgccccggatggccgcaaggtgaccgccgccgaggcattcaagattgccggcattgagcacggcttcttcgagttgcagcctaaaggaggtcttgccatg

SEQ ID NO: 14184 - DNA, 434 bp, Oryza sativa
  Clone ID: uC-osflcyp023f09b1
tgcacctcccgcttccacgacgccatgcggaccatccacgccgtcgtggcggtggctggcgatgaaggggtggcgcagcgaggcgaggatggtgctcgaccggacgtcggacaccgccggccgaggctgagcagcggctgcaggagatcgaggacgtcgtcgccgccagctccgtcggcggcaacggcggcggtgcgcggaaggaggtggcgaccaagcccggcatgcagcgggtgctcaccatcgtgctgatgctgcagttcttccagcaagcctccgacatcgactccgtggtactgtacggcccgggcgtgctcgccgccgccggcgtgacgcccaacaccctcctcctgggcctcaacgtggtgttcggcgtcgccaaggcgagctccatcctcatcgccatggcgctcaccgcccgcgtgcggcgccgt

SEQ ID NO: 14185 - DNA, 481 bp, Oryza sativa
  Clone ID: uC-osflcyp023f10b2
tttgtttcttacaatggaaattgcaccacttaaggcatatataattaaaaaaccagatcagcaaaatttgtgtgcctcggtgtacaatacagatcaacagcttacaaaatctggcatgcaaatctaagctctcaccacgctatgaaaaatatcccctttgcaactgtaagctaggaaagaatatgaccacaacaggggaagaatttgggagccattcactgtccatttgttgtttattcaagccgtttctttgaatatacggggaagcacttcgtggatgctaatgtccaggagctcaggactcctgcataatactcgtcccttttcagttgtgctagggacaaaccatatcttccgcagaattggtgactcaaattgcacaaagaaaccatcactctggtcaagcttccattttcttgatccctgtcctttccagacctgagggtacgagatggcgctcttaggtgctaccatacaagca

SEQ ID NO: 14186 - DNA, 485 bp, Oryza sativa
  Clone ID: uC-osflcyp023g06b2
tttggtgttttttctttgaatatgttaaccaagcatcaatattgatcatacaaagttttacgaagacaacagtagataacgacaaagttgtacaatgtgaaagaaacagttcaaaatagaatgtagtaagcatgtgagtacattgtgcaactcattatgaaagcagttaatagtgcacttccctgctggacatttattttaaaaatgatgcaaaattaaccaacatcataagaacattgttaagataagatgccccttcaatttgtaaacatgatgttttagatgttaggtcattcaggtgaaacatcatatatacagcagcgcccacacaagaagctagatcaagagttagcaatttcctttgataagtgaaaactgtgaatatgccgggtccttattcatcttagaaacttattttaaaagcaaagtacatcatctttgaagtctaagataacagtaattaccaggtacaaatatctttgatg

SEQ ID NO: 14187 - DNA, 450 bp, Oryza sativa
  Clone ID: uC-osflcyp023h01b1
gtaaacctggtgttaccaactagagattatctttatgcaccatcatttgagaacctttgccgggctgctgacttcatccacagaaatgctttgtgtgggaagttgacatatgttcactgcaaagctggacgtggacggagcacaacagttgttctttgctacttggtgcaatacaaacaaatgactccggctgaagcttatgaacatgttcgcttgcgcaggccaagggtgctattagcttctgcacagcggcaggctgttgagcaattctaccagcttagggtgaagaaatctgggaaatccatttgcctggacagcccaataatgaaaccaccgctgttccttgccactcgcaacctcattgcatttgacgagaagacattcgtcatggtttccaaatcggacctcgaagggtatgatgcggatacctcggcccgtaacgtgggcagt

SEQ ID NO: 14188 - DNA, 365 bp, Oryza sativa
  Clone ID: uC-osflcyp023h02b2
ttttgttttttttttttttttgttttttgggcttggacttaccgaaaatagcaacttcttgatcttattactattaaaatagtcctgccttaggttatccaaatctattggaggtaaggttgacaatttctttgtagctcactgattcacgtggtcctggctcatttctttgaggctgtggaggtggttggatgactggtggttgaggctggattattggtatcatcctaggctctgatggtcttggcttctcaggctattagatccgagatggctattcatgttcttcttcgggaatagtttgaaactgtttgtaatccttgccttttgccaagcgaagtgccagttttttttggaaagaaaga

SEQ ID NO: 14189 - DNA, 445 bp, Oryza sativa
  Clone ID: uC-osflcyp023h10b2
tttgtttgtgactttctgggtggtttcttcatactaatataaaggaatacatacactccacggtttagtccatctcatcgccggcatgatctgttctaattaacagatcccaagatgaatttcgccctcggcagaaaaactatttacaaggctcttccgtctctcacaggctactaaacaaaaacacagaggaccaaaacatcggagagaaatatccatcaaagaagaaaataagagagaaactacaaagtcgtcagctaacccatcctgagctagttctctaccggcggcggccggttcagatccagatcgaaagctgccgccttgttcgccgtaaccgctggaggtgacggcgcgagatcaaccaccgacgaggagtcggagtcactttgtgcaaccgccgccacggtgaccggcggtgcaagcttcatcatacggtatccag

SEQ ID NO: 14190 - DNA, 313 bp, Oryza sativa
  Clone ID: uC-osflcyp024a06b2
ttttggttttttttttttttggggtttttttaagcaaaacgccatataggtaaaaggtttaattaacataggagtccagcagaaaataacaataaaaagatagcttggaattaaagccgttgttccaatttaccatacgcagtatttgattacaggaatcccaaaaaactactaccggtgccgggttttaatttttaaaaagcacaggttcaaattattgcgacaaaagtttttgatacccgtaagattggacgcttgatagccaaaccacacttataaccctaaatatgcatacggaggatgtccaatcgga

SEQ ID NO: 14191 - DNA, 388 bp, Oryza sativa
  Clone ID: uC-osflcyp024b02b2
ttgggtgttttttatttttttgggggtttcttcttttttttttttttttttttttttttttttttttttttttttttggacccaaaaggccccaaggcatttttaacaacccggccccaaacaaaaaatttcaattaccccgcccattattccaaacccccaaaaacaagaattaggttaagaacaaccttttcaaaataaaataaatttacacatgggggggggacaaatgaaaaaaaaggaacaaaagggaaaaaaaagaaaagctaaggaaggcctgcccatggttagcttcccagaccatgggggcccaccccccttttcaaaggggggcccaacaccgggggggagcccgggaacccccccaaacctggccttggggttgggg

SEQ ID NO: 14192 - DNA, 377 bp, Oryza sativa
  Clone ID: uC-osflcyp024b10b2
ggtgttttttttttttttgggggaaaaaaaaattacagctcaaattattaccaaatgcatcgatcgatcgatcaccaccaatattatgatacaggaaaagaatgcgataattaaccccaaaccaaaataacaaaaaaaaaaggcaatgcatgcagccctttgtgtcactgcagcgtgggccccacctccctcttgatcctccccttttgacagcgccactccacctaattatttcggtcccttggattctcgatcgcttcctttccacgccaaaaaaagccacacgtttcactgatccctggggcccaccttcttcatcccctaagcctagttgggaagtggatagccatccattcagaccgcccgatcgatcgatc

SEQ ID NO: 14193 - DNA, 445 bp, Oryza sativa
  Clone ID: uC-osflcyp024c03b1
aagtcgcgtcgcaccgaagcagagtagagaaggagaggagcggagcgccatcagccgtccgatcgagtgatccgatggctctcgctctctccacctctgctgctgctgccgctgccgccgcggcgcgggcgctcgcggcgagggtgacgacgacgaggggttacgccgcgtcggcggcgtcgtcggcgatgaggcgggcggcggcggcggtggaagggaagggcgctgcggggatgacgcaggcgaaggacgggtcgtcgtcgtcggcggcgagggaggtgtcgtgggtgcccgaccccgtgacgggccactaccggccctccaactcgccggcggcgccgacgccgtcgacctccgggccgcccacctcgcccgtagctacgcccgcgcgtgatgcgcgcgaacttcccgtcgtcaaccgacgacgacgccatccatccatata

SEQ ID NO: 14194 - DNA, 419 bp, Oryza sativa
  Clone ID: uC-osflcyp024c06b2
gctggcggccgtgctggcggcggcggcggcgagcgcggcggcgcgcgccgccgaggccgtgccgctgcacgacgcgctcgggctcgtcctcgcggaggacgtccgcgcgcccgaccccctccctcccttccgcgcctccatcaaggatgggtacgccgtcgtggcctccgacgggcccggggagtacccggtgattacggagtcgagggccggcgacgacgccctcggcgtggtcgtcacccccggcacggtggcgtatgtcacgaccggagggccgattccggatggtgctgacgccgtcgtgcaagtggaggacacggagcagctcgccggcgcgccggatgggtcgaagagggttaggatattggtgcggccaactcaggggcaggatatacgcaatgggggatgtgacataccaa

SEQ ID NO: 14195 - DNA, 435 bp, Oryza sativa
  Clone ID: uC-osflcyp024d02b2
ttttgttttagcttaaggtgtcaactgtcaacaacccattgcataaagctgttctacaatatataactgctacattttagtcaacctatactacagaagtatcagagtgagacatcagctgctgattatgtacacgtttcaggcatccagtacaacagtagcctgatttccagtaccagtgcagtctagatataaaaggtttgtgtgcaaaagaactcctaggttatacagaacattatccaccattcatcctgcacttgatgtctggtagcgttctccaatactgattcaaagattggggcagtactgcagccaaagtaccccacgattcaggcagaatgctcaagatctcttcctcttttcgctctttcgcagacgtcctcttcttcctttacggggcgtatcatgtatttgcagcttagcagcagcagtcac

SEQ ID NO: 14196 - DNA, 476 bp, Oryza sativa
  Clone ID: uC-osflcyp024d07b1
tacagcgatgcggccccgccgcagagacgcctccgcctccgactccgacgacgccgacgcgcgctcctcctcccctcgcccgcgccgccgccccgaccccgcgccgccgcgcgcgcccctcctcagcagcctcgtggtcaagctgcagccgcgggggccggaggaggagcacggcgcggccgaccggctggagcgccggcgcgatcccccgcccgccgcacgccgccccccgcgggagccctcgcctccagggttcatgcgccgccgggagtcgcgccagacgccgccgccgcagcagccgcacgcggtgccgaggcgccgcggcggcagcgcgtcccctcctccccctcgccgacgcgggagccccctggggtttcggcctaggtatccccagccccgtgaggagccacaaggatatcacccgcactcaggttccatgatacctccacgtggccgcggagtagaaagcagcaatt

SEQ ID NO: 14197 - DNA, 458 bp, Oryza sativa
  Clone ID: uC-osflcyp024d10b2
aggggttctaggggcggatgggatgccgggagggctactcgagacgattaatgttgataagaagatgctagttgacagggtgaggcaagctctgtatgcgtcaaagatttgcagctacgcgcaggggatgaaccttctgcgagcaaagagtgtggagaaggggtggaatcttaacctcgcagagcttgcaaggatttggaagggcgggtgcattatccgggcgaagtttcttgataggatcaagaaggcgtatgacaggaaccctgagctggccaatctgatcgtggacagggagtttgcaagggagatggttcagcggcagaatgcatggcggcgggttgtggctcgtgctgtggaggctgggattagcactccagggatgtctggtagcctttcatactttgacacctacaggtgtagtcggctgcctgcaaatctgatccaagcacagagagact

SEQ ID NO: 14198 - DNA, 446 bp, Oryza sativa
  Clone ID: uC-osflcyp024e06b2
tttgttttttttaagtatgggggttagacagctgctgttccgatataaaaaatattggtaaatcgttctacatcaaaacaggcctgtcttttacataccagagggctacctgctagtctatagtcacaaccactcccgcttcgtttttaataacacatctgtacttcacatttcatcccaacaactaacctatttgggctggatacatcgcaaaagatgggtcgttcgacccttctaccagctatgaagtaaagctccaattctatccgatacttgtactcttatacaagctggatcctaatgcactcccagcattcggctgtttcttttgtgaagtgaacaacatgttggcggcggcgatgattctttggacccattatgatggggggcttattgatgggctgatcctcgcaggctttggtaaggctcgcccccccccccccccc

SEQ ID NO: 14199 - DNA, 398 bp, Oryza sativa
  Clone ID: uC-osflcyp024f02b2
ttttggtttctgtgtaaaaatggagcaatggatcatgcaaagctaacatcagttattattggtacacatatctctactccacagaaactcccaatggaacctcttattgagcactccacaaatatggagcctgcaggtcactctgcgaggttccatctcaacttttcaaaactgtaagaacaaaaaatttaaaaggtacacgtcggtatcgtcgtgtctctctatgcctcggcgccgagttccaacatcaaggtgtggttcgcatcgttgcttccagggccactgaactggatgggaccagggctgatgtaatggttcttgagggaccactcatctcgcaatgaagcaaacttcttaaacggtgccccgtcaagttccaccatagccttcttgatcac

SEQ ID NO: 14200 - DNA, 473 bp, Oryza sativa
  Clone ID: uC-osflcyp024f07b1
tcattcaattgttcctacaacattgtgactgttggatgtgggcattgcacaatggtgctctccatggatcttgctccttttcaccaagcacgcactgttcaagatcaccaggtacagaacagaggatttcaaggtaataactttggaagctatgacatagcttccagaaatcagaggacatcgacagccatgtacccaatgccaaccagtcagcagcaagtgtcacctatacgtcgtatgcacaattaattttctcatgattttatttcattgatctactaaattatggggtttattttttatttctctatataagcatgcatgcaaaatgggtatatataatatagctaaaggttatatgtactgttctaggcttctaatgtataatcaaaatatataatagtcatcaagttcatgcatgacctatatatgaacctgatcacactgaattcccgtaaacattagtttttccc

SEQ ID NO: 14201 - DNA, 443 bp, Oryza sativa
  Clone ID: uC-osflcyp024f10b2
gaccacctgcggggcgtcccccgagaagggggcgcgccgccgacttcgcccgcgctgcggcggcgtctcttctcccaccacctactccagcttcggtcagtgctaaggcgacgagggtgtctggagccaaggtggctgccgccaggactgcggcggcggctgcggccatggggggctcggacaggagcaggaagcccgccaagaagggcggcgccgccgtgctgccggcggtgacgctcgcggggctcgaggcgtacgagcccgccgggagcatcgcggcggcgcagcgggagcacgtcgcgatggcgcaggcgcagcgcaagatgcggatcgcgcactacggccgcaccgcgtccttctcccgagtcgaagggaaagtcagcgctaccgcgacgggtgccgccgagctcgtcgccggtgccgtcaccgggcatgacgagaag

SEQ ID NO: 14202 - DNA, 411 bp, Oryza sativa
  Clone ID: uC-osflcyp024g03b1
gtgttgtactaactgatgaactgctctcatgcaagccagattaccataaagattgggtcataagcactgttgttagggtttctttcatgtagggaaaggaaaggtgatttcagttgcctgactgctgccagaatctgcgaagcatctacaagcgacgccgtcgttcaggcagccggcacggcaatgccggttccccttgctccatacccaaccccgcctgtgccatttacacctcccaatggggctcaaagccagctcgtgtgctctgggtgccgtaatctgctcatgtatccagccggagcaacgtcggtttgctgcgcagtttgcagtaccgcgactgctgtgcctgctcctggaaccgagatggcgcagttagtttgcggaggatgccacactctcctgatgtatata

SEQ ID NO: 14203 - DNA, 442 bp, Oryza sativa
  Clone ID: uC-osflcyp024g06b2
tttgggtgagaataacaaaggggaggaaacagatagtaatacaacattctttttcaagacaaatgacaaatacatctagcagaagttcaggctttggagatgtttgtttcgacgtgatatggctctttggtataaaggaagtaacattcagacgtttcgctctgtggtttgaacccgaaaaccttcaattgttgcacatgccggacgctcctccactcttcagagctggcatcctgcaaggatatcaggttgagcaagctcaagttgcagtttatgtgtaacctctttacctttgcctcctgtaagtaccccgggagcgtgtcagcatccaagtcctcccaaacgatgctccggactgcaggcaacctgtcaaacgccttcagctctgggcatctgaggatctcaatcttcgtcaagctcgagcagtttacaaccatctcta

SEQ ID NO: 14204 - DNA, 373 bp, Oryza sativa
  Clone ID: uC-osflcyp024h02b2
ttttgtttttttttttttttgggtttttttttttttttttttttaaaagggttaattaacataggagtcccgcagaaaataacaataaaaagatagcatggaattaaagccgttgctccaatttaccatacgcagcttttgattccaggaatcccaaaaaacttctaccggtgacaggttttaatttttaaaaagcccaggttcagatttttgcgacaaaagtttttgatacccgtaagattggacccttgatagccaaaccacacttaaaacccttaatatgcatacgggggatgtccaatcggatcttcagcccccaccagaggcagaccagtacttggaggccttgacgggaaggctttcaaaggcaccc

SEQ ID NO: 14205 - DNA, 436 bp, Oryza sativa
  Clone ID: uC-osflcyp024h10b2
gtgtttttttaattggggggggagcactggcacagatggaggtaacctttcaattctttttattctgttttatcatgtctaggatcagagatcctggaggcacccagtaccacatgcatttctgtatatcccttttgtgcacacaagactgacatattgaggagagcagtttgaagccggggtatcacaaaaggttgttgctctagaactccagcatgcggcctcggaggatagcctcagcttttctgacttcctgcactggtccaatgatgaataccctgtctggaggtccctttgcaccaccaatatggatttcaacattgcaagatgctttcacttccattattgatgatccttttctgccaataacacgccccattttgccaggaggcacatccaagactgacaggatatccacctcaggaacataaacatc

SEQ ID NO: 14206 - DNA, 533 bp, Oryza sativa
  Clone ID: uC-osflcyp025a09b1
ttcgtcctcaactttcttttttttctctccagatcctgtctggaacttgttcgcatattcttacccataacccatgcaacaaaaatgttcgagataatgatcatgcaaaatacacaaactccaccaaaggctaacgtgaggagatcgtgatcctgaacatgattaggatgattatctaattctcttcagaaaaatgcaaagttaagtcaggcctttaagaacaagggaggacatttaaatatgtgaagcgagaaaattattgataagcttatcaggcatccatttgtcaggtttagatacttttcaaatatctgacttttatgtttgccaggtttgcgttgttgacccttttctttttagataaaccgagtggaatacatgcattccaagggatttattcaccgtgatatcaagccagacaatttccttatcggcttaggccggaaagcgaaccaggtgtacataattgattatgggcttggtagaaatacaaggatctccagacccataacacattcctacagggagacaag

SEQ ID NO: 14207 - DNA, 455 bp, Oryza sativa
  Clone ID: uC-osflcyp025e09b1
gccagccagccatgcagcccgactccgcctcccaccgcatcgcccgcgtcgccgcccacctcagcccgtcgccgcgcccccagatggaggagggggtgaggccggcgccatgcagggccaagggcggcgcgccggggttcaaggtggccgtgctgggcgcggcgggagggatcgggcagccgctgtcgctgctcatgaagttgaacccgctcgtctctgtgctccacctctatgatgtcgtcaacacgcccggtgtcaccgccgatgtcagccacatggacaccaccgccgtggtccgtggtttccttgggcccaaccagcttgaggcagcacttacaggaatggatcttgtcattatccctgctggtctccccaggaaaccaggaatggacaagggatgatttgtcaacaaaaacgctgggattgtttgctactttgtgaaggcgttgtcaagt

SEQ ID NO: 14208 - DNA, 523 bp, Oryza sativa
  Clone ID: uC-osflcyp026a04b1
tttagagagcttgcggaagcgggggtttggtgcgggcgcgcgcgtgtgaggggggagagaaggccaggaggaggcgacgccgtcgcccgagggaggcaaaaatccgatcctcctcctgccctgctcgctcgctcgctcgcctgcgctgcgcgcacttggccccgtcccgtccgttcccgctcgccaggcatagaaagatggtgctctgggtcttcggctatggctccctgatctggaaccccggattcgacttcgatgagaagatcctgggcttcgtcaagggctacaaacgcaccttcaatcttgcttgcattgaccatcggggcacgccggagcatcctgcgaggacctgcacacttgagtccgacgaggaagccatatgctgggggattgcatactgtgtcaaaggggggcttaaaaaggagcaagatgcaatgaagtactcggaaagaagagagtgtgagtatgaccagaagatctctgtggatttctacaaggaaggagattctttgaaccagctgtg

SEQ ID NO: 14209 - DNA, 346 bp, Oryza sativa
  Clone ID: uC-osflcyp026a09a1
aaaaagaaaaaaaaaaaaatgcccacaccttcaacaaaaaaaaaaaacggaaaaacgaccaaaaaaatgaaaaaaaaaaaccccaaattttaaacaagaaaaaaaaaaaaaaaaaaatcaaaaaaaggaggaaaaaaaaaaatttttaaaactcccgccaaaaaacccaaaaaaggccccccccccaaaaaaaaaaaaaattttgaaaaaaaaattgaacaaaaaaagtttggccggggagcctcaaaaaacctcgaaccgccccccaaaagttgtgataaaacgaggcccaaaacctcttttttccaaaaaaatttttccaaaaaaaaaaagggttttggggggg

SEQ ID NO: 14210 - DNA, 343 bp, Oryza sativa
  unsure (1)..(343): unsure at all n locations
  Clone ID: uC-osflcyp026b05a1
gtaaacataatatcccggtacctgtttaaataggtgcaagtcggcacacgagaagggccaaacacgtacctatacatgggaaaaccatgtttcccaaggtatttttttaattctgttatacccttattacaacaaacaatgcgattacgcaaagcccagccctaataaggagcaatggtgttgncggcttcgccattgacgggatggcatttcgctagccagactcaatctgtagaggatggtcggctgcccggaacacgtactgaactctgaatctcaatatctttcagaagaggagagctgagcttcgtcagactaggtagtcgtagtacaccagcaagag

SEQ ID NO: 14211 - DNA, 346 bp, Oryza sativa
  Clone ID: uC-osflcyp026b08b1
tatctgacttgctcaattatttaaatttgagagtcatgggcgcttcaatagggcgagaaaggataggttactgatgaggtctatccagaataggctggatctgagcgacgcaagcgaataacacacaggattaatgcgtgaagtggacgagattgtgcattttgctttgaaggcgcgagctgaggcacttagctgtggactacggtgattggcgctggagccgtggagtatgtgcatgtgcgcatccagcggctcaacaggagaaaggggctaactcctgagcatgggatagaggaggagtacagcaggcgcgagagtcctgatgggaggggaacaggagatttgc

SEQ ID NO: 14212 - DNA, 187 bp, Oryza sativa
  Clone ID: uC-osflcyp026c01a1
acgcgtacgaagcctgattctgacttccgtcgcctttttttgtttttgtttttttttttttttttttttggtaggaaaagaaaggatacaaaccagcacagccaaacgaagggagtgcatacattttttttttctgcaccaccgcctctactgtcgctaacgaaccgaactaccactcccatgccta

SEQ ID NO: 14213 - DNA, 423 bp, Oryza sativa
  Clone ID: uC-osflcyp026c09a1
acgacaaaccacgaacttggatattaaagatgccacaaagaaggttcacataaacaacacaggtcacagcagcgaaagctacaagcaaaccctgcataatcgaaaagcaaatgtttttcaaaaccagacacacaaactgatagatagaagcccacacggacagatcataggatagcagcagtaatcaagcattgccaaggcaccaggcaagaaccctgaacctttttagtactcggcacccttatcaccctcgtcaccatcgtcgaactcggagccgacctcctcgtagtccttctccagcgcggggaggtcctcgcgggcctcggagaactcccccttcttcatgcccttgccgacgtaccagtggacgaaggcgcgcttggagtacatgagggcgaacttgatgtcgatgcgggagaacac

SEQ ID NO: 14214 - DNA, 473 bp, Oryza sativa
  unsure (1)..(473): unsure at all n locations
  Clone ID: uC-osflcyp026d05a1
gatagaatcatggagtttatgttataaattctgaatcaagtattttacattcatgtacaacatacgcgttgctacactttgaaaacatggctccggggagtattagaagttattctaaccactcagggcaattctgaatcctacattnaacaccttgatgaagctagttaggttacaatctactcggaaagtcatcaaacctttattcccgtccagcaatgattctaagtgggatgagggnntctggtctatctttactaacatatcgatgaactctgtaaatctactcatttaaccaggctaatttctcatttcattgatatttgcgatgcgccataacggagcaatgcaaattttcatttaacaagcagcggcaattagaatctcgccttctagaaacacattcgaacaacctcccatctttccgactgaaatatgtcaggtctcctccatggccttgtaatactaagatg

SEQ ID NO: 14215 - DNA, 462 bp, Oryza sativa
  unsure (1)..(462): unsure at all n locations
  Clone ID: uC-osflcyp026e01a1
agcaatgctagtcaataaagctaatttcacctttgaacgggaatggggaagcaatggagtagagaattacaggagaaggtggcagctgaggagagaatcaggagctgtcacaaagctatatacaagttgggaagctgaacgagaagagagcatatgcttccctcctacaggaagcattatgacttgttggtgctgttttacaaatctgggtgattatcggaagatcgtcatgcggtagcagctgcannttcttctgcgacttgggatccctgttgcagagcgcagatgaggttgcgatccccgtacacattgtccacgcgacatgttgatggccagaacttggcgccccgaagccacgctgcagggaacgcagcatactccctggagtacggcttagtccatgagtcgctcatcagaagttggggcgggtgaggagcactcttgaggacgttgttgttcaca

SEQ ID NO: 14216 - DNA, 204 bp, Oryza sativa
  Clone ID: uC-osflcyp026e04b1
taatttttaaaaaaaaaaaaaaaaaaaaaaagagggggaaattaaaaaaaaatatacggttaagcccaataaggggggcacatgcttatgggggcggcttgcttgggggttctgtggtgtgccgcgtccctcggcgtcgttgtctggttttttgtgttcccccggggctcctgttcctgccgcggggggccgcggtggccgccg

SEQ ID NO: 14217 - DNA, 387 bp, Oryza sativa
  Clone ID: uC-osflcyp026e09a1
gtatgttgccaggaaagtttaaggaccaaaaagcccgcccccacaaaaacaggggggcggccacaaaaaaaggggagagaaaaggggggacaaacccaaaaaaagggggaccgagagcctggggcaaggaaacaaaccaccaagatgaagccaccccccaaaacaaaaaaaaggaaaacatatttggcggggagaggaacccccaaagaacatgggaagaaagggaacaccttgccgcgggggaaacaccacaaaaaccaaaagtcccgggcacccccctacccaatggggcaagggtcaaaaaagaaaaaacgcccccaaaaccaaaaaaaggggaaaagcccccagcggggggaaaaaaacccccccccccagggggggggaacc

SEQ ID NO: 14218 - DNA, 364 bp, Oryza sativa
  unsure (1)..(364): unsure at all n locations
  Clone ID: uC-osflcyp026f05a1
gtttttgttttttttttttttttttttttttttttttttcaaaaatggatgttttaaattatttaaagggttaaaactaaaagtcaagttttagaaacagcagggccaaataaaagcatccaancatccatccaacaccaagataaaaattggagggctttaagttccaggaaaactaaaaaggggcccacacatgttgggcccattgggggaaaaaactactttttttttcccaaacaacatttcccaaaaacacagggcgaaattggcccccttctagggggagggccaaagggatggggctgagctaaacccatttaaccccttttaacctaacctaaaaatggaaaccccctggaaaagg

SEQ ID NO: 14219 - DNA, 373 bp, Oryza sativa
  Clone ID: uC-osflcyp026f08b1
ttttctctccacgcgtgcgatggtcgccgtcaccatggtcctcttgtccccggcgctggccggcaaggccgtcgcgaaggtgttcggcaaggggcgcatgaccatgcgcaagtcggcggccaagcccaagcccggcccgtcgggcagcccgtggtacggggtctaccgcgtgctctacctcggcccgctctccggctagccgaccagctacctgaccggcgagttccccggcgactacgggtgggacaccgcggggctctacaccgacccggagaccttcgccaagaaccgggtgctggaggtgatccactccaggtgggcgatgctcggcgcgctgggctgcgtgctcccggagctcctcgtccggaacggc

SEQ ID NO: 14220 - DNA, 449 bp, Oryza sativa
  Clone ID: uC-osflcyp026g01a1
agcactgtaagtactcgcattccacaacaaccgaagggcaacaataggactcagaacatccaagtttttaaccgaatagaaataaacgagttttaaacgactaacatagtgcacattgcgagcagatattaacggtccatgcaacgagtaccatggccgtgggcaaaacttaacgaacgctaagatatctcaaatgcagccagcataaccaccacttcaacgatgctcatttcttcttggcggcagccttggtcaccttggcaccggttgggtccttcttctccacgtttttgatgacgccaacagccaccgtttgcctcatgtcacgcacggcaaaacgaccaagaggagggtactcagagacggtcttcacaaccatggccttggagggaatcactctaaccataccagcatcaccggggttgaggaacttgggctgcttctacagc

SEQ ID NO: 14221 - DNA, 451 bp, Oryza sativa
  Clone ID: uC-osflcyp026g04b1
ttttattcttcgtcgtagcactgatgaaaagaccatgttaccgcaagcacctctaggcaacgcaggcaagaaagttcggttgttccatggaattcctggattccctctctgacgcgccacaagatcttcagaacctcgtaataaccgcgaggtttctgactgtcccacggtggatccgagggctgaaccacctcgcctacttgcagatcacggtctgcaaactaaccccagatgatgtaaaacttcttgggagcttgcacaggttggagtgcctcgtgctgggcttggatttcctcccgaaagaagccaccctgatccaaggtcagggcttcataagtcaagaagaagaagaagaagaagaagaagaagaagatgaagaagaagaagagaacatggggatctggttccgtgagctcctgagattgtccgtcgattgcccggtgccatggct

SEQ ID NO: 14222 - DNA, 462 bp, Oryza sativa
  Clone ID: uC-osflcyp026g09a1
catgaagattttctttttttagtgttttacagcaaaggcttcaaattttaagtgttctgtagcaaaatttgccaaatatctttggataaaataaggaacccgacatcacagtacaataaaaaaaaataccgattctacagcaaactgtactgcgctatcaatccgaatcctgatacagccacacataacaagagaaaaatcttattacaattgcaggaaaacgagttaggcagagagattatcaaagaacttcatgtagtcatcaaatgactctccacgccgaatcttagcaatggacccatcatcttctacccaatattcaggtgggcgcaacttcaagttgtaggttgaagccatgctcatgcagaaagctcctgcgtcatgaaccaccataccagctcccttatcaggtgttggaagtgccctgtgtttgccccgggaccctgctgattcacaaactgg

SEQ ID NO: 14223 - DNA, 497 bp, Oryza sativa
  unsure (1)..(497): unsure at all n locations
  Clone ID: uC-osflcyp026g12b1
tataaaagtgaaaggcctgggagcgaagcgggtgagaatggcagggaaagccggcggcctcaagggcgtcgccctcatcggcggcgccggcggcaacagcgcggtcgccggcgccctccacttcttccaggacccctccaccgggtataccgaggtgagggggagggtcaccggcctcgctccgggcctccatggcttccacatccactcctttggcgacaccaccaacggctgcaactctaccgggccccattttaatcctcacaataagtcccatggggcaccatctgatgatgaaagacatgtgggcgacctgggaaacatagtagccaacaaagatggtgttgcagatatcttcataaaggacctacagatttcactaagcgggcctcattccatattgggaagggcagttgttgttcatgctgattctgatgacctaggaaggngtggtcatgaactcagtaaaacaacaggaaatgcangagcaagattgg

SEQ ID NO: 14224 - DNA, 123 bp, Oryza sativa
  Clone ID: uC-osflcyp026h05a1
cgttaaaaggggatgaaaacaattgggagacagttaacttaggaaggaaatattccttagcaacaaagccaaacacttggcccttcctatcagacgatcagactgaccgggttctaaaattca

SEQ ID NO: 14225 - DNA, 152 bp, Oryza sativa
  Clone ID: uC-osflcyp027a01a1
gagacggagggggtgctaatgcctaattaacaatggggacgtggacagacaacttaactaccacggtcaaatgggtcaaaccacctagaaccagtacaaagggaagagcaccccccactaaatcaaagactaattaaaccctgcgtgggggg

SEQ ID NO: 14226 - DNA, 398 bp, Oryza sativa
  Clone ID: uC-osflcyp027a09a1
ctcacgttcatcacatcgaggaagtccaaatttcattacaccgtttctcagaatctgtaatgcagagagagcatacataagcataacaattatgaccacaaccctatcttgaccaaacccaaaataagcagagttaatgtacaatgtaattttagagcgtctactagattgtttacagccaatgcttctggggctagccatcccattagcagaaaacaaaaaccatggaagccaagagaccaattcagaagtgatgaaacagcagatctagatacaactgtaatacatatatgaacacagcctaccatatcgtctgtcgagtggacaaaattcgaactcgtaaagtcaggatattgtcatggtatttggtagattttctccagtccaggtctcagatt

SEQ ID NO: 14227 - DNA, 400 bp, Oryza sativa
  Clone ID: uC-osflcyp027b05a1
acgattacacgatagatacatggtatgtgggttctaaacttttattatcctcacacgttagtacatgtaataatagcgttattatggtaaaggatgtgaacacgtccactacacacgctgacttaacctgccacggtttcaccgatcgtcatcttctcctcccttctcctgcgttccgccgccggcggcggcggcggaggcggggacttgccggcggaggtagtcctccttcccgaggcacgagtccgggacgacgacgccgacgctcttcccgaacgcgtggtggcagtaggcggacgcgttctgcccgccggccatggtgatgttcacgttctccagcgacagcttgctgcacggcgccgcctcgctgcacgcgaacgtcaccgcccgctccgacgcc

SEQ ID NO: 14228 - DNA, 314 bp, Oryza sativa
  Clone ID: uC-osflcyp027c01a1
gttgagtgcttgtgcttcacggaaaaagaaaaaaaaaatgaaagggggtcctactgaactagtagcagaacactagttatagagctgaattctgaacgcatctatggtgaggccatatggagatggaggcagcaatgaaactgaggaaactttgattcgaatcgcgtttaagggagaacagtccgtacttatggtgctagtaacagcaagttacattggttcaggtagggtggaggtatgacgaacaggctaggatacccggggctttattgaggcccccgggttgggccctgcctgggccctgggcctttagc

SEQ ID NO: 14229 - DNA, 399 bp, Oryza sativa
  Clone ID: uC-osflcyp027c09a1
tttgttttttttttttttttttttttttttttttttttttttttttttttttttttttttttttttttttttttataagttataaaaaatattatattttatggaaataattataatatatgggcagaaaaaaaaaaaacaacgaaaaaagccaaaaaaaaaaaaaagagggtcccccaaagggggaaaaagatattttgaaaaaaaaaggggggtaaaatgggaaaaaaagggagggtttaaaaaaaaaaaacgccttaatagaacaaacaaagctgaagaaggggcccccccttggaggtaaaaaacagcacatttaaacgcaaaaagggggcacaacggggcccaacctcaaaagggaacccaggggggggtaaaaacacccaagggtggtaagcc

SEQ ID NO: 14230 - DNA, 380 bp, Oryza sativa
  Clone ID: uC-osflcyp027d05a1
tttttgtggttttttatttttttttgtttttttttttgttgtttattgttaattttattacaatttacaacatgaaatgtacttgcatagcgtaaacatggacattgaaaaaaacgctgtttatgaccagctaaaagccagtcaaacgcaaaccaccacagttactacagggctaacaaaaaactgatcatgccataaggggtatagcaaaaggctgtatcagatgcatttagatggtcgctaaaatgtaacaagcgtcggcaaactggaggttgttctagcatattgcaaaaaatggacaaaacaagaattaaagaaactagctggccctaaaaaaccatttgaaaacatgcaagctggatctagctgcccttttctga

SEQ ID NO: 14231 - DNA, 412 bp, Oryza sativa
  Clone ID: uC-osflcyp027e01a1
gtagttaactttgatcttttaggaagtgaagtccaaaacagaatcaagaaattgtatagatggtggtggctggcaaccataatatggcatctgaaaaattttgaaaccagtagcactatatcatgatgatgcctgttttctgcccagggggagagctcacttctttccatcaacagcacggagggagccaagctgcaccggcgcctgagtctgcactaccttggatgacccgtaggccgacaagtcgacgccctaggccttattcttctcgagctgctccttgatccagaagtatgtgatcctcagaccatccttcagcctcatggttggagcccaggcaagcttcattttgatgagcgtgttgtccgagttgcgaccacggacaccctttggcccggtgatgtggaggatg

SEQ ID NO: 14232 - DNA, 290 bp, Oryza sativa
  Clone ID: uC-osflcyp027e09a1
agttattaataaatgtacaatttgatggccggctaacgaacaaacaaaaaacaaacacagtggaacccacaataaattaaatttggactcacccccctcatctagcctttaatgacataccacattttttccctccccctccccggggcggggccggaaaacctaaatacctatcccctccccctgagctggggggcgggtgcgagctgcgggcgcctgtgcgaaggtggtcgcttacgccggggaggaagaaggacgccccgggcatgaacagcaggtgggggggggaa

SEQ ID NO: 14233 - DNA, 285 bp, Oryza sativa
  Clone ID: uC-osflcyp027f05a1
aaaaagggggaaaaaaaatttacaaccaaaatttccccaatttgcccccccaaaaaaaaccctttgttggggggaaaaaagtaaaaaaagaccaaaaacggacacaacggggggtacccaaaaccgtccgggggggcctccattaaaacggaaaacttttttaaaaaggggaaacccccccaaattttggggggccttttaaaaaagggggggtaaaaaaaaacccgggtttttgggttttgggcctcccaaaaaataaaaaaaaattttctttaaccgaggggc

SEQ ID NO: 14234 - DNA, 283 bp, Oryza sativa
  Clone ID: uC-osflcyp027g07b1
tgtacattttactttgacgagaagcatgttgatgcttctcgaatacaagggccctataacaacatctgcttcagtagtaaggggtgtcacctcttttgcagctgttgcttctgggaaattgaatatccctggtgagaaaatactgggtttggcgaagttttttcttggtttagggctaccaggtagcgcaaaggatttccttaaccagattgagttattatcattcttggaaaacaattgggttatttgttcctttggtccttttactttctttcattgttat

SEQ ID NO: 14235 - DNA, 394 bp, Oryza sativa
  Clone ID: uC-osflcyp027g11a1
ggtacatggagatgccatctcaattctcaagctaggatggtaaaaaaatccacaatacagttcaacacaacagggccaacagctaacaaagaagcaagacatgattcatgcgaaacatacagttcaacacaacagctagcaaacaagcacgactaactcattacatttatataataccatgatgatacacgaaggatgcatagaaccggacggaatttctcctgtcctcaaagagatgaataaggcggtaggtgccccttctcccgtaggcatatcagtgtgttgtacaaactttcttttatgggggtgaatgtgaggcccaagtctcttagcctttgattagagaacttgaaaggttggaccatctgcttgctgtcttcacacttgttacagg

SEQ ID NO: 14236 - DNA, 486 bp, Oryza sativa
  unsure (1)..(486): unsure at all n locations
  Clone ID: uC-osflcyp027h03b1
ttgctcatttgtctctaccgatcaacatcaggtatacaataccacatgtttctcgttctgactatggatctgccagcctgggtttatcccatgattcctgttctcaccatggatctccgagttattatcatagctctttgggccagcaacgttcttacctgatgcaccgcaccgagtcagggccaagcctgtctactatggtgctccagtcgccacaatagagtcagtagcagtacaatggcgaatcagcagaagtctatcagctgcggtttaactcgatcattacgtcaggcctatgtacagcattgtcttgattctgatggaagcttgtctgctgtgacatggatcagtcgctccaagatgctgattgatctacgaagntcactgtttcatgagcatttgtgcacgcccctgctagatttgtctctgggagatgcaaataaaacagaaaaatcctatgcgacacataactggcaggttcatgca

SEQ ID NO: 14237 - DNA, 306 bp, Oryza sativa
  Clone ID: uC-osflcyp027h07a1
aaaggatatttgcaaaatttatattaaacctttctcgatagacctaccactgggccaattttgactacatacgaacaggtttacgaaggactttcaaactactaaacaccaagcataaactccacaactgaatcctgacgcctctggagattttacaagttccacacaggaattgcaaagcaacgggcttaaacaaaccaaccgattcatgtaaaacacgataagaagtcacgatactgattacctaggttcacaagcgatcattaggaggaggcactcttgaagttgcggcgaccaagtataagg

SEQ ID NO: 14238 - DNA, 426 bp, Oryza sativa
  Clone ID: uC-osflcyp028a03a1
ggctgtagcactagcgtgcccatatttatattccaagcctccaaggtatacaatacatatttgatgtaccgaacaactgaaaaaggcgcttggtttggaagcgcactatttttaaatttataggataacttctgacagcctttcttctaaatgaacttttggcaaccgctctgaagccgtgtaacacaatccaacaaagcaatttgcagtcaaaatttcgggcatgtgccgttctagttagaatttaggatgtgactcactaagtaattgtgattgtttctctatgcaaacaccagccaacagtattgatttcatcatgcataatctggcatgaccttcttgaggaatttaattggttgggattcctcaggcgcaacctcatcaaagggaacatagtatctatccttgtcgtaaacatggcattta

SEQ ID NO: 14239 - DNA, 546 bp, Oryza sativa
  Clone ID: uC-osflcyp028a04b1
tagaggatcgagaacaagatcaaccggcaggtgacgttcgccaagcgcaggaatggcctgctcaagaaggcgtacgagctctccgtcctctgcgacgccgaggtcgccctcatcatcttctccaaccgcggcaagctctacgagttctgcagcacccagagcatgactaaaacgcttgagaagtatcagaaatgcagttacgcaggacccgaaacagctgtccaaaatagagaaagtgagcaattgaaagctagccgcaatgaatacctcaaactgaaggcaagggttgaaaatttacaacggactcaaagaaatttgctgggtgaagatcttgattcattaggcataaaagagctcgagagcctagagaagcagcttgattcatccctgaagcacgtcagaactacaaggacaaaacatctggttgaccaactgacggagcttcagagaaaggaacaaatggtttctgaagcacatagatgccttaggagaaaactgaaggaagcaaccatgttcctggcagcaaggggggagcagggctgaact

SEQ ID NO: 14240 - DNA, 260 bp, Oryza sativa
  Clone ID: uC-osflcyp028a11a1
ttttggggttttttaaaaaattgtttttttttttttttttttttttgatgataacatttttatttaatattctgccaaatcaaaatctccaatggtacagcccactacattgctaaatgagggaactactcttggttcttgcagatctcatcttggccccagtacacaacagacctaaccctaaacactatagcgggctcaaaaccaaaccagactgaactttgggaaacaagaactactttcctttttcaccacccaaa

SEQ ID NO: 14241 - DNA, 306 bp, Oryza sativa
  Clone ID: uC-osflcyp028b07a1
ttttgttgtttttttttttatttgttttttattttttgtgttattttttttttgtcttcttttttttttttttatttaaatcacacatgctcttttttttttgtttcacattctttatggacagaaaaaaatccctggaggacgaggtgtcccaagggcgggtgggggctgcagacctaaacacaggaggtatttaccggggccaaaaaagtttgtatgtacagcatactgcgggaggacggtatggcatacaaaacgaaaaggcgggtgacatactgtgggtaaacggacgaattggcctcccca

SEQ ID NO: 14242 - DNA, 51 bp, Oryza sativa
  Clone ID: uC-osflcyp028b08b1
tcttctcttcgggagagatggtggggaagagcggggtggcggaggagggct

SEQ ID NO: 14243 - DNA, 445 bp, Oryza sativa
  Clone ID: uC-osflcyp028c03a1
ataattaattcacaacaccatatttcattgatcaggttcagaacctgcacagaaatacacactaccggtacagatctcaccttctttccaatactcgtacatccatccacgcggtccacacgaatacgtacatctatacggtacacgtacgtacatctactggaccgggtacacacacgcacacttttctgcagagacgcgcatcgtcgtcaacctagctagcttagctgaaggcgatgcgtcgccatggcagcacggcggcggcggcgctcacttgccggggacgaagttggtggcgtaggcccaggcgttgttgttgacggggtcggcgaggtggtcggcgaggttctcgagggggcccttgccggtgacgatggcctggacgaagaagccgaacatggagaacatggcgaggcggccgttcttgatctccttcaccttgagc

SEQ ID NO: 14244 - DNA, 426 bp, Oryza sativa
  Clone ID: uC-osflcyp028c04b1
ttccattctcctctctctcctgcttctctctctcctcctcttcttcacctccttgtctgtccatagatcgagccgctcagaccaaatcttggatgcgttctctcttctttctcgctgcgagggaggcgggttgttcgatctgcgggtgaaatcgagcgagaggtgtgatttttgtttctcttgtttgtttcttgaagttgaaatcttgtccgtgtttgtttgttttttttttttgttttccctcttcgtaatcatccggtcgcgaggagatttactttgggttggtcgccgatttgcttcaagatccctagacctgcccctacttctctgtagctgtacatatttcaagagaggaaattttgggctggtttctgatacggttcgagaagatttttgcaatttcttccgattttcctcccttggggg

SEQ ID NO: 14245 - DNA, 495 bp, Oryza sativa
  Clone ID: uC-osflcyp028c11a1
cttcgatgctgccattctatcaatatgtaagagcagcgcacaaattttttcagcagatgagctaaaggacagaaccattttaactcatataaaaatactatacaggttaattgcactgtttataactataagcttcggttactgcttgctctcagctctgccttcagtgtcattgaggagtcagaaatgaacttgctgaaagtgaaattcttgagccaagattatgatagtgaccacaaaaatgttcagaaagattaccccagcactccataagaccacagctatatatctgtgcacatcttttcagctgcagtttgttcatttcagatcaatgaaaaaacactgcttattctgtagaatggagagaccttcagtagagaaatggaaaaggctcagagttctcaaccatgggatcattacctcctgcatgatttgctgccaaattctcctccttctaaagcccgatttatatattgacggagcttgatgccctga

SEQ ID NO: 14246 - DNA, 453 bp, Oryza sativa
  Clone ID: uC-osflcyp028d07a1
ttttgttttttttttttttttttttttttttttttttttttttttttttttttttttttgggaatccaggaaccgggtggggtttcttccccctttggtttggatacactatatatacaggtatgctaagttgctaactatggaaaaatgtttttggataaagaacactgcagcatatatgaaactacccagggacagccggggttgaaagcttaggcaacccactttggccattcagaacaattacctttcccttcgaatccacattgacaatgggggaatcgcccttctttacctccccaggtaggattttttccgggagggtgtcctccaggagcctaatgatggcccttcttagcggcctcgcaccatagcttgggttgaagccttcggcgacgatacccttcttgaacttttgggggacctggagacaatgtccttggccttgagcct

SEQ ID NO: 14247 - DNA, 448 bp, Oryza sativa
  Clone ID: uC-osflcyp028d08b1
tcttgctgggaaccagtttgctggaaatgtgccatactcaatttccacaatgcctaaacttaagtatctaaaccttaatcataaccaattacaaggaaatatgacagatgtcttttccaaccttccaagtttatcaacacttgatctctccttaaattctcttactggtgatctcccacaaagtttcacttctctgtcaagcctgaaaactttgtatctgcagaacaaccaatttactggatcaatcaatgtccttgctaatcttcccctggataatttaaatgtgggaaacaaccgttttactggttggattcctaatgagctaaagaaaataaatagtcttcaaaccgatggcaattcttggagcacaggtccggcaccaccaccaccaccattcacagcacctccaccatcacgcaaccgtaaaaaaagcccaggcagacactcc

SEQ ID NO: 14248 - DNA, 297 bp, Oryza sativa
  Clone ID: uC-osflcyp028e03a1
gggtgtggcaatccctttaacccctttttcctttactgttggaccgaaagagcaccacaccaacgaacacggggacaaccagcttaggggggacaaacaagcgcaatcaggggtacaacaaaccgccgctgggggaaacagaacccgaagggatactcggggatactcctggggaccccccggaacacgggtaggcagaaaggggttcgtgaaaaacaacaaactagagggcgggcaaattcttggccttgggaaaaaaccccatggacacgggccccgcgaactggttgaacaggt

SEQ ID NO: 14249 - DNA, 502 bp, Oryza sativa
  Clone ID: uC-osflcyp028e04b1
tatcgtcctcgtcctcggcatcagcagcagcaagggaagggaaggattcgccgcccgcgaggtcgtcgcctccccttccggcttccgtccaggattttccatggacggcgcggccgactccggcacggcgggcgccgcggcggcggcggccaagtggcggaccgatgcctcgcgggcgttccagtactacctggaccgctccaccccgcacgccacggggcgctggatcggcaccctcgccgacgccgtcatctacgccctccgcgtttacctcgtccagggcttctacatcgtcacctacggcctggggatctacctgctcaacctcctcatcggcttcctctcccccatgggcgaccccgaggcccacggccgtgtcttcttcgacggggccgtccttcccaccctggggttcgacgagttcaagcccttcatcaggcgcctccccgagttcaagttctggtatgcaatcacaaaggctttcttatagcttttgtgagac

SEQ ID NO: 14250 - DNA, 454 bp, Oryza sativa
  Clone ID: uC-osflcyp028f07a1
ttttgtttttttatttattgtgttaaattgatttttatagcattagtaagcttattgttacaaattattaacatgaagatctcaaaatatagaacataagggagtaaacaaaactgaacaaccaaacaactacagtactgtacatgcctggaatcctacatgaggcgactgatctaggagaatgctgataagcatagatactgggcaagggaagggagcctgggcagtcagactcgcgggaagcgagaaggttctctccttccaaggaacttaggaatctcaatcatgctgccttgtgcagaggatgggcgtcgaccattgtctacttgcgtctgttggccacactttgtggtgcgaccttctggttcatcttgaccttccgagccagtggcaatcaaggttatgctcacttggccattgagcgatgggtctatgacagcaccaaatatgagat

SEQ ID NO: 14251 - DNA, 371 bp, Oryza sativa
  Clone ID: uC-osflcyp028g03a1
aggggggacagtatggtatagcctccaaacatatgccaattgtaacaatgacaacttacaactccattatgttcaattggtctctccagtcccaaaacaaatgccatttaagctaatggtacaagctgcaactttaacaatgtgctgtgtggtttggcttcatgcaagatcgaaaaccatggctgaatacctactatcatagaagaccatgggttctgcacactttgcttttcaagactgacagaagtcacatatgactcaaaaaaatgaagttccacagcagttaaaagtgcatatgctgaggcatttcagcttgaaattactgttgaagatttcctgacaaagtgaagggaataacagcacaaatttac

SEQ ID NO: 14252 - DNA, 233 bp, Oryza sativa
  Clone ID: uC-osflcyp028g11a1
aaaaaaaacccccaactctttgggggggaaaaaaaaacaaagtttttatagcggcggttttcaaagacggggttttcaaaaaaaaaaaaaaaaaagcggccgtggaaaaaaaaaaatttgaccccggggtttcttgggggggggggggccccacaacaaaatttttgaaaaaagggggggggggaaaagttggcgacaacggggggggaaaagggaaaaaacatggggggggg

SEQ ID NO: 14253 - DNA, 458 bp, Oryza sativa
  Clone ID: uC-osflcyp028h07a1
ctcttttttttttttggttgatgaacatcacggggtgccaagcataacttgtctttttttttttcgtctcaagtatctagttgccgaaaacgttcgatatcgcaaaaaactatggaccgcatttgcctaagccctttgaaggctcgaacccatgctttttcacaaacaatgtaagaacctataggctacagcaacaatcggggggccacaaccatggttaactgggtacttcaggaaaccaaaagttcacccataaatggagggaggttaagtgccagaatttcccttgaaagggacttagataactgtgctggtatcgaaactggaatccatgtatattcattctatactcaaccgtgagcttacaggtacacatctttaccaggcaccacttcacaggatcgggttggtcagattggaatttttacccagtatacattgaacgagttctttatgag

SEQ ID NO: 14254 - DNA, 488 bp, Oryza sativa
  Clone ID: uC-osflcyp029a03a1
gacagcatctgtttacgttttatgacttctttgaaggttatttacaccagggaagaaaaaacacgcaaaatgaagagcgctcaagattgggaaaagtggctaaaaaaacaacaggctgctgctatgccgcggcactaaagaagaagagtagacaagaagattctttacagtatactatgtgatgctccttgtccccctcccttttcctttatcctgtcccgtctccgatatgttgtatctttacatgacgatgcacttctctttcttcggcgtcgtcggctgtggagcacgtggcctccttgccgttgttggaccaacaactaatcctggccgacctgtgccatgtgattgattgggtgtctgctggtgctgctggggcaccggctcctgctgctgtgatgacgactggggtcgtaaggttgttgccgctcaaactcctgttgatgaagtgctatagctagctctagatcagagtttccagactagtg

SEQ ID NO: 14255 - DNA, 250 bp, Oryza sativa
  Clone ID: uC-osflcyp029a10b1
tttaatttcgtgaccagtgcgagctttgcggggagggggtacattgtggagacggcaccaacacataacctgatgacccagatgttggccattaagttcaacgttcaggtgccttggacgtctccacctgaagggcaagaaggaggcatcggtgctccgatcagggtagaaaaatgccaacgaggctggcgacctggacggcgcgcggatctacgccgtagcacttgtccgcaagcgcaccgagcacatg

SEQ ID NO: 14256 - DNA, 105 bp, Oryza sativa
  Clone ID: uC-osflcyp029a11a1
cctctttttttttgggggtttttttaatttgtggggttaaaacccgcttaattttttcctcaaggccccggattaaactgaaattctattttcaattggaagcag

SEQ ID NO: 14257 - DNA, 485 bp, Oryza sativa
  Clone ID: uC-osflcyp029b07a1
atatgaacacttccacgcaacaagaaagcgaagaaattgttttgaatttcgaagaaacaactgatagtaggtttgatacagtttttgcactacgctgttactgcacatgggagcagaacatattctcgtagagatatacaaacatcacacagaggaagcagcagcaagcactctagagagtcagcccccaaaacttccccggacaaatgcagctgcttaattactccgttccagcgatcttcttcttcaaggtctcgatgtcggtcgccaactctttcctgctctccttgaagaggaggtagcggtagacgaaccagccggtgtagccgaggccgacgagctccaggatcttggggagcagcggcacggagttgatggcgccgacgacgacggtggtgagccagagggcgacgacggcgccgccgctgtagaggaggaacgtcggcttgtcctcgatcgcctcccactttgccttgaggtcggcg

SEQ ID NO: 14258 - DNA, 245 bp, Oryza sativa
  Clone ID: uC-osflcyp029c03a1
tttttttttttttttttttttttttttttttttattttttttttttttttttttttttattatttttttttttttgttgttaataattatttaataaacattgctatcaaaagaaagaagaaagaaaaaaattaaaaaaaaaaagaagaaaaaaaaaaggggaaaaagaaaaaaacgaagaaaaagaaataaaggggaaaggacctggaaaaagaagaaaacacgcccaaaacgtgggggcactc

SEQ ID NO: 14259 - DNA, 311 bp, Oryza sativa
  Clone ID: uC-osflcyp029c10b1
acgagggaatggcatcatcatcatcatatatgtagcaaataaacatggaacatgctattgttctttattcagacaccgaacaattaactaatcatgtataatatagaagtttgctaaattaacatagacactctataagggaatctctcagtcagcagagcccaacacttccaagctccaaacccagaaacatacaaaagctttttctgacttctgcaacttccctggtaagagtaatatgcagcagcacaagaacagagtctttaggatcattttttccagccacaacatcgcagtccttacttcagctt

SEQ ID NO: 14260 - DNA, 502 bp, Oryza sativa
  unsure (1)..(502): unsure at all n locations
  Clone ID: uC-osflcyp029c11a1
gagaataaaagcatgtgtggattatctgcagggtaatgctagttctacagcatataaatctgaaatctcacttgattttgcaatctacagcagttctcagtttatgtatcaatcagggaagtaatatgaatgacaggtgaacttgtggaggctaccacagggtaatgagctcctctgggaaggtaaccatgccacgaccgagcatacactatgctgtagcctgtagggtcgtccggtgttagattgcacagtgaaggatgatgaaatcatccatagccactcatcccaagcaatcatccagctaagttagccaatcatatcagatgcaaccgtcacggccagccaatctcggaggtggagaacatggcagtgacaggcctgcacatcagattgaagagtgtagatcatcaaaatctacccactttctctcctgcagtaccctgngagaaggtatctgtaccgatcaacattctgtagcagatagctaggaagatgaacagca

SEQ ID NO: 14261 - DNA, 429 bp, Oryza sativa
  Clone ID: uC-osflcyp029d07a1
cagcaataatggccacaatttcaacgggattttttaacatagcaccacatttaaccaggcccaagcctaacaaaggcccacatggtcaacaacaacacattacatgtccatcaaaagcaagagctttcacaggcccacgtaaaatctttaaacctgaaactgaaggccacctttccctacttacggagtataaggtggggatatataaccagccggttaaaaaacgggaggggaatcacaccaacacgaagatttacccgatgacccgatgtaataaattaaactccaagggcccccattggtttcatatagagaaatgatgggcatttttctgtttcttccccactgaaattgcacggggaggggggaaactggggaaggtatatacagtgttcgaaaacttaagaaacgaagtcccatgaaaataaa

SEQ ID NO: 14262 - DNA, 465 bp, Oryza sativa
  Clone ID: uC-osflcyp029e03a1
gttagaaagcacaacaattcttatttgatagaagtttgctaatgtacagatggcttccacaatggagagaaaggtaccaaatgctgtaagatcaacacatccaccaccattacttacagggttggtggtaaaaataacaattactgaataataattgcattaatgcatccaaattacttggaatcacaatagcaggcaatcaggaatgctaatgatactatatatacatatgcaaatcctatttactcctaagcaacggagagagggccgaagcgtcatcaatcttggtgttcaggacttcttacctaaatctgggcaccagacaagaacgccaaggctcctaccaaaacacaaaacaatttggaacggcatgcatttgccagaatgcctattccaggcggtcttgacagtcttgggaacttcctgggacttggaggtaaaataccactacaattaaagacaaaa

SEQ ID NO: 14263 - DNA, 352 bp, Oryza sativa
  Clone ID: uC-osflcyp029e11a1
atgatcaaatcaagatgctttcaaattccaattcagaaaatagagatgtgtacaggggaagggggaatggagcatactgcatacacaccatcaagctagacaaactgacagaacctaacagacacgcatgaaacttataggaagctagctaaactctaccggtagctgcacatcgatccaacattttcgtcatcatcattggcaaacacgcatagacccacttctttattgtaaccaactgactagcttcatcgcgttctttatctgcatattttttattcttcagtaactcaaaagtttggtccagcagcgaggatcttggctgtcaggctgctgcttccccgatcttgta

SEQ ID NO: 14264 - DNA, 456 bp, Oryza sativa
  Clone ID: uC-osflcyp029f07a1
aagagttctaaaattttaatcccttctcaaattccaagggagtacaccaagcactataagcttgctacttgctacaatgtatacacacacaaacacaaccctagctagctacccagtatatacatactgtacttggacacagcttaattaatttaattgaattgattaattagaccttgaccaagggcgagccggtgaggaactcggtgaaggcgagggcgacaaggccgagcatggcgaaacggccgttccagagctcggggtcggcgcttatcacgccgccgttcctcgcctccgggctttcgccggggagcagcggcaccagcgacgccccggagagcacggtggcggtggcggaaaaccacgcgagcccgtccccgctgccggcctgctccaggagcccgttcgcccgggacgccttcacggtgagcgccgacacgaaccccaccattgcca

SEQ ID NO: 14265 - DNA, 533 bp, Oryza sativa
  Clone ID: uC-osflcyp029g03a1
acactattgaagagctatcacggcagtgcagcacgcgcgcaagcgcgggtgactctatatcgggcgccctcttttttttttttttgtttgtgattttaatgtttgttttatttattgtatctggtgtacagtgaagcaagctttacttttacggatcatacattcatcgcaaattaacagctctaagccagaacacaataaatgcttgcaacgacgagatgacagacgagcgggataagcatgatgacgaccaatgctgcaccaccgaacacgctcagagaccaccactgccgcacaggacaaggtggagggggtacctcaaactgaaggcataaaatgcaagagttccagaattgagggcccgcctgccggacaagatgacgcaccattacgcactgtggttgcccaaggggacactggatcttggactgtgaaaaatctgacgtgaaggacgactaaagcaagaaagcgatcgtcttgccactgacggtcatgaggaagatctacatgccttcactaaggcgcaagacaag

SEQ ID NO: 14266 - DNA, 503 bp, Oryza sativa
  Clone ID: uC-osflcyp029g10b1
gagagaagcaccggcggtcaataattaaaaaaaaaagaaaaaaatggctttcagaaaccatgacgctgccatggtcctcttcttcttcctcctcatggtgactacctacgccaacgcgcacggacacagcaagaagcccgaggagatcactcagggcgtttacggggcggcggcggcggtggcggccggccccggcggcacgttcgacatcaccaacctcggcgccgtcggcaacggcagggcggacagcaccggcgcggtgatggcggcgtggaggtcggcgtgcgccggcgccgggaagcagacgatcctgatcccaagggagatttcatgacgggggcgatggagctcaggggcccctgcaatggcgccgtgaccatccagctcgacggcaacctgctgggctccaacgacctcagcaagtacccgggcaagaagatgcccaactgggtcgaggtccgccatgtcgacaacttcgtcatctccgggcagggcaagctcga

SEQ ID NO: 14267 - DNA, 468 bp, Oryza sativa
  Clone ID: uC-osflcyp029g11a1
cactaacgtgcactctcaacattcatcatgcatacaccaaattgaaaaggggacgtgactctcaaaaagatggaaagggagcgtgcaccaacaccatctctgaccagagagtgtcggtagaactgggcaattccctcgtgttcatacttcgtgtagtaactttgcagaggatgaattcaaagcgcgtgaactagctagactctgatgtttatctggtacatcattgagtaattacattgctgagcaaatgccataaaacaactcagataatacagcaaatggatgataccctactagttgatcaagattattcgttcaggtagatggttatccttgctctagagtttattgtcagattctgcacatctgaaactatcctccaaaaccatgtttttgcattaggtgcattattatactgagatgtgctgattctactagggaactttgatgcatgcatgaactcacttg

SEQ ID NO: 14268 - DNA, 378 bp, Oryza sativa
  unsure (1)..(378): unsure at all n locations
  Clone ID: uC-osflcyp029h07a1
ggaggaaagtgagacatattactatatttaaaaacttttggcatcagtcagtgagaaaaatccagaaatcaatatatcctatgggaagaacgtagctataaacaaaggtatttacacggataaccacaaagcgttttttttcagatcgagccaaataaccagccttcgaggccggccaagaaacctagccttccatgcaggctcctaactatcatagacaaatccacatttgatggacagcttctgggctggctcattgttgatggcaacatgcacatacagaacagttgtaccccattcacgagccaggttcttagaattggcaacgagggcataacccaattcatttntttgaagctgcttagcaacacaaacatt

SEQ ID NO: 14269 - DNA, 437 bp, Oryza sativa
  Clone ID: uC-osflcyp030a03a1
ggccaacccatcttgcattgctcttcttccaagtcgaattcctgcagctcgaatcgaggttgagaatcgaatcgatcgattaaaattcacatgaatcttatcatgccacggcgggcatgtccttgagccaggcgtcaagcggtttgccgatggagtaaaacgaggattgcggtctccctgggctactcatgataaacaccgtgggcagcactgaacacgtactaagattttgcaggaaacagctcatagatatacatgactggaatagatccggataccggatgaccagattcaccggtagttgcggtaaagtgggctgtacatgcagctctctgcatacttaaccaggtcctttggccgaggcgcctgcttgccaaaccaagttcatatgcctttgctgcaacgttggctgcaatgtgggcaaaatctttctgatg

SEQ ID NO: 14270 - DNA, 336 bp, Oryza sativa
  Clone ID: uC-osflcyp030a11a1
gggacaacatgcagttcataaaacgtataggattacacgtccgcacagatcgggtccatactgaagaaaattaagatagaacatgcccccagggggcgtgcaacataaagtatacagctgatacaaaaagagaggggagcgctgcatgtctgccgcagctgttattttaattactttgttcatatatgctgaaacaaggacgtgcttaattactagctgatcaactccgattgagctagcatgttaagctcgatcgatcgatccaagcaggattgatttaactgaccttgttgcaatcggtggaaaggctgatggggaagccaacgttgacccccc

SEQ ID NO: 14271 - DNA, 336 bp, Oryza sativa
  Clone ID: uC-osflcyp030b04b1
ttcaagacacgccctactcggagttcaaccacaggttccaagagctcggtttggagaagggttggggtgactgcgcaaagcgtgtgcttgacaccatccacttgcttcttgaccttcttgaggcccctgatccggccaacttggagaagttccttggaactattccaatgatgttcaatggttgtatcctggcttcgcatggatactttgcccaatccaatgtgttgggataccctgatactggtggtcagggtgtgtacattttggaccaagttcgcgctttggagaatgagatgcttttgaggatcaagcagcaagggcttgatattacaccta

SEQ ID NO: 14272 - DNA, 463 bp, Oryza sativa
  Clone ID: uC-osflcyp030b07a1
ttttaacttgacccaattcacttgtcatgtatttttggtaagaacaacactgccatgtagtttcacagaatacagcaccttttcttcattgttgattcctatcctaaacgaaaacaaaaaaacagctcattattggttgctcacatcgtcacacggctgcggggatggccaaatatccttgcaagctaaggtacaacataacgtggccagacaatttgctcaacaggagcaagagcatatcccccatgactcacttgaaggtattttacctgagaactctagctctacaacttctccctgacataacataagtagtctgcttacacctcgaagatcagcttcctgaacttctccatgtgctcagcctgcaatgagatggctatggataggctaccatccttgttcgcgcttgggaggacaaacgccagcccttataggcgatgccaccaggacccatgacact

SEQ ID NO: 14273 - DNA, 385 bp, Oryza sativa
  Clone ID: uC-osflcyp030c03a1
cagcaatcacaatatttcataaaaagagtcaaaactatgtaaccaaacaaccagtttgatacagtgatgatatatgcaaggttcaggcctcatgatttctgcattgcgagtcctgaacagatctcagatcaagcagtaaacatcagtactgaatcagtagcttggtacataaagttcatcacgaagagcaagctacttggagtgatggtttcagactcagtctgaaggaacaaggtagttgatgaaagcttcggctttaggagcaagtgtcttcatggtctcccgtgttgccatttcgttgtcctcaaactggaatgctggagcacaggttacaccgacgaaagagtagtgaagttcagggtctcttcctggcgttttgacaaat

SEQ ID NO: 14274 - DNA, 120 bp, Oryza sativa
  Clone ID: uC-osflcyp030c06b1
tttttctcttggtagctagctagtggagatcgccggagaggagagagacgacgagagagagagagagggggcaagatggcgggagggttctctgtgtcggggtcccgggtggagtttgag

SEQ ID NO: 14275 - DNA, 361 bp, Oryza sativa
  Clone ID: uC-osflcyp030c11a1
tttttgtttttttttttttttttttttttttttttttgtttttttttcgtttttttgttttttttttttgtgttggttgccgtgttcatgagcttgttttgcacgatgttgccgccggcgctgtcgccggcgatgaacagaaaaaaaacgtcgccgtgcaaagaagccagccagcgtgcgaaaaagccggccacaaaagcccggcccaggaatacgacgccggccgacggaagagggggcgccggcgcgaggtggatagcgaccagcaccccaacaacggggggggcaagagccagggggttgacacacctgggggacggggaggagtcggacaactcgcagaggaagccacctggggggg

SEQ ID NO: 14276 - DNA, 339 bp, Oryza sativa
  Clone ID: uC-osflcyp030d07a1
gggttatgggggtatgaatctattgaccatgaaaggttcaacagcttttcatcaggcaagattgaaaaaaaagggggaggggtggaaaattctagcagcagggggccaatttcttggtataaaagaaagggggcgcaaaaggggccctaaattgggccacaaaaaaatgggtctatgaacttggaacccccaacactgggtttacagcacaatcaggggatggatctagcacacattaacctcagggaacccgggccctctcaagagttatctatttgggggccaggtccccaaatgaaaagatgaaaaaggctcccattggtgaaaacgacccaccat

SEQ ID NO: 14277 - DNA, 272 bp, Oryza sativa
  Clone ID: uC-osflcyp030e03a1
ggccggaacaattttattggtgataacacatcggcaaggaaaacacacaagcttattacgggggaaaaacccttaacaaaaagacacggccccaatagaaaggacatgtggacccaaacataccagaggtgctcaagacaaagataagagttggaagcggcgtggtagaaaaagaatacataacaaatgaaatcaagaaggagcataaaaacgcagcgaaaaacaaaccaagccaaccatcctcaacaacaacaacaccattgacaaaagtt

SEQ ID NO: 14278 - DNA, 489 bp, Oryza sativa
  Clone ID: uC-osflcyp030e11a1
aaaagggagctagtacaaagcctcaatacacactggagtaaaaccagcaacggcatctgcgctccacatctcgcgatgtgcagcggtctgagataaacagtttctatgtgatggaacttaaaagtctcttttattcaaaaacacgggagcgggcaatcgctcactatctgtccctctgggtattgcttagttttagttgaggcatgagtaagcgagcgtcttctcctccgacagctcctgggcagtcgcgtccatcttcttccttgagaactcgtcgatcgggagaccctgaacaatcgtccattcgccaccactgcatgttactgggaacgagtagatcagaccagcaggcacaccatacgaaccatcagagtacacacccatggagacaaatgttccctcaggagtgccaagaacccagtcacgaatgtgatcgcatgcagagctggcagcagatagggcactggattgcttcctcgccttgatgat

SEQ ID NO: 14279 - DNA, 356 bp, Oryza sativa
  Clone ID: uC-osflcyp030f07a1
aaggttaagatcaccatcaacttttgaaaaaacaactttgcataagcatctactacatccagcagcatgaaacataatgttcaaggtatcagactttggaagatacttaaatactaggccaaacggttcgtatttcaaaattcagctaacacctccactggtttcactaagacgaccacacttcaagccaggtgttcacttctttgccttcttaggtgccgctgcagtttgagcaggagctgccgctggaagagctgctggctctcttgggccctgagccaaccctttctcccttctaacaatctttctctcacggatttgcttgctcttggcacgcttagcctcaaactggtcag

SEQ ID NO: 14280 - DNA, 260 bp, Oryza sativa
  Clone ID: uC-osflcyp030f09a1
aaaataagcaaaaaattccctcgatcgaacacacacacccccacaattaagggacatacatacatgcactggtgaaactgcaactgcaggggcggggcggggctaccacaagggtccacatggtaccttggttggcaccattctcgaacgggtcgttgggcttacttgccggggacaaatttgggggggtatgcccaggcgttgttggcaacgggggcgggaacagggtccaaaaaagttctcaaaggggcccttgccgg

SEQ ID NO: 14281 - DNA, 472 bp, Oryza sativa
  Clone ID: uC-osflcyp030g05a1
ggaagtaagaatcaagagccattttaatgtgcacatgagtagccaaaattccctactattgcccccagataggttaaaatatacatccgggccataattccaccaatatttttttgttcataccacaggattccctttcgttcaaaggtctacgatttccacatacctagagaattcaggccaacagtttgccacttccagggaacctgttcataagggacagacagtacacagtaacctactcttgcattagccacggtatgctcatactgatgggaagaacttgttcaggttgaacggcagggaatagaactcctcgcttcttgtgtcaatcctgtatgatcggaatttatcccaccaatggtggcctcgatcttttctgacagaactatcatgcctgtgaatcgtgttgtccagcaaatatgcaacaaagccagcaacgaaagcctttgacgagaatatgacattcacg

SEQ ID NO: 14282 - DNA, 450 bp, Oryza sativa
  Clone ID: uC-osflcyp030g06b1
ttcggtcgccgtagcagccacgtctcctccaccacctcgtctccctctcgagagagacaccgcgcgtctcgtctcgtctcatggcgccgccgcctcgggctcgcttggtgcagatcgggacccgccgccgccgctgccggggccggatcccgccttgcaccaagtgaatcggagccggcgtagcgccctccttccgccgatccgccgccgatgctgcgctgcttggttgtttttattgtctctccttcgtttctgggtcggtatcgggacggggttagcgatgaatcggatcgaattgctgatcctcctcgtgttcgtgttcgtaggtgtggggcgtacgcgtttgtattagatttaatttttttttcagatctagatctggtgcctaattctcgattacttattctatctatgattcgtgtcggcgttatcaagttggaatttccccta

SEQ ID NO: 14283 - DNA, 234 bp, Oryza sativa
  Clone ID: uC-osflcyp030h01a1
ggaagccaatgatttttaataattaccaatggggtttttacattacatgtcacgaaatgacatgaacggccaatgaatagatagagccacacaacaaaacaagtgcggagccaccaaagggagagacacggcctttaaggggcgggggcgaccataaagcataaagggcgaccccaaaacttgaaagcagcacacaaagcagaaatgcacaaggatatacatgaaaacatacgg

SEQ ID NO: 14284 - DNA, 440 bp, Oryza sativa
  Clone ID: uC-osflcyp030h09a1
agcagggtagctaaagaacatgatgttagaaggataaggttgctaggaagtatgatcaattcgtagtagttacagaaattacagatttttcacaggaggctggcagtcagtcgcatgccattgttgtcaacctgccattttcatgagcctcctatgaaacgaaggcgtacacttacagcttgacagactactcgcacacagggaggatcacgagcaaaaaaagaggagggaattaacaaccgttgcaaaattagttaacagaaactccagagatccgtgtatcaccgtatgtgtttggctcgtttcgtagtcctagttgtcctctctattttcgtctggcggcggcggcgccggttgctcttcgggcaccacttccggcaacacctcctgggactcgctcttcttcttcatgtgattgtagctccctttctccatgaaca

SEQ ID NO: 14285 - DNA, 486 bp, Oryza sativa
  Clone ID: uC-osflcyp031a02b1
ttcttaacccacccacccttcctcctcccttggcgagttgctggaacggcgggggggctatcctgccgcggcatcgcatccgctgcgtagctcggcggccggggggtggcgcgacttcttcctctttctcttttgctttcctggcttagctccgatcctgcgctgattcgatcatcctccgatttcggtggcttttttttttgcctggtgtttctgctcgaccatgctggcaggttcttcatctaagagggtgatgctgcttcagcaattggcagctagctaactctttagaccaaaagaagaattctgtggttatatgcaacagagaagcgcattcttgctttgatattcgccgttttaccgggtcggcagcgatcagggtgtggtgaccatggagcaagtggtcggagggaagtataagctcgggaggaagattgggagtgggtcatttggggagctatatctcggggttaaatacataatggg

SEQ ID NO: 14286 - DNA, 444 bp, Oryza sativa
  Clone ID: uC-osflcyp031a05a1
aatatttttttttttttttttttttttttgttggtttttttttttttttggggggttttttttttttttttttttttttttttccctaaaaaaaaaaaaaaaccgcccaaaggggaaaaatttttaaaaccccccccaacccttaagttataaaaaaaaaaggggaaaagggtacaattttaaaaaaaaaaggggtggcccaaaggaaaaaaaaaacttgtttaccaccttaaaaattgggaattgggcaaaaaaaaaaaaattccttttaaaaaaatttttttcaaaaaacttttccaaaaaggcaggggcattttaaacccttgcaaaaaaatgggccctttattttttaacccttaagggaaaatcctccttgggaccccttaaaattttaaacgggtcccgggaatcaccccccaaatctgaaaactttgatgccccaaa

SEQ ID NO: 14287 - DNA, 474 bp, Oryza sativa
  Clone ID: uC-osflcyp031b06b1
tgttccggtaggccgtcctcccagcagaccaggcgggctccgcgcggcaggatgcttgggcggccttgccgccgtggctgcgtagcgtatgagcagctttggaccggtgtatgctcgcaggacccccgccctcgtgcggccgactgccggctcccgggccccgtcactccacggccgtccacgcgccgtgccggcccaggcttcaagagatgcttgcgcgctgctacccgtcccacgggcagaggtgctcgcacacgtccagcgcgccgcgggcgccccaccgggcgtcccgcggcggctcgacagcgcgagcggcgtggcttctcggcgcgcggaacccaagcgtgccggcgctgccaaggccacctcgcgcgtgccattggtcccggatgccgcccacgatacaggctcacggcggccccgccccgtgcctacccataagcgagatgctctcggaagacgacagcccgcccg

SEQ ID NO: 14288 - DNA, 426 bp, Oryza sativa
  Clone ID: uC-osflcyp031b09a1
atcaagggggtttctacagaatccacaggaaaacaacacacaaagcaagaacaactccaaagtgagcagaattcaccggcgttgtaacttaatatgtttgcaatcttccaggaaaggcgtaatgacacaacatttgccaagttattgataccactacagcacgacagtaacatatggttcgcaaagccatagcgactacaagttgaagattatcggtagctctagacctcattcactgacagagagcgacctctctctccgtgtggatccaccaccgtatccttcctcgaccgggctcctgctccttgatctgctctcaactggtgagtaggacctctccctcatcctgcgccttgcataccgaggcgaaggagaccttgagtagctcgggctgcggtaaggcgagcggccccttggaggaggaga

SEQ ID NO: 14289 - DNA, 159 bp, Oryza sativa
  unsure (1)..(159): unsure at all n locations
  Clone ID: uC-osflcyp031c02b1
ttataacatcagcaaccaattcctaccgaagcgagcatctataaatccagcaggtggttcaacaancctagctaggaagcatggccccttcacacttgatgctgatcctcctggaggcatatctgttcctcgcccgccccgaacacccgtatgaccatt

SEQ ID NO: 14290 - DNA, 496 bp, Oryza sativa
  unsure (1)..(496): unsure at all n locations
  Clone ID: uC-osflcyp031c05a1
caacaagcatggatcttactggaatgttaattacatagtagagcaccacacatactcttaacaatatgactaaaatgcttccaatttccaatagtcgagaggacagaggaaaagcagacaacttcttcaatggagatcccaaacaaaaagatgggaaaaagaacgggaaaaaagggactttttttttccaaatggcaccacatcaagggaggaaccaaataatatcccttttcttatgaatgacacaaatattctttggtttagattatgttctttccttcttttttccttctcctctcttcttggtgggcgtttcttggtccgagagaccgttcttgcgtcactgcgccgcgacggtgcgggaggacgaggactgccnngccgccgccggcgcggcggcggcggtgggagaggaccacgggtggccgtgcgagctgctgcggtggagccggcacttgaggagccggcgtgcgtcgccggcgcgcaaacgcacttg

SEQ ID NO: 14291 - DNA, 504 bp, Oryza sativa
  Clone ID: uC-osflcyp031c10b1
gctttggaaaacccaattacagcagaggagaggacagcaagacaacaaatagtatatcaagctaaacagatgggtaggcgaagtataagcaatgccaaaacctttgcagtcatgggcctgattttctctgccgctgaatgtgtcatagagaaggctcgcgcaaagcatgacactaccaattcagcggtggctggctgtgtcacaggaggggctttagctgcaaaaggtggtcctaaagctacatgtgttggatgtggtggggtttgccaccttctcggttagcaaccaagaggtggattcagcatccaaaacaacctttagtcattttaagacattcactcattgacatgtcttctgaggtcttgcagagcaagattttgttattttacgagtgttacccaacatcgtaggcataactggagtaactgcgaggtctacagaaatcgacctttaatacgaggcaatggttttgagttctgcaatatgttgtatcattctcactat

SEQ ID NO: 14292 - DNA, 349 bp, Oryza sativa
  Clone ID: uC-osflcyp031d09a1
aacgggcatcccttgacagaaaggtcatccccataaaaagggcttaactagcacaaaaaaaggtttaactgggaagaacaagcccctaaaaagggcttaactagcattacatcataccaatttgggggggcctaccaaaattggcagacaaaaaggggaaggtcatccatcacactacttgggaacctgggtcttcaaaacaaaaacctcgtcattcttgttgaaagggaaaatacaaacatcacccttattggaaactttgacattaaacaagtgattccatccgggggggggcaaaaaagccctattgttttgggactttttcaacccaaaatggaataaccgggtt

SEQ ID NO: 14293 - DNA, 556 bp, Oryza sativa
  Clone ID: uC-osflcyp031e05a1
tttatttaatagagatgagaaatccgctaatgggaataacaccacggataagtacctagaccattagttgggaaacgaataaaatcattattgcaaaaacatcatcttcttcttcatcttcttagtgtacacaacaccaactcgatcatcatctcgtcgcactaaacccatcttccccaacccaaagacaacgaactcgctggccacaaatccatccaaccacaattaaccactgctaagctacggtcccccacttcacttgccggggacgaagttggtggcgtacgcccaggcgttgttgttgacggggtcggcgaggtggtcgccgaggttctcgagggggcccttgccggtgacgatggcctggacgaagaagccgaacatggagaacatggcgaaggcggccgtcttgatctccttcaccttgagctccgcgaacgcctcggggtcatcggcgaggccgagcgggtcgcaggcgccgccggggtagagcgggttcgacgacctcgccgagcggcccgccggcgatgcggtacccctcgacggcgcccatgag

SEQ ID NO: 14294 - DNA, 493 bp, Oryza sativa
  unsure (1)..(493): unsure at all n locations
  Clone ID: uC-osflcyp031e10b1
tcgcgagtgccctggacgattcctcatcacctgcacctttgatgccaccgtcgctggaagcatgactgtttacttctttgcaaaggaggagctgaactgtaatcttacagcaacgaaagaagatttactcaagccagtcactgtaacatttaaagagggtcttggtcaaaaatttaggcaaccttcagggacaggaattgacttttcgttgtttgaagatgctgaattatttaaggagggagagatggatgtatatccacttgcagtgaaggctgaaacaacattctcaattggtcaattctcagaaggggaagaacaaaagtcacaaactccaaattcacagatcacccaggctgtatttgagaggaaggagaatggggattaccatgttcgtgttgttaagcagatcctttgggtcaatggcacgagatatgagttgcaggagatttatggaattggaaactcttgtgaaagtgacaccgaanggaatgat

SEQ ID NO: 14295 - DNA, 398 bp, Oryza sativa
  Clone ID: uC-osflcyp031f01a1
ccagggcaagggggggtaaggcctcagcaaataccaaatttgatggataccccagatgaacaattctcagggcatataagtccataacatgttaacttcctctagcacgggaatgcttttcaacagttgacctttttgcataaagcaacacatacattgggtatagctgcccatgggcttgcccaatcgttctgagctcacgacattcattattgccctatagttttccaaagatagggggaaaacagcataccctcggcagcactaaatttcattagacaggtaaaacaggtttattctgggggtaattgttgcataggaatgcattaagaagccttcaaatcatcaagtcccacactggcccgaaaattatgattctctttgagaaaaggataaaa

SEQ ID NO: 14296 - DNA, 392 bp, Oryza sativa
  Clone ID: uC-osflcyp031h01a1
aagggggtgaggagaattacaacagcgtacatccgcaagaggatcaaatcagagccctatacaaaaaggaaggatatgcagcgcacacatccgtccgtacagtcaagctaaccaaaagccactgtggattcattcacttgtcgaagtagccctcggtcctgcccttgaacccgatctggccgaaggtgagcgccaggaacagcccaaggtgccacgtcaccaaccacagcctgcaaattaatcacaaaacccacatgaacaattagacacgtagccactgaacgcttttgctactaattatataggagtactatactgcgtgcctgaagaagatagaggtactgaccagaacggcgagtccagcgcccgcggccaggggaagtgggagagct

SEQ ID NO: 14297 - DNA, 432 bp, Oryza sativa
  unsure (1)..(432): unsure at all n locations
  Clone ID: uC-osflcyp032a10b1
tcccagagcaagaagctcatctcctcctcctctcgcatggcagccatggccaccaccgcgtccagcctcctcaagacctccttcgctggcgcgcgcctccccgccgccgcccgcaaccccaccgtctccgtcgcgccgcgcaccggcggcgccatctgcaactccatctcgtcgtcgtcgtccactcccccctacgacctcaacgccatcaggttcagccccatcaaggagtccatcgtgtcccgcgagatgacccggcggtacatgaccgacatgatcacctacgccgacaccgacgtngtcgtcgtcggcgccggctccgcggggctctcctgcgcgtacgagctctccaaggacccctccgtcagcgtcgccgtcatcgagcagtcggtgtcccccggcggcggcgcgtggctcggcgggcagctgatc

SEQ ID NO: 14298 - DNA, 548 bp, Oryza sativa
  Clone ID: uC-osflcyp032b01a1
gcagtaacaaccatccataaattggaggtaaacgggcgcattggggagcaccatgccaaccaggctgattacaaatcccaacacatcagatgttttcagggaaatcaatagaatatgatcgttgctcgcgacagccgggaatcagtatcagtcccacgaactagttgagccttgaccaccaccatagccaccgccatatccaccgccccctccataaccgccgcctccatagccaccaccgccaccaccataaccgccgccgcctccacccctattgtcgcggcggaagtcacggccaccaaaacgggcaccgcctgatcggcggtttctgccaccaccacctccgaacgaagaacgggccgagtatcgttcaagccattgaggaacctcctggtttgcttcctgcattagctcacataacggcctcgccagggatagattgccctcgttgaaaaatgcagttgccaagccagacttccctgctcgtcctgttcgtacgatacgatgaacatagtcatctatgtcatttgggaggtccaaattgatga

SEQ ID NO: 14299 - DNA, 254 bp, Oryza sativa
  Clone ID: uC-osflcyp032b06b1
ccacgcgttcttttagctaagctagcacgcacccacggggaggttttacacctcgagctcgctggccccggcagcgatggtggccagagacctactcctcctgggtgccaccgtcacgtccacccatgcggcgcgcctcctcgacgaacaactcagcaccggcgccatcccggcgatccccgggggccccggagagacggaggaaggccccgggatcccggtgaccctccgcctgccccgagagccggtggttg

SEQ ID NO: 14300 - DNA, 322 bp, Oryza sativa
  Clone ID: uC-osflcyp032b09a1
gggaacctgagtgagttcaaacttggaacaccattcttacagctaccaccagtttctgcagggttatcagacagcagttacaggagtctacctcctcatgctgcagtgttaaaaaaaaaactctaacgctcctcgtaaccatattacaaaacaagcgagtatacaaaaatatgacaacataaatgtttcatctgccctcttgcactgacataactatgttaaacaggttagggaagaaaccacaacaagaaactcatctctttagtacatgctaatgccccctgaatagccgcagttgtgtttgggccaaatgtgagaaacc

SEQ ID NO: 14301 - DNA, 535 bp, Oryza sativa
  Clone ID: uC-osflcyp032c05a1
ggaatgaagtttgttatagatcatactgtatgtgtagctattacaacctgcaatcatgtatgtgatgaattacctctgcacattgagcaatatttatactgttacaaattctttgggagaagaaaaatcgcatgtgtgttgtactgttgtgtatagaatggcattggctaccctctaattcactgaaaaatgtgtagttttcccctggcctaaccctcacctggcggcatgcaatacatttctgtctacaaactttcagatcgtcagcttctctgcatcaaagccatcaaccgttcaactgaggagatgatgtacccactgcttgaggattgccggtgaaccataccacggcctctgctcatcgtcagaacctacaggagagtggtacacgccgtcgaagcttatgttcagtgcgccttctagatgcgccgacacctcgggaacgacgccgtctccccacacatcagcacggccacagacctgcttgtagccttgtccaatgaagcgggctctcaaggctgggcctgattgagta

SEQ ID NO: 14302 - DNA, 268 bp, Oryza sativa
  Clone ID: uC-osflcyp032d01a1
atgattagtaggatgcaataatttatcttagccgggatctacataatacaatatcgggaggaagcaaaatcttcactggtctcagggcgggcacttgaacaaactacaaacaccctgttttttcaagggcagactacatcagggtatacaatctcctcaaaacaagcattatatgctactaccggttgcgtcaagttacaggttacagatctgtactagaaacaggccgaaattggtatcaaaaaggctttgggagcataagttttca

SEQ ID NO: 14303 - DNA, 204 bp, Oryza sativa
  Clone ID: uC-osflcyp032d09a1
gggggtatcataaaacttttggggggttatttaattttacttaagtcctttcataatcaaaaacaacacggagggtgcatcgccccccacccccgaacaaacaaaaaaacaccaaaaccccccacggccaacataccaatcccagccaacaccctcgtggacaaaaacaaaaccccatatcatcaacctaaaaaagggcccccc

SEQ ID NO: 14304 - DNA, 487 bp, Oryza sativa
  Clone ID: uC-osflcyp032e05a1
aaaaaagcactatttctttcttcgagacattatcaccatgtcaacatagcatgacaactaacagtcacaatagaatgaatagctactacccactatgattaagacctaagttccagatcaaaattctcaataccataaatcacgattaccaggtgctaagaaaagataagaaacatggacgcaaaattgactcagtgttacaactgtagcacacaagtagcaaaaaaataatagaaaggctatttagcagaagagatctgcaatccttgggttcgcaagtaccggcatagattagtttgctgcagcagtctctttggtagcatcagacccttcttcaaattttctcgcagcctcagccgtgttaagcttatcagacccatcttcggattctccaacagcctgaactgcatcaggcttcttccaagctccctcgacatgactctctggcagtggacggctcccattgtcctctcctctaacaggggaa

SEQ ID NO: 14305 - DNA, 398 bp, Oryza sativa
  Clone ID: uC-osflcyp032f01a1
gagctaaatattcaaaggggtatattatttatctacgggggataaggggaacttgctctccctatctttctcaaacccacatagctatgtacaagttatctaatacagctactgggcttgcttgtagctatgttaagttatacaccctgacactccatctgccatacctactttacaatcctctaatgtacaaaatttcagctgtatcacgctatgtctttatagcagcagaaggcagcataaaaatttccaaggcgttgttcaagtcaagatccctcttggaaggtcaccgagccgtgttagggcagcccgggttcccctgcatgaatggcaagctgctgatcgctgtgtgagttgatgcccttgcctcatcctttgactcaaaaacctttgcaagc

SEQ ID NO: 14306 - DNA, 344 bp, Oryza sativa
  Clone ID: uC-osflcyp032f09a1
aggaaaactttccaaccgtaattgaaactttcaactcaaaatttaaaaagttgcccctcgacttttgaaaacttcaggctcacacaggagccggcaaatttgcgtgcagcaaaggaatcaacccttgcccttggttccctaggaagacttttaccaattggttattgcagggtgattctgcttccaggtaccaaactttgggggttcacattttcaccatctccggtaaaaaaatggggctcaaaacaaaagctattggaatccgtttaacgactagatttattccgtaaccattaactaggggcttaaaatcccgggatgggggaagctgccttgaaattctt

SEQ ID NO: 14307 - DNA, 503 bp, Oryza sativa
  Clone ID: uC-osflcyp032g05a1
actacgcgaaaataggtctggggaactttattcaagttcatatgatttgtctctgcaccgttacatgcatgcattgagctttgcaatatgcaggcagaaagcttattcaaacccaaactatatatggaacgcgtgtatgtatatatctatatcgatcgacgtttaattcatcatcgatcgatctcttctcagaacaatcttcttagaaattgatggagtatgccggcgactggtccgggttgaagaggccgaagtgcctctccgtctcgtcgcctcccttctggttctcgttgaacatggcgaaaatgtaggtctcgatgctcccgggcctcttgggcgtcccctgcccgacgtggttgatcaggttctggttgtacgtctgcgcgttgccggcgctcgccgtcgtgccgccggccgacggccacccgctctccgacaccacgatcgggacgctcccggcgccggcgctctccagcgcggagtagaacgtgtcgacgatggcg

SEQ ID NO: 14308 - DNA, 499 bp, Oryza sativa
  Clone ID: uC-osflcyp032g09b1
tttttatagtatggataaaggtgataatacacaggtgacataaaaattggacagaacagtgtcgatggagcatcaacttcagtcaaatgatacctctgagccaccatgttctactacagaaacaaccaaggtcaaatatgtcagaggagttgctgtgccattaggaaaaacaaagtctcttgttgagagatgggaaaagagagaggctactaatgttgagtgctcaccaccaactggttcttgtggtgaccgtgcagtgagatctgatggtccttcctccttttcagcagaaccaagtcaggcatatgagaaggacttgtcaacaattgatgaggcgatgattccaatcaatttgatgcagaaccatgatgaatttataaatgccggaaaatcttgggtgacaaagttagagatgatgcgtcatgtcttttgaccaaatggtatcaaaggagcgattgctgcagtggcaaagttgactgacaatgctgttctagctgat

SEQ ID NO: 14309 - DNA, 496 bp, Oryza sativa
  Clone ID: uC-osflcyp032g12b1
tttggaagcttctagaagtttccgtgggcgatggcgatccgcgcgaggtcctcctcctacgccgccgcggcggtcgcgctggcgctcgcgctggcgtccgtcgccgctgtcgccggcgaggtcttcttccaggagaagttcgaagatggatgggaaagtcggtgggtcaagtcagaatggaagaaggatgagaacatggctggtgaatggaaccacacatctgggaagtggaatggagatcctgaggacaaaggtatccaaacctctgaggactacaggttctacgctatttcagcggagtacccagaattcagcaacaaggataaaaccctggtgctgcagttctctgtaaagcatgagcaaaagcttgactgtggtggtggatatgtcaagttgcttggtgtggatgttgaccagaagaaatttggtggggacacaccgtacagcattatgtttggaccagacatctgtgggtacagcaccaagagggccatac

SEQ ID NO: 14310 - DNA, 282 bp, Oryza sativa
  Clone ID: uC-osflcyp032h09a1
cgtatgctgccggcggtcggctggtaggctcttgtggagcggccctcctttttttttttttttgacaaattaaataaacccatgggggagacaagagcggagcgcgctaagattcattcattcattcagttggacaaagcaaacgagacgagctttattgtcgggatcaaaaacacagactgggcaaccacacatttaacacaaggtagatagttctacacaaagctaacgatgataacgatcggatggggatgaccgcagatggattagatggatagataa

SEQ ID NO: 14311 - DNA, 361 bp, Oryza sativa
  Clone ID: uC-osflcyp033a05a1
aaagaaccccgcctagttcaggttgggagttagaaggaagcccctcacacctacagacacctaaccgtctattacactacaccgtcgatggatacatcgacatgggtctactgctgagcactatctgaaacgggagacacacccgaggacgattgtgcacacagcctcaacaccaaccatttcaaccaatagggggcctgcagagccaccaaccagactgccaactcaagctgcaggtgccttgccgtccttgttgatggacgcctaccggacggtctggggcttggacctcggcttcggagactggaagggcttggccaccacactcttttacggcgccttgcactgggtgccagcgctg

SEQ ID NO: 14312 - DNA, 489 bp, Oryza sativa
  Clone ID: uC-osflcyp033a10b1
gttcaatacatgcatacgtttatatatagtgggagtgtagtagctactgatgagtcccgtttcatttgagctagtagctagctagcttatacacacacacacagagtatagggatcatagctagctagctaggcatgggtgatcatcatgatgaggaggagaagggaaaagacaataaagcagcagcatcatcatcttggcaagcccggcgccatttgatcgtgctggcagctctggggggaaccgtggccgcgaccgccgtggtgataaccgtgtccgtcatcctccggccggtgcacgtcgagttcgcggtggcgagagcgacgcagcagaagatcgccatcggcagcaacgacacgggcatctacctgaacctgaccgtgaccgccaggagcaccaccagccgcgccatggtgcagtaccggaaggtgttcgtggacctggtggcgaagacgatacagaaagacaagatgcagcttgagatggacc

SEQ ID NO: 14313 - DNA, 407 bp, Oryza sativa
  Clone ID: uC-osflcyp033b01a1
gggggaatcaatcccattaggccaaacaaataccaccatccaacatgccaaccatattttacactgggaataccttcctaccccccaaaaaagggcaggaacaaaagaacattctctaagggaccaacccccactagctcaaagctagaaaagctttacaaaggagggaaagatggcagccatttccggcacacactgggggagccgcccggggaggtcaaaattttctgggggtgggaaaaaagaaccaaaaactaatttagacatgtcatcatcatcatcaatcaacacctgtgctgctgccacaggcaaaaggagatgctgtggacttgatacatttcacctcatcccacaaatctaaactgtttcttctttctccctatctcctacgatcctaccatttttgg

SEQ ID NO: 14314 - DNA, 536 bp, Oryza sativa
  Clone ID: uC-osflcyp033b09a1
ggaataatatgcctcaaatcatataagataatggcatggaagacaacctctcccactaggcaaatgtgcaaagctagcatgttattatcccttcgcaagttccatgccaacaagagtaaattttctcagccattcgaaggtattgagctaagtactagcacattagctttactaataaccacccctcagagcaaggacaagatggaggacagagccaccttcgatgttatagtccttcgcagtcttgtcgtcggcaagctgcttaccagcatagataagcctttgctgcacgggaggaatgccttctttctcctcaacacgctccttgatcctatcgatcgtgtcggtgggctcaatgtcaatttcaatctcttttccagtgagggtcttaaccttgatcatagtgccacccctgagcctgaggaccaagtgaagagttgactccttctgaatgttgtagtcggccagtgtgcgcccatcttccagctgcttgcctgcgaatatcaaacgctgttgatctggagggatcccttcct

SEQ ID NO: 14315 - DNA, 349 bp, Oryza sativa
  Clone ID: uC-osflcyp033c05a1
ggcaccggacgggttatatttttcacaagcaaaaaaggggacccagggccatataatcaggattggtacaacttacaaggggggggattggaaaacaaaaggcaacttattatcccaactagcattaacaggggggggggggcctgaagaacccccgccacgttttattttcagcataaacaaagcatcccgggatttccgggtcgggggccatggaataccctggcaagcaaaaggattctactgggtcttggccctgggggggaacagggcgatgacccgggtggtggaaccccccttgttggtgtacccggggacaaggttgacaaagtttttgttaagagcaatt

SEQ ID NO: 14316 - DNA, 274 bp, Oryza sativa
  Clone ID: uC-osflcyp033d01a1
gcatgcacccctccgtcagcttctatcctccacaacagccgcccccctttatttcttctctttctcttttttttatattttttggggtatttttaaacttcttgggggtacaacacacatccccccaatcccaatacccctcaccttacccctaaactcacggcttccactatccacaactcaccaaacctgaataaacaacacacttgaaacaacccccaacaccctctgtctaccaggccttactaaccaaccggttacactctcgccaaaa

SEQ ID NO: 14317 - DNA, 375 bp, Oryza sativa
  Clone ID: uC-osflcyp033d09a1
ccccccgggggaaaaacttttagggggaaaaaattcccccctggggggcccaaaaaaaacggggccttttaggttcaaaaaaaaaattttgggggttcccctatggatttccccgggggggcccccccccacgggggggcccccccccaaacaaaaggcccggcccggccaattaaaagttggggggggggtatttccaaccccccatgggcccaaaaaaggggggaaacccaaaaaggggggggggaagaaaacttgggccattttaaaaacaccccaaaacaaaaaatggggccagggtccccctgggggccctttgggggggcccaaaaaaacccggggggccccccccccctgaaaagggggtttggtagc

SEQ ID NO: 14318 - DNA, 530 bp, Oryza sativa
  unsure (1)..(530): unsure at all n locations
  Clone ID: uC-osflcyp033e05a1
ggacgacaactttaaatattgctcaataaaacactatctggagacaacacacacgagagtcatatccagaggaaaacaatcagcccagacggaccactagcaccaaatgcaaagcaatgggaagaactaattcgaccgctaccaccctagtaaaaaccagagaagagagaggaaggggggacaggaagaaaaacattctagtagaacaggagaagaatccatccatcatggtgacagcagcatgaggcatctaaatcgatggtctccaataacatgcggagccatcgatcgatcgatcttcccattttactggccctcgccggcgtcgcccttggaggcttctttcacctcatcaccaccgtcctccgtgaggtcagaggtccagagggtcacagttgtccctcaggagctgcatgatcaaagtgctgtccttgtaagactcctcccgagggtatccaactcggagatggcttcgtcaaaccctgcttagcaaggttgcagccttgtctggagagttaantctcgtagta

SEQ ID NO: 14319 - DNA, 379 bp, Oryza sativa
  Clone ID: uC-osflcyp033e07a1
agtcttcaaaaaattcagatgcttgtatctggcagtatgatatcgccaagctaacacgttgccatctaagaaatgttgtgtctttttaataactggagcatggagcatgagaaacattaaactgtgcaccaaaacttagcgcaaatcacccatgacacataagcgacattacagtatgagatgggagtgtttcagtagagcattcaggaatctctgacaactcaacgacttgagaagctcatcagaatcatgctgcctagttcaaactggcctgctgtcgaccatcagggatagcgaacaaaaccaccggcttcggaggatctgacaaaaggggcatcgcacctgtaatagcctttcctctaagctgtatgacctccca

SEQ ID NO: 14320 - DNA, 166 bp, Oryza sativa
  Clone ID: uC-osflcyp033f03a1
cagccgccccccttttttttttttttttttaggcaacaactaaccaaagggttctttatatacatattggtgtccttcaattaattgtctttgtattaatgcaaaatgttgcccccctgccccctggcgtggaaagaacaaaacgcccacaaaaaaaccccccccc

SEQ ID NO: 14321 - DNA, 470 bp, Oryza sativa
  Clone ID: uC-osflcyp033f06b1
ctgacgcgtgggggcaagggtatccttgctgcagatgagtccactggcaccattggcaagcgctttgccagcatcaatgtcgagaacgttgaggagaaccgccgctctctccgcgagctgctcttcaccacccctggtgccctccagcacctaagtggtgtgatcctcttcgaggagaccctgtaccagaagaccaaggacggaagcccttcgtcgatgtcctcaaggagggtggtgtcctccctggcatcaaggttgacaagggtaccgttgaggttgccggcaccaacaaagagaccaccacccagggccacgatgatcttggcaagcgttgcgccaagtactacgaggccggtgcccgcttcgccaagtggcgtgccgtcctcaagattggccccaacgagccatcgcagctttccattgacctgaatgctcagggtcttgctcgctatgccatcatctgccaggag

SEQ ID NO: 14322 - DNA, 346 bp, Oryza sativa
  Clone ID: uC-osflcyp033f11a1
gccccaaaaacaaaaaaatcccaagggctaatcttttgaaccacaccccaacaccccaaaaaggggccgggatgaaaccaaaggaaaaaccaagaccaaaagggggggggggaaaacccaccaaaaaaaaagacccaccacaccaaaaaaacaggaaacccgcgccaaaaaaccatttccctacccaaaaggcaccaaaacccggaaaaaaaaaccctgcccaaacctaagacggcccaaaaaaagggaaaaaatccttatggcaacccacaaaaaaagaaaaaaaaggaaaaaaatttttattacgccccacaaaaacaaagcatagcatcgggagcccacttaa

SEQ ID NO: 14323 - DNA, 494 bp, Oryza sativa
  unsure (1)..(494): unsure at all n locations
  Clone ID: uC-osflcyp033g07a1
ccccccacccaaaaaaattgtccaaaacaaaaaaaaaacaaaatccccccccccccaaactaaaaaaaaaaaacccccttataccccccccccccggcagggcgccccacccaaaaaaagggccaaaaaaaagggaacaaaacccgcccaaacacaaaaaggaaaacccccaaaacacaaacaaacaaaccaaaatttaaaaaaaagtttaaaacccccaaaaccccccaagggtacccccccctaaaaacctaaaaccccctaggccccctgggggccaaacccgaccttaacccccccccccccccaacacngcacccaaaaggccccggcaaaaaccgcccccgccacccccaaaaaagaaaaaaacaaccgggccccaaaaaaccccccccccggaacccaccacaaaaaggccccaacccccccgggccggcctcacccccggttcccacaaaaccgcccccggccgcggggaaaaacaaaaccccccc

SEQ ID NO: 14324 - DNA, 416 bp, Oryza sativa
  Clone ID: uC-osflcyp033h03a1
ttttttttttttttttttttttttttttttgggtggttttttttttttttgtgggtgtttttttttttttttttttttttttttttttaaaaccccccaaaaaaaaacccaaaatttttttttcccctaagggggacccaaaaccctttttggcctttaaacccaaaggggggggccaaacaaccaaggggggggggtaaaaaaaaaaaaatatgacggggttgggggggccccaaaaaagggggtctcccattgggggggatctgaaccctttggggggggggggggaaaaaaccccaaaaaaaaacaaacctttgggaaggggcccccccaaaaaaatgggccaccttaacagggggggggggacaccaaaaaaaccgccctttttcgaaaaaaaaaacatggggggcccaggg

SEQ ID NO: 14325 - DNA, 452 bp, Oryza sativa
  unsure (1)..(452): unsure at all n locations
  Clone ID: uC-osflcyp033h11a1
aacaaggaaattactacagattgcctcggcaagaagctgccaagctggagtacgtagttagctaggtccaagtctggacaagatgcaattcatcaacgtaggattacacgtacacagagcggtgtacagagtcaagaaaattaagatagcatgcacgcacggagcgtgcaacataaagtatacagagatagagagagagatgaccagcgctgcattgatatgccccagctgttatttttactgtagctattattttggctagttgatcaactgcgagccagcatcgatcgatatatcgatcggtcggtccaagcaggattaatcgatctagctgaccttgctgcangtcagtggagaggctgtggnggaacnctacgttgacgccgcacttgccggggatgccggcggcggcgcctaggttgagagacttgatggtgccgggagggtcttga

SEQ ID NO: 14326 - DNA, 561 bp, Oryza sativa
  unsure (1)..(561): unsure at all n locations
  Clone ID: uC-osflcyp034a02b1
tcgagacctaatttcccaaagaaaaaaaaaagaaaaacaaaatcccatctcccaccgccgccgcagcccaccaccagccgccgcctcggccgcgagatcgccggccgccgccatgtcgaatccggccgcctactacgccgccgtcgcgcggaagcagtacttctgctaccaatgcaaccgcaccgtcctcctcccggcctccgccgccgccgccggggcgctctcctgcccggagtgccgcggggatttcatcgaggagcnaacgtnnccccgcccccgccatcatccccttccccttcgccttccccccgatgatgcccaccgncacctncgnctcccgncgnncgncgnncgnnggctngncgacccagtcctcctcctcgtccgccgccacgtcgccattcagcgacctctccgccttcctcaacagcatgctcggnccgctcaacctccgcaccgacgagcggatgccgggaaccacctccgccgcgggcacggtgacccccgaggacgagcccgacggggttcgacgcggcacgttctttcagaactacctccaga

SEQ ID NO: 14327 - DNA, 444 bp, Oryza sativa
  Clone ID: uC-osflcyp034a07a1
ggtatttccccctttttttatacaacccctaaaccagaagtatctttgggtgtccagacataggagtgagtgattacaggcccagctgttctgaaaccaatagaactactgaagagcaaatcgaacacactgagcaaaaactggggcagcagttgagcatattgatatgggaggtctaagaatgaaacaaatgaagaagtaggttgtgcttacattacgcttaacacgacgatgggttcgacaaaaactaggatagggtagagctagagagagacaagaaaaagcatgacataataactgataagcgtgctcgttgagcctctcagacttgggccgtgccttgcgtgaacaagggatcctcacaccggtacttcccgtcagggccaattccaaagcccttgggatctgagaacacgttttccagaagctggcttcggggaggga

SEQ ID NO: 14328 - DNA, 201 bp, Oryza sativa
  Clone ID: uC-osflcyp034a10b1
taagtattcacttgttgagttgccaccggcgttcttgtccttggcatgggagaaacggccattgcttactgtgtctgcttggaggtgagggtagtttttttgggagtatttgggggaatgcgttgccatgtgatagatcttgggacgaataagctaggagaaggaagttggcaggttctgctgtatctctatccattactg

SEQ ID NO: 14329 - DNA, 397 bp, Oryza sativa
  Clone ID: uC-osflcyp034b03a1
ggggggaaatggacccaggcgaccatgggggaaaataagggggggcaaaaatttacttgttaccccccccccttacacccaggaaaaaaaaaacatggtttaaacggaggaacatacatacccttttggaccaccccccccatggttgggacaagggggggtacaaacatacggccccaaatttccccatccgccgggccttccttccttatttaaaacctgggaattaataaaaaacgtgggggggggcttctttaagggaactgggggctgggggggatttttttggggccggatccaggggggggaccaagcgggttttggcgggggccaaccccggaaaaaagcccctggacggaaaaaccgaggaagggaagcttggggagcctgccttttt

SEQ ID NO: 14330 - DNA, 382 bp, Oryza sativa
  Clone ID: uC-osflcyp034b11a1
gaaacaggaaaggacacgttaaagggtatagattatgggtactaaatgtcagtggtttgagtagtgtgacacaacaaacaccaccactatagtatacataagcaggctttactatcccatccgtgctttttccaaaagaaacatcaaaaatacatcgatgtttctaagctgctagtcctgcatacaaaactaagttgctgctttcaagatgttggcaaccaaagcacacccaaaatcaggaatatctattacagacttgcagtgttctctaacctcaaagcaatgcgtgaccaaacaaacgctactcctgcttcatctttgattcaggctggtagcatggatgcagcaacacatggatgcacaagagccagcagggaagatg

SEQ ID NO: 14331 - DNA, 376 bp, Oryza sativa
  Clone ID: uC-osflcyp034c07a1
aagccactgagaagcaacactttaaccccaaaagacagattaacgacaatatctgagagaagtcacttgctgtgccaccatggctggacagccgagcagagcatgtaacacacagagcacgagatcactatacaccaaacgggaacgaacgaagacaactcagggtatcatctgactgaagatacacgacgcggaccgttcaatataatattaagtcttcactactcctatatgatgggagaatggcaaaggcaatggcgacgggatcttggcttagttgcagggaagggggtggcccgtccactcaatgaggcagaggaccctgaggtcgatgagcttggcctgggtgatgccgaggaacaccttggtggactcc

SEQ ID NO: 14332 - DNA, 573 bp, Oryza sativa
  unsure (1)..(573): unsure at all n locations
  Clone ID: uC-osflcyp034c10b1
atcctccgcaagtggatctcccgttttgatgtctggccattcctggaaacatacactgaggatgttgcaaacgaaattatgagggaaatgcaagccaaacctgatctcatcattggcaattacagtgatggaaaccttgtcgccactctgctggctcacaaattaggagttacccagtgtaccattgctcatgccttggagaaaaccaaataccccaactcagacatatacttggacaagtttgacagccagtaccacttctcatgccaattcactgctgatcttatcgccatgaatcacactgatttcatcatcaccagtacattccaagaaattgctggaagcaaggacactgtggggcagtatgaatcacacattgcattcacccttcctgggctttaccgagttgtgcatggcatagatgtttttgatcccaagttcaacattgtctctcctggagctgacatgagtgtctacttcccgtacaccgaggctgacaagaggctcactgccttncaccctgaaatngaggagcttctctacagtgaagtcgagaacgatgaacacaagttg

SEQ ID NO: 14333 - DNA, 383 bp, Oryza sativa
  Clone ID: uC-osflcyp034d03a1
caatgaaaccgttcagcactcattcataaagaaactgtggtatctacgttccagaatcttttcacataaagtgttccaaaattatgttgaagagaccatcgtctcgaatcctaatattgtttcagatgaggctaggaaatagctgcttcaaaaatactctctctctcccggcgaaaaaaaaatattcagttacctatcactaacaatctaacacagactagggttatctcgtatcaattggttgcagggtgtttcgcctttgaatgatccttcagagcaccagaggcgctgaaaggctttttgcatgagttgccgacatagctagcagaacgcttaggcgtgtcgctctttatgggcgtcctctttgcctgttttgctgggga

SEQ ID NO: 14334 - DNA, 445 bp, Oryza sativa
  Clone ID: uC-osflcyp034e02b1
ttcgtcgccattctcgcattctcgccttctcgctctctcgtggctggccgtggcgggcgctcgcggcggcgccgccggtcgctgggcctgcgcggcatgtgtcgcggtgaactgtggagtcgcggtggctgcggatgtattcttcgtcgtctctctcgtgtgctagggagcggtggtggagaatgggagatgggcccgtctggtgtttgacgaaatgccggagcgcagcaaggcatggagaggttggggcttcaagcctctacgcgcccatcatcctgggtagtggacagcaagctatgtctgcaagctatgcctctacagccgcaggcttgatgggcgtgtgggttgaaagcggatgcctgtcctcgtgcggtgcaaatgtgagttggttcaactgtacgggagtgaggagcagaaattctcttagcagcttcccatttttgaa

SEQ ID NO: 14335 - DNA, 442 bp, Oryza sativa
  Clone ID: uC-osflcyp034e07a1
ttttgttgtttcttccaacgctcgaatgcacttgcaatttgcttgactgattcagcctctagcacaaatgggccaacagtagttgctgtttcctagtttttgtatggtctctgatgtcacgtgggtttgcttctggcccatcatagatgctgactagagagttctgctagataaacaaactttgcacaccaacagcaggaggtgatcaataacgagatccaaattaggggaactatcttggcctctctattggggcctgcgacaactgatcgtatgataaaagctaagtagttaaaaactagtctctagatttcatcacggtctttggtaggtacattttttacatgagcaatttgtaactgaaaaaaattatcaagcaaacaaggctctggtatccgacgatgtactaaacgtgcacaaagcccataacatgttgcatcct

SEQ ID NO: 14336 - DNA, 525 bp, Oryza sativa
  Clone ID: uC-osflcyp034e10b1
tgacgggccgttcggcgccacgggcgtcaagcggctgcaggacatcggcatgatcgacgccgtgcccggcatgcgcgccctcgacatgaacaccgccgaggacgagatcgtccgcctcacccgcgaggtcgttcccggcatgatcgtcaccggcatggaggtcgccgagatcgacggcgccccgagaatgggcccgacgttcggagccatgatgatctccggtcagaaggcggcgcacctggcgctgaaggcgctcggccggccgaacgccatcgacggcacgatcaagaaggcggcggcggcggcggcgcacccggagctgatcctggcgtcgaaggacgacggcgagatcgtggacgcctgagcgaatagaacagggtaaaaaaaaattcgcaagacgtggtggtgacacggaggcgttggggacgagaagaagatgtggactttcccctgtgtttttttttcgggattcgctttgatccccttgtttgtttagctttggatggctactagcgtcttgttcat

SEQ ID NO: 14337 - DNA, 460 bp, Oryza sativa
  Clone ID: uC-osflcyp034f03a1
gccggcgtggtgtccgtcgtgtttttggaccagttcgagcgcatgctgccccaccgcgacgacgcggcgtgccccgcccgcgggttctacgcctaccgcgccttcgtcgccgcggccggcgcgttcccggccttcgccgccacgggcgacgccgacacccgcaagcgtgaggtcgccgcgttcctggcccagacttcccacgcgacctctggtgggccctactcgtggggctactgctacaaggaggtgaagggcgcgacgtcagacttctgcgtgccgaacgcgcgctggccgtgcgcgcccggcaaggcgtaccacgcccgcggacccatgcaaatcgcatacaactacaactatggggcggccggcgaggcgatcggcgcggacctgctgggcaacccggagctggtggcaacggacccgacggtggcgttcaagacggcgctgtggctgtggatga

SEQ ID NO: 14338 - DNA, 289 bp, Oryza sativa
  Clone ID: uC-osflcyp034g10b1
cacctcgttcccggaggtgttcaacaacagcggcatcctcctcggctacgtctccaacttcgccttcgcgcgcctccccgtccacctgagctggcgcgccatgttcctcgtcggcgccgtgccgcccatcttcctcggcatcgccgtcctcgccatgccggagtcgccccggtggctcgtcatgcggggccgcatcgaggacgcgcgccgcgtgctcctcaagacctccgactcgcccgacgaggccgaggaccggctcctcgacatcaagaaagccgtcggcatccca

SEQ ID NO: 14339 - DNA, 485 bp, Oryza sativa
  Clone ID: uC-osflcyp034h06b1
tccacatcttattgtcacttccatctcattctcctaattgtcatcactagcttctagctagcttaattaattaattagccatggcggaggagaagcaccaccaccacctgttccaccacaagaaggacgacgagccggccaccggagtagactcctacggcgagggcgtctacacgtcggagacggtgaccaccgaggtggtcgccggcggccaggacgagtacgagaggtacaagaaggaggagaagcagcacaagcacaagcagcacctcgccgaggccggcgccctcgccgccggcgccttcgccctgtatgagaagcacgaggcgaagaaggacccggagaacgcgcacaggcacaagatcacggagggagatcgcggccacggcggcggtcggcgccggcggctacgccttccacgagcaccacgagaagaagaaggaccacaagagcgccgaggagtccaccggcgagaagaagcacca

SEQ ID NO: 14340 - DNA, 353 bp, Oryza sativa
  Clone ID: uC-osflcyp035b06b1
cgcgtttatcgagagagagagagagagagagagagagaggcgactatgacggcgattgctcggttctcccgcgggcggcggcgagccggcgagggcttctccggtggggggcggcgagctatcctagcgcccgccttgggagcgctctcgcggatctcctttggagctttgatagcatagcaaggtcatggcagacgttgcagatttaactggggatggaggtgcctccggcgcatttcttttatttttattttccgcttcctgtcttcgtttctttttgtattttatttctctctttcttttttttcttatttctctctttcttcttttctttttctcctttttcttatctt

SEQ ID NO: 14341 - DNA, 270 bp, Oryza sativa
  Clone ID: uC-osflcyp035b11a1
aaagggcaactccttatttttttttttattttgtgtttgtttgagcatttaacttagttttgttctttttttttatttgaaaagaagaggcaatcatttcccctaataacggtagggggaagaaggggaagaatctcacacaagttgggcataagtttgggcaaaaaggaaagtccaggtgttcaacggggggaacaaaaaaaaatatgggtgaactggggccaacagggggccgtggggcaaaaggaaaggggggggaatattttttta

SEQ ID NO: 14342 - DNA, 325 bp, Oryza sativa
  Clone ID: uC-osflcyp035c07a1
acaaagcatgaccctgtcacagttagaacgttcgttctaactgaaaaggtttggcctaaaaaatgttttcactgggccagcaaaagttttgtcctaaaaaaaaaaacttgcccttttttagcttaccagcccttttatttcacatcaaatgggactacaattttatttcaccatttgacccattttgggggcggtaaaaagggcctgaaaatgatgataggaatgtcccccacaccctcactttggttggggcacctcaagaatagccttagcccgaaagggcacatttcctgggggaaccccagccaagcttatcccccccttt

SEQ ID NO: 14343 - DNA, 368 bp, Oryza sativa
  Clone ID: uC-osflcyp035d03a1
gctcgttaaagacaatatagttctgtaatttgtaacaacacaagagcctgaggatataacgagttacaaacatgctgccgttgcagcatggtcatcaatatacaacattacaacaacatatggggatcgcagaacactcccattccacgattttacaacatatgcttcacaacacgttataaatacatggttgtaccgagctgtagagagacagccagcacgtcccaactacaaatgcacactagccaacagcaaacataaaaactactctttggtaagtcactatatatacgcactatagcttcacatgacttaaattataacatgacataatttcttttggataaattagccccaggaaggttttg

SEQ ID NO: 14344 - DNA, 371 bp, Oryza sativa
  Clone ID: uC-osflcyp035d11a1
atcgaagccgtttcgtttgcttttattccattcgattcgattcaattcgttcatctcaacatgcacatcgtccaagctaactccttaccggaatactctctatagaaagtagaaaccaactttggattcctttctgctgcccctcaggccctcgcatacataaaaagaaacagccttttctagagagcgtcgttgccttgttcaaaggttgcaccaatgccgctctacaagactacaactcatccttgaaatttgtaccggaactcctctcccccctcaaattagttgaagctgtgctctgatccttctctgttttcgttgctgacgaatccggccgcttcagtttgaaagggatgctagcgtgctttttg

SEQ ID NO: 14345 - DNA, 307 bp, Oryza sativa
  Clone ID: uC-osflcyp035e07a1
ccaccgaaaatccaagagcttcttattaataataatagtaaaaataaacgccaaaagttttaacacggaagcaattaacttagcacacaaaagacagacatgaacacacccaagcccctccttttccttgtctaaaacgaagcagcaactaaattaaatcgaccctaaaatttccgaggccccaaatggcggctgatcgacgacgaaaccgaggaggctctagttggcttgccttggtgatgagtcttctgcgcgacggcaacgggggggcaggggccgggaatggcaccctttttgggggggcaaa

SEQ ID NO: 14346 - DNA, 555 bp, Oryza sativa
  Clone ID: uC-osflcyp035e11b1
tttcttcttcttcctcctcctcgcgctcccccgatgggaatcgtgaagagaggagcggcgcttgcgagaggagagagatggcccgtaccaagcagaccgctcgtaggtccacaggaggaaaggctcccaggaagcagcttgcaaccaaggctgctcgtaagtctgctcccaccactggaggagttaagaagccccaccgttaccgccctggaactgttgccctccgtgagattcgcaagtaccagaagagtactgagcttttgatcaggaagctgcccttccagaggcttgttagggaaattgcacaggacttcaagaccgatctgcgtttccagagccatgctgtccttgccctccaggaggctgcggaggcataccttgttggtctcttcgaggacaccaacctgtgcgctattcatgccaagcgtgtgaccatcatgcctaaggacatttagctggctaggaggattcgtggtgagaggggcttaatttccctcggcgactcctttgacaaatgaagcatgcgtcgtattgttaggagggggttaaatcttt

SEQ ID NO: 14347 - DNA, 459 bp, Oryza sativa
  Clone ID: uC-osflcyp035f03a1
tttttggttggttttttttttttttttttttttttctttttttttttttttttttttttttttttttttttttttttttttttttttttttggggaaggggcaaccccccaaaaccaaggggtttattaaaaatttaaacggggccgaacgtccccaagcctataagggttaaacccgcaaattccaagtttttttttcctttcgctgaacgggggcgggcttttttttatacccaagcagaacccggccccagggggcctgggggggaaaaaaaacccccaaaaaccccccccctgaaccgggggggcccgggggcccccccggggggtaaaaaaagggccggggttttattccgggaaaaaccccccccccaactttggggggggggcccggggtgaaaaaaccttggcccgaccccttaaatcccgggggggcccccaaagaataaaccggggggg

SEQ ID NO: 14348 - DNA, 323 bp, Oryza sativa
  Clone ID: uC-osflcyp035f11a1
aacctactaaattcgtatatccattaagcctcctcaagcagccttggtatgtatttacatgtacctgattttcactcatagctagctccgatcgaactcgatcttcctcgcccactagagtaaatcccaaccaacaacatagccgaaagatcagatgtctcactatacatgcttcagctaaggccccacccccatatccgatgtacacatgatatcaggaactggaattgattcaatgcccgtaatttcatctaagcaaattcaattccctgaggatcctactttagtgtacccgattgagccgcacaaacttactgagcatg

SEQ ID NO: 14349 - DNA, 117 bp, Oryza sativa
  Clone ID: uC-osflcyp035g07a1
atttgtttggtttatataaaagtatattttttttttttttggagcaagaaatgatgggttgccaaaaaaaaaccccagagaagggagggaaaacgaagaaggaaggaaccaaacaaa

SEQ ID NO: 14350 - DNA, 355 bp, Oryza sativa
  Clone ID: uC-osflcyp035h03a1
tttttggtttgttttttttttttttttttttcttttttttttttttttttttttttttttataaagggaaaaagccccggcttttgggagaacggtttgttttgttgggtgggactggaaaaaaaacaatacaatttggggggaaaacacgggttcataagaactttctgggggtcttctacgtccaaactaaaaaggggggcaagaccccatttttttttgaacctttttttgaaaaaaccgggggtttgaaaaaaaaaacccaatactttgaactacaacgtttaccagtttaagaactgggggcgtggttcccgtttcctttgccttggttggggggggcctctttttcccc

SEQ ID NO: 14351 - DNA, 173 bp, Oryza sativa
  Clone ID: uC-osflcyp035h07b1
ttcctattctcgttcttgcacggggaagaggacagaaagatgtttaacgctggggggggaaacccaccgcccctgcgccgagagagcaagtcctccccctgcccccgctcaagccgcgcctctaccagagcaagactcaatccgccgctgctggccttgagatacgccccgct

SEQ ID NO: 14352 - DNA, 365 bp, Oryza sativa
  Clone ID: uC-osflcyp035h11a1
agctctactcggcgtgggagtactgcgagaagtcgtacctccacagcgagcagaagcagatggttctagacaacttgaaggattatgctgtgagggctttggtgaatgcggttgaccaccttggcacagttgcctacaaactgacagacctgtatgaacaacaggcttcagaagtttccactcttgagctgaaagtagcatgcttgaaccagcaagtcctcacctgccaaacttacacggataaagaaggcattaggcagcagcagatgaccggaaccgccacaagacattacaaacattacattgtaccgactttggcgaacaaaagaatgcaggctttctctgagatgcaaactgatgctgat

SEQ ID NO: 14353 - DNA, 399 bp, Oryza sativa
  Clone ID: uC-osflcyp036b03b1
cctagcttcccaccattgcttgcaaagctgggggggtcactcctcccgttaagcgggccgcggcggcgagagcaagctaagctaggtcgggcatggggaaggacgaggtgatggagagcggcggctcctccggcgagttcgcggccaaggactacacggacccgccgccggcgccgctgatcgacgcggcggagctggggtcgtggtcgctgtaccgcgccgtcatcgccgagttcatcgccacgctgctgttcctgtacatcaccgtggccacggtgatcgggtacaagcaccagacggacgcgttggccttcggcgccgactcggcgtgcggcggcgtgggcgtgctcggcatcgcgtgggcgttcgggggcatgatcttcatcctggtctactgca

SEQ ID NO: 14354 - DNA, 457 bp, Oryza sativa
  Clone ID: uC-osflcyp036b11b1
ttttcttgagccaatcaaccgcttccttttgggggacgagtgagaagaggatcgaccgtttccttcgatcgcttggtctagactcatggggaacctagaagagactaggcccggaacacatggccggcaggcgccccgagcacacgtacccggatgactggtccaccaaggatcagttcatgacccgctggtccttctccgtccgcagctgctacacgctgttttgtgacccgccgcacaccaagtgtttgggcttctcggaggcggcacgcgacgcacactatctacggtggctccttacagcatctatattatcaacagagctccaataaactaagataatgcacaacctggggaactacaccgtcccggtcaggtctacatgttcatgatggacctctaggataggaatgacaggctgttctacaagctgctgatgacaccatcgaggagctgc

SEQ ID NO: 14355 - DNA, 511 bp, Oryza sativa
  Clone ID: uC-osflcyp036d03b1
cgggggcccacccacccccccacccacaccccaccccaccccccccccccccacccccaacccccaccaccccccaccacccccacccccccccccccccccccaacccccccccccaccccaccccccccccccccccacccacccccccccccacccaacccccccccccaccccacccacccaccccccacccccccaccaccccccccccccaccccaacccccccccacccaccccccccaccccaaccccaaccccatccccaatccccaaaccaaacccaccccccccccccccccaccacccaccccaccacccccaaacccccacccacaacccccacccaacccaccccccacccccaccccccccccccacccccaccacccccacccccacacccccactacacccaaaccccaaaacccacacccctcacacccccccccccccccccatccacacccccacaacccccccacccccaccacccaacccccccccccc

SEQ ID NO: 14356 - DNA, 345 bp, Oryza sativa
  unsure (1)..(345): unsure at all n locations
  Clone ID: uC-osflcyp036e01b1
tttcgatctcgtcttctctctctcgcangactgggtcgggatggcagcggagggggggaaggctgccgtggtgccggagtcggtgctgaagaagcggaagcgggatgagcattgggcggcggacaggaaggagaaggcgctcaccgagaagaagaaggccgtcgagagccgcatgctcatcttcgcccgcgccaagaagtacgcccaggagtacgacgcgcaggagaaggagcttgtgcagctcaagcgtgaggctctgatgaagggtgggttctacgtcagccctgaggccaaacttctgttttgtggtccggatacgtggtatcaatgccatgcaccccaaga

SEQ ID NO: 14357 - DNA, 173 bp, Oryza sativa
  Clone ID: uC-osflcyp037a07b1
tttttcggcggggagctagggttttggtggtggggggaggaggaggtggagcacgttactatctctttcctttagctttcttcattctttttttctttttctttccacttttcttcatttttcttccctcctaacttaactacttcactttttccatactcttcttattaatc

SEQ ID NO: 14358 - DNA, 336 bp, Oryza sativa
  Clone ID: uC-osflcyp037a09a1
aaacccccaaaaaaagggccccggggtccaaatcgtttccctccccacgaaaaaaaaaaatttttaaaaaaccccccaaaaaaaggaggggggagggaaaacaaaccctttcccaaaaagggaaaaaaaaacccccccccaagggggtttttttagccgtgaccccaccaaaacaaggagggggaacggcccaaaaaaagggggggcaaaaaaataaaaggttgtccccaaaaacggaagggggaggaaattgtttcttgaaacccttcctttgggggattccccccccccggggggaaacctgggaccccctttaaaagggccaaggggcatctt

SEQ ID NO: 14359 - DNA, 447 bp, Oryza sativa
  Clone ID: uC-osflcyp037b05a1
gaagatctgggacttgataacatatatgtatatatatccgggtagaatataacaacacgagggaatgattagggaagaattaatgggtataggagtagctagctcggaggcggttctggacgaaggaacggtagaaggtgttgggcgtccagttgagggggatgacgtcgggtgccaccaacgtcttgccggagtcgctccggatgcggatggagaatggcgcccgcaggcggtggttggagtccagcctccacaccgacccccacgactcccgcatgggcgtccaccttcctcctccggcgccggcctgcttgaggtccacctgcgccacgtctccgtcgccgttctcgtactccaccagcaccgccaggtacacggggctggaccctatcttcacgtggaaacccaccttgaggcccgggaacttgcacggcacgcgcgcgaact

SEQ ID NO: 14360 - DNA, 421 bp, Oryza sativa
  Clone ID: uC-osflcyp037b11b1
tctgcgacgcagtacaatgcaggccctcgtaagccaagaggaccaaatgcacccaggagcggcggcccgccaccgaaggtgctctccatcgacgtgccagccatctccatgggcgagctgaacaacatcaccggacactttggacagagtgccttgataggagaaggttcgtacggtcgaatctacagggcggtgctgacctccggggagccggttgccataaaaaagcttgatcccagcgtgtcaagcgactctgaagcagacttctctgctcagctgtcaatggtttcgaggctcaagaacgagtatttgattcggctgatgggctactacctggatgcaaactgaagaatcctggtctaccagtttgccacgcacggcttcctgcatgacattctacacgggaagaagggcgtgaggg

SEQ ID NO: 14361 - DNA, 524 bp, Oryza sativa
  Clone ID: uC-osflcyp037c01a1
acaaaaatgacacgctcctttattcattgatcattacgtgatggagtacaagtttataggtacggttacacacacaagtagtagtctctgcagtagaggtaatgaaaacccctttcatgcagcatttgaacaagtaaaaaaaacagatgtgcatgtccgttttccagaatatatatgcaggattagttaagaacatatataggtagaaatatattttgcaccaattaattaagcagattaagatgggtacgtagtagacattagcaagcaagcaccaaacctgtagattagatagatagatagatagatatctggagcggtatcatcagctgatgatgatgtgtatagatgaagtattgagctgatgcaagaggaggccttggatttcatgggtgaggaaatgaagttgtaaaatgttcagcaggtagctttgcacttggtcgagcagtcgaaggagcagtcgtcgtcgtcaccgtcggcggcgtagccattgccggagcggctgaaggagactaaatactttt

SEQ ID NO: 14362 - DNA, 397 bp, Oryza sativa
  Clone ID: uC-osflcyp037c09a1
aaaaaaccaaaatcagatgggcatagcattctttatttactcgccctatttgcaacttccgactttgaaaaaaaaacccctgaaaatgcagggggcttagcctgctacatttgcatccttttaaatcaccggttgtttagcgaccacaaaagagcaggggcccagacccagcagctggcttagatccccccaaaacccccccgggttttacggggcaggcctattttagaaattttacctggcctcttttttatggacccaaaggggtcggtcatttatctccttctgggacgctaccttatgcggggggcagcttcttcttcttcttcttcttctacagaaactggggacgatgagcagcccgatcgccgtgaccacaatggtcgacggccccccg

SEQ ID NO: 14363 - DNA, 368 bp, Oryza sativa
  Clone ID: uC-osflcyp037d03b1
tgctattgtaaatgactttaagagtgttgagggagatagagctctggggcttcagtcactcccggttgcttttggtatggaaactgcaaagtggatatgtgtaggagcgattgacataactcaattatccgttgcaggctaccttttcagttccggcaagccttattatgccctggcactgctaggactcacaattcctcaggtggtctttcagttccaatacttcctcaaggaccctgtgaagtatgacgtctaataccaggcaagcgcgcaaccgttcttcgtcttgggccttttggtgaccgcccttgcaaccagtcactgatgaaagcagcatttgccctggactgtgattctgtgacagttaa

SEQ ID NO: 14364 - DNA, 345 bp, Oryza sativa
  Clone ID: uC-osflcyp037d05a1
agacctcatttcaaatagagtgaataggggtcgaatcctcatgtcattacttgttaggaatcaacacgatacctatcaagcacaagttcacagctaaggaaaacgttcttcatttccctgagaatttttattttgttgagaggtcaagaccggaaacagattattgagaacagcctttaaatggaatctgggactgaaattattgaggcaaaataaacggatcaactgcaaaaaatgggaatccttagttttcagctcttttcagactcccagcacgcccagatatatacatacaggcttagcacaaatgtatgtacagatatttctgatgccacaacgttagaa

SEQ ID NO: 14365 - DNA, 485 bp, Oryza sativa
  Clone ID: uC-osflcyp037d11b1
ctttcccctcgcctccacgaacaagcgaaagtaaacgcgacggagaagaaccttccccacgttgggttggattggtcaaggcggcaacgaaccgaaggaaggaagggaagcatctgggctacaggtccacgcgatcgattgttcgatcgatctcggattgatcgctttgtgattgtgattaatctcgcggcgacatggcgacgtcgtgggctgcgccgccgccggggtacccgtacgcgcagggtcaggggcggcgcccagccgccgcacccgtcgcagtccacggccgtcgccgtcactccggtcagcaacggcgtggggaacccctacgtgatcgtcaccccggccagcgcgtcccccttcacctgccagtcactaaggaaggcgctggagccgtacggcaggaagctggaggacggtactccgcaggtcgtcgacaccaccggcaacatctggcaccacctttcgacggcgcccaacatggc

SEQ ID NO: 14366 - DNA, 331 bp, Oryza sativa
  Clone ID: uC-osflcyp037e01a1
ggggggtaaccttcttcactaacattggacttaactaagaaaaagttgtacatacgttagaccaagccaagggtattggtactgctaaggaccaaacattcagcatcagagtgcccttctaaaatggtgaaattacccattacccagggacatggaacatgactacttaataaccaggcttcaacttgatttcttcatttcgacttaattctacttgcaagaagaaaaaaaaataaggaaacgatcgggggccttgagtaagatttaggagatcactctgtgcatccagtgtctccatgaggagagggggagcgtactgcgcgttcccttg

SEQ ID NO: 14367 - DNA, 391 bp, Oryza sativa
  Clone ID: uC-osflcyp037e09a1
aacgctaactttgcttccacttaacacaacagaagagggataccggggcccccccaacaatttgaacaaccacccctttacaagcccagaaatccccgcaggcacggacagggaaaacacaccgggggtttaattttacacgggttttccaaaactggggatgtgcacaaaaccgcaaggccacacaaatagccacaaaggtttcccctttaaagccgaggggggggcgccgtcaaaagaaaaacagttaaagggattatttttataagagagggacctgtcagcctacagatagctttgttttatggtatggaggggaagctaacctctcaaaggttgtggggaaaccccccagtttattatgcgaaaaggggttcttggccggtaacgc

SEQ ID NO: 14368 - DNA, 375 bp, Oryza sativa
  unsure (1)..(375): unsure at all n locations
  Clone ID: uC-osflcyp037f03b1
aatagggaaaaaagaaaaacgagcaaatccaaatccaaatccaccaccacccacccttcccgaggagagagagagaggctatgacgcgctgcgccgtcgtcgccgccgtcgcggccgtgctcctcgtcgccggcgcggcggcggcggggggtggggaggaggaggagtnaatatcaaactgcgcgcggtggggcctgggtatttgttattcaaagcaagacgaatatggccccatctcgattcagctattccactctgttgagttgagacctaatgtgttatattgattgggctatccttctatgctaccgattagcgttgttcttactgttctatgctggtggctgttctttctcttctagtctcgagcatgtt

SEQ ID NO: 14369 - DNA, 328 bp, Oryza sativa
  Clone ID: uC-osflcyp037f05a1
cctcattattcattttattttactggggggttttctttttcttttttttttttttcttacaggtttaaaagggttccaaatacgcgcacaaaaagcacgcaaaaaaaagtttacagattatgcaaaaagggggccagcgccacccgaaagagccccgcaagccaaggtacaaagaggaaaaaaccagaaacaagcgcgaaccggacaacacccccaccaaccccgaaagcccgggggtgtagggccgaccaagtgagccaagcagccccgatgcagccggaaaggaggcagacaccgccgaaaccccgttggaagggcaaccgggccc

SEQ ID NO: 14370 - DNA, 435 bp, Oryza sativa
  Clone ID: uC-osflcyp037f11b1
tgacgattagctatctagcttagctactcgatcatcagatcatcgatcatccgacgatcaaatcagtaatcttgaatatggcggctttgaacggtaaggtggtggtggcggtgatggtggtggcgatggtggtggcggcgccgggagcgtcggcggcgatcacgtgcggtcaggtgggatcggcgatcgcgccgagcatttcgtacgtgacggggaggagtgggctgacgcagggatgctgcaacggcgtcaaggggctgaacaacgccgtccgtaccaccgtcgaccgtcaggcggcctgtcgttgccttaagagcctcgtcggcagcatcaagtcgcttaaccttggcaccggttgtcggcattccatgttagagcggcgtttacgttggcttctctatgtgttttttccccggttgtaactaggtctgttaa

SEQ ID NO: 14371 - DNA, 372 bp, Oryza sativa
  Clone ID: uC-osflcyp037g01a1
ttactcaatttttttttaccaccgccccccacacaatcaagcgaggggggctataaagaacatgtgaccccatggttcttaaaaggtcaagaacctgacaacgggccctttgcccccattttttacataggcatcccccccctgtacaagcatttcacaaatccactgcttaactcagaggatgcgataacctctcaggactaaaaagatacccggggtttttcccttggaagctccgatgcaccctctcctgatccaaacactgaccgctcctgcaaactagtcccaatttttcctttcggaaaccttggcggctattcataactcaccctgtaagtatctcagggcgccgagcggcgattagccctggcc

SEQ ID NO: 14372 - DNA, 376 bp, Oryza sativa
  Clone ID: uC-osflcyp037h05a1
tttctttttttttttttccccccctttctttttttttcccttggtgtttttttttttttttttctcctttctttccctctttcttcttctcttctttttcaccgggaaggggaacacctccccaaaatcccccctcccccccccccctttaatatatcccccccccaaaagggcccccctccccccaccaaaaaacccccgcccaccccttgggcccgccccggggcaccccaggcgcaacccccgggttaatgaaaaacggaacccccaacccccaaaacccctcccttaacccccccaaccaaagcccccctaacattgtggagccccccttttgctccttaccccaaacccccccccctataaagggggggcc

SEQ ID NO: 14373 - DNA, 113 bp, Oryza sativa
  Clone ID: uC-osflcyp039a09a2
ggaagcaaaataacatcaccatatatccttccctataaagggcctggcttaaccttacaacagggtacaaagccccccgactaattccaagttccatcgacgggggcgttaat

SEQ ID NO: 14374 - DNA, 418 bp, Oryza sativa
  Clone ID: uC-osflcyp039b05a2
gatagaacttattactgttgtttcaaccatagttttccagtgacatggatgaaaatggatttctaacattacaatgctgaggcacatcaaatacactaggtttacaacatgcaagagcagtatatggtccttttggttcagggatgtaaatctaatctaccatatccaaactgttgcttcaatcaatcaaagtcagtataagcttcctgagcgacgtgggttcgattctggcctgatgggttcaccggtgtagggatcaaacttgtatggttcccctgtgaatggatcaaaccttacttgttggcgagcagtagagtattcagcagatgacctggagctgaattctgggactatgtttgtgttgtaccttgaagcagataagtatcctccttccctagatgaaaaagctacttgagct

SEQ ID NO: 14375 - DNA, 274 bp, Oryza sativa
  Clone ID: uC-osflcyp039c01a2
tgtttttcacatgacacggaaggatcacatatagagtttaattttattacaagccacgacagaattaacaaattgagctaagcaacaccagctttattcaaggcacttatactgcttaccacctcctaacataggatggtgaggagtgctgctgattaacgctccacccggagtagatggacaccaagacgaatcttattttgcgagactgtattaggtttgttggaacattatatttttccccttcaagctttaccatggtagcatccccaat

SEQ ID NO: 14376 - DNA, 340 bp, Oryza sativa
  Clone ID: uC-osflcyp039c09b1
cactatagggtaagccgctgccccggggggaaccacaccacaaaaacccccaagacccacccgtccggcattttactgcagcatctcgagatgccccaggggaaacaacaaaacggaaagcagcttgataaccaccaactagcaaagccagagccaagggctgcccatcggggtgaaccagcaaaacacagaaatcccacagacttaagaaccccaaatctgtgctacagaagaaaagaacaaaccaagaaaatcccagaagcatcctaaagaaacaagaagcgggaaaaaacaagcaagggcagcaccactctgaaaactcccttggggaaaaagggag

SEQ ID NO: 14377 - DNA, 123 bp, Oryza sativa
  Clone ID: uC-osflcyp039d05a2
tttggttagcacaacaatttcattattatctttctccagccatcacaaagcaaattaatatctgaaccaaacattctaaggagcgttatgggatacacaggaatccgcgaggtttttttttaa

SEQ ID NO: 14378 - DNA, 340 bp, Oryza sativa
  Clone ID: uC-osflcyp039d05b1
gttgattcccccaaactcaaaactatgttgacatgccccacagtgatgccatccagagattcacataataatcatgttccaaatttccagagacctcttctaaggaagcaagtaatgtcaagggcttctgccagcatcaggcacagctttgacgatagccaagtacagtcaggtgacgtgtctggttatacggatgcactggcttcactaagtgatgctctttctgagggtctcagccctagttcggattgggtagtgagagttctagcttttgaatttattctgaatcttctgcaacaaggccagagaggtattcaggaaattaccacatacttttgat

SEQ ID NO: 14379 - DNA, 377 bp, Oryza sativa
  Clone ID: uC-osflcyp039f05a2
caagattcaaattttggttgcagttaataaaccaacaagtaacattcagatcaacactaaaaataagttaggttcatcaaactacaagtttggattccctcacatatgactactgacagctcgattctttgaatatcgcatccaaattttcatgcagttcattgtgccaaacaatgagccttgcccatgctatgacatactgttcatgtgcgagtgagtaatcaccaactttagcattgacaccgcctttgccccactccacattgtcgctgcccttgtaaccgatctggctcgctgggtttgaacctatacttcccttcactctggcctttttaagggatgcagaccattttggcagatcggattataaatcattt

SEQ ID NO: 14380 - DNA, 170 bp, Oryza sativa
  Clone ID: uC-osflcyp039g01a2
ttgggtttttcaaacggaggggcttcctaacgaacaatattctctggcctgtacgtaactgtataacatggcatccccttataacaatatgacaaagaattgctgtgcggtggaacatttgcatttttgaaaaaagcacaactgtgcaaatgacttttgaaatttacaat

SEQ ID NO: 14381 - DNA, 318 bp, Oryza sativa
  Clone ID: uC-osflcyp039g09a2
catgaataatgtcttacacccttccccatatataacttgggtccaaaatggtagtagtggtagccaacttaaccatgcaactcaccaagtctgtaccaaccagaacaacaatgtttggcttcaaaacacatgacaataccataacagacggttccaaaacacttggcctaggcacacacccatcaaaatcaagtaaaccatgttccgaaaagagaagaccttcaaccatctttatcaacaccagcacttgccgccggataccctatcgtgacgatgaatagggttcaaggcttgacggctgcacacagaaccggtagc

SEQ ID NO: 14382 - DNA, 443 bp, Oryza sativa
  Clone ID: uC-osflcyp040b05b1
cagttcctttgttaggttttcttccagtgagctctttttgctcatattcagatcttcacttatttcctagttgttactactgcctttgagtattgacagcttcatcctgccaactcagctcaatcttcctctgaagtttcagtctttgtttctgaatctcttcagtgttcagaggggaagttctgccaaaaaatttctctggccatccattttccaaggggagattctgccaaaattttcatctctgtccatcaatattcctggggaggttctgccaaaattttctctgaaatcggttaatttataaggggaggttctgccgaaattttcgctggtcatcaatcttccctttgttgacataccctgcataagtatatacaacaaacatataactttttgcaaggtaagaaggagtttttatctgttcttgatgatagacttct

SEQ ID NO: 14383 - DNA, 348 bp, Oryza sativa
  unsure (1)..(348): unsure at all n locations
  Clone ID: uC-osflcyp040c01b1
aatcctccaacctgccactacatcttggtggcttttaataaaaanatcggtcattacaaacatcgcnctcgctccctacccagcttcctcctcattacccgacactgattcctaccgccccccccaatctccaccccgtcccaacattacaaccaattacctccccccttggctcccccccaggcccacctgatactgccaaccctaccactctccatccacccccaatcttcgctccttccctatcaaaaacataaacctctcttcctacaacctttttatctcctatccaatctacccaatcttcaatcaccctcttttcattcccctcatcctactacccgaacc

SEQ ID NO: 14384 - DNA, 358 bp, Oryza sativa
  Clone ID: uC-osflcyp040c11b1
cttatggattccttactcctgacttctggagggacggcaagttcgaaaagtctccattccaggagtacaccgacctcttggccaagccgactaaggctcttatgattgatgcacctgtcgagaacgtagaggcttaggatggcggagtaaagagagtctttgctagctcggacttgtctgatgcactttgttttacaatagttaagaaccggttgtcatccttggattgtgctgcgtctggatgtttctatttcctgtcaagttttggatcatggtactgtgatactgcttttatcaacgaatgctgcataattattatgttgaaaaaaaaagcctaagaattgaagagcctgaagaa

SEQ ID NO: 14385 - DNA, 437 bp, Oryza sativa
  Clone ID: uC-osflcyp040g11b1
gcatgggactcattttgaatctctttaggggtgaatataccatacctagcaagtggttctcactagcacaaattgagtgaaataatccatgctagtctgacatgtacagcaacaacattacagggcaaattatgatttaccattcaccaaaatacacagtaaatctgaatatctccgtgcaagacgagcatcatggcggcaggaaacttgtagaaagcagcaacccaaccactgactactgactgagcctagcattgtccatacatcagggtattcgaagatagttggctcgaattataggctcactgatccaacagttccaacaaaccacccaaagaaggaactttggagaaaggttgtttactacttccttccttcatgacagagaagttgccattatttgccttgaagcattcattggctggccgtttcacaaa

SEQ ID NO: 14386 - DNA, 179 bp, Oryza sativa
  Clone ID: uC-osflcyp040h07b1
ctacaccaacgactccattagcattcttctcttccgaaaaatacatctcctgcaccagaccttcaccatccccctttaattccttccctaaccactcctgcttcagctcttgatcctccaactgctttcttgctcaacctcactatctccattccccaccatattaccttccacccatc

SEQ ID NO: 14387 - DNA, 498 bp, Oryza sativa
  Clone ID: uC-osflcyp041a03b1
cggactcttgggggcgcgcgccccgcgccggggcggggtcctcttaacccgcgcggtgcggtcggcaccccggccgccgagcaagtggtcgctgggtagctggcgcaacctgacggcgctgcagcagccggagtaccccgacaaggcggagctggatgaggtgctccggacggtggaggcgttcccgctcgattgtcttcgccggcgaggcgcgcaagctggaggagcggctcgcggaggccgccgtcgggcgcgcgttcctcctccagggcggctactgcgccgagagcttcaaggagtttaacgcgaacaacatccggtacaccttccgtgtgctcctccagatgttcagggtgctcatgtttggaggccagatgcctatcatcaaggtaggaagaatggcaagtcagattgcaaagccaaggtcagatggctttgacgagagggatggagtgaatatgccactctacataggggataacattaatggggattcat

SEQ ID NO: 14388 - DNA, 447 bp, Oryza sativa
  Clone ID: uC-osflcyp041b07b1
ctgttttctacccacccaccctctcgccgtcacaggggcgattttagaaagagctgggggtctccgctgccatggagctctccgcggagaagacctcgtcggggagggagcacaaggcgaaggacctgtaccaggcggacttcggccgcctcgagatcgagctagccgaggtcgagatgccggggctcatggcgtgccgcgccgagtacggcccctcccagccgatcaagggcgcccgtatctacgggcccctccacatgaccatccagaccgacgtcctcatggagaccctcaccgcccttggcgccgaggaccgatggtgctcctgcaacatcttctccacgcaggaccacgccgccgtcgccatcgccagggactacgccgccgagttcgcctggaaggtggagaccctggaggagtactggcggtgcaccgagcgctgcctcg

SEQ ID NO: 14389 - DNA, 377 bp, Oryza sativa
  Clone ID: uC-osflcyp041c03b1
gtcgtttgcgtgcataccggctagacactgatgcctgggcatattgaatgcgcgagcgtgtgatttaaactggtatatatatgcatcttttcgacggggatgctggagaaccggtgtcacgagctgagcatcctagagcggagcaggaacgagcatagctagaggatcccctgtgtgacggccccatgccccgcggcgggtggtgggctggtaggggactggcacgggaacggaccggcttcaccgtcgcttccagggccacaggccaccaagacggcgggccggccgagctcttctcctttaagtggaccaccctgctcatgctgatcgccacgctgctcatgctcatcagaagtctctcagtcacacggatagtt

SEQ ID NO: 14390 - DNA, 484 bp, Oryza sativa
  Clone ID: uC-osflcyp041c11b1
atggtgctgcaatgctcacatttgaagcactgtcaggaacatctgaatttgcaaagagatgggtccctttctgcaaaaagttcaatatcgagcctcgtgctccagagtggtacttccagcagaagatagactacctgaaagataaggtagcagcgtcctttgttagggagaggagagcaatgaagagagattatgaggaattcaaggtgaggatcaacgccttggttgccaaagcccaaaaggttccagaggaaggatggacaatgcaggacggaagcccttggccaggcaacaatgtgcgcgatcatcctggaatgattcaggtcttccttggccaaagtggtggccgtgatgtggaaggaaatgagcttcctcgcttggtttatgtctcaagagaaaagaggccaggctataatcatcataagaaggctggtgctatgaatgcattgtccgcgtctctgctgttctttcgaatgctccatac

SEQ ID NO: 14391 - DNA, 489 bp, Oryza sativa
  Clone ID: uC-osflcyp041d07b1
cggtttcgtggggctggacatccacttccccccgggggacgtgttataatcacaggaagtctaaaagatggtcccatgatgactatatcaaaggatgggggcaaaccatgtccactacctgacagctggaagctggctgagatctttacaactggagttgtcctcggaggatactcggcagtgatgacagtaatgttcttctgggctgcatataagacagactttttcccgagaatattgcatgttgaaagccttgagaagacagctcaagatgatttgcaaaggcttgcctctgctgtttacctccaagttagcaccatcagccaagctctcatctttgtcacaaggtcccgcagctggtcatctgttgagcgccctgcatttctgctggtctttgctttcttggatgcacagctgattgctacactgattgctgggtatgctgactgggcgttcacctcaatcaaaggcattgggggggggttgggc

SEQ ID NO: 14392 - DNA, 455 bp, Oryza sativa
  Clone ID: uC-osflcyp041e03b1
gccgttcggggaaacaagtaaacgctcgctcgctggggctcctttgaccccgtccccgcctggccgctgctgctctctcgctcttctccctccaataattcgcttgccctctggtggctcaaagcccagggaaattgatggagaagaattggggtagccccatgccacctggttcgggctagatctccggcgagacggccgctgggagcagccgatccggccccgatccgatgggtggcgaggtgccggagccgcggcggctcaaccgggcgctcagcttcgacgactgggtccccgacgaggcgctgcacctcgtgatgggccacgtcgaggacccgcgggacaggaggccggcgtcgcgggtgtgccgccgttggcaccgcatcgacgcgctcacgcgcaagcacgtcaccgtcgccttctgctacgccgcgcgccccgtgcgcctccgggag

SEQ ID NO: 14393 - DNA, 264 bp, Oryza sativa
  Clone ID: uC-osflcyp041f07b1
tccgccctacccgcccgcaggtgactaccccttcttctccatcgcccacgagggagagtttggaagctagctggggtttcatccacagccgccgacatggctcgtggccgccgcctaggaggcgagcatgtacgcactgcagcatggcgcgaacccccatcctgccgatgacgctcatgaacgccatccggctgggcctgtgacagacgatctagtccaccgccgccccctgaggaggggggaaggcagcccatgtgaccccga

SEQ ID NO: 14394 - DNA, 525 bp, Oryza sativa
  unsure (1)..(525): unsure at all n locations
  Clone ID: uC-osflcyp041g03b1
gtcgtttcggagggcaccttcgacaagctcatggactgcgcgatcagacggggcgcgtgcatcaaccagtacaaggcgccgcggtgcgtgcgccctggcccggtcgtcgagctgctcgacgcgagggtgcagggcaagtacttcagtcccaagtgccccaagtggagccccgggaacaagcaatggaacaaaagcaaggatctggtcggcaagggagacgcctaatattgaagctagagggtgatgatctgatcgagtatttgtgtgagctggtaattaattaacggtacatgcatatggccattggtcgatatgtttctttagggatatgataattcatgtttgaattatctctgatgctgcgagaggatcgaatagttatgagatgacgacttagcctatatgatcatttgctttactctttctctgctgtaacgcagtatatgttatttcctccgtctcaaaatataagcatttttagtacattngataatcaaacatttttaaatttgactattaatagca

SEQ ID NO: 14395 - DNA, 420 bp, Oryza sativa
  Clone ID: uC-osflcyp041h07b1
ctgttttattcagaatgctcacgaaggtgctaaaggcatgattttaaaggtgcctaggggtatgtaactgctgataaccataggtctgcaaagtattatgctgcgcacgtcttttgcggacaccttaagaaggttgcgaatatacatgtgaccaccaaaaccttgttcaaagtgatgctaagtactttaaattatgatgaaatgcaacatgccgtgtgttgtattcggcttgaaccctcgacccgcgagatgtggacatgcgtgccagcatgttgtacttgtaccaggttcaacgttagcttgaacactgaacaagttaaatgtgttgcaaaaatgccaaatttaacccaaaacattttaaagaagcaatgctcctatgacaagaatttttaaacaaattttctcaaaatcaaagggggg

SEQ ID NO: 14396 - DNA, 410 bp, Oryza sativa
  Clone ID: uC-osflcyp042c11b1
tttttaagcttgcctaaatacacaaatggaagggggggtctgttgagaccttatgagctatgaccacaaggctaagtgaggctatatgagatcctgcaatcataaccaaccttgcatcggagaaacaaaaagactctaacattggaagaacaaagagatctttatgatcaagagattactgattatgctctggtcattgatgatcctcgaaatgcaacaaaaaacttcaaatggcaaggcaagccctgtaagactggacatgcaagaatgatctggccaatactcgctgatctatgacctactattaaccatcttatagaaagtggggacacatgcaagtccagggctggtccatgtgctacatgttaacatatcatggcgctgtactgaataatcattactaatactat

SEQ ID NO: 14397 - DNA, 483 bp, Oryza sativa
  Clone ID: uC-osflcyp042d07b1
gtttgagttgaaggcagctggtgctacttggatggagtttgatgaacccacactggttcttgaccttgactctcaccaattggctgcattctctgctgcatacacagaacttgagtcggcactttctggattgaatgtgcttattgagacatacttcgctgacattcctgctgaatcatacaagaccctcacatccctgaacagcgtgactgcttatggttttgaccttatccgtggagccaagactcttgaccttatcaagagtgctggtttcccctctggaaagtacctctttgccggtgttgtggatggacgcaacatctgggctgatgatctcgctgcatctctcactacccttgagtctcttgaggctattgctggaaaggacaagcttgtggtctcgacttcctgctcactcatgcacaccgctgtggatcttgtaaatgagaccaagctcgatagcgagattaagtcatggctcgc

SEQ ID NO: 14398 - DNA, 526 bp, Oryza sativa
  Clone ID: uC-osflcyp042e11b1
tttttatcatggccatcgcgctggccaacggggggggcttttcaaggactgggaggtcttccacggcatcattgtcctgctgcttatcaactccaccatcttccttcattgtagagaacaacgcccatcactcgccgctgctgttctcatggccaaccttgcacccaagaccaatgtgcttcgggatggccgattgggcgagcacgaggcaacaactctcggttcccggtgacattattaccatcatactcgatgacatacgccctgctgatgctcgtctccttgagggtgacccccttaagattgaccactctgcacttactggtgagtcccttccactgaccaataaccctggtgatcgaggtcttctctgccttgacctgcaaacaagttcagattgatgccgtggtcattgccactggagtgcacaccttcttccgcaaggcggctcatcttgctcacagcaccaaccaagttggtcactcccagactgtgctcactgcgatcgggaacttctgtatctgct

SEQ ID NO: 14399 - DNA, 366 bp, Oryza sativa
  Clone ID: uC-osflcyp042g11b1
tctagatctcggaagagaagaacacgcaccgcggggagaggggagagaagcggaaagctccaccgaatcgaagcccccacacacgcgaagctggcgcgggaggcggccgacgcgagcgcccggaagcgcaaggcggcggacggcggcggggagggcgacgccgcggcgacggtcccggaggaggcggtgatgggggaggcggcggcggcagccgcggcccccgagccggtcgtcgaggggggaggaggagggggtgggggagtttttataccctaaccctgccgatgaaggcggatgcgatggtgctaattctttgctccctaggtgatctgacccatgtacgtgccaggatctccccacctctag

SEQ ID NO: 14400 - DNA, 466 bp, Oryza sativa
  Clone ID: uC-osflcyp043a03b1
gttattcttatgaagattctcacagagagggggggcgcctttacacacaactgctgggcgggaaattgccagagacataaaggagaagctcgcctatgttgctcttgattatgaacaggagcttgatactgccaggagtagctcctctattgagaagagctatgagctgcctgacggccaggtcatcaccatcggagcagaaaggttcaggtgcccggaggtgctcttccagccatcttttattggtatggaagctcctggcatccatgaagccacatacaactccatcatgaagtgcgatgttgatattagaaaggatttgtacggtaatgtggtccttagtgggggatctacaatgttccctggtattggtgatcgtatgagcaaggaaataactgcacttgcccctggcagtatgaagatcaaggtagttgcaccgtcagaaaggaaatacagtgtctggatt

SEQ ID NO: 14401 - DNA, 370 bp, Oryza sativa
  Clone ID: uC-osflcyp043c05b1
ctctttgaggaggggtggcttctcctccccctggtggcctttttctaatcggtacggtttcgaggatcgccaagggttaagagggatgagatggcggatactgatgtacagtaccgttgcttcacaggtggtctcgtctgggacaccgacgaccattgcctcgaggacggcttatgcacctacggtgagatcctacactgcaagaacataaacgacagtgagacagggaggtcacgtgggtttggcttcgtcaccttctcctccgagcagtctatgcgcgacgccatcgagggcatgaacggcaaggagctcgacggccgcagcatcaccgtcaatgaggcccagtcccgccgcttccggcggtggaggc

SEQ ID NO: 14402 - DNA, 463 bp, Oryza sativa
  Clone ID: uC-osflcyp043d01b1
gttgttttgcatgcagttgtttctggtgttaaggggcgattttttgatggctgcagggttttaccatctgttattcaagtgacatttatggaagtattgcgagccacagtgactccgtgatcaaaaaggtggggttgagtaccatggtttgcaattacggacctgttagaaactaagaaaattgtaattataagtagacacaaatgacgtgcttcaacttttgatattggttacaaatgtgacctgctcaaatttggggaaccattccatcctcccaatcatcagggttttatgctgaaagaactgaagaggtggtatttccaggatggtggagggacagacatggtactttcgctttaagaaactggggatgatactggagtatggccgcgcttttcttgaagttcatcaatattttgaagaggtgatatattggagcactgcagtccgagaaatgattttt

SEQ ID NO: 14403 - DNA, 481 bp, Oryza sativa
  Clone ID: uC-osflcyp043d09b1
tttatgtcaagaagctcatctcctcctcctctggcggggcttttatggccaccacggcgttcagcctcctcaagacctccttcgctggcgcgcgcctccccgtcgccgaccgcaaccccaccgtctccgacgcgccgcgcaccggcggcgccatctgcaactccatctcgtcgtcgtcgtccactcccccctacgacctcaacgccatcaggttcagccccatcaaggagtccatcgtgtcccgcgagatgacccggcggtacatgaccgacatgatcacctacgccgacaccgacgtacgtctgtcgacggcgtcggctccgcggggctctcctgcgcgtacgagctctccaaggaccctttcgtcagcgtcgccgtcatcgagcagtcggtgtccccccggggcggcgcgtggctcggcggtcagttgttctccgccatggtggagcgcaagccggcgcaactgttactcaacaagctt

SEQ ID NO: 14404 - DNA, 560 bp, Oryza sativa
  Clone ID: uC-osflcyp043g05b1
ttttcaatagaaaggactaaactatacattacgggggtggtttgtaacagtggcgcagtttccaagcttctagccaagaagtaacaagtaatacaaggaactgtatgtcaactcatccaaagattccttgatgtggactgacataatgttggacaaacacaactaatccatctcattgtcctaggctatagccaatggcacgttttaaagtcaccaacataaacacatttgaaattgctcttacaatatttattatgccgtttcaattgtacctaaatgcccttttagacatcagatcttacaggaacaatagttagatattcccatgaaaagtagagttagataatattttgcggctttgcaaagataattgataggcaagatgatgaaccagtgtagcattttgactaaatgtggaaatatgggctgcatctctaatttctatgccttctaccctgaagctgttcttttccactccaagatactgcttgctagaacttgtacttagtgcattagttttcttaggtctcttatcaggtaggtgattttttaggctgatt

SEQ ID NO: 14405 - DNA, 193 bp, Oryza sativa
  Clone ID: uC-osflcyp043h09b1
ttgtggcgaagcggagccagatttccctctcgtcggcttttttactacgcgacgcctcctagccgccaccgcttcaccaaatcaaaagctctcgctgctcctcgagagggagttggtggagagagaaagagagagagagagatggcttccctcttctttcccttctcttttcctgtcttcttttctttttttt

SEQ ID NO: 14406 - DNA, 407 bp, Oryza sativa
  Clone ID: uC-osflcyp044f01b1
aacatttctcgacgaggtcgacccggagcttctcaaggcggtctttaagcctcgggagggggctcagcaagcagaaccgcctcgccaacgtcgccgacgatgccgtcatcgactccacctccatcggcaccacccaccgggaggagctcatgaagaagggcgtcatcttttgctccatttccgaggccatccgcgagtacccggaccttgtcaagcgctaccttggcagcgtcgtgcccccggcagataactactatgctgccctcaattcggccgtgttcagcgatgggtcgttctgctatgtgcccaaggatacggtttgcccaatggagatatcgacatactttaggatcaacgacaaggagaccgggcaatttgagaggactttaatttgtggctgaatgaga

SEQ ID NO: 14407 - DNA, 284 bp, Oryza sativa
  unsure (1)..(284): unsure at all n locations
  Clone ID: uC-osflcyp044f09b1
atcctctcccaccaccaagcgcgagctcgattgtgggtttaattgattttctccggtttaatccgtagaaaattccccactcctcctcctcctccaccgccgccgncgacgccgcactcctcactccgcagaagcaacaccaacgccggactccaacgccaaccgnctgcgcgcgcggcccgtcgccatcgtcgagcaccttcacgcttcctcctcccccgcacggaacggcgacccctagcgccgctataagaaggagagaggtgggcgggactcatggcgcc

SEQ ID NO: 14408 - DNA, 552 bp, Oryza sativa
  unsure (1)..(552): unsure at all n locations
  Clone ID: uC-osflcyp045a05b1
ttgtttctaggagggtgttcgatgacatgccgtcgaggagcaccattacatggaacgccatgttgcatcagtatgccaggcacgggaaagttgacacggcttatgagctgttcctcgcaatgccgaggagagatgttgtgtcctggaacacggtgttggccgggtactgtgttgctggccggtgcagggaggcacttggcttgttccgtcagatggtgtcgccgtcatcgtgtgcggtgcatcctaatgtgcctacgatgagcactatcctcggtgcttgtgccggcgcgggttgtttggagaccgggatttgggtccatgcatatattgagaggaacagaatgaatgatgatggctatctggatcggtgcctgatagacatgtactgcanatgcggaagcatcgataatgccctacagggtgttgagaaggcacctaggaagagggacctgttctcatggacaaccgtgatctgtgggctggcaattgcacggcgaccactgatgctttgagatgtttgcatgatgcagataatgcatatgcccgatgatg

SEQ ID NO: 14409 - DNA, 539 bp, Oryza sativa
  Clone ID: uC-osflcyp045b09b1
tataaagaaaattataaaaagcggaggcggctggagtgaagtgggcgagggcgcaaaccagagagaggtcacgagattatcgccggccatggccgccgcatcgtcgtcgcgtgttctgctcgccgccgtcgccgtcctggccgccgccctcgcgggctgcggtgcgggggcggcgctggacgacccggcggggctcctgcggcgtgcgaaggaggcggagttcgcgggctggatggtggggctgcgccgccggatccacgagaacccggagctcgggtacgaggagttcgccaccagcgagctcgtgcgcagggagctcgacgcgctggggatcccctacaggcaccccttcgccgtcaccggcgtcgtcgccaccgtcggcaccggcggccctcccttcgtcgcgctccgggcggacatggacgcgctcccgatgcaggaaagtgtggaatgggagcacaagagtaaagtgcctggaaagatgcatgggtgtggtcacgatgcacatgttgctatgcttgttggttctgccaggatac

SEQ ID NO: 14410 - DNA, 547 bp, Oryza sativa
  Clone ID: uC-osflcyp045c05b1
ttatgaactgttcgaggtggtttaaagccatcacaagtcacctccaccaaggatagtagatccgatgcttctcatagtccaaacacaccaaaacgtacagctgatcgagaaaatcaatggagaacatcatggacggggtctgaagagtcgatctcaacaaacccgtcgcagagagatgcacaaagtgaatatggaagactagagagttctacagaagataatgaccaatctataagtgggtctggaactgttgtactgcgctcgccaagagcatctcaggtgtaccctgcagctactaaccacagttccaagcctcccagtagattctcctcgtatgaagacacgtctatcagtgggacagtcgttcggaatcaaattgaagaaccagaaactccacgatcttcaaggtcgagactgggaatccaagaaaagtcaccaaatgcttcactggaggacagtgcaactaaccttgcagaggcaaaggctgctctccaggctgcgtttaaaaagggtaatgctcgtgaaagacatgttatcaacaaacatg

SEQ ID NO: 14411 - DNA, 302 bp, Oryza sativa
  Clone ID: uC-osflcyp045f01b1
ttctgtggtgacacggaggcgttctggacgagaagaagatgtggactttcccgtgtgttttttttttcgggatttgctttgatccccttgtttgttttagctctggatgttgattagcgtcttgttcatagcaattccactgccaccgtgtgagtgtgctctgcttgcctgatgagggcaagaaaacttccatggatccgtctctctgggaggaatgaataaaaaggatgaggaaataaaaatgattcagtgccaaaagaaaataatcaataagctttcctggggccccggtgttagcttgg

SEQ ID NO: 14412 - DNA, 300 bp, Oryza sativa
  Clone ID: uC-osflcyp046b03b1
ttttgtcgtaacgctatacacggggaaaccacggggggggattgaggatattggcgggctggacaaacaccgacaaggtgcaagaggacagcgtgccattgactagtgacgctggcaggaacaagaccgggacgaatagagagcgcctgtaaagaagctacaaagagaagggcagatagcacaccctgaggacaccagcccccgcggcggtgttgagctccatgcagctgacggcggcgtggatctgccaactcatggaagagtgtcagaggaagggggcggagcatccctgcgtcaact

SEQ ID NO: 14413 - DNA, 476 bp, Oryza sativa
  Clone ID: uC-osflcyp046d03b1
aaccaattcgcaccgatcgatcgatgggtggggctaattacaagatcgggggggctaactaggaagcatggcccgtgcacagttggtgttggtcgccctggtggcagctctgctcctcgccgccccgcacgccgccgtggccatcacctgcggccaggtcaactccgccgtcgggccctgcctgacctacgcccgcggcggcgccgggccgtctgcggcctgctgcagcggcgtgaggagcctcaaggcggcagcaagcacgaccgtagaccggcgcaccgcctgcaactgcctcaagaacgcgggccgcggcatcaaggggctcaacgccggcaacgccgccagcatcccctccaagtgcggcgtcagcgtcccctacaccatcagcgcttccatcgactgctccagggtgagctgagccatcgatcagagagacggatcatatatatacagcagcgcgccggttgccacctagt

SEQ ID NO: 14414 - DNA, 124 bp, Oryza sativa
  Clone ID: uC-osflcyp046f03b1
ctttcttccagaccagcagcaccccccacaccgggggggggttaacaaaaaaaaacggggggggaacaacaccccaccaacacagggcacacaaggcggccacaaacccacccccgaagaccca

SEQ ID NO: 14415 - DNA, 430 bp, Oryza sativa
  Clone ID: uC-osflcyp047f11b1
ttgttgtttacaaataatggggtcgcgcttggggctctttttatctcttgttgttcataaaccgccgaaatggcaacgcactgactgagaatctctaagtggcaagtcccactgcattcttatcactccttaaaatgtggcaaccagcaaatgggaatcttatggcaaatgacactagtgatggcaaccccgaataagcaactgcctgcattgctctgcccaaaaatgatttctattgtgatgtctgcatcctgtggcaaagtctcattgttcaacatgatgacattcaaggtcatgactacttttatggcacctccacctgctgcaactttacttgcattccacccttaatacaataatatcattgctataggaatggaggactctaccattcaaatttaaaatgtccgtgatgacgaggttaaaagca

SEQ ID NO: 14416 - DNA, 496 bp, Oryza sativa
  unsure (1)..(496): unsure at all n locations
  Clone ID: uC-osflcyp047h03b1
gttcgatgtttccccaatggaacaggatatgccctaagttctgttgaaggacgagtttctatggaattctttgatctatctgagtctgctcaatctaaaaagtatgctttcaaggtgtcatcggaaatcagaagctggccgggacaccgtttatcctgtcaatgcaattgcattccatccaatatatggtacatttgccactggtgggtgtgacggatttgtgaatgtatgggatggcattaacaagaaaagactatatcagtattcaaagtatgcgtcaagcatagctgctttgtcatttagtaaggatgggcacctgctcgctgtggcatccagctacacttatgaagagggagaaaaatcccatgaacctgatgcaatatttatccggtcagtgaatgaagtggaagtaaagccgaagcctaaggcactggcagcaccttaaangtgttttagttgtctcacgaaggggatatcgtgtggtttgatgtgtatg

SEQ ID NO: 14417 - DNA, 440 bp, Oryza sativa
  Clone ID: uC-osflcyp047h11b1
ttcgatagaaaaagaaagaaattaaaaagaggggcatttttcgtgagcttgcagtgacagcaatggtgagagttgctgccgccgcggcggtgctcgtgctggcggcggctgcagcttttcgcggttgccatggccgatgagccgtccaccgatgacggtgcggtccgggtggcggcggggctgacgaagtgcgtgtccgggtgcggtagcaaggtgacctcctgcttgctcggctgctacggctgcggcggcggcgccgccgccgccgcgacggagatgccgttctgcgtcatcggctgcaccagcgacgtcttgttctgcgccaccggctgctccacctcgttctgattaagtacttaatgaagtaattaacccgcgcttattaataataaatcgcacctacgtatgccacatgtggacttgcttgactattaaatact

SEQ ID NO: 14418 - DNA, 605 bp, Oryza sativa
  Clone ID: uC-osflcyp048c07b1
gttagttgcggcgcggcgcggagaggcgagcggttgtggtttttctctcattcttccctcccttcccccccctacttctgacgagccagctccttatttcttgccctatcctatctctctttgtcaccttccctgcctccttctccttttccttcttccttcttctctcttcttctctttccttccctcttttttcctccctccccttctctctttctctccttcttctttttcctttcctcctctcctctctcttttctcctcctttctcttcccctctctctctccttcttctccttccttctccctcccacctcttcctccctcctctcttttctctccctccttttttctttctcttcctcttctctatttcctccctcccttcaccttctttccctctttctctctctatctccttcttcctctcttttctccctttcccacttctccctccttctcctttctctcccttcttctctcccccctccttttttctcccccttctcttctcctttcttccccttctcttcttctttttcccctcttcatctctcttcttctcttcccctcatttccccttcctttctcccttttctcccctc

SEQ ID NO: 14419 - DNA, 490 bp, Oryza sativa
  Clone ID: uC-osflcyp048d11b1
tttatgtcagggagggtgtcatggagttcctgtggaggaatcatccgctggactgcccaatctgtgatcagggtggggagcgcgatctccaggatcagtctatggcatttggggctgaccgtggtcggttcactgagatgaagcggtccgttgaggacatgaatttgggcccattggtgaagacagggatgacccgttgcatccaatgtacaaggtgcgtcagatttgctagtgcgggtgctggtgttcaagacctgagtatgttaggtcgcggtagtggtgaagaaattggtacatacgtggagaaccttatgacaagtgaactctctggaaatgttattgctatctgcccagttggaggccttacatccaagccatctgcctttaaagctaggacctgggagctgaagggcactgctactattgatgttactgacgcaggttgttccaacattttagtagcctgcagaggttctgacctttgcgtatc

SEQ ID NO: 14420 - DNA, 403 bp, Oryza sativa
  Clone ID: uC-osflcyp048g09b1
gtttggttcccttcgcctaagcgaacgaaccagggccgggttctcatcgggacgaccgcaccaccggagcccgagaagacggaggagcaggagctcctccacccccttcaagagccagtggagggagacgtcagtggcggcggcggggcagacaggacgtgcgggatcgcgacgtgggcgctgattcgtgtccatcgttggagaggcggcgctgccgacagcgagtgtgaccgggcccagagcggcgctggggccagaaggcccgttggcggtggaggtccgggactacatgcggtggtacacgctgtacgcgaggacggggagcaccgagtccgcgcacacgatggcgacaaccatcgtggagatgaccaagaacccggtcacggtgacgctcatcgtggcc

SEQ ID NO: 14421 - DNA, 130 bp, Oryza sativa
  Clone ID: uC-osflcyp049a10b1
cagctattacaattcacaagtgtagactgtaggatggccacgctctcttactgcagccgcctgagcaccggcggcggcgcccaccagagccgtacacggctcccaacaagacaaccccaccaacacccaa

SEQ ID NO: 14422 - DNA, 394 bp, Oryza sativa
  Clone ID: uC-osflcyp049b05a1
cgaaagattctaaacattagactgcttgccattttaatatatccaacattaacaagggcggtagtagaatcattagtccacatgattctacatcactctctatttttgctttttttttctaacacattttagatgatgcacctgaaactgaacagaagctgctttactactacaagggatgcagctccagaaagctgcatttttccccctttttttttcagtttttatacacagtgtagaaaagcagagagactaaactctgaaaactccaaggttatacactagacagcagcagcaggagcatcaccacttacccatggcgctttagcgaggctggtggatgacgtggcggccggcgcctcccttggcggagaccaactgggccggcttgttg

SEQ ID NO: 14423 - DNA, 246 bp, Oryza sativa
  Clone ID: uC-osflcyp049b06b1
gtcgccttcgttttcctcctccccaacacaaacaaacacaaaaaaaccttcgccgactctcgctcaactcacctcaccaccggaggcagcttagcttccttccttcctcctccatccatggcggaggagcagtccaaggcccaggcggtggcgaaggccctgtcggagccggtgcgggtcggggggtccgcggcggaggccacgctctccggcggggagctcacggggcgccccaagggaggccgg

SEQ ID NO: 14424 - DNA, 389 bp, Oryza sativa
  Clone ID: uC-osflcyp049c09a1
aacacttatttgctgggagcaatagatgttatattagaagtcccattggcccccaacatggggcaaagccttcctcgcattcgggacggaaatacatatcaagtagcacgttttgctgttttagcatcccaattccgagcagtttggtgacacgacacactgaaaagatgagcgctttaagtatcaggcctcatacggctggctggagtggcccaagtccggggtccagctttgcttctctatagtaagaacttttcggatgaattcccgcctgtcctcactgaataggggggcagccttcgaggcggctaattaatttgggttagaaaagcaagcagtgagtgtggggatgtgagcttagaaccacaacaactttggcgctccagtgg

SEQ ID NO: 14425 - DNA, 512 bp, Oryza sativa
  Clone ID: uC-osflcyp049c10b1
gagctttctcttgaagctgcaagtttagctcaaagaaacgcaagcctcggaataagtgactcttcagcagtatctgcaacaagagcgagggctttggctgaggatgcattttttcatccatctgttatgtctatcagttatgcttcaatagagcactattttgcgatttacatgccattctttgcgccagtttccttgcatgtgctgttggcggtaatgaaagagctgaaacgatacatggtagagagaaggaaatattcagcatttcttgcttcccaggcgacatcttcctgatcttttggtgattatcagcagccctgtttcatgcctagtactatcatccacaccaagtctgatatagatggtagataatctgcaacggggttcagccacagctgggggacgcgtcttcttaccatcaagcaactgctgggcagacaggtagaccaaatggtgtgtgcctgtgaactcgcagaccaggcgaagatgtgagggaaccccgtttttgtcac

SEQ ID NO: 14426 - DNA, 388 bp, Oryza sativa
  Clone ID: uC-osflcyp049d05a1
atctttttgtcttttacccccttttttttttttttggaaagggggggctgttttttattgggcccagggaaaccccaccccaattctcaagctgggagggtaaaaaaatccacattacagttgcaacacaacgggggccatccagctaacaaagaggcaagacatgtatttaggcgaaacatacagtccaacacaacagctggaaaacaagcccaactaactcattacatttatttcatcccatggtgatccacgaaggatgtatatacccggacggaatttccccagtcctcaaagagatgattaagggggtgggggcggctttttcacgaaggcatatcatggtgacgaacaacccttttttaacgggggggaatgttaggcccaa

SEQ ID NO: 14427 - DNA, 381 bp, Oryza sativa
  Clone ID: uC-osflcyp049e01a1
atatgcattatattagcatcaaaaaacaagggggctaagcccatataggcccaacattcaaacataataaccccccttttaggcccaacaattaaacattttaacacccctttttgcacaaagggttcagcccaatttgaatccaacacaacccggcaaacattcaattcaacacaaaatttacaacacagcaaatcagcaaattaactgggtggccactcgggggaagggtttgaaccgggaaagggataggaagggcttgaactgggggtgggacagggacaagaagtgcttgaactgggggagggccggccctaatttgtttaggaaccccccaaggtatgaagtttcagccataaatcacatattttaatcaggggg

SEQ ID NO: 14428 - DNA, 116 bp, Oryza sativa
  Clone ID: uC-osflcyp049e01b1
gcgcgtgcttttgtaagagagagcccccctacgacgacgacgaggatggttttagactccacctccgccaccgcgcccgcggccgtgctcaagacgcccttcctcggggcgaagcg

SEQ ID NO: 14429 - DNA, 411 bp, Oryza sativa
  Clone ID: uC-osflcyp049e09a1
ccataacagagacgacagccccaaatacttgacttgtccactatgattttcttgacaaacttaggtaccagataacattgagaaaagaaaaagaaaaacataacataccacctataacttaccatacttttaacctaacaaaattactctccgaatgctaaatgtgcgttggagttcttatgggcggaactgaaatctcaagggcacgagcagattgattttgctcggggaaaaaacccaagaaatctcctcccaagcacccacactcacaggcccatcacaccaacatgaataactttagcaagctcttaattcacacgcagaaatccacctgccggaacatatcaccacggccgaagtcgtagccgctgggtatctctgggaaatcctcgcagaagtcatcaccgatgt

SEQ ID NO: 14430 - DNA, 418 bp, Oryza sativa
  Clone ID: uC-osflcyp049f05a1
tttcttttgtttttttccctccttttttttttttttttttttggtggtttttttttttaaaaaaaaaggggccccctgacccttcattcaaacgaaaaaaaaagggggggcttttgggacacccaagaaaaggccctccggccgcccacaaaaaagggaaccctaaccccggggggggccctaaataaaccccaaccccccccttaaaaaagtttattggggtggcctgggcccccccccccaaaagaagccggggtttcccccccctgggggggaggggccataagtttaaaaaactttccgggttccccaggaaaattttaaactctccccctccgggaaggagggccccgtggggcggctttgccaaccacgggggggggaaggactcttctctaaaacagagggcccctttttt

SEQ ID NO: 14431 - DNA, 308 bp, Oryza sativa
  Clone ID: uC-osflcyp049g01a1
cagcacaaagtagaggttgttactggataagaacaatcaccaagatgacaatgtctaaagcagatttgcttcaggttctggtcaggctgcactaggcaaaatagttctgttttattgagaccaaagtctcacgtactggttcgggagtaccgcatatgtaggcagtttgtagccacagccattgtcattttagtcacggcgcctccttgagcatatatgctcccactacaatcttaggactcgagatccttgaccatgaagtcctggcgactgaaggggttcatgaccaccggtgggccatccctgcg

SEQ ID NO: 14432 - DNA, 354 bp, Oryza sativa
  Clone ID: uC-osflcyp049h05a1
ccttccccttttttttatttcctcctcctccttcttcactttataaaaaaaaaaccaccctcccccccgaggggggaaataccccccacccaaacccccaagggggaattttaacccccaccccccgggggtgggcctcccgcgccccggggaggacgccaaaccaacctgggggggaacttccgggccccctccccccccgggggcccgcgcgcaacccaaaaggggggaactcccgggggcatcgccccccccacttgattccccccgccccccccccaattaaggaaggaccccccccccccaatgacccgagaaccccctaagaaaggaagggcccaaagccccccctgg

SEQ ID NO: 14433 - DNA, 274 bp, Oryza sativa
  Clone ID: uC-osflcyp049h12b1
ggcaaccatggatgcacactctgctttcatgtttctcctgactttgatccatcttcttttgcagatatcagctcgtgatttcctctcacctggctcctctctctcagtagagcgcagttctgatgtgctctactcaccagatggtactttcgcctgcgggttctacaacatttcccccaattcctccatcttcgcagtttggttctccaactcagctgaaaagacagttgtgtggagcgctcatcttgggcgtcctgtgtacacctggcgatcc

SEQ ID NO: 14434 - DNA, 165 bp, Oryza sativa
  Clone ID: uC-osflcyp050a09a1
aaggaactataagtttggttaaatggttatttatacatgttttgaatcaatttacaagcaaaggattcagaataagtggaggtttgactattttttttgtcctctaatattatttaaatcgagaaaattctttgctttttatttgtgcattcatttttatttatt

SEQ ID NO: 14435 - DNA, 424 bp, Oryza sativa
  Clone ID: uC-osflcyp050b05a1
agcagagcgaaaagagggtagcatacaggctatacatgaatagcgtccaaaaatacacgggactccgacccataaacccagtcactatccgacaccaatcaagcgcgacatcagggacactcgaacacccaagaatcggggcaggactcatgactaacagaacaaaaaaaaacatatggtctttttttttcgccaggaataggcggtattatggggggcaaggtgaatgtggaggactgggaagccaacacccttacttgcacttgaagccatggcacacggacaggatgatgatgaggatgagcgcgatgatgatgcccaggacgatcagcttgatcttcatgttttgtaaccacatttttcgccgcacctttgtaccctgctgtctgaaatcttgtgcctgagatctcaggttttcagtctt

SEQ ID NO: 14436 - DNA, 376 bp, Oryza sativa
  Clone ID: uC-osflcyp050c09a1
cttaagaaaatcttcaacttcatatacaattaattcgtttgtacactcgaatagtgataacaagttaaatcaatgagaaaaaaaaaagcatagtcaacattgtcgacgtagtagtagaactagaaaccatcagttgaccgttgaacaaacaaattccacctcgcctgcagcggatccgccaccatcggatcggccaccagcacatgcacatcctttccggccgtcgtcgtcgccgctgccgccgccgccgtcagtttgcgccggcacatggggcaggtccctagcttcacccgagcccaagactcgaggcaccgcgagtggaagcggtgcgcgcacggtgttttcacccacgcctccgttgtggtttttttcccac

SEQ ID NO: 14437 - DNA, 74 bp, Oryza sativa
  Clone ID: uC-osflcyp050d04b1
gttggtccaagatgttcgggcgcgcgccgaagaagagcgacatcaccaagtactacgagatcctgggggtatct

SEQ ID NO: 14438 - DNA, 390 bp, Oryza sativa
  Clone ID: uC-osflcyp050d12b1
ttctttcatccatccatccatcccctgctgtgcaccgtgactccaccaccaccatcaacaagatgaaaaacaaactcttcttccttttcttgccttgccttgcttgctttgcagtaatcaggggaactgctctctcgtgcgtgtgatttctagtcagtcagtgtggacatctctaaattcatttgtgatttccttcctcatttcgttgcatcggtgtgctatgctgctccaagaaacaagacaaagaaaagaaggcgcgcttgcttgcttgcttgtctgctgcacgagtcatagttggcgtcaatcacatgtacagctgcaaatgctgtgccaagaaatgaacaaaagatatttacctgacccaaaagaaggccatgtaagtcgtcttac

SEQ ID NO: 14439 - DNA, 82 bp, Oryza sativa
  Clone ID: uC-osflcyp050e01a1
tttttgggggtttttttttttttttttttttttttttttattattatttcgtttaaaaaaaaaaaaaacgtccgaggggaac

SEQ ID NO: 14440 - DNA, 468 bp, Oryza sativa
  Clone ID: uC-osflcyp050e09a1
acaaggttcaagcaaagcatctactacttgagaattcagataatacatcaagcaaaatcacacaccagccatcagtgcttccatctttagcatcacagcctgaaagctcattccaccatcctccacatgcccatccatttgacatagttgcagagggcttaaaaggacgcgaaaacacgacgcagcgatgaactgcgggcttggctgcagactgcagcaagctccatcgcagcccagagcaaacatatgtacatatatgacacagcagacgacaaccttactacacaaaccatacacgacttaacatagtagacggcgagcagcagcaggcgtacttaattactagtagcatttacgttatatcacagtagtagagggaagataggtagacaacacttgacttccatccgctttggtctttgatatggctctcctcctcctctgccttgtgtgtgccagcagaccctt

SEQ ID NO: 14441 - DNA, 702 bp, Oryza sativa
  Clone ID: uC-osflcyp050g01a1
caaaacaaacaggggggggaaaaaaaaaaagcaccgaaaaaaaaaaaaaaaaggaaaaaaaaaaagcaaccaaaaagaaacaaaaaacaaaaaaagaaaaaaaaacaaaaaaaacaacaaaaaaaaaaaaaccaaaacaaaaaaggaacaaagaaaaaaaacgataagaaaaaagacacaaaaaaaaaaaaaaaaaaaacaaacaagaaaccgggaccaaaagggacaacaaaccaaaaaagaaccagaagaacaaccaaaaaaaaaaaaaacaaccaaacaagggaaaaaaaaaaaaaacaccagaaaacaaagaccaaaaaaaaaaagaaccagaaacaaaaaggaccaacaagcaaaaaaacaaaaagaacccccaaaaaaaacgaaaaaagcacaacaaaaaaccccgccccgggacaaaaaaacaacaaaaaaaaaagaccccaaaacgaaaacaaaaaaaaagagccacaaaaaaccagaccaaaaaaccaaaaaaagaaaaacacgcaaaaaaaaacgaacaaaaaaaaaaaaccaaaacaagcaaccaaaccaaaaagaaacaagcgaagaaaaaaaaagacaaaaaaaaaaaaacaaaaaaaaaggggggccagccaaaaaaggaaaaagaaaaaaaaaaaaacaaaacccccacacaaaaaacccaaaaaaaacgaaagaaaaacaaacaaa

SEQ ID NO: 14442 - DNA, 461 bp, Oryza sativa
  Clone ID: uC-osflcyp050g09a1
ggaagcagaccacatcaaacaactttgtttcttcgatctcatgcaaagagacagaattacatttcttgtgttgaacaaaagggatatatatttatggatattgctaccacaaggcatgaatcatgaatatgaccttgtcgtacagtttgctcatgtgcacatcagcacatacatatgtaactatctagaagaaccaagaaagtttatattggatgcatacaaaaaaaaattgaaggggattaatcgcaatgcgcatgcactttagccgctagagaagtgtttacatacatgcatgccagattctttagctttatggatcacttttcattgatgacgacgtcgtcgtcgtcgttaatttctccatggagcttagtatccttggaactgaagtggtggaggtgaggcttactgttgcgccatcaccggcggtaagagttcagtagtgtccaacgccggtggag

SEQ ID NO: 14443 - DNA, 209 bp, Oryza sativa
  Clone ID: uC-osflcyp050h04b1
aatgatcggctgagctttcacaagttatagatggcatggaaggattgagggatgcgatatttagtgacatccccaagctcatgtcagctcttgacttagatgatgctcaccgattcagtatcttctatgattttgtcttcttcatttcccgagaaaatggccaatagaacatctctgttcagagagctgtgggagcatggaggatggtt

SEQ ID NO: 14444 - DNA, 441 bp, Oryza sativa
  Clone ID: uC-osflcyp050h05a1
cccgcaggcacgcaaacgaaagcatggacccaccagagtggccgcccaaaaaaaaaacacggggggggaaaaaaaagacaacgcgaaagcaagaaaaaggaaaaaaacccaaaaaagaaacaacaacacaaaaaaaaccaaaaaagaaaaaaacaaaaaacacaacaccaaacacgaaaaaaaaaacaacaaaaacaaaacaaaaaaaaaaaaaaaaaaacccaaaacaaaaaaagaaaaaagaaccaaacaaaaaaaaccccaaaaaaaaagaaaacacaaaaacaaaagaaacaaaaaagcacaaaaacccaaaacacaccccccaaaaaagggacccaaacaaaaaaagaacacaacaagaaaaaaaaaaaaaaaagcgaaaaaaacgaaaaggaaaaaccaaaaaaaagaaaaaaaacaaaacccaaaaaagaagaa

SEQ ID NO: 14445 - DNA, 202 bp, Oryza sativa
  Clone ID: uC-osflcyp051a09a1
ggacgcattgtatcaaagtgggcggctgtacaagtacaattcatatatacaaaaggacaatgacgccttaccttgatgcactggatgactgtccagtgcttacaatgaaagactaaaaagaaggcattgattcatcaagccatctaatattgtgttagctggacaaatgcatctatctattgaacaacatctatgagagaca

SEQ ID NO: 14446 - DNA, 352 bp, Oryza sativa
  Clone ID: uC-osflcyp051b05a1
aaaaaaagcttccttagttcccaatgggaagggtttcccttacataggggaaatttttgaactgggccggcttaaagtaaatttaacaacttagccttttaggggggaaattttttgccaatttaatccttttgaccttgggggccatcaaaagactggggggggtttgcccataaggaacctaatacggggttaattttttgaacattgtttatcactcaaaagactggggaggggctaacaatttccaattcggggcaaccttatttacttgaagacctgggccccaataacaaatttttggggcctttacataaggggggggtttcatagggggaacctgttttttttt

SEQ ID NO: 14447 - DNA, 397 bp, Oryza sativa
  Clone ID: uC-osflcyp051c08b1
tgtttacgccgtcgtcggccttcaagttcaacgggcgcgcgcttgagatcgagcgtgccatgtcaacaaccggcagtcccatgttcgtccccccccgcagcatcaaattctactcctacttcagggctctacagtgcacaacctagtactgctatgttcaggattactggagggtcttccacttcatgccctacctccatgagagcctcctcacacttcttcttccttttcgacgacgtcggtattcccacttatacctccccattggcggtctcggagtacaaatatctacaccttcgtcacccgcgacgccaaggccaggtacgttaagttccactggaagcccacctgcggcgttaggtgcttgatggaccacgaggccaccctcgtcggcggc

SEQ ID NO: 14448 - DNA, 338 bp, Oryza sativa
  Clone ID: uC-osflcyp051c09a1
caaaaaattgctttgatctattgttcgggcccagaaactaacttccattggatgagggcacattttgcttacatacaggcaatcaatgaaaacgctatggccgacgactggtcgccttgatcagcaaaactggagcatgctaaaatggtatttcccagctgcacaagagctttattttgttaacaggaaacgacaccacaagggtaactcatttaattctataggatgtacacggggacatgggatacctatacacgggatggggctaccaggcctaaatgttagttgccaccactttttacaagcattgactagaaaaaattcacccacgcggccca

SEQ ID NO: 14449 - DNA, 120 bp, Oryza sativa
  Clone ID: uC-osflcyp051d05a1
ctgactcatacgcttcagttttatctttgcttagcttatttcgtcacaaaaccgggcgctccaaaaaacaacaacccccacactttgacctaaaaataagttccagccctgaccgcaaaa

SEQ ID NO: 14450 - DNA, 403 bp, Oryza sativa
  Clone ID: uC-osflcyp051d12b1
ttgatatcttcgggttcgacccgctggggctatgggggcctgttgggaccggtgggttcatctagccacggtggctggcctacggcgaggtgttcaacggccggacggcgatgatgggcgtcgtcggcatggtcgccccggagctcctcggcaagctgggcctcgtccccgccgagacggcgatcccgtggtttcagaccggcgtgatccccctcgcgggcacctacacctactgggccgacccttacactctcttcgtcttcgagctcgccctcgtcggcttcgccgagcaccgccgcttccaggactgggacacgccggggtccatggggaagcagtactttctcggcctatagaagaccctcgtcggctccttgcagcctgttctacccctgggggcctt

SEQ ID NO: 14451 - DNA, 97 bp, Oryza sativa
  Clone ID: uC-osflcyp051e01a1
tctaacatttttttttcccacccgaacgaaaaacaacccactgggtgggtttgggacacgaaccccccaaaaaggaacaaaacaagcaccctgaaca

SEQ ID NO: 14452 - DNA, 147 bp, Oryza sativa
  Clone ID: uC-osflcyp051e08b1
ggccgacccaaaattccccgaccgacccactcacccgagcttattttggaccaaccacacccgcgacacacgggggggattaattaaaaaaaaggggcccataacaccccaattacagacaccgaccagctctacattaaagcccca

SEQ ID NO: 14453 - DNA, 280 bp, Oryza sativa
  Clone ID: uC-osflcyp051e09a1
atcccaaatgttctcattgattgatagcgatatcatagaagcagcgacacgaattaagatttaaaaccaaccccaagaaggatcgcagatccaactccaccgaatcgatccaagaactccggctaatccaaccaaaccatgggcgatctcatttcaccaacacgacacgaacttataaaaagactaacaccaccaccaccttcttcttatttagggactcgacgacttaagacgacttgatactggcgaaaggggaaaggggaccccccagatctaggag

SEQ ID NO: 14454 - DNA, 106 bp, Oryza sativa
  Clone ID: uC-osflcyp051f04b1
cggatggtggatgcctggggtggctggagcctgttcggggctttgtttaagacgttgaggaaagtatcattgaagcatggtgtttctatcttaactgctgctgtga

SEQ ID NO: 14455 - DNA, 436 bp, Oryza sativa
  Clone ID: uC-osflcyp051f05a1
acttctatgccttcagcaattggacacaaatatggtggacacacttttacccttacacaacccgtttgttccctgcacactctacagtagaagtacataaccagatgcgctttggtagtgggacttgtgttggtcccccttgccctaccccttctcttacctgagggcttcggtttggagggaattgaagagaattggaagggattgagcgagaataattccacaccataatagatatagaataaatcctctccaatccctcttttatggggattaaccgaataaggcctaaggcagaggcggcgagtgccctgtcttgctgtctattccatctcgagcggctctccgctaccagggccacaaccgatcaccgggtcctaaacatggccatgccttcaaactcaatgaactttcttttcccctttcccccaacctt

SEQ ID NO: 14456 - DNA, 384 bp, Oryza sativa
  Clone ID: uC-osflcyp051f07a1
ggggcaaaaaacagttgatataggaaatagctgcgaggtcagttattttcgcccaagcaaaaatagtaccgcttaagttcaggacacaggtaatgcccaaaccaaaaggcctttttaaagagacatactgatcgaacattcatgaaaaggttgtaacgcttgcgggggggaacaaaaataatttggccttggggttgcccactcaacacgaaggattagggtattataaccataaccattgggcttggtgatagccttttaaggggcctctttgggaacaaaggtggcgaagccgaaccccccgcttggtccaggcttttgatcccccgcaccctaaccccgggtaactggcccaaatgggcggaaaaacttaaggtgggcggg

SEQ ID NO: 14457 - DNA, 58 bp, Oryza sativa
  Clone ID: uC-osflcyp051f12b1
tagttagcaatcgagatcgaaatggaggtggcgagaggcgtttgtaagctgaacccgt

SEQ ID NO: 14458 - DNA, 425 bp, Oryza sativa
  Clone ID: uC-osflcyp051g03a1
accccgggggggttttttttttttatttttttttttttaaataaaaaaattttccccttttttttagaattttttagggtgggggaaaaaaaaaataggggcaacttgaaaaaaaaaaattttgggggaccaaaaccttatttttttaaaaaaaattttttaaaagtttgggggtttggggcaaaaatttgaaaacttggttggtaaaacaaaatttaatttcactttttggggggaaaaaagggttttaggaaagggcctttttttttcaaatggccaaacccggtttttcctttgaaaagggaatttttcaaagacacctttttcgaggaggtgcttagcatttaatgggaaaaaaaggggattttttaaaaacttcccccccttaaaaaaaaaaagagtgctttatttcgggggtttttttt

SEQ ID NO: 14459 - DNA, 156 bp, Oryza sativa
  Clone ID: uC-osflcyp051g11a1
tttttaattttttttttatttctcttttttttttttttaacacgcgggagttttttatttgaacaacagtgaatttaacaagcttcatgcttccagagacaaccccaaaggcccagaagcaacagtggcagacagaactcagcatcacgcaaaatt

SEQ ID NO: 14460 - DNA, 468 bp, Oryza sativa
  Clone ID: uC-osflcyp052a03a1
aaagcaagcaaacaaaacataaatggccaagactttagcaaacggaacccggacccccccctgaaacccgcgattgcctacaaacaagccttaaattttaagggggggggggagctatggggaagcaaccgggatgatgtccaggcaaacaaattaggggaaccaggggggggggaaaccagggaccattgcccaaacaggctttaccccgggatgggggcctttttttcctaggacccggccttgggggggggggggccccgaaaccggggggacccggagacgagggcgctcatggtgccccccccctgggggaaccccattttggccatgcccttgcccggggaccaagggaagaaccccctcctcctgaacaagggccgaaactggttcttgacccgggggaacaatttctggaaggggggggagttgcccaccaacgtaaaccccctggggaggccccccggg

SEQ ID NO: 14461 - DNA, 462 bp, Oryza sativa
  Clone ID: uC-osflcyp052a11a1
gaccccaaatgttctcattgattgatagggatatcatagaagcagcgacacgaattaagatttaaaaccaaccccaagaaggatcgcagatccaactccaccgaatcgatccaagaactccgcctaatccaaccaaaccatgggcgatctcatctcaccaacacgacacgaactcataaaaagactaacaccaccaccacctcctccttatttagggactcgacgactcaagacgactgatactggcgaaaggcgaaggggaacagcacagatctaggagagctggccgcagtcggcgatgacgaccggcttggcggtgctcccgccgcgggatcccaccttctcgatggccttgacgacgtccatgccctcgacgacgcggccgaacacgacgtgcttcccgtccagccaggttgagggcacggtgcagatgaagaactgggacccgttagtgttgggccc

SEQ ID NO: 14462 - DNA, 235 bp, Oryza sativa
  Clone ID: uC-osflcyp052a11b1
tctgtagtgaaacagcagaaaaaatcaaacagggggaaaaaatattccccatctgtgaaattcgcaaaaccctagcgcggcggcgatgtcgaacacgagggtgttcttcgacatgaccgtcggcggagctcccgcggggcggatcgtgatggagctgtacgcgaaggacgtgccgcggacgggggagaacttccgcgcgctctgcaccggcgagaagggcgtgggcaagagcggc

SEQ ID NO: 14463 - DNA, 301 bp, Oryza sativa
  Clone ID: uC-osflcyp052b07a1
attcttaggggggacccattgagtgttaactgacatgaagagcaccgcaacattggtgtgcaccaaaacaaaccatatagggggaggactcacccccggaagggcaacccagcaacaagccctagtcctctccaggcgagacccaaccgcgttgggatccatttcaaaacaagaacatgaatcccaaccaccccatgccaaagagagaacaccccttcgcggaccaaaccaggagctatctcgccgagagttcaccgggcacaccagcttcctggcaccacccccttggccgccttggcct

SEQ ID NO: 14464 - DNA, 520 bp, Oryza sativa
  Clone ID: uC-osflcyp052c03a1
ggacacaatgattagggatcacttattcattatagttcttccatgctgctctaccacagcaaaacgtttcagacaccatcaaaccagacttaaggatacacattacaggtaaatagtacacaatgaaacgggacacgaccaaggaccagaccagacaaccatagctccattggggaagacaaataggcagacttgtgaaccctagaacagcagcagctccatggctgaggacttactggccaccacggaggcggagcaccaggtggagtgtggactccttctggatgttgtaatccgcaagggtgcggccatcctcaagctgcttaccagcaaagatcagacgctgctggtccggggggatgccctccttgtcctggatcttcgccttcacgttgtcaatagtgtcggacgactcaacctcaagggtaatggtcttgccagtcagggtcttcacgaagatctgcatcccacccctgagcctgagaaccaggtgaagggtggactccttctggatgttgta

SEQ ID NO: 14465 - DNA, 435 bp, Oryza sativa
  Clone ID: uC-osflcyp052c11a1
gacccaattcacttgtcatgtatttttggtaagaacaacactgccatgtagtttcacagaatacagcaccttttcttcattgttgattcctatcctaaacgaaaacaaaaaaacagctcattattggttgctcacatcgtcacacggctgtggtgatggccaaatatccttgcaagctaaggtacaagagaacgtggccagacaatttgctcaacaggagcaagagcatagcccccatgactcacttgaaggtattttacctgagaactctagctctacaacttctccctgacataacataagtagtctgcttacacctcgaagatcagcttcctgaacttctccatgtgctcagcctgcaatgagatggctatggataggctaccatccttgttcgcgcttgggaggacaaacgccagcccttcataggcgatg

SEQ ID NO: 14466 - DNA, 363 bp, Oryza sativa
  Clone ID: uC-osflcyp052c11b1
gtgcgcctgctggtgccgctgcggcagtaaccggcgggatccgaccacgccggcttgttactgctggaatctagcgagccagctgcggtgggtgtgccgggccttgctttggtcttcatccgcctaagatctgattggatctagggtggtctgcggaagatggcgatcacggggaggcggtctacgatggtgcggccggcgtgggagacgccgcgggtgcccatgtggaactcgtacctccgcctcctggtgccttggatagacacctcaagcggctacttctaccgcggggggcccgatggcgggggcgcgtcggagggatacttttacaggtcgccggtgcagaagtcgatggcgatcgtc

SEQ ID NO: 14467 - DNA, 524 bp, Oryza sativa
  Clone ID: uC-osflcyp052d07a1
caagcagtatccgttaacggattccattctattttgtaaactagatgttagtatcccttttacaaatcagtatgtcaaaaaccgatcagacagaagcaagaaaaaaaaatcagtgtcaaatgaccagtcagatgctaaatcaactatgccttggtcttattgggtggggcaaaatttcttcatcgactgcctttctcttgtggctgttggtgctagtgctgctgctgctgttctcgcttgtggggttactgctgttgttgctttcgctgttgctttgcaggtgttgttcctgctggtagggctccttgcatctgcttttcagtatgtggggcttcagcttgctcatgtcggagagccgaactggtttgaggaaaaattcatcagctccttcctccaggcatctgattcagataacaaaatcataactgtatcagagtttattctaagatcaaaaaccatgatatgcaatccagaaattgaacacagaattattcttcatgtactatccattacaaatttttttt

SEQ ID NO: 14468 - DNA, 495 bp, Oryza sativa
  Clone ID: uC-osflcyp052e03b1
gttctttagagagcttgacggagaatttctcatggtgtaaaattgttgtctgatgccattcgcatgtaatgatattggtttttatgacatcaaaacatagaacagtttttcctatttgttcttgcgcatgtagtaaacttgaacaaaaatgtatcttctgacttctgatgagagcaaatagaagctagaagaagggataaaatatggggactcagctttagtctcatcggcaagaatcatctaagatgaaattcagggagaaaattcatagcgtgcaagtgcatcattcaaaggacgaaatgcaaccatgcttatatgaatctatggataatctgaaaggtcagttatatgctcatatggctttgtttcaggtgattcattgtacagaagaaatgacaaagcaaacgttgtgggatgccatgcacactgagcaacctagtatagaagctgtcaaggtctgaatcattcattctcattattttcacgtttcttttc

SEQ ID NO: 14469 - DNA, 487 bp, Oryza sativa
  Clone ID: uC-osflcyp052e11a1
ggataaatccatcatagttgcaaagtagtttgaacattatacaaaggagtatatacactaaaacatatgttccatgtttcgagcagctaaacgttttcaggattttaggttccagatttccaatcaacagggttttccgttatcacgtattcaattctacaaaaaaacaggctgaatagagcagctgaaataccgtataaaacagaaaactttggcaagaacacaagacgcgccacattatgaagcctggatttggtatgaaacaacatggattcgtgaccaacgaaaacattccatacacagtttctttctccaccacccacggggatactggactggatcagtttacaaagtaaaccaacaaacttccctgatctaaagagtccaaaactttacgcaaaaagaaaagcgacttgctggtcaagccagtttatgatatccagttgataccgaagcaccaggcccacagcttaacagaagttgcatt

SEQ ID NO: 14470 - DNA, 406 bp, Oryza sativa
  Clone ID: uC-osflcyp052f07a1
acctccaaggtccactctaggttcttttggtctaacaagaaaagggaaaattgggggcagcaggcaacctatttccaaaatggggacagatttttatttagagaaaaggggagggtttcccctttacaaactttttttgtatgttatgtttgaccactcccgtcagtaagggctcaactcaagcaacatatttggattatctttcatcggttttttttcttccttcagggcccacaccgaatctgcgctgtagggggggaccaggatccaaccccacttattcagggtgaaaatgccttagggggtaaccacagttttacctttttggcccccccagcagtcgctaaaacaaaagggggggttcccccctttggaattgttcggggggccccggcaatgcccgtta

SEQ ID NO: 14471 - DNA, 433 bp, Oryza sativa
  Clone ID: uC-osflcyp052f07b1
gctctgtgaaggaggtcaataaagttatgcaacgtaagggtcacaaaagcgctgttacttgcctgtgtttcgctctgaattctgagcagattattacagcttccaaagatggtacaattcgagtatggaacattaatgtaagggaccatcttgatgaagaccctaaaaccttgagagttttgccaattcctctccatgattcaaaaggttctgtttgccagtatgatcacatgagtgtatctcctgatgagaaagttctggccacgacaagtggatcaacgctgcaatggttatgtgtggaaactggtgcagttcttgatacagctgagaaagcacatgaaggtgatataactggcattgcctgggctccacgaacaattccaaatggtggaactcctgcttttgttttagcgactgctggagtggacaaaag

SEQ ID NO: 14472 - DNA, 393 bp, Oryza sativa
  Clone ID: uC-osflcyp052g03a1
ctcaacctgatatttgctgtttattaaaccgatgactgaaatttatgtcctaatcaaaacctcctagctacttctttcagggttcttgctaactaaagcctaatctgcgacaccaaaaaaaagaaaacagacccacaaaataatgatcaatccaagctccaggcctccagccatggcgcatgggcatggcgcccccctgatgatcaactctcctgcgtcttgacgacgatggggccccgcacctggaggttcccgtccgaccagacaatggcaccaaacgcctaattcgccgccggcgcggggtccctcacggggaacttcacccagaacgtcctcacctcgccggtgctctcgaacgtcagcgtcgtcggcgtcaccgttacctgcaccccc

SEQ ID NO: 14473 - DNA, 498 bp, Oryza sativa
  Clone ID: uC-osflcyp052g03b1
gcgggcgggtggcattcaacgcccagagcggcacgtccatgtcgtgcccgcaagtgtccggcgtcgccggcctgatcaagacgctccatccggactggagccccgccggcatcaagtccgccatcatgaccaccgcgacggagctgggcaacgacatgaggccgatcatgaactcgtcgatgtcgccggcgacgccgttcagctgcggcgctgggcacgtgttcccgcaccgcgcgatggacccgggcctggtgtacgacctgaccgtcgacgaccacctgagcttcctctgcaccatcggctacaacgcgacggcgctggcgctcttcaacggcgcgccgttccggtgccccgacgacccgatcgacccgctcgacttcaactacccgtccatcaccgcgttcgacctggcgccggcgggcccgccggcgactgcgcggcggaaggtgaggaacgtcggtccgccggcgacgtacacggtcgccgtcgtgagggagc

SEQ ID NO: 14474 - DNA, 537 bp, Oryza sativa
  Clone ID: uC-osflcyp052g11a1
ggacacaatgattagggatcacttattcattatagttcttccatgctgctctaccacagcaaaacgtttcagacaccatcaaaccagacttaaggatacacattacaggtaaatagtacacaatgaaacgggacacgaccaaggaccagaccagacaaccatagctccattggggaagacaaataggcagacttgtgaaccctagaacagcagcagctccatggctgaggacttactggccaccacggaggcggagcaccaggtggagtgtggactccttctggatgttgtaatccgcaagggtgcggccatcctcaagctgcttaccagcaaagatcagacgctgctggtccggggggatgccctccttgtcctggatcttcgccttcacgttgtcaatagtgtcggacgactcaacctcaagggtaatggtcttgccagtcagggtcttcacgaagatctgcatcccacccctgagcctgagaaccaggtgaagggtggactccttctggatgttgtagtcagccaaggtgcggc

SEQ ID NO: 14475 - DNA, 329 bp, Oryza sativa
  Clone ID: uC-osflcyp053a03a1
atagcgcgcaattatcattggatagcagcatggttaatatagggtaagtaacatttcaaatcacagataacagctgctacaggtagagcagacaacaagaactgcgggcatttcgactgaaacaacaggcatcagaattcagaagccgttatgctgtggcctatggataatgagaaaagtgtttgctagtagatttaactcttacagttgtgaatgtcaaaatgccttttgttttccaagcctctaatggtacaatgagaaacaaagaactggttttgctgaggctgtaggccgatctacttcttgatctttttatcggttttgcccct

SEQ ID NO: 14476 - DNA, 258 bp, Oryza sativa
  Clone ID: uC-osflcyp053a08b1
gtgaggatgcagccatggcgtcttcgggggcaggggcggggtgcactttcctggggacgaggctggcggacccggcgccgcagagcgggaggatcgtggcgaggttcgggttcggcggcgggaagaaggctgcggcgaataaggcggcgaggccgtcggcgccgacgaccgacaggccgctgtggttccccggcgcggtggcgccggactacctggacgggttgctcgacggcgactacgggtttaacccgatcggcc

SEQ ID NO: 14477 - DNA, 293 bp, Oryza sativa
  Clone ID: uC-osflcyp053a11a1
atgcacttttacgtatttttggccccatgtgagcccccgccctttttttttgtgtttggtaaactaacacgcgccactatttgacattactgaattttgacggtcaatttttgcagaggacaagaaaaggtcaaaattttgattttccgatgtctccaacgaattgcagataatgatatatcatcgtttccaccagcaagggctacaaacaagcatggcagtactgcacacgttacaagtctccatctgtgggtcagaactgctctgctctgttctgaacaggctcaggatca

SEQ ID NO: 14478 - DNA, 114 bp, Oryza sativa
  Clone ID: uC-osflcyp053b07a1
ttggtttttttttttttttttatggtcccatccaatatgcattaataaccgattcttttgttggatacatttttggctagtacaaaaattaattaggctaaaggattaaaaaca

SEQ ID NO: 14479 - DNA, 168 bp, Oryza sativa
  Clone ID: uC-osflcyp053b12b1
gccggctgtgagttttctactcctcctcctcctcctccgggtccggggacctctgactccgcttcagcgacccgatccccaccttgaccaatatggactcagagccctcatcgcagaacccggctgatatcacagctgtggtacaaatccttctatcccagatgcatt

SEQ ID NO: 14480 - DNA, 388 bp, Oryza sativa
  Clone ID: uC-osflcyp053c03a1
gcacaaactggtccttgttatcaacaacactccaacagtcatgctgatacaggtagcaatgcatagcggatttacagccaaacccagacagtactatcataagcacaacgcatgtgccagaatttattcttgttcatagagcggaaaccgcttctttattacattgcactggcattacctacataaggtttgcgctttgcctcctagcacaaaacttgggccatctctcatcttcactggagttccttcaggaagtcggcgttatcaaccaaaaccactttccagccatcagggtcaaggaaagaggcaatctttgtgttgagccctggtagtggacctggctgccgcaaaatctttccccctagttcttttgtaaccaacttaacag

SEQ ID NO: 14481 - DNA, 96 bp, Oryza sativa
  Clone ID: uC-osflcyp053d09b1
ctcgtattgtaaccagacccgcacccaccgcagggaacggtataatttcgattccggatacgatcgcctctcgacctctccactcagacacataac

SEQ ID NO: 14482 - DNA, 167 bp, Oryza sativa
  Clone ID: uC-osflcyp053e03a1
gagtgaggagcacgtcgattgattgattataaatccatggatctcccggattaattccaggtacatggatatgatggatgggatatggtttacacgttcgtttcttcgatcgatcggtctttgccttcgttttagtttcgcccggtgattgaatgatttcgctttgc

SEQ ID NO: 14483 - DNA, 114 bp, Oryza sativa
  Clone ID: uC-osflcyp053e05b1
gacatatttagatttatcgcccctcaacgcaagcgaccgggcaaggggccatttgtaagctgcttgccggtctcgctactaaatctgccgaataggcaagcctgcaacaccccc

SEQ ID NO: 14484 - DNA, 401 bp, Oryza sativa
  Clone ID: uC-osflcyp053e11a1
catcagaaacatggcatacactgtccactcctgtcggaaaatagaagcagcacatgagctactatgtctgacaaacacagcaatggtgatggatgggtgcacctcggatatgcacggggatacagacaggcgataaacacaacactcctatttgggaggggcgacataacaacacagtactcaactcgacgacgacacagttttcaggggaaccaacaagacaaccgagccgctagatccgagcgttcgtttcatttcccacctagcgaggggaactgggcctgatcttcgatcaccggagcggcagcctgtttgcgacccccgttgccattgtaaccaccatggaaacccccacgatcaccacgacccctgccacggccacaaccacggccagggttgta

SEQ ID NO: 14485 - DNA, 460 bp, Oryza sativa
  Clone ID: uC-osflcyp053f02b1
gcatattaaagcctcccatcaacttcttgcacacaccctccctttggctttcatctgcatctattcagttgcagattgagagccaaagacattatcttgattctatcaggagggttgtgctagcgaattcttgttagcaacaaattgacatattgctcggcacatccccaccgagaataccaagatgacgttctctggtacacaggacaagtgcaatgcttgtgacaagaccgtgcatttcattgatctccttaccgcggacagtattccctaccacaagtcttgcttcagatgcagccactgcaaaggcacactttcgatgtgcagctattcgtccatggatggggttctttactgcaagacccattttgagcagctattcaaggaaacaggcaccctcaagaagaacttcccctcaggtacaaaggcaaacagtgaacaggctaagattcccagcaag

SEQ ID NO: 14486 - DNA, 290 bp, Oryza sativa
  unsure (1)..(290): unsure at all n locations
  Clone ID: uC-osflcyp053f07a1
cgcaagcaattaagataaatattaagaaaattgtttaaaaaatatgatataatatttgtagccccccgactcactagtcaacggcgaaccagttgatgtagtgaggcagaggaaaaggaaaatatcatatagaagaaaattcatgatgacttagcctttgtaactattttcccttggtgatggcagagtgtggccaatattgggaacaaaagtcgtccaatcaataacaaatgaagaccaccagcttgactgacaactaaangcctgtcgaccggtgaaaagcgaaaaag

SEQ ID NO: 14487 - DNA, 574 bp, Oryza sativa
  Clone ID: uC-osflcyp053f10b1
tttgaactactgtgaatagttcaaatttgttatgcttctattatgattgggtgcgtgtgtaattatagcttccacttcaaacttggccgagcttttaatctgatttaagtgaactatgcaaattgcctcaagctctaaattctaatgttgtttagtgcttatcacttctgaaatctggtgggctaacttgtatcaaacattcagattctgagtcacttgagatctttgtaaagtgatgggccagattgagactgatgtgaatgtttaaactaattgtagaacgctaattttttgcatcctgatttggctcagaagtattagctttctaggtcttcatgtagaattaggtgcacaatcagatcacactatcattgtttgtagacaaaaaaaattcaaactaatcctaaatgattaaacataatcatgttaggaccctatattgccattgatatgagttctggaggtggtttttggcctgataataacctttccactataatcgcctatgaacaggattaatttcataagataaccgatgaagttgttgagagtttgaatgaggagggcaatgtct

SEQ ID NO: 14488 - DNA, 170 bp, Oryza sativa
  Clone ID: uC-osflcyp053g03a1
tttgttttttttttttttttttttttttttggacattaaaaatccaaatacctgtatatttacagatatgagatagcccagtagcaaaagttttatgtcaaccacatatccttaaagcactggtctgaactttattaacaatgcaccggagcaattcaacccatggtaag

SEQ ID NO: 14489 - DNA, 393 bp, Oryza sativa
  Clone ID: uC-osflcyp053g07b1
gcagcattttgattttgaagcagcagagcgaggtagacatggccggggccactttggccctctcgaccgcggcgctggccggcaaggccgccgcgaaggtgttcggcgaggggcgcatcaccatgcgcaagacggcggcgaagcccaagcccgccgcgtcggggagcccgtggtacggcgccgaccgcgtgctctacctcggcccgctctccggcgagccgccgagctacctgaccggcgagttccccggcgactacgggtgggacaccgcggggctctccgccgacccggagacgttcgccaagaaccgggagctggaggtgatccactccaggtgggcgatgctcggcgcgctgggctgcgtgttcccggagctcctcgcccgcaacggct

SEQ ID NO: 14490 - DNA, 424 bp, Oryza sativa
  Clone ID: uC-osflcyp053g11a1
ttggttttttttttttttttttttttttttttttttttttttttttttttttaaaaaaagccagctttgccaaaaggcttttatttaaatatagacttacaaagaccccaacaaggggtccaatgaaaaatatccagggtctcccccccctggggtgctccttacattaaaagaagggggataggtttggccccccttatccaaattaaggcgtagcccattgcccctaaaatttaacaccagttcctccccccctacaagcgactcaacagcaaggcgcaaccaaattttacccaaaatttgaagcttttcacattttaacaggacgcgcgatcttgaaccactccgtgtggaaggggccgggcatgtcccccctctcgtgggggggcgcccccaaaaagcccctttgggcccgcaccaggtt

SEQ ID NO: 14491 - DNA, 510 bp, Oryza sativa
  Clone ID: uC-osflcyp053g12b1
gcggccggcggcgaccggtcgccggtcgagctccgcagccgccgccgccaccaccaccaccaccaccgcgcggcgcagaacgcagagcgccaccggcccgcacctcccagcatgggcattgccccgggatcctccacggcatcatcgcggtttgccgaaagcgcgacgcctccgatgctctcctggtggtggtcacggtgggcatcgccagtggcgcggtcatggcgagccttcgcccctcgccttctcggcggctgtacccaccgtgcctcaggcatacatatctctgagtaggattttctaatgactggttacatcgcattcagagctagtgtaactgcgtaagataccacgtaagagagaaagtgcacataactagtgtacgataccaccaaagagctaagaacggtcctctccacatattccatgactcttcacaggcagtatgattcccttgcattaatgacctaaactttttttgggcatcctaaaagcttctcatgagcatta

SEQ ID NO: 14492 - DNA, 530 bp, Oryza sativa
  Clone ID: uC-osflcyp054b07b1
accctgcccagttcggctggtcctctcccgcccgcgggcttcttggatcctcttcaagaaacaaacccggccatcgatcgccgattccttcgagggctctggacacctgctacaccttgaaatacctaagttgctctgctgtatttctcaatggagcatctttccgaggaactgatcatagagattctcaagaggattacaaggacaagtgatctgaattctgtctctcttgtgtcgaagcagctctacgccatcgatgcggagcaaagggctactatttgcattggttgtggactttcaacagaagatttctcagcactttgttcccggtttcctaatttgctcaaagtagagatcgattactctggttcgacacctggcaatgggaaccatattgacaaccaaggtctctttgttcttacatctttgtgtactttgcttaatgatattaccttaagcttttgctcaaaaatcaatgatgctggtattgcttgcctaacttactgcaagaagtgatgtctctgaagctg

SEQ ID NO: 14493 - DNA, 538 bp, Oryza sativa
  Clone ID: uC-osflcyp054c03b1
cgttctttatttttcgccgacagaccgcgtgtccatggggggggtttctttaatacccacgccggtttccacgttgtatcgcggcggggccggcgggctcctgtttgcttccttccccgttctccgtttcttcctcgcgccgcatgctatggcagagcaagctggaaccccatgtactcctataagcccccaagcgattagtggtgcttttgttcagcaatattaccacattttacatgagacaccagatcaggtctataaggtctattaagacgcacgttttgtcggtcggcctgattctaatggaggcatgcaatatgtctcaacaactgctgatctcaacaaaataatcctgcctatggacttcagcaactactgaacagagatcgtgactgcagatgcacagttatctcaccaggacggtgtgcttactgctgatcctggacctctgacttctgaaggcatatgccgtagattacacattcattctttcttgccccacatgaatctggtggctttgccgctcccaatgtatttt

SEQ ID NO: 14494 - DNA, 424 bp, Oryza sativa
  Clone ID: uC-osflcyp054f01b1
caattctgctctaatggctctgaaacagatgtgcccgcggaactgcataaatttcaagagtggtctatgaaaattggagaatgggaggaattgcacacatgaactgtcttgcccgagtggagatgctatgggataggcaaaatacttgatagggctttctggctgtttggcatttgtcagacgccctgtgtgtggtaacatctcgatcaaattggaggtcgaaattcaatatatccggtgagaagagatcacgagatcgatcgctacctatatatcacagatagaaatcagaggcctatcgatattttcgccgagcatatataagtagtgctgtcgatggcgagcccaattcgtgctttataagaacagaacacatgcttaagactctgagtgttggggcgtatcattttttccgggttacctt

SEQ ID NO: 14495 - DNA, 450 bp, Oryza sativa
  Clone ID: uC-osflcyp054f09b1
gtggtcgccgcgagccaacgagcgagaacgggcgacgcacaaacgctgtccacgccagcggcaagtcgactcgtgcacctggtctcgtgctgctccatggggtcctcgcccttcgcctgccgatggcgacgatcgccagggcggactcacgctacggaccgtcgtgccgccgaggctgtcttcgagcgacgtggcgcggaacggccgcctagcggcgtggcgcgctacacggcggcggatggtggagatggagccaacgaactgtgcccagtaccgggactaagacgcgtaccgaagcgggatacgatattattaaggacgctataactcaggctttggtagaagcaaatggcgtaacacggacattggttctgaaatcgccaaaacggatgaatgcactctactgtgcaatgaaacgtgttttttgaggtgcttcactgctaatgagga

SEQ ID NO: 14496 - DNA, 440 bp, Oryza sativa
  Clone ID: uC-osflcyp055a05a1
tttgtgtttttattattttttttttttcatgatttttgttttttacaaatttttttgttacactggggagaaaagccgaaatgacttatcaaaaccgaaaaggaaccgagaaccgttcaagaaaggcatagaacggggggggggagtccccccggatgggggaagggggagtacccaccaaacccaaaatacccttgaattacctttttttattcccgcatcccacgcattgagggaggggaaattcttttcttaaccttctaagatttcgagcttgcatttttttaaatgcaaaaaaaaaagccaaaggcgggggggtccccacaaggtcagaaacggggggccccggacaaatccaccaccggggcccactggttaaaactcattttaaccggttccggggagttccccgggaagagggcggccatggggcttccgag

SEQ ID NO: 14497 - DNA, 206 bp, Oryza sativa
  Clone ID: uC-osflcyp055a10b1
ccctccctcttatttacaccaacacctacaaccccaccggggggggacttcatacaacacggcggtgtacaaaaaacctcaccaacaaaccttacaatacattgcataacaacatggaacccactaaccaccccctaatccaccttctccaccgaatcctcatcaaatcccactactcctatacacagacgcatcctttcaaaccc

SEQ ID NO: 14498 - DNA, 514 bp, Oryza sativa
  Clone ID: uC-osflcyp055b01a1
ttatcttccggccttacttttttttttgttttttaatgaaaaaccgggctatacaacgaagcatttggcaaggacccgacaaagacttgaccgccacccaaaagctcattaactgtacaagcaaaagccaaacattcttccgctcgcgggtctatcatttgtcagaccgcatctgcgagtgaacactggtcgacaacaattcaaatcgatatagcacactcatgttctattcaaacatggaacaaacttggggcaaaagcagatccacgtggatcggcaggcttgacttattctactatggcacttggatgcagcaaatttggcaaacacttccggcagtgccatcattttcagcaaaccgggattttgctctgtagcttataacaaccttttggaccagctaaccagattccactgtatggatgctgctccgttagcttaccaaattttcttgcaaacctttttcaagaggttttttgtttgttttcccattagtaaaattgcctgcccacct

SEQ ID NO: 14499 - DNA, 67 bp, Oryza sativa
  Clone ID: uC-osflcyp055b06b1
tccctgttcaccccacccttccgttcttttaatctaaaataaccaaatttttttttattgccatatg

SEQ ID NO: 14500 - DNA, 529 bp, Oryza sativa
  Clone ID: uC-osflcyp055b09a1
agggatagaataaccagagacataggaggtttcatttcttcttctcaaagtagtgtagcatctttccttctttcaccattacataagcttaagcaataacagataacaaatcctcctcctcctctaggtaaaatattcaaacacaatacccttataagtacttattattaggaaagtagcgtgcatgggcataaatggcagcggggggcaggttaagaatcacaatgctgagcagcgaggaaacaaaacaccataatgggacagagcaaaagcctccgaaagggagcttttaggcagaaggcttctcccacttgaggggcttcaccacctcccaggtgaagtctgggtcgtcccttcgaagtgaccgtaagccgccgtcttgaggtagcgtccgttgccgcctttcttgaggtcaaggttgatgatgatcatgccaggcctgaagtcgaagttctccttcacaatcttgaggatctccttgtcagggatcctgccagtgccgtatgtgtcgaccaatacggacagtggc

SEQ ID NO: 14501 - DNA, 140 bp, Oryza sativa
  Clone ID: uC-osflcyp055c05a1
tgttgggaaattaaactgggagggtatatttcacaaatagggaaagacgcatggacaccacacggctactatgctcgcttcccatgctagcgcaggggcccatcaccgggagcaaccgtatatccatatacaaaatataa

SEQ ID NO: 14502 - DNA, 370 bp, Oryza sativa
  Clone ID: uC-osflcyp055c10b1
gtctgggatgaggatgcccccatggaaattgaggacgaagaggccacaaagccagaggggtggctggatgatgagccagaggaaattgatgatccggaggctaacaatgcctgagactgggatgatgaggaggatggagattgggaagcaccaaagattgacaaccccaagtgtgaagaggctcctggttgtggtgagtggaagaggccgatgaagcagaaccctgcttacaagggctagtggcatgcgccttttattgacaaccccaactacaaaggaatctggaagccccatgagattcccaaccctgagtacttctagcttgacacgcctgactctgatccaatttgcgctattgggatttgagatc

SEQ ID NO: 14503 - DNA, 571 bp, Oryza sativa
  Clone ID: uC-osflcyp055d01a1
agtacacaattctgtaaattgctataacgcgctctgtccacaagcaaaatcatgtccaccaaatatataatatcccagtacacaattaggaaatagaatgaaaggaaaataacttattggttgttattacccaaggggacaaacctacactacacctgaaattgaacaagaaaaaacagccgttgtacagtagtacaagacgccaatggctctgagcatccaactccttttgtgttttaactgtttacatcaggaagtccctggggtcagtgacgtatccggtgagggctgaagccgccgcggtgaacggcgaagccaggtagatctgcccttccttgtgccccatcctgccggggaaattcctgttcgtcgtcgacacacacaccataggttcattcatgcgagcatatgtatcacgaggaccacccaaacaagcaccacaactagggctagctggtgtatcacaaccagcctcctcaaatatctgtgagcaagttttgccaccggctcctggtacagggatgctataaatgtccatccacaccttttgtgtcgcccgaacgagaaaagt

SEQ ID NO: 14504 - DNA, 429 bp, Oryza sativa
  Clone ID: uC-osflcyp055d09a1
tttttaccaaatccatttcttaatttaattatggggaagggggggaatcatctaaggagtgatccaacaaaacaaacgtaaatgacaaaagcaagagcttattacaagcctaaaataccacacacgctccaatgcaggcatccctctcccttcattattccaagctttgggcacaagaccttcatggcttcatgtataccgatccttggcatcaacgaagacaaaaactcaaaacgcgcggattgaatcttacaggctctttgctggtgcgaagacctcctccgcggtgatgccatactcctggtagatctttccagcaggagcacttgcacccaatttggcgatgccaataaccctgccttcgctttccacgaactttttgccatccaagagtaaaccctgcttcaaggctgacccttgcattaacaa

SEQ ID NO: 14505 - DNA, 371 bp, Oryza sativa
  Clone ID: uC-osflcyp055e02b1
cggaatcgagcgccgtgctctcgcgacgccgccgccgccgatcgatcgatggacgccgaggccggcgtcggcggcgccgaccagctgccgtggaggcaacactacaggaatttactgcttttagcataccagagttttggtgttgtttatggggacctaagcacatcacctctttacgtttataaaagtacattctcaggaagactacgtcgatatcaagatgagcaaacagtctttggtgttcttgccttgatattttggaccttcacacttattcctttgctgaagtatgtcactattgtattaagtgctgatgacaatgctgaaggtgggccgtttgctctttattcgctgctttgcaggcatgcgaa

SEQ ID NO: 14506 - DNA, 207 bp, Oryza sativa
  Clone ID: uC-osflcyp055e10b1
gtgtgaagatgcttaatcgcattgctgaagctggtggtaccttcattccggggccttacctgctggtcgatatgctggaaatgaaagaacttggagggaggccagatgcccaaggcaaagcagcgaatcaggcgagccctcaacaagctgagctgacgccacgacagcaactgctcaaggatcaagtgcatgcatgtgtggccaatc

SEQ ID NO: 14507 - DNA, 533 bp, Oryza sativa
  Clone ID: uC-osflcyp055f01a1
ataagcaaaaactgactgctagtattattttcccatcacatccaatccagaaacttaaaaagccatataagttcaggcaacatataactgtgattgtatcacagcagaattataatggtggctcaggaggcagccagatgacaactctgaaacaaaactcaaatatttaacgagaactagccaccaagaggtgatcgattataggcgcgaagctctaagactcatagatccaagggtgaaggttgctcctccactcagctaaaccttcagggaaccagagagcgatctccttcttcccgttgtccacggagtcgctcccatggatgacattcctgccaacttccacggcatagtcagcacggatggtgccgggggctgcctcccagggcctggtggccccaatgatcctgcggccagtggcaacaacatccttcccttcccaaaccattgcaacgacggggccagagatgatgtactccaccaacccagggatgaagggcttgtcggaaggtcggcatagtgctgctggcaaa

SEQ ID NO: 14508 - DNA, 138 bp, Oryza sativa
  Clone ID: uC-osflcyp055f09a1
attagggagcaacctttaaacggggttacttaaaaaacatcacagctgcaaacttatccaattattttttacacaaaatttttaaaaggctacataaaattttccattcatataaaaaatgaactgtctaaaaggata

SEQ ID NO: 14509 - DNA, 409 bp, Oryza sativa
  Clone ID: uC-osflcyp055g05a1
tttttgtaacacaatatacacaagctgacaagcatttattaagaagcacctgtttaacataggtaatcaacatgcataatagcccttcttcacacccatcaccatcctgatcttgtctacctgaacataacaggtttacatgggaacattgcacaaagctgtaggcatttctcacatgagcatatatcccttcctgtactcactccataataagcaacacaagtcgcaagcattacattatttttcttctctgctgctctatggtcctactcaaaacttgcaggaagtgcccagccgctgatttatccgctgacctgcagccgacgtacgctcctagggagcttttttcagcagcttctggaacttctaaaggaatatacatcgcccttatgcatggaggaacaacagg

SEQ ID NO: 14510 - DNA, 401 bp, Oryza sativa
  Clone ID: uC-osflcyp055h01a1
aaaaaaaaataaattttttttttttaatttaaataaaaattaataaaaacttaaaaaaaaaaaaaaaaaaaaaaaaaaaaaaaaaaaaaaaaaaaaacaaaaaaaaaacataaaggaaaaaaaaaaaaaaacaaaaaaaaccaaaaaaaagaggaaaaaaacccctgaaaaaacaatgaaaaaagggattaggaaagttttaaaaaagggggagaaaaaaaacacaaaaaaaccaaaaaaaaataattattggagagcccaaaagggaaaattataatcaattaaaaaaaaaaaaaggtatgcaaggggtaaaaaatattgcaaaaaaacacaaccacaaacttttatttgaaataggtttaaaaaaattcaaaaaaaaagaaggggaaagaaacaatttt

SEQ ID NO: 14511 - DNA, 421 bp, Oryza sativa
  Clone ID: uC-osflcyp055h09a1
ttatgttgtgcggccttttttttttttttttgggcaagaaaaatcagccacagtacatcaccgttattggatcacaaaaaagccaacaaaacaagcagatgtgatgcgaccgaggcagctttattcaacttgtccagaaccacttttctaccgactaccacttttgcatgggttaaattaaccaggtaccacgggttgattggacagtatttcctcaatgggacacagacctgccgaaacattaactatttccccctcactcttactactcttcattttaccgtctttcagaaccttggcaaaatctggcgttggagctgtcaaacatgttagccgtcaggtcccgtctccttcatgtctacaggcacaagcatccatgcccttttctactcacttggttagagcctatccttgagaggct

SEQ ID NO: 14512 - DNA, 257 bp, Oryza sativa
  Clone ID: uC-osflcyp057a02b1
tttaccttctcctccggctcttcttcagtatcgaatcctctcttctcctcgtgcccaccaccaccaccgtagcaatggcgggcaacgggccgatcaacaaggaggacccgctcaactggggcgcggcggcggccgagatggccggcagccacctcgacgaggtgaagcgcatggtggcgcagttccgcgagccgctggtcaagatccagggcgccaccctccgcgtcggccaggtggccgtcgtcgtccagtccaag

SEQ ID NO: 14513 - DNA, 201 bp, Oryza sativa
  Clone ID: uC-osflcyp057a05a1
tgtttgtttttttatttttgttggttttttttttttttttttaggaaaggggagccatggataattaaaccttttatgagcgaaattaaagcataaatttaaggcattattatcccggcaaaaaaaaaaaaccttaaggaaaccaggtttttggttccgggggaacccattaactaaccgctagggaaataacacacgttt

SEQ ID NO: 14514 - DNA, 270 bp, Oryza sativa
  Clone ID: uC-osflcyp057b01a1
ccccaagacgggtgctttttttggggccccccctggggttggcggggtaataccatccaaaaaacgtgacccgaaaccgactttatttctaaactggaattatggggaaaccctttttaactttcccccctaccggggtaaccccccctttcacaaaaggcatttttccaggaggggaaacttttacgtttaaggataaaaaaaacccgggtcctggtaactgggccaatttttggggaaaatgactttgggggctttttgaggaacaaa

SEQ ID NO: 14515 - DNA, 402 bp, Oryza sativa
  Clone ID: uC-osflcyp057b09a1
tttttgtttgattagttttatttgattttacgttgtttcatttcttagttttttatttttttttaaaagtgccgaacgtgaagaggcaatggcttaaataaccctacaaacaaatcggccttgacctttaggggatatattagaacacaacactggtataagcacttcccattagaaaagtaactggccccctcatgggacccgcccattgacaccccctgggggggatcccttggcggcgactgagggttttatcaacagggggcggtccttgagtgatcgaccgggattaatctacccgggggctttcttagaaagactgtggggacccatatggaggggccgtgtgggaacttctttgcaggggatcgcaagaaccccaggtaaacgcctgtgggtggg

SEQ ID NO: 14516 - DNA, 386 bp, Oryza sativa
  Clone ID: uC-osflcyp057c05a1
ttagttggcgcccttccttttttttttttgtttttttaattatgaggaaatttttgcttttttaccttttcaaatatggtgtgtaaaggttacacctcacccaaaaggaagttgactcatatacaaggcgcattgtggacgatatcttggccctgtctttactcatgcacacgccctaatcaaatgtacggatctacatgatacactcgagctagcagaggctatcagcatccttccaactacaatttgtacacaactttgttaatggtgatatatatatctcagacaatttctaatttgccaaaggaagatttgtcatcaatgttcttccccttttgagaagacgacttctttttccggctatgtcacctgtgccgaactttcat

SEQ ID NO: 14517 - DNA, 289 bp, Oryza sativa
  Clone ID: uC-osflcyp057d01a1
gaagagatctgccaggtgagatacatggcattgtcatgggtttacccaaaggagttggattgacctttacgtgtatatgtattgcttgcgactaggtgccagtaaaaaagactcctcgatgacccagttatgtcacttaaactgattgtaagagccaattttttgcagaaattaatttatctatataccaaacacaaatgcattgcctggaaagaaaaaaaaaaagggctgacgcccttttttttttttatcctttagctctttactttatatctgacactgattaact

SEQ ID NO: 14518 - DNA, 401 bp, Oryza sativa
  Clone ID: uC-osflcyp057d09a1
tgttttttttataatcaaatcacaaacatatcatatacatagacccataaactagcatagttcatggtcccaaaagcacaagagtgctccggtgctcccccacaaacttctccggcccatgtggcctgattcggggggttacaatgtaacaacaaaagttacaagacaccacctccctgctgttctacaatataatccttaaattgccttgccaaattttaaaccaaggctacaacaatgcagaaaaaaaaatgcccaactccatgataacttatttatgtctactggacctatgggagaaagcaaaggcctaagcgggtgctaattaataagcagccttagaatagccaaagcctcttctcttttactatagcaaagagggcttccttcttcttcacctt

SEQ ID NO: 14519 - DNA, 426 bp, Oryza sativa
  Clone ID: uC-osflcyp057f01a1
tttttggtttttcagggaaaagggttaattaacataggagtacaggagaaagataacaattgaacgatagcatggaattggaggctatccaccaatttaccattccaatggcttggttcctggtggactcaaaaaagtacggccgatgaccgggcttacttatttaaaagtacaggttgagaatattgccacaaaaggtttttgataccctgaagaatggacgctggatagccccaccacacttggaaccctgattctgactgcggaggttgatactatcttgacgaccacaatcactaagagattcagaacaacatcagactgacaatgctaacaatgccaagcagcagccccaatacttgccttcaaacccagcagctccattaaagccccagacgcgcacatgattgatcactggcccacaga

SEQ ID NO: 14520 - DNA, 199 bp, Oryza sativa
  Clone ID: uC-osflcyp057f06b1
ttgctttcgatcgccggcgactaccgaatctgtgccggtcgttaggaaggagagcggctatggcagcgatggcattcctgtaccggcgtgtccttcctttcgttgttggctgtatgatattatttattattaatcttttttgattttctttatttctttttatattttaatttttcttctattttttctttactttttt

SEQ ID NO: 14521 - DNA, 357 bp, Oryza sativa
  unsure (1)..(357): unsure at all n locations
  Clone ID: uC-osflcyp057f09a1
aaaggaaacaggcccttttatttcacaaaggggggttttcttacgaagcaacccatttttcccccgccggggagccactaggcgggggttatggggaaaatttgaaacgaatttttccgcaaaaaaaacaggttagggggccttttcctaggtaaacaaaactacggggtggctggctggctggcaatgcaggggggggggggatccaaatgaaaccggggggctggatatacccaacccttttgctaaagtaaagggcttccttggggccccggctgccaggctggtatggaaaaaacctcaccttgccttcnncgatgtcgggccacaggggagggaaaatttgccaagcaacct

SEQ ID NO: 14522 - DNA, 147 bp, Oryza sativa
  Clone ID: uC-osflcyp057g05a1
ggttgggttatatttatattggttgttttctatatatttttttttcttttttagttttttttaatcttattatgttgttaaatttaatacagtttaattatttaaactttcttttgggggcaaaaaacactaaataaatattggggg

SEQ ID NO: 14523 - DNA, 493 bp, Oryza sativa
  Clone ID: uC-osflcyp057g10b1
tagtgccgctccgacgaccagatccgtaagcgactttttaatcacacgatccagtatgccaatgtgatatgacgacaatgcaaggattattatgtacaggccttctatgatttttattatattaatttttatatcttttttttttacttttaaaattattttttttattattaacattttctttattttctataattttttctattattatttttttctattactttattattttttattatatttttttattttatattatttatttcattttattttttttttcttatttattatatatttttttttttttatttctattttttattttttatttttatatttaatatatattatttaattttattttctaattttatttttattttcatatttattttttttatttttattattaattatttattttttttatttttatttattcattttttttattttatattattatttaaatattttttcttttttt

SEQ ID NO: 14524 - DNA, 334 bp, Oryza sativa
  Clone ID: uC-osflcyp057h09a1
ggacaagcaagaagtatatatattcatccatttctcaaactactacaagaggtcgagaggaacacataatcaggagggattgcgacaatttacagcaacaggagtctggagatcgaggcaagaacaagacaggcagcagcagagctaccctcttcatttccactgaatttttacacatttggaatccatggaaacccgaccttcccttccggggggcgggtgtcaccggagtccgatgagaaaatggtcatggcgggctcataatccggatcgctcgccggcgtcggtgaaggaggcggggcgattgttcgggcggctgttgaggagggggttc

SEQ ID NO: 14525 - DNA, 218 bp, Oryza sativa
  Clone ID: uC-osflcyp058a02b1
gtccgctctaacaaaatacagtatcgtgggcttgtgtcgcgcgggtctctcatctacgatgagatcggaacctcgcgttgccgattaccttctccgtgctatgggcaaaggcgcggatcaacctgcacaaggcctccgttacttcaacgccatccgctaatgaggcgtatcagtagtcccgtcctaacaaggaccagtatattggacggttttctaga

SEQ ID NO: 14526 - DNA, 403 bp, Oryza sativa
  Clone ID: uC-osflcyp058a05a1
catgaatcatggaccactggtaattgagttactgggtaagcgccagcgccacacatacaaggtctgaaatctctgaaagtacctgatacatgagcatacagaaagaccatcaaactgacaaatttcatgcggccaatatacacacgcgattgcactactgatccaaattaatcaaccttttttattttctttttaacccatctcatccataataacgtagaaacaccagagatccatgcagattacattgcatccatccaagatgagaatgatcaaaaaaggtttgggttgtatccgttgctgcaggtggcgaggttgtagtaggcgaccatgtgaccgagggagccccaggctaggacttccacaaggtttaagccgacgggatcgttggaccggatcaggc

SEQ ID NO: 14527 - DNA, 521 bp, Oryza sativa
  Clone ID: uC-osflcyp058b01a1
cattgttgcagtcaccaaatccctttcaaggtcaaaaggaatagggtccaatattacacctttgacatactcaaatccccgtagcttgttctttgctgcaacagattgcagctctttcaggatatgctctttaaggccttcagacttgcatatttcagcaaaagaacccttgcagccatttgattctgcccacttcatggtgttctcttcatgtggattaactactgccactaacattgatctgaagctgtccccatatacccagacatcttcaacggctggagggaaaacatatactttctccaggtattcaactgcaacatactccccttgtgacaacttgaatatatttttctttcggtcaattaccttcaggattccatctgagttcatctctccaatgtcacctgtgtgaaaccatccatcagccatgacctcattcgtgagctcaggatttttatagtatcccggttaagaagtttcctcggacgcatatttcaccacgggaaggagtaccaagt

SEQ ID NO: 14528 - DNA, 399 bp, Oryza sativa
  Clone ID: uC-osflcyp058c05a1
cttctgccgcagcacgctggaaggggaacaaacactccagggtgtttagcaaccgccgtctaaacacaagggcgtaagacgcaatatgtacaacaggtcactcagcacagcaggtcaatgttgggagcctgtgccagtaagcatggtcatcttgaagaccatcaggggagcagctgtttacacccatccataaatcccaagggagataagcaggaccagagccacagagagaaccagccaaatgatgtacgatgggaatcccctcttattgacctggtgctctcacatgtgaatcaagaacgctctattttttctactgcttgttctgcgtgaatttagcctctgttagcttacgcatccttagaacatatatagcattaggtgtgatggcaacatgct

SEQ ID NO: 14529 - DNA, 229 bp, Oryza sativa
  Clone ID: uC-osflcyp058c10b1
attaaagcgagagagatctctcccgtgctcgatgcggggcgctcgtacacgatgaccaccatggccatggctggctcctagtttgcctccgtgttccttggcgcgctcttctcggtggcgcggctcgccggcgcggcggaacaaccttcaggacgcgtgcagccggacgctgttcccaaggtgtgcatccaggcgctgacgaccaacccggagagccggacggtttact

SEQ ID NO: 14530 - DNA, 76 bp, Oryza sativa
  Clone ID: uC-osflcyp058d01a1
accagatgaaaaggaattcttggtttttttaaatgtatgactctacactaggcgatggatttttctgatagtactg

SEQ ID NO: 14531 - DNA, 524 bp, Oryza sativa
  Clone ID: uC-osflcyp058d03a1
aaaacaacatcattttttcttatatgtcgcttaggacgttgacacggtctccaatacaaaaatgttagtgagactttgatgttttactgtacgcatctaaaacaacataaagaaggaacatagtattttctatcttctatggtgaaacatttgaggtcattttctgaaagtattagcagtatgtcaatgtgtcaccttcagtggattcaccttgaaatacatatccaagacagcaagtcactgaccaacaattagctccttactttccaactagttcttcatgagaaattttcacaacataattactgtcagatggtacagtactcttgcccatccttcacactgtgaaatgattttaaaagataaaggttgcaataccagatttgagaatcacaagatggtaatgggaatgtcatgcttagctatccttccagaatgcagaggatgggagcattcaacagtggtcaactggtcaagtatccaggattcctaaagaaataggttatgcaatggtgcaagcacac

SEQ ID NO: 14532 - DNA, 533 bp, Oryza sativa
  Clone ID: uC-osflcyp058d06b1
acccattagaagagtttaataccatgatgcaaattttataacgcatactcattctgcatagaccatgtactgaaatatggcgcacctatcaatctatactgcatgtatcacgttatgctggatctatataaagctgctctgcatcgctcattataaattgagagtgagcgattgttgcttgaccttaaccagaccagagaactctaagagcctgagctgctccagaccatttgctttcatgggaacatgtgtactgatactgtctatatatatctcaacaacaggtttgatgacacaaatccagaagccgaaaagaaagagtatatcgatcacatacaggaaatcgtacactggatgggatgggagccctacaaagctacatatacaagtgaatattttcaggctttatgtgagcatgcaggtgagttaaaacgaaaagggctagcctatgtggaccccagaccgcacaagaaataaggatacagggaaagaaatgaatgtccatggaggatagacccatgaagatcctgaac

SEQ ID NO: 14533 - DNA, 539 bp, Oryza sativa
  Clone ID: uC-osflcyp058d11a1
aaccaaatatgttcatatgatattttgccgggacatgacttgtttgcccactcacaaggagaaaatagaacaagaagcaaagtcaagtaggtaaaagacatgtactaattttgttattccttatgccgaagcaatattggatcaaaaatattctccacaatgtcgtggagcttgattgattatatggaatggtgatatgatctctctttgtgaactctgcatcctttcgctcaaaggtcctcggggccattgatatccttgttctcgatcactgctccatctgggatttccagtttgacaccaggttgggctgtgatggtcaccttgcccttcaatgtgatgctagagccaaaccaaacatcaccggaaaccttcaaggtgtcaagctcaacaatgctggggattgacttgaagcgaccaaggaaacacccgaccttcttgaactctggacccagttcaattgagggattcgatgggtttgttctgggcgggttgcgtgtacaaagccatcaaccaaggtatatagatcagactgtact

SEQ ID NO: 14534 - DNA, 456 bp, Oryza sativa
  Clone ID: uC-osflcyp058e07a1
gttcaatcatatcatgtgcattagagaatatagtaaaagataatcggtgttcattgtcaatgccgtagcttcgccatgacaactccaatcatagggcagccaaaaatgaacaaagggcagtaggtattgaaattgttgcacccaaaaagaatagttcccaagtacaagacaaccagtatgacaagggtgcttcttaagcaggagttgcctgcctcctagaagaggcaatcagatctcgtaattccacgtgctctccgctattagctttggcgctttgctttggtcagacagatcaaatgacgctgcgaccttgaaggaggcaccgatcttggagtccctggtccagtcgagggcgaggagcttggtggaggcttggtaggaggccttgatggcatcccctccttgaaacttgcgggtgaaggaaaagttccaggcgttgttagcggtgtcgaagca

SEQ ID NO: 14535 - DNA, 116 bp, Oryza sativa
  Clone ID: uC-osflcyp058e10b1
gttggtttgaagagagagacaagccatcattagccaccgggatgcaggcatgcatcacatagctgacaggacaagaatcagaggaagaagacaaggatgaggaggaggaggaggag

SEQ ID NO: 14536 - DNA, 396 bp, Oryza sativa
  Clone ID: uC-osflcyp058f03a1
aggagcacgcggatacattttcccataatccggagatgataatacctgatacaaacttccagactacagacctacaagctgcgatcggacaagagaaggaaacggccctgaacagtttccaatcatctccacggtagcagctatcttaacaagttattacatcacaacttagggggatttttggcctttgaaaagaaggcctgaggggaagaactatacgaacttggccttcacaaatcacaaacccagcccaaaacgctgggctgccaccaatgctcagttgagaagaaactctaccactagcaaccaacctcgccggctttgtaaataccagagccggatcttctacaccattacatggtagctgatgaaaacatggaagagttcagtctgccc

SEQ ID NO: 14537 - DNA, 469 bp, Oryza sativa
  Clone ID: uC-osflcyp058f11a1
aggttcaaatccaacttattcataaagcatactgctgtcccacaggaaactgtttcataaaactaacatatcatacggactcgatggtccattaaaccagacacaagtagacatcagcaccacaaatacttgacgaacagaggctcgggatgaccaggcacatcggcagctccaccaaactggctgattactgaccaccacggaggcggagcaccaggtggagggtggactccttctggatgttgtagtcggcgagggtgcgtccatcctccagctgcttgccagcgaagatcagacgctgctggtctgggggaatcccctccttgtcctggatcttggccttcacattatcaatggtgtcggagctctcaacctccaaagtgatggtcttcccagtcaaggtcttcacgaagatctgcataccaccacggagacgaagcaccaggtggagggtagactccttctggat

SEQ ID NO: 14538 - DNA, 368 bp, Oryza sativa
  Clone ID: uC-osflcyp058g07a1
atattgtgtttgtgtttatagttcacagtacataatgaaactatacgctacatggaaaaatatcgaagttatatatatctatcagactatcaaatatcctcgattataccagcagagaataaaacccagagctggtgaacgccctaaaagctcacaatagggccagacgctgccctggggaacggaaggacatcacgtggctgacaggctaacctaccgggtaccattcctgatgaatgcgagtcaaaaattaaagcatctggccagaggatcacgcccagggggggatgctggccctagtgcggcactaggcacgactgcgctcgcctgcgtctggagcagagccatcgacctcccgatcgaaagag

SEQ ID NO: 14539 - DNA, 313 bp, Oryza sativa
  Clone ID: uC-osflcyp058h06b1
ctcgatttatctttcttggtttcttgatctgtagcttattagcggccatgtgcggcggagcaatcatctccgggttcatcccgccgacggccgctgcggcggcggcggctgcggcggccaagaagcagcagggcaggagggtcacggccgacgtgctgaggccggggatgctgcggaaggggaaggcggcggcggcggaggaggaccttgaggccgacttccgcgagttcgagcgtggcatgagcgacgacgaggcggaggggggcggcggcgaggaggaggaggaccacaactacgtggtcgtggtggcccc

SEQ ID NO: 14540 - DNA, 404 bp, Oryza sativa
  Clone ID: uC-osflcyp058h11a1
tatgcctcctttcttgccgccctccttttttttttgggggcttttgaaaggggggaggtgcacacatcgtcaagagtaatgagctgacttgatccggtacaaatgactgcgaacactgcccatcgacatttatctgtagcctagctaccagattgcttgcaggaaaatacctgggtgtcacactgtgacggcatagctgctatcgtaatttctaccacggggtcggacgtgcttagtttcggtaactcggggcatgcgatctgcggatgcttacagccatcctctgataaaatcgagcttacccgggctctcaggggggtgactcgcctgttcctccatgatctgccccgggttggtccaatgctgcacccagccaccgctgtttggaatgatgccaagtcttg

SEQ ID NO: 14541 - DNA, 453 bp, Oryza sativa
  unsure (1)..(453): unsure at all n locations
  Clone ID: uC-osflcyp061a07a1
tttttggttttttttggttttgcggtttttttttttttttcaggggcatacattgcccattcttgattaatttacccaaagtcgtccattttagccttatactacgatggagagcacacacgctaactaaatttttgagaccaaagccaaacattccgcatgggaatatggggggcaaattttagggggaaacttttttcgaacttgaggaccttgactaaccggccccgattccagtggtgggggaggacactggcccatggcctcaagcggtactcccttggtctccccccctaatgccacttttaaacgccgtatgattaccagccacaacccttttaacaggaagggcccctacttgaagcaacacaccatggttaggaagcactgnncactaagaaaattttggcccaggttggggggnaacagaccccctgccccgcggtcctgacc

SEQ ID NO: 14542 - DNA, 235 bp, Oryza sativa
  unsure (1)..(235): unsure at all n locations
  Clone ID: uC-osflcyp061a08b1
gttttatctgggggggggggggagtgataaaggtgggggtgttgtnttaaaaatgagaggagggctctgcagctgccacaatttaaagacatgacatggtaaatgttgaagactttactattagctgttgagcttgttaggaagcatcataatttgagtgataacaggtttattatctcatatctttattatccatatacttgatttatttgtgatggttagctataaaattttt

SEQ ID NO: 14543 - DNA, 214 bp, Oryza sativa
  Clone ID: uC-osflcyp061b11a1
gaattaatacaacttttttatatgtagaacctataggatcacattgaccagaacccggccggccacagatcaagatttcttgagtaagtacgtatgtgtagaagaaaaaataagctcacacaactacaaaataagaatcatctccggctagccgtggatccggtgggggccggtcaccgccactctagtactggcttgccgcgtcacccctggg

SEQ ID NO: 14544 - DNA, 510 bp, Oryza sativa
  Clone ID: uC-osflcyp061d04b1
tttgtcttaccatggtgtaaattttgtgattgcacatgatggatttactttatgtgaccttgtttcttacaacttaaagcacaatgatgctaatggagaaggtggctgtgatggatgcaatgacaactttagctggaactgtggtgttgaaggagaaacaaatgatctgaatgtgttaagtctgcgttcaagacaaatgaaaaacttccatgtagctttaatgatttctcagggcaccccaatgatgttgatgggcgatgaatatggtcatacacgttatgggaacaacaatagctatggacatgatacttgcattaataatttccaatgggaacagttggaacaaagaagagatggccatttcaggtttttctcagagatgataaagtttcgtcacagcaacccaatattaagacgagacaggtttcttaataaaaacgatgtcacctggcacgaggattgttgggagaaccaggaaagcaaatttttggcattcacagtacatgatca

SEQ ID NO: 14545 - DNA, 185 bp, Oryza sativa
  Clone ID: uC-osflcyp061d12b1
tttgactgctcattagttggactttgatcccttctatgacgtagcagattgcattgcatacatgtacgcactgaaaagctgcatggcgatcgaatagcagtcgaatacgggatctcgcatatggatgggggatacgcgaatagagttataccccatttgtaggactacatctgcgataattagct

SEQ ID NO: 14546 - DNA, 128 bp, Oryza sativa
  Clone ID: uC-osflcyp061e07a1
tttttgtttaaaataaagtgagagcagcatgaatcaaaattccaagaagaatagagctgtactgtggcattgaacacacatcacacgtttgtgaactcacgagatacgatgcatctaatctctgcact

SEQ ID NO: 14547 - DNA, 303 bp, Oryza sativa
  Clone ID: uC-osflcyp062a03a1
ggacataagtatgtactaaaactttggaaaatcaaacagatgcaatcatcttaatgaaagttgaccaaatatacttttttccatatatcttatataaatgacatatattccaaacaatgctcacatacagctccgcagcaatattttggaaggacacatgtatgccttatgttgccatcggcctattacaacaaaataaccaaaaataataattatttgctcactcaaacatgacacgatctcttttaagagaggattatttagatgttcatatttcgcatgtgacccaacaagagtacacat

SEQ ID NO: 14548 - DNA, 513 bp, Oryza sativa
  unsure (1)..(513): unsure at all n locations
  Clone ID: uC-osflcyp062b07a1
tttttgtataaattataatttttttatatttttttttttatttttttttataatttttttttatttaataaaacaaaattaaaaaaataaaaaaaaaaaaaaaaaaacacccactcacgaanaacggaaaaccaaaaaaaaaaccccaaaaaaaaaaccaaaaaaaaaaaaaaaaaacaaagggggggggtttaaaaaaaaaccccaaaaaatagggggagaaaaaacaaaaaaccaaaaaggccacaaaaaaaagggaaaaaacaaataaaacccccaacccccggggggaaaaaaaaaaaacccccggggggggggggaaaaaaaaacaaaaccccaaaaaaagggggaaaaaaaaacgggggccacacaaaaggggggggggaaaaaccttttagggaccaaaaaccaaagagggagcccccaaagaacaaaaaaaaaggcggcaaaaaaaaaaaaaaggggcccaaaaaaaaaaaaaaatggaaaaaaacccccgggggagggcccccc

SEQ ID NO: 14549 - DNA, 502 bp, Oryza sativa
  Clone ID: uC-osflcyp062c03a1
acaacgagatagcccaagctagtaatatgcaggttgcagagcaccaacaaaatcttcgtgttcagagctcacgacagcatcaccatttttacaaagaaaatggagaccaaatcaaacagcaaattttatccagaacgatacgcgtcgtctaaaatcttacaaaaatgaataaacggacacgagagacgacacctccaaaaaaccagaaattgcgtctgtcaggtgtactttttttttcctttttgtacttttgcagtcttcagttcgatgttgctgctccctgccgtgggctggtttccacctgtaggctgttttcacgatggtacagagacttcgcaccctggaatattgtcccaagctttttcaatgctcttgctcgtaacttcagaacatcttttgggacactggcgtctttcaaaactgcttggcaaacatgtgtaagtgttgactcaatatcaaccacattaattttccataggtaactaagcatggcatctttttt

SEQ ID NO: 14550 - DNA, 250 bp, Oryza sativa
  Clone ID: uC-osflcyp062d07a1
tttttttttctgcagataaattcttccatcggtttactgctacagacgccgcgagaaatacaaagcttgaacacactgttttcaagtcacaagcaccgcattacatgactataattggaaaagaaaaaaggtggtacatgtctcacgctattgcaggtgttatgctggaacaggattacaagcttctctcttgtttcataagttaacaaatccatcacactgcatgatggctggcggcacaagggaacgg

SEQ ID NO: 14551 - DNA, 65 bp, Oryza sativa
  Clone ID: uC-osflcyp062e03a1
ggccgccctttttgttttttgggttgtttgtgttttatagaatgttttattacttgttttttttt

SEQ ID NO: 14552 - DNA, 108 bp, Oryza sativa
  Clone ID: uC-osflcyp062e11a1
ggtatatacagtttttttgtttatttacagtgacacgtttacggcccacatcgccagaaacaagccaaggtcataaacgctacaaccattctctgtatcatagataag

SEQ ID NO: 14553 - DNA, 320 bp, Oryza sativa
  Clone ID: uC-osflcyp062f07a1
aaaaactccacaaacaatccccaaacatggccagaggctttgcttatgttcagcgtctgacttgtgaaaacgcccaggattcccaaactacagcggcaaatccatctaattaaacatcaagactcgtctcaacaacaacctgccacaattcacaaacagcaggctgctgcacaagacggtgtacacggttcattttatttgggtgttcgtttccaccatcagattgatataatacacgcgaacaagcagaaacattcggcaacaatttctccaagaaaatcgcggcctattttgtcatcatcccgagcgagcgttatttg

SEQ ID NO: 14554 - DNA, 440 bp, Oryza sativa
  Clone ID: uC-osflcyp062g03a1
attcaaataccactttttttgaaacaaccagcacaagatattgcgacgtttctattgatatagaagaaaaaaaatacaagattacgatcctgggagactgcagtcaggaaaaagaaaatacaaccacaccacgcgtctacgtctgatcccactgcagaaacccaacaagcacacaacacgaatggaacttctaaacgacgcctccaaggaggaagcgacgccaaagagcaccgccgtcgcccgtcctagaacaggatgtggttttcacctaaaggaccaaaggaggaaagcgcaacaacgccccgcaggcgtcgccgttgccggcccgaaggctaggctttcacccattgctttcctcctcccccgcgtcaacgagtgctcgtcagaatcaacagccaccaccagctaatcctctttcacgcgtgggcaccgcgccgacg

SEQ ID NO: 14555 - DNA, 527 bp, Oryza sativa
  Clone ID: uC-osflcyp062g11a1
attgctattattattattattattattatcacttcaaagtgcaagaccgactaagaaacaaactgtcattatcatggcaagcagaacataagaagtgtaataacaatagccgcggcatgtatggaacaaaaataataaaccatcactgcatgtatttacagtgccaccatgtaatacataggacgatcatgctaactaacaccctactattactttccaacagattgtcacattcatacaggatactcacgtagggacaatttgtagtcataccatcctcacctcccagcagcgcattcaattgctggaaaatctctgaataacaaaacagaggggatatgttgttcctcacgtagtagttcaagggcatagaaggacactctgtgcttgttcattacatcacaacccttattcacctcagtgtacaaaatccgacaccctgaaatggggtgttgttgcttgattagtcacgtaggatgacagagtctgcaatctccatcagtggctcaaggcactcgggagcaaac

SEQ ID NO: 14556 - DNA, 441 bp, Oryza sativa
  Clone ID: uC-osflcyp062h07a1
agctaggacaaccaaaaacactgaaacaatatcacagtagtacagcaccaaattagtagtactagtactaatcagatgaacaaaagagaattactacacaccctttgattttgccgtactagtacaacacaagcgacctgacatgacagtatgacatttagtacagcaaacacacacgcgagatccccaattcaccagacaaccaaccaatccaccaaaatcaatcagtgaaaggggtagtacatagctagccggcgtaaatgtggacccccatggcgattaggaaaatggtgaggagtgcgaaataaaggacggcgtggaccattatggggaggcccctggtgtggaaggttccgaacttcggcacccggccccttccggggaccgtgcacaggaaccccggggtgagcaggacgaacaggaccgttggcaccaccaccg

SEQ ID NO: 14557 - DNA, 391 bp, Oryza sativa
  unsure (1)..(391): unsure at all n locations
  Clone ID: uC-osflcyp064a05b1
gccggtcccggttcgcagtttcgggctaggcgtacgtacttgctttgcagctactacaacctcctgcagcagagccccgatgtcgtccaccagttctacaacgacgccagcaccatggtccgcgtcgacgacctggctggaaccaacaccaccgacagcaccatgatggatatacactccctcattatgtccttgaatttcacccaaatcgagatcaaaacagccaactttctcaactcatggggtgatggtgtgctagttatggtatctggtcttgtacagacccaggagtacagccaccaagggaaattcatccagatgtttttccttgctccccaggaaaagggttactttgttctcaatgattattnccatttcgttgacgaagagc

SEQ ID NO: 14558 - DNA, 412 bp, Oryza sativa
  unsure (1)..(412): unsure at all n locations
  Clone ID: uC-osflcyp064a07a1
gacaacagagttctgtctaattgcttgaaatcataaagctcctacaaatccacacttactgaacgtgtggagcccttttttcttaactccctaatgcaagttcgattccgagaacatgacgaaaaccaagcacagttcagcgcatggtaagttggtaactatagccgcatgaagatattcacttcttcctcttctttgggggctgaagtgagtcttcatcatcatcttcctcatcatcctcattggcctgatcttccttttcctcatctactccatcatcatcttcaccaccatcatcatcgtcgtcgtcatcctcattggcatcatcatcgncatcgtcgtaattacctccaccacccttctggccttcaggctcttcctcatcctcctcaccattttccttaggctcacc

SEQ ID NO: 14559 - DNA, 452 bp, Oryza sativa
  Clone ID: uC-osflcyp064b07b1
tctcgttgacccgctctaccccggcggcgccttcgacccgttcggcctagccgatgaccccgaggcgttcgcggagctcaaggtgaaggagatcaagaacggccgcctcgccatgttctccatgttcggtttcttcgtccaggccatcgtcaccggcaagggccctctcgagaacctcgccgaccacctcgtcgaccccgtcaacaacaacgcctgggcgtacgccaccaacttcgtccccggcaagtgaagtgggggaccgtagcttagcagtggttaattgtggttggatggatttgtggccagcgagttcgttgtctttgggttggggaagatgggtttagtgcgacgagatgatgatcgagttggtgtcgtgtacactaagaagatgaagaagaagatgatgttttttgccgaggacatctttagcgttcgtttctttgatgaagggc

SEQ ID NO: 14560 - DNA, 420 bp, Oryza sativa
  Clone ID: uC-osflcyp064b11a1
aactaacataagatagtcattaattaagccgagatagttcagtgcttgaagattacatgccggatttttttttgtgggttttagagtggtttagactgaattacaacacaagatgacgacgagggtccagggacaacacgtccataatttacattcagtttcttcagtgcgaagtagcgagagcagctaataacggggagaactaaccaacacaagcatcttctagtattaaggaacacacgcccccacccacctaccgttgtagtcagtcactacaaaacatggccatggtggcgagccgccctgccaccatcagcgattcagctcattgtcatttcatcggcttcgactgatcctaccggtagtaagcctggtggtgaaaggctggggccattgcattgctggagccgattccattgc

SEQ ID NO: 14561 - DNA, 439 bp, Oryza sativa
  Clone ID: uC-osflcyp064c07a1
caagcaaaatcacacaccagccatcagtgcttccatctttagcatcacagcctgaaagctcattccaccatcctccacatgcccatccatttgacatagttgcagagggcttaaaaggacgcgaaaacacgacgcagcgatgaactgcgggcttggctgcagactgcagcaagctccatcgcagcccagagcaaacatatgtacatatatgacacagcagacgacaaccttactacacaaaccatacacgactcaacatagtagacggcgagcagcagcaggcgtacttaattactagtagcatctacgttatatcacagtagtagaggtaagataggtagacaacactcgacttccatccgcttcggtctctgatatgtctctcctcctcctctgccttgagtgtgcagtagacgctggcctaggagcaaaaacgagc

SEQ ID NO: 14562 - DNA, 415 bp, Oryza sativa
  Clone ID: uC-osflcyp064d11a1
ggcagcaagcaatgatgtatgtgtcctcttgatgaaaaaaggttggatgtgtacatgcatgtacttgttccagttgatgaagtaacaaagcttggaaacatggagaggctttcagcattgtcatgcaaaggtcactgactgggccttttcaaattgcatttaaacctgtgtgcatgtcatcagattgactttgggatctactcttgtttcccagaggccgatgcggtgtttgatgttgacgacgacgacgattctgcttcaccacaagcccttataactgcctcattctgccagaggcgcttgaggcgcttcttggcgttgttcttgcgggtggtggtgagcttgatccgcttccagagcagtcccggggagtcgttccgcttcaccaccttcagcgcccgcgttgcccagaacg

SEQ ID NO: 14563 - DNA, 557 bp, Oryza sativa
  unsure (1)..(557): unsure at all n locations
  Clone ID: uC-osflcyp064e04b1
cattaacttaggttagctacttcttgttgcattgaatcatccatcatcaaatcattgggatatatattccacgatggccaaggtaatcacactaatccttgtcgttattacagtgtcaaccatgctagcctcacctgtggaatgcaccaagattcctggtgcctttcctattggaatgtctccatacaactttacgacaatgatagatatcttcaaagtggccatgttagtgccaacggaggattgcacctccaatgttgagatgtgcataagtgagacatgctcctacatcagaaaagccctcgatggtgttgttgatgctgccccaccagcaaaacaggcggaaactaaggaggccacggccaagatggctgggattgctgctactatgctcgacacagccatggcttcaggagaaaagagacangttgccgcagtttccattgccttcatgcttgctgctgatgcgatggacgcatccgcacctgctgacangtttagagtaatggatgaaacattcaaagcagccgctttttctatcgcttgagcaagcaaca

SEQ ID NO: 14564 - DNA, 411 bp, Oryza sativa
  Clone ID: uC-osflcyp064e07a1
ggaacaaaccccagggccaacgggtacagatttcccaccggaagtctcactgtaaacacaggccaagtctacctcctgttggaacgccaaaattgcatatccagtatccagcctaaagataaaaataaccatgttgcatacatagataaggagacattctccccagtaacagaagaaaagcctagttcatcctccggatgagctcgttgatgtagtcctcacggttgccggcatcaccacccttgacataggggttccttttcttcttgaggccaccgagtggtgccttcaacttgaagggccacaggaagttgttggcctccttgaagtgtggaccgacagtcatgatcttgtggacaagatcctcaatgcagatgatgtcatgcttccccaagccctccttaatgactt

SEQ ID NO: 14565 - DNA, 549 bp, Oryza sativa
  Clone ID: uC-osflcyp064e12b1
ttcggctttgggcattgagaacctgttggtcctcttgatcggtggtatcccaattgccatgcctaccgtgctctcggtcaccatggccattggttcccacaagttgtcccagcagggtgctatcaccaagaggatgactgccatcgaggagatggctggcatggatgttctgtgcagtgacaagaccggaaccctcacccttaacaagttgagcgtcgacaagaacctcgttgaagtgttcactaaaggtgttgacaaggaccatgttttgttgctggctgcaagggcatctaggacagaaaaccaagatgccatcgatgctgccatggttggtatgcttgctgatcccaaggaggcaagagccggtatcagggaagtgcacttcttgcccttcaacccagttgacaagaggactgctctaacatacatcgatgccgatggcaactggcaccgtgccagcaagggtgctcctgagcagatcctgaccctgtgcaactgcaaggaggatgtaaagaggaaggtgcatgctgtgattgacaagtatgctga

SEQ ID NO: 14566 - DNA, 369 bp, Oryza sativa
  Clone ID: uC-osflcyp064f03a1
tttttttttttttttttttttttttttttttttttttttttttttttttttttttttttttttttttttttttttttaaaaaaaacccgcgggattgggggcccacgtacggggggccccccccgttttaaacgacgggacacgctcggtttatgggggggtattattattttcctcgaaacaatttaggggggggatatatataggcctttttccgtttaaaattggaagaatttttagcaacggtaaaattcggtaaaaaggtaaggaatttaaacccatatttttggctagatttattaacatctttttgaaattgggcaattcttgaaaggcttacctagggaaacgggggaaggagtttgcctg

SEQ ID NO: 14567 - DNA, 308 bp, Oryza sativa
  Clone ID: uC-osflcyp064f11a1
gggcccccgatttaaaaaaccccggggaaggggggttttaaattttgggggacaacaaaaaaaaaaatcccccacgggtttaaaaaaccaaaaccaaaaaagggcccataagggtttatttttggggggaaaaatggccaaaaaaaaaacccggttgtttttaaacaaaggaaaaacccaaaagggccccattttttttggggaaaaccttggaaaaaacttttttggggaaaaacccgaaggggaaaaacgggggggggccccaaaggggggtaaatttggggtttgagggggcccaaacccttttt

SEQ ID NO: 14568 - DNA, 466 bp, Oryza sativa
  unsure (1)..(466): unsure at all n locations
  Clone ID: uC-osflcyp064g04b1
gtctcttcatccgtctcgcatccattcccccgcctcccgccatttcaacccgcccccaattccaaaaccctcgcctcctccaacaacgcgcccccaaaccctaaccctaggagagggcgcggcggcggcggcggcggggggcgagatgccgaaggctacggcggcggaggaggaggagttccgggcggaggtggaggagcggctgatcaacgaggagtacaagatctggaagaagaacaccccgttcctgtacgacctcgtcatcacccatgccctggagtggccgtccctcaccgtgcagtggctccccgaccgcgctgagcccgctgggaaggaccactccgtccagaagatggtgctcggcacccacacctncgacaacgagcccaactacctcatgctcgcccaggtacagctcccccttgacgacgccgaggccgacgcgcgccactacgacgacgaccac

SEQ ID NO: 14569 - DNA, 162 bp, Oryza sativa
  Clone ID: uC-osflcyp064g07a1
ttgttttttttttttttttttgttttttttttttttttttttttttaaacacaaaaaaaaaatattctattgatcatttccattagcaaaacaaaatgccttccagaacccaggggcgaaacttacatgtattattgggactttctataccttgctattcca

SEQ ID NO: 14570 - DNA, 506 bp, Oryza sativa
  Clone ID: uC-osflcyp064h08b1
tcgttattccttggttcctctggctcactctactcttgcttctggtgttctgcaaggaacattatgatctctcctagatgtctcttctgttttttggaaggaagaggcgcagtgggatttcatgaagctccaatcttccatgttcttgctccatatgacactactaattttatccatgcacctttccttttctttagtttgttccatagctaccatgtgagacctctcctatctttctttcatgcctctacaactagaattgtgtctagtagtgttatgccttttttagggcaccatcaataattcctagtccttgtttatgtccaagaaacgtatttggagttctactctcttctatatgatggacaagccagacttcagagacctttgagcatgcagacccaaatacggtttgcttatcacagtgcgcttcatggtattcatccctggagctcgtagccaccatcaagtttggataatcttcgtagtctacgggcagcacatat

SEQ ID NO: 14571 - DNA, 422 bp, Oryza sativa
  Clone ID: uC-osflcyp064h11a1
tttttggttttttttttttttttttttttttttttttttttttttttttttttttttttttttttttaacccggccaaaacaaagccttattgggtggggaacaaaggaacaggggggggggaacaaggaacaaaatccgatcaggcgggcccacgggaccaccctgggggggccaaacgcaagggctccggggaaaggaaaaaaccccttacatccatcaccggggatatgcataggggggctaagaggggcgggaagcccccctggcttccctggggggcagggtttaaggactgggcaccgggctttaatacggccgggcacaacttggccgggttggccgggacgtaccggaaccccgggggggggcccaagggctcattcccccgggggccaaggggaaggggtgtaaagggagggg

SEQ ID NO: 14572 - DNA, 425 bp, Oryza sativa
  Clone ID: uC-osflcyp065a07a1
cgcgaaaagcactttgctaaacgttttgctaaaaacaatcgtgagtgacaaacatgggcacctttagaggaaattttacaaccaacgccgccccgaattgaaagcacccaaaatcatgctctataatgaatacgaatctatgaataggttcttatgtaagtattcacaaagtacttgacgttcggctcaatgcacttcaggcgggactagttatgaccacctaaccttaaggaactgttaaatcatgaagctttattcattgggccggagacagaaaagatgatctgtggatagagcaccatattagcagcgctcctaaacagcagcgaccagcatattgcgggccagaccaaacccttgggccttaaagcaaggctgatagccaggcctgtcaagtcttgtgtattggaataggaacgagctta

SEQ ID NO: 14573 - DNA, 506 bp, Oryza sativa
  Clone ID: uC-osflcyp065b03a1
agaaggataaggtcgctaggaagtatgatcaattcgtagtagttacagaaattacagatttttcacaggaggctggcattcagtcgcatgccattgttgtcaacctgccattttcatgagcctcctatgaaacgaaggcgtacacttacagcttgacagactactcgcacacagggaggatcacgagcaaaaaaagaggagggaataaacaaccgttgcaaaattagtaaacagaaactccagagatccgtgtatcaccgtatgtgtttggctcgtttcgtagtcctagttgtcctctctattttcgtctggcggcggcggcgccggttgctcttcgggcaccatttccggcaacacctcctgggactcgctcttcttcttcaagtgattgtagctccctttctccatgaacagctgcccgaagtgtattttgcagtacaacaccccgttgagcgccgcgtaagaagaggtggtcaggatgcagcctccatgagagcacttgaagc

SEQ ID NO: 14574 - DNA, 512 bp, Oryza sativa
  Clone ID: uC-osflcyp065b11a1
cacgacgatcccaaataactaaacatagagaaaagatgcatgcaggtcacgacgatcccaaataactaaacatagagaaaagaaacataagatccctaagcatagattacacatatctccccactgttcaaaatgttacacataagatggcgcgaataagcaatcagtggggagaccaagcaatacatttcttgcatttagcaacctactgcaagaccagactaaattatcaagcccatagagctacaagcttctaaacacacaaatgctaattaaatacacaggcagctaaacccagttccttcagttcatctctcacgaagtcggattataacgaaggcactgctcgtagtagctaataagcagcaagggattatttgctttcaattctttgtcgtccaccatgacttcctgcccatcagacctgagtgctttgaatgtaattgaaacttgctgcacatcgttgttcacagctgctgcaaatcgcactggcttgatgatcttgggatatg

SEQ ID NO: 14575 - DNA, 403 bp, Oryza sativa
  Clone ID: uC-osflcyp065c09a1
aaagaaaaattgcagattacattacattattattattcattaaggacacctcaaaatacatcgcttgtcgggttaatcatattacaaaattttatctgaacaaaacaccttaagtacatagtcatattgtacaaattacaaaagtcgatctgctttcgataactttacgagattgattgattcgttcattcacaaggcaattaacacctaaaattttacaacaacaacattatgagcaatagctgaaactttgaaagcaaaactccagtctggctgtataaccagcagcagcaggcagcaaagcaaactgttcgatcacattttgacagggaaccttttgtacaggtccgggttgtcaagcctgggcttggcgatgacctgcagcgacgtgctcatgaacgtg

SEQ ID NO: 14576 - DNA, 277 bp, Oryza sativa
  Clone ID: uC-osflcyp065c12b1
tcttctcctcctcctatacataggcgtcgccgcgtacgccattgccagcctcgtcccaatcccaccacctgcgccacgcgcgcgcgcgtccttcgggcaccctcgcaccgcaccgtccgttggcgcgcggttggtggggcggtggtggtggtggtgccttggctagtttggccggcgcgcgcggggagggagggagggaaggagaggaggatagaggatgctcgggctcaggtcgcagtcgccgtggtcgggggcgggggcggagccgttttgtggt

SEQ ID NO: 14577 - DNA, 69 bp, Oryza sativa
  Clone ID: uC-osflcyp065d05a1
ggaaaacaccccaatttttaattgccggggggtgtttgtcccaaaaagtctttaataactttgggtttg

SEQ ID NO: 14578 - DNA, 52 bp, Oryza sativa
  Clone ID: uC-osflcyp065e01a1
gcaaaatctgctctcattcatgatatcttagcacaggtcccagacctccagg

SEQ ID NO: 14579 - DNA, 424 bp, Oryza sativa
  Clone ID: uC-osflcyp065e09a1
accaacagatctgcacctgcttttttattccaagctatatactgtagtaaataaacagtcttgtttgtatggtacaaagcacaaacaccacttgtggtgggtacctttaggatagttctacttgctcttttggcatagaagaactaagctacacggccatgatttaatcatcaaagtagttataagtagaaagtctgacgaataaaagttcaaacttcttatttcgagcaaaatatcctcctccacctccattgttgtatggagtatgcatacaatctttaccagattttatcagagcaccgtggttgatagctgcgcataccaatgcttcaatcgctcttattcaaagtaaaaatgtataaactttgtatcatgggatcctaacatgtcccctgcccttgccctattcattccttcataactt

SEQ ID NO: 14580 - DNA, 365 bp, Oryza sativa
  Clone ID: uC-osflcyp065f05a1
aagcaaaatcttcactgttatcatggcgtgcacttgtacaaactacaaacaccctgttctttcaagggcagactacatcagggtatacaatctcctcaaaacaagcatcatatgctactaccggttgcgtcaagttacaggttacagatctctactcgaaacagcgcgaagttcgtagcagaaaggctatggtagcataggcgttcgtggcgcctgcttacgtgaaggtgtcctccctatcaccttctgcgacctcgccctcgtcgatgttgctgaactcgaggaaatgcgttggccgatggtccttgtgatagaagtcccggggcgtgccaagcttcatgttgtacttcatcagcgggtcgtgc

SEQ ID NO: 14581 - DNA, 428 bp, Oryza sativa
  Clone ID: uC-osflcyp065g09a1
aggttggaaatgcaactatcaaactggaacttttgagataaagcaattatcaaacacaagacattattttgtctcacagacctctgctttgctcatcaaagaaccccttttgttcacttgaagcatactagcctttttctggacatgacacccttgcagaagaaagaacatccgcgccgggttttctttttattcctgtccctctgctttggtggaggcttgattactaccttgatggcagcatcaaacacagcttttacattctgctgtgtctttgagctgcattcgatgtaacacgttgcgccaatgtgcttgcggagttcctctccctgtgctgtagtcacaggcaccaagctaggatggtcaagcaagtagtgtttattttacgaagaaccaatttggttccaaacaaaaaaattggcacccct

SEQ ID NO: 14582 - DNA, 466 bp, Oryza sativa
  Clone ID: uC-osflcyp065g12b1
ttaagcatattgtggcaagcatggcattgagcaaagaaaggctgacttactacaattacatggacctggggaggtcaagaacatgaaacagatgagggttgacttggaagtattacgccttatttgtgagagagttgtgaaaagagaaaagttgaagaaagacttggttgtatgtggacatgatacacttgctgcaagaaggaattctattgcctattcaacccggacttcatattgtggatctggacctggagcaagttcagaatctgcaacaacttctgtcaataactcatatagtgggttaatgcaaagaacagatgatgtcgcggttgacagtattattttcaggaaacctactgttaggttttctctcaataacagcgatgctgataggaacacagctgacagttcaacatcgtcaatatcgtacaagcagaagctggatgacccggaatcacttgctgat

SEQ ID NO: 14583 - DNA, 566 bp, Oryza sativa
  Clone ID: uC-osflcyp065h05a1
tgttgcggccgcgcccgggaggcgcggcggcgcggcggggagggtctcgttccgcggggtccctgctcccatggtggcgatcagggcggaggcggctgccgtcggggaggacgagcgcgtcatcctccggcaccttcgccaagctcaaggagcagggtgaagaccgcattcattccattcatcactgctggtgaccctgacttgggcgacttacagcgaaagccgttgaagaattcttgatgcttgtgggttcgggatctgattcgaattggtgcgtgcctttacttctgacccatttggcctgatgggccccgttcattcaaggcttctggctacaacgtgcacttatcaaaaggtcaccacattttgaggatgtttatcttctatggtaaaggaggtgattacctgggctgtcctgccctgtagcgcttttttcacatattataacccgattctgaagcgtggcattgcaaacttcatgactgttgtaaaagaagccggggtccatggtctttgggtacctggtgttcctctggagagaccaattttttggggggtgaagctgc

SEQ ID NO: 14584 - DNA, 489 bp, Oryza sativa
  Clone ID: uC-osflcyp065h08b1
ttcttcgattcgattcgattcgatcttctccacctcgtcgccgtcgaacgcaactcggatcgggaggataatggaccagccttctaatggcttcgccgccggaggtctttttcttcgtcacattgatgggcaaaatgcctctcccccttctgtcattgtgattggtggagggatttcaggcattgcagctgctcgtgcgctgtctaatgcttcgtttaaggtcacactattagagtcacgggaccgacttggtggccgtgtgcatactgactattcttttggctgcccaattgacatgggagcatcttggttgcatggtgtatgcaatgagaattcattggcaccactgattaggttgcttggccttagattatatcgcaccagtggtgataactctgtgctatatgaccatgatctggagagctatgctctctttgataaggatggtcgtcaagttccccaggagatagtgacaaaaagtcgggaaac

SEQ ID NO: 14585 - DNA, 481 bp, Oryza sativa
  Clone ID: uC-osflcyp066a01a1
gcgatagtaatttggccacattagagtagctgctggtagcaaaaaggttgacataatagttatctttcacagtaccacatcgattgaaaggagaatacttggaggcgcgacagtttcctacaatcaaaccagaccaaaacattatactgataaaacagcctactcgtcctcctggctacggagccttgcaagcttgttggtgaccacgatgtcgagctgcgcagcacgctcaacgatctccttgcgcttcttcgtagagacgttgtgggcaatctcggcacagtaggtcctgttgtgcatcatgagcaactccagctcagagacattgtgcaccacaaacttcttgaacttgttggggaggtagtgcctggtcttcttgtctgagccgtaaccaatgttgggcatcaaggtgcatcccttgaactttctcctgacacgggagtcaatacccttgggcctgcgccagcttggcttgaggcat

SEQ ID NO: 14586 - DNA, 401 bp, Oryza sativa
  Clone ID: uC-osflcyp066a07a1
gaataaaatgctttcaatttccaatagttgagaggacagaggaaaagcaaacaacttcttcaatggaaaacccaaacaaaaagctgggaaaaagaacgggaaaaaaagggactttttttttccaaagggcaccacatcaaggggggaaccaaaaaataccccttttcttaggaatgacacaaagatgcttgggccaaaaaaagggcctttcctaactttttggcaaaaacgggcttcttgttgggcgaaacttggcccaagagaccgtgcttgcaacaatgcgcccctacggggcgggaggacaaggactgcacggcccccaccggtgcgccagcgggggtgggagaggactacggttggccgggcgagctgctgcgggggagccggcccttgaaggaacc

SEQ ID NO: 14587 - DNA, 408 bp, Oryza sativa
  Clone ID: uC-osflcyp066b02a1
atatcaatatccaaacggcagcttttcacataaataaaataaccgatagctcaagggtgagaatcaaaaaccgaaagaaattggttttttgagcagagtgcaaaacataaacaaaaatgcctgttgcaaattgcaagactacaggtaaacttaaatgccataaggagtttgtttggcagcataagatgaaactactgggataaggctactttttcactcgtcatccttttcctcgtcatcatcatcagcaccagctgaggagttgagagcattcaatttttcgacgagactggccttcctttgctcgtaggttagcttcttgagggtgtatcttttgtgggtagccggttccttcttggtcgatttggccatggtaggaacaccgcggatggcaagatggaccttttt

SEQ ID NO: 14588 - DNA, 477 bp, Oryza sativa
  unsure (1)..(477): unsure at all n locations
  Clone ID: uC-osflcyp066c03a1
cacaacagctcatatcatcatctgttacagtcagttgcaactatcatcaacacactcgctctattcaggaaaattggcaacacagcaaagaaaaaacccgagtcaacagacctccaacgctccaatgaaataacaaacttacttcactgttccttgatctatacctcatcatccccccccccccttcaccgaaaatggccaaggcaaacaaatctacatcgtctgcaagctgggcgccgaggctttttcggcgagcacttactcaagtaaacaggtggccctgttcggtggtctctagctctcttccaagctgcatgtgcacaaatttcctgtgcttctgcttgttgatcctggcgcttaaccttctcacctgtgattgaacccagaaaatctttgcagagaaccattgccaccaatnatatgtgaatnaatncttntttnttggcctaaatgcattctttcaggccaaacagaatt

SEQ ID NO: 14589 - DNA, 422 bp, Oryza sativa
  unsure (1)..(422): unsure at all n locations
  Clone ID: uC-osflcyp066c11a1
ctgacgaattcttttattttttgtgatgcaagtacaacaaaacccactctcacaccacaaagtcacaagagtccatgtaaaccgagagacccccttccaccgaccttacaaacttgcggtttatctaccgtgctagattcacctagcaggctagcccgatcagtactcgccctgttcctcgtcgtcgtcctcgacttcggcgccgacctcctcgtagtccttctccagcgcggcgaggtcctccctggcctcggagaactccccttcctccatcccttcgcccacgtaccagtgcacgaacgcgcgcttggcgtacatgaggtcgaacttgcggtcgatccgcgagaacacctccgccaccgccgtgttgttgctgatcatgcacaccgncctcctcaccttcgccaggtcccctcccggca

SEQ ID NO: 14590 - DNA, 355 bp, Oryza sativa
  Clone ID: uC-osflcyp066d07a1
aataaaacaacaacaggaggggaaaagaagaacgcggggggaaaggaaaaaagggcggagggcagggaaaaaaaaggaaggggggggcagggcaacaaagggggggaaacagcaggagcagtcgaacaagaaagggcagataacaaaaaaggggggaaggaacaagaccaggggggctaggggggcggggaaatactaaggcatgtgggaggaggcccggttacgggggggggagcggggcacacagggccccaggacacaaaagacggcaattcaaacaaacaagagtcagcaagcaagaaagcgccctcaaaaaacggggatatgccccaccgttccaagaacttaaaggccc

SEQ ID NO: 14591 - DNA, 362 bp, Oryza sativa
  Clone ID: uC-osflcyp066e03a1
cccccaaaaccccttccttttaaaaaaaaaaaaaaaaaacgggtcccccccccaaaggggggggacccccggggccaaaaaaaaaaaaaaccccctggtacaaaaaaaaggggggggggggaaaaaccaagggcctttccccaaaaaatttgggggcgggggggcccccccgggggaaaaaccaaaattgacgggggggccaaaaagatttcccttttaggggttttccccggggttgttcgggcccaaaccgggaaaaaaaagggtttcccctccccctcccaaaaaaacccccccgggggggggccccccccccttggggttttggcccaaaattggggtaaggggggggggcccccccc

SEQ ID NO: 14592 - DNA, 485 bp, Oryza sativa
  Clone ID: uC-osflcyp066e11a1
acacgtgcatattttcataaattgatctgagtaggccaaccagtattgtgcattgtaattagttcccaaaaataacagcactaactattttcatcaaaaatagaaatttacagggatagttataaaccactgcaataccaaacaaagcattgcagattgccttaaaaaaatgaagcattacaaaagacagttctaccttgctaaaccatcatgagaaactgagaatatgtgtgttcatcttcatcacagtgcagaattcactgagtaatcagtgtcagcaagtgggattcgattgagtatgaactaactacaatgtacaacattttagacgccttgcctgatttgtggtaatgtaaaactgcacctgctgcccaaaaagtacagggcaaaccaaagtacaaaacagcctacacttcttcagcccatttctccttcggtatctcaccagagtcggtgattacaactttcttcctaggcttgccatt

SEQ ID NO: 14593 - DNA, 409 bp, Oryza sativa
  Clone ID: uC-osflcyp066f07a1
gatagaggagatcaaactgtgtttatagactgaactgaaacttgattatacagtttgccacgactcctaactcaagcccctatgacgtggatacatatgtacaaaagttttgacacctgagaaaatgatctagtttccctacatggatagctagctagtagctatctcatgtcatggagtgttgccaagaaggcgtccaacttgacattgtcacctcgagacaagaacttgatgcagatgggcgccctggcacccatgagtgtcagcatggacagcaagatcgagccgacgccgtcgccgcaaatgagccccgacgccagcgccggcgagagcatccgcccggggccggcgtccatcttctcccacaggtacgccaccaggctggcgatgcacatgccgacgggcacgc

SEQ ID NO: 14594 - DNA, 490 bp, Oryza sativa
  Clone ID: uC-osflcyp066g03a1
agaaatcagaacggtgacctgttaggtctcaagaagagttacaaggaagactgcacttgggcacatataataactcggctatcaaaacaaagcacaaatcattcttgtctgacgaacacacgcgaacatgttaaaaacactctcgaaactgttggttgaatggcgtggaccctccatcctcagcgctcgaggcacaggctcagctagtccgagctgcttaaaccctgcagctggtcaggatacacgcacgccatggtcggcaagcaacttaaccccaactataacaaagggtaaaggcctcagtagccggtgtgctgctgccacccctggtgagacggctgtgattgggcattctggaaaccgttcaggcctccctcggccgggttctggtggtgctcttggctttgagaatggtagaaagctggatacccatggccaccgaattgcgagtgctgctgcggttgctgcgcctgacgaaagccaccctgct

SEQ ID NO: 14595 - DNA, 483 bp, Oryza sativa
  Clone ID: uC-osflcyp066g11a1
aatcatatgggttttatttattgagcactccaatgtggggatcgatgagctgctttcagctatggaatgaattgcgtagctctccagctgtcaaagcagatgccatgttggatatgtaggtggttcttagttatctgtcttcgtcttggcctgcctgatcttcctgtccagattgtcgcacgaattgcccgcggatccgagggcgctgctcagccaacctctttctgctctgatagcgcaccttttttccaaagttcctcactttccgtttctgtctgaatttgttcaatgcagcttctcggtaacagaccccattctgatacaagtcattaccactaccactcccacttccattgccacctccagccccattttcatccacgataccattaacagtctccatgtttggcctcccaacattgggagcagtactaggtcctctttgcccattgtttccattatggccacctgaaaagctcccga

SEQ ID NO: 14596 - DNA, 137 bp, Oryza sativa
  Clone ID: uC-osflcyp066h07a1
acgtctgtccaggaaaaaatagttcatgttgaggcagaaaaaaattttcttaggtcttctcgttatgtacccaaatgagctaaggtagaatacaacttattcttttcgctgttcaccaatggaaaagaaagggaaaa

SEQ ID NO: 14597 - DNA, 393 bp, Oryza sativa
  Clone ID: uC-osflcyp067c09a1
gggccaaaaatttttttttttaggggggggggggggggtcccccaaaaattacaaattttttttcaaaaaaaatttggggaagggttttatcaagttcatataatggttttaaaaaattgggaaggggaaaaaatttttttcccaaggctttaaactaaggaaaaaaggggtttttttttttaaaaaaaggggggctccaaaaaaagaaatccccgggtcttttaagggaaaaaagggaaaaatggggggggggaaaaaaaacactttttggggggcaaaaaggggtgttttttttttttacctttgaaaaccattgggaaaacttggtggcccctctaaatttaagggcccccgggggggctttttttgttaaaaaaattttttgggggggg

SEQ ID NO: 14598 - DNA, 529 bp, Oryza sativa
  Clone ID: uC-osflcyp067d05a1
gaagttgtcaacagggaggcttctctttctggttcaagaaagacacctctttttctcatagaccacaccaattccgtgatgatatactctccaatttgcagcatttgacacaagttacatacacacatacatgtatagctcgtgatagaggcactgctccccacagtttcttctctacacgttgcaatggcaaaaacaaacaaaaaagaattaacctatatatatgtatataccgctatacataaagaacgaatcgagtgggtgttgaatccggttgaccctctaagaccatgcacacggatatgcatatattcctctttcaaaataaacggaaaattgccacatcattcggtttattatcggcttgagatttcttttctttgctcatctatgtgaagaacttggtggcatgatagacttgctgctgcaggctcaacctctaacaaccagcagccctgcgaaaattgcgtatggacttgatgccggcaaccttaagaatgttgctgggcttgctcaaagttggctggga

SEQ ID NO: 14599 - DNA, 156 bp, Oryza sativa
  Clone ID: uC-osflcyp067e01a1
cacaaaaaaacgttgggataagtaacgggaatttttgaaaattaagttaaatttttaaaaaaatcccaacagagcttttgggggacattttatgggtccccatttttacggggtttaaggaaatcctttcgaaaaaaatcccttttccaaattttt

SEQ ID NO: 14600 - DNA, 487 bp, Oryza sativa
  Clone ID: uC-osflcyp067f05a1
cagcccatcatattatattcatttatattagtatcaaataacaagtgtgctaagcccatataggcccaacaatcaaacacaataacaacccatatagcacaacccgacaaacatccaatacaacacaaatcttacaaccaaactaggttcagtcgggtgagcaaaacataacagtaccaccatatcctagatagcaaaacaaagttctacatcactgaccatatctacaaagtccaatcatatcttgcccttcttgtgcaggattatcaatgaacttccatctcagcaataacattctttacaggctcattaaaactcgtattgctgttgcaatggcacatcttgaaaagatcaaatgcagtgggtggagcatccttatacttagtttgcttcttttcttttttagcatcagcagatacagtttctttcatctggctagctgtttctgtggccatggaagaagtgtgaggcagaatgagcttatcag

SEQ ID NO: 14601 - DNA, 461 bp, Oryza sativa
  Clone ID: uC-osflcyp067g01a1
aagagcaagaaaaaaaatcagtagattaatttgttatatttattatgagctcaatatatatactgtttaagtatgtacaatgcagtgtgttgctactgaactttatcagggtagtaaagtagatctttgtggactgatgaactgaacctatctctgcctatttggagtgtttcataaagggaacactccaaactctgaaatatcttcctccactgcagggtagtcactgaagttaactggactacttcagatcctttaaccgatggttaatcttggtcagaacgacagatttcttgttcaaactgaggttagattatatccacagcttcttggagcacaacaataacacataacctagaggttcctcaactaagatctcagttaagttgtggatgctcccttgctagtttatactcagctggtaaaaaagaattgaagacactagcctttaatgttaagag

SEQ ID NO: 14602 - DNA, 529 bp, Oryza sativa
  unsure (1)..(529): unsure at all n locations
  Clone ID: uC-osflcyp067h05a1
ggatccctggagcttcaccagtccatcctgcttcttcaccttgaagctctctgtctcagcaatctgctctagctttgacactattgctgatgctggtttttgtgtcatgaaccgtgagtctgccttctgctctttgtcgttctcaaacaggcctgacagatcaaatcctttggagagggagatgatgtcaaatgcattcaagctcactggcttcaaagagcttgctggttcttttgccttgccttcattgtccttgtgatcagcactgaaagcagtatggacatccttgaggttgtttgattcatttggctgtgatagcatcactgctggtttgtaccccttcttgaaccatggatgctcaactagcttctcaacggtgatcctaatgtttggatttggatcaagcagcctggacagaagccttcggacatcagtagtgaaccactgtgggaacttgacatcacctttgcttatctttccgtacatctccattagaatngagtcatggaatgggaggtagccagcaagc

SEQ ID NO: 14603 - DNA, 518 bp, Oryza sativa
  Clone ID: uC-osflcyp068b05b1
tagataaagacttcaagcagctgatatatgaagatgttcagttagttatgcccatctctgagattggccgctggtccttttatacgctgtggcattatgttgcacagtacaagtgtgacccaaccgtagatttgagcctcaggtgcttcataggtgatgaagcacatggtatttcaggaatacagcaccttgttcctggatttggtcggaaaactgcagtgaaacttctaaagaaacatggttcattggaaaatgtgcttaatacagctgcagttagaactgctggcaaggactatgcccaggatgctctagttaagcatgcagattacctgcggaaaaattatgaagttctcagcttgaagagggatgtaaaagttcagcttgatgacagatggttatccacaagggactcttgcaacgacagcagtgttttgtctgacttcatccttaaattaacgaagggcagaatatcagaggaaattagtgtattcttggatccatcaaataactccttgcta

SEQ ID NO: 14604 - DNA, 528 bp, Oryza sativa
  Clone ID: uC-osflcyp068c09b1
tttcctgtcaaagcaagtgatctctttagctgggatgatctctgtatttgcatttgcagctgctcgtcacggcaatggcatccaccaacagctggccccacgagatcgagtcgccggtggccgcgccgcgcctgttcctcgcctccgtcatggactggcacacccttgcccccaagatcgcctgccacatcgtcggcagcgcccaccccgtcgacggcgacggcagcatcggctgcgtcaggcagttcaacttcacctcagccatgccattcagccacatgaaggagaggctggagttcctggacgtggacaagtgcgagtgcaagtcgacgctggtggagggcggcggcatcggcaaggcgatcgacacggcgacgtcgcacatcaaggtggagccggcggcgaacggctggagcgtcgtgaaggtggagttcacgtacaagctactcccccgagtggaggtgaaagacgagatcaccaaggcttatgaggtcctcaccggcatctttaagaccgccgaggcctacc

SEQ ID NO: 14605 - DNA, 573 bp, Oryza sativa
  Clone ID: uC-osflcyp068d05b1
ccgccggcacgggcccggactgcctggctggacccacgcgtccttcttactgaacgaagcttacctagctactcgatcgatcatccatcagtctagatagatatggcggctttgaacttcaaggcggtggccgccgcgatggtgatggcgatggtggcggcggcgccgggggcgtcggcggcgataacgtgcgggcaggtggggtcggcgatcgcgccgtgcatctcttacgtgacggggaggggtggcctcacccagggatgctgcaacggcgtcaaggggctgaacaacgccgcccgcaccaccgctgaccgccaggccgtctgccggtgcctcaagaccctcgccggcaccatcaagtctctcaacctcggcgccgccgccggcatccccggcaagtgcggcgtcaacgtcggcttccccatcagcctctccactgactgcagcaaggtcagctagatcgattaatcctgcgtagaccgaccgatcgatatatcgatcgatgctggctcgcagttgatcaactagccaatataatagctacagtaaaaataacagctgaggcatatcatt

SEQ ID NO: 14606 - DNA, 209 bp, Oryza sativa
  Clone ID: uC-osflcyp070a05a1
agcggtgctataatcgtaagcaccaactgtttacttgatcaatgtcagtatttgccattctttacaatgaactatacaagtatatgcaaaaacatttcgcctaaattgatgtgcttcctacaaattcgccttttccatttcacccaaggggatgaacatacaacgcaattaagcgacaaacaactctgcctgaccgtcgatgaacaggc

SEQ ID NO: 14607 - DNA, 533 bp, Oryza sativa
  Clone ID: uC-osflcyp070b09a1
ttgttttaagtttggaaacctcaatctagcaaacgaatggaatcttaaccagcaaagtagatcctcattggagagtacattgtacacataaaaagagtataaagcagagcctaatctatttggtaaaaaaatcatacaaatggtaggaacctgagagcaaaattaacacatggctcatcctttggtgctctttttcagaacgtatagttaaggattgggccaaaatgctgtctattctgaacatatacagttcttggtacagactagcagaattttcatctcatctagatgagtttcttcttccgaaagaaccgtttgaggtgccacaattgcgcaattgaggcgataacgcagaccgaaagggacattaagcttaaccatgtgaacttaaaatttgtccaatcacttacatctctcatgtctgattctttggatcttgaggtacatccaagtttccatggactgcttgaacagctgtctctagcttgggtaatttcagtgcaactcccctcgagtctatctatcttggcaag

SEQ ID NO: 14608 - DNA, 474 bp, Oryza sativa
  Clone ID: uC-osflcyp070d01a1
aaagagctaaagatttattattactgcaaaaattggagcaatagaatagattatacaaaaagcagatgctggggtctaattatccacaggcaatgaatccatatatttttttatgaataactatatgcttcaacttcaagcatcctatcctaatgccaaccattccatcctgcattacgcaggattttagcttaccaacatgggcagttgggcacgcattccccatttccgcaccttcatgcttaggctccctaaggaacaccctttgagagcatgaagagtttaaacacaaagatgggtggacacccttcagttgattgcaacgcttttattattccccttttccatgtggaaggctctggttaaaacctgagctcccaggccggccaaaagtgaagggcctgtttcaaagtaagcacacgagggttgccattcaaaaggacggtccgcacccttacaaattcaccattttcc

SEQ ID NO: 14609 - DNA, 145 bp, Oryza sativa
  Clone ID: uC-osflcyp070f12a1
attatattatttttttattttattattttttttttttatttttggggataaaattcaaaagggcataaaaacgggagaacaaaaaaaaaggaacaaccggggaaaccacaaatggtttaaaaaactcgtagcagtgttttaaaac

SEQ ID NO: 14610 - DNA, 450 bp, Oryza sativa
  Clone ID: uC-osflcyp070h05a1
aggtaagcaacagatgcaaatgctgaggcagggagcaacttttacatgacgggggttcttttctctgtttttacttgcgaagtaaaaaagggcctatgggggaagatcaaaatggaatgtagctaacaacagcaacgggttgttgtcagaggtgaaagattctagacacattaagccaccactaacaacccacaagttatgaggggagtcgatcacgctacctacacggcgcaagcacatacgaccaagcatacaaaaatacgcaaaatgaaaaattcatcaacctgggtaatatttttggaatgcaaccaaatatgaacggttatggtgcctgtctttgcttccgttgccatcatcggacgcggtcccagatcgatgctttcctggtcactcataaacattgggtgaagcttgaagtcccgatggccaatgagggctgaagccatcccc

SEQ ID NO: 14611 - DNA, 502 bp, Oryza sativa
  Clone ID: uC-osflcyp071a09a1
attcatcagcaccttagcattatgtcacaagaaatttggaaaagcaacattaaagtgctgggacaatagcctttctccaatctccacgtcctaccatatcactaatagtagtacaacaactggccaataaaggtgctatgttggccgacatagacatcacttaacatttcattttgtgacacgaagtactctttaccatagaaaactaggtccagagtttaatcttgaacagaatagttgccgcatcagctagatgggaggtttctgccggcaggaaccacaggtgaactatttgtattaagtggctgtctcttgcaagcaagcctgacggtggaatcgatcacagaaggctcagccattgcaccattaccataatcaccacaggccagccttttggtaatgggagggaccaaagatatacctagcaggttgattgtctcaagatgacgactggtgaacgggttgttccacatgaaggtgctcatagctggggcaacaaaga

SEQ ID NO: 14612 - DNA, 460 bp, Oryza sativa
  Clone ID: uC-osflcyp071b05a1
tttttgtgtaataatgccatctttcatatatatttttatttatagttcattcgttttaactgggacatcatcattttccattattgcacatgacagtacacattaattagtacatacaaaagacatgaattgtttatatatccatgctaccacatatataggagaatctatatatgcacatatataatcagaggcgcatgaacacactaattacttgggggctggaagccggtggagcaagaagaaggcgcgctgactgcatctgcatattaacgcaaaaactatggaggaaagaagggagaggggaaaaatgttcaaagatgataaacaagtaagcctgcaacgtgatcattgctgcacggaaagagcaccgctgcacctcgaacgaacggcaaacatgaatgagaacattcgagcttgctaaacagctttatgggtgcgggctgcaatgcaaccacca

SEQ ID NO: 14613 - DNA, 542 bp, Oryza sativa
  Clone ID: uC-osflcyp071b06b1
tgtacgcgtgggcaaggtcaatcacgagagcaaaagttgtggttagtgtccctgcaggaaagacgagggacaggagaaatgacttgctactcatacgagatggaggggaatcattcagaataattgacaagaccaaaagggacgatgcgaccactgtgatccaaagagaggagtgggcaaagtcgaggcaagatgtggagaagcactttaggaagctccgcgactttgactactcgaattggctctgaagaaatagtagctggagtcattcagcagagaaattattttgctaattttgcagctgcttatattagaggaagcgaccatggaccatggcgctcaagggagaatcgccatcttcgagtaggctaattatgtgtactttaagtttttgtagcaggtagaaagcatgccacgtagcgagcctattctgacaaaactgaaaggcttgatgcttgtgaatgcactaccttgatgggtagcgaacgaaaatgtggtccttggattcaaatgcccgtgtttttatagtatcgatatctaga

SEQ ID NO: 14614 - DNA, 505 bp, Oryza sativa
  Clone ID: uC-osflcyp071c01a1
gacacattaaccgtcaaaaggaaccctacttataaaatttaatagaacttgtacaagatgacatggtcgccacaaagatgcacaattccgagaagaaacaacaacaatctttgcagacagccagagacaatctcatgggccatagtaaatgggagcaacaacggtttagttatacaccatgtattttggagtcgcgctgaacttctgataccctttgatgaccttgtttacagcatcaaggaagtccttctcagtcactgttttccgtcgggcgcgaatcgcatacatgccagcttctgtgcagacactccttatatcagctccagttgagttggggcagaggcgagccagcagctcgaaacggatatcgcgctcacagttcatggtgcgtgtatgtatcttgaatatttgggtacggccctccaggtcaggtaagccaaattctaccttcctgtccaaacgaccaggacgtagaagtgcaggatctaaggtatcaggcctgttt

SEQ ID NO: 14615 - DNA, 188 bp, Oryza sativa
  Clone ID: uC-osflcyp071c09a1
tttttttttttttttttttttttttttttttttttttttattttttttatttattattttttttaataaaaaaaaaaaaaaaaaaaaaaaaaaaaaaaaaaaaaaaaaaaaaaagaaaaaaaaaaaagaaaaaaaaaaaaataaagaaaaaaaaaaaaaaaaaaaaaaaaaaaaaaggaggggaagac

SEQ ID NO: 14616 - DNA, 433 bp, Oryza sativa
  Clone ID: uC-osflcyp071c10b1
tgctagatcgcgagcgacagaggatggccgcagccatgtctatggctgcctagggtttcgcggcggcgacggcgaggtggatttgggggtgggtggggaggacttctcactcatgtcgggaacctttgaaccattgtcccactcatacacagctgcactgttccccatgtgagaaacgaccgtgactaggactagaccttacacctgtgcttgttgtacgatataccagaggacttttttaaccatggcctggaattcacttccacgaggagtctaactcaggacctgaggagtgctactgaaaccacccaaccaactaacttagaggccctttcgcttgcattgagatacttaactgataactcacatacttattcattcctgccacaacttggattaacatacattcctgcataaatcttttcaggaactc

SEQ ID NO: 14617 - DNA, 452 bp, Oryza sativa
  unsure (1)..(452): unsure at all n locations
  Clone ID: uC-osflcyp071d05a1
aaaagaaacaattcattccatgacattcattagacgttctggcttacatcaacttctgtagaatacaaccaccatctcatactaaataaagagagatgtgaaggaaggacagggaaaaaaacaaccagagacccatcatgataaccctaaacaaagagcaacagcaattcagaactcttaatctttcacctaaagttagttttgaccggagactatcaccaaccaaaagcacactggactgctaaaatcagaataaaatcactctcaattgccagagaagaaacccttcttcctcgatgggctccgataaattagtatcgctataagagaaagaacagcaccaccaccatgagcccttaccatgtggntgggcgccggatgagaaacacccctcctggttctttcacaaggcaccgacaaaaaaaacgccaggagtactaacaacgcctact

SEQ ID NO: 14618 - DNA, 205 bp, Oryza sativa
  Clone ID: uC-osflcyp071e09a1
cggccgcccttctcttttctggggttctttgctaaagaacgatatttattatgaacaattcctgtgagcacggctagcatcacattgacactgatgaatatcgccgtatactcttcgctggacagctgagaaaaatcgtgtcgccctccatcgtttttcattctctccttcacctatccactcatatcctaaccgtaccagcctc

SEQ ID NO: 14619 - DNA, 436 bp, Oryza sativa
  Clone ID: uC-osflcyp071g01a1
ctgatcacatcaaagaatctttattgttatagcttattggagtatctgtccggctgtcggctcataaatcctagtattctagatcaagaaaaccatatcagcatccttactagttgttacccatgggacatcgcatacaagaaacaaatcaagctgacagcaagaggcgcacatgctgacgccacactagaacttccagtagaggggaggactggctggagaatggtaggcgcagctgatgatggtttgctgtcgaattcgcggcattgctgggttagacgctctcgttctgcacctggaaccatgcaagccccggttgaccgcagcgtcttgattcagggatgggtacaattggccccaagaatatgcgccacaggtcgaggattatttgtacaagcatagctgcacccaaggcgtcgacggccactctggaaag

SEQ ID NO: 14620 - DNA, 523 bp, Oryza sativa
  Clone ID: uC-osflcyp071g09a1
aagaaaatagttaatatgtatatcccatcgcaacgggaccccgttttgtagcagccctcgtgattattcatgattccagggaatacataatatactggatataaccttagccagcggcccgtttaggcccgcgatatacaggcccattggcccggcccagatacattgcgtgggggacaattccggcatcgacgggatagattcgccggtccagccgccgccgccggcacaacccgcagccgccgccagcgagcgagcgagcgagagagacagagagagagagatggcgctgaccaacttcgtgctgacggtggcggcggtgggcgcggcggcgctcctcttcaccaccgacatccgcaagtccggcgcgatgttccgccgcaacgcccgccagattcgtgcctggctcgaggaggaatccgcctccgccgcgtccaggtaaatccacggctcttgctctcagctttcgataggcgccgctgatgcgggggagtagacgatctcgatggataatattaatact

SEQ ID NO: 14621 - DNA, 199 bp, Oryza sativa
  Clone ID: uC-osflcyp071h06b1
catacgtgatgtaatcatgataaaattgaatgtgtcaatgatggtcgattcgtatgccattatatgcgaattgactgttgtttctattgttatgatcaacttatcctgttattactgatggcaatgcccctgtggacgcgtggccaagcgtgctgctgagaggacatatggggtctgatattatatgttgaaagaaact

SEQ ID NO: 14622 - DNA, 442 bp, Oryza sativa
  Clone ID: uC-osflcyp073a01a1
tttttggttttttttttttttttttttaatctaacatacgcaaactgatattatcacaatgttagccgatgacaatggaaagagtaatctaggtacaagcggatcattgacggtggagacaagacattggctgtaccacaacacccaccaggggggccaacaaggagcgctatccgttataggacgagagaaaaagtaaaacatcacgatgtgaagtgaaactgaataattctagtagacgatgatgatgatggataggctccttaggacgcccgccgcccttagcgtcttgctgctcccatcttgtccactggaaggctcactcgtcatcgccttcattctcttcgctgccctcgtcgtcatccttatcattgacctcggacttggacttgtcagaatcctccttgggggcctccttttcctccttggcgggtgccttttt

SEQ ID NO: 14623 - DNA, 428 bp, Oryza sativa
  Clone ID: uC-osflcyp073c08b1
gagggagaggagcgctgccgattttccggagggggagatctttttcttctccctgaaggttcgagatcgatctgcgacgaggaggagcggggaatcgtaactttatttccgaggaaatttcaacaaattgatgcactaatggagtccaagggtggcaaaaagaagtctagcagtagtcgttcctccctgatgtacgaagctcccctcggctacagcattgaggacctacgacctgccggctggcatcaagaagttccgcttctgctgcttacttccaactgcgcgaggaagccctcttgatagcccccttggcttaccttgatctaggagtttagttactcctctgaattcttgttctgggctatcttacaactttcttggtagctgcttcccagtgacctggaagggtatcagtcctgcttccttct

SEQ ID NO: 14624 - DNA, 133 bp, Oryza sativa
  Clone ID: uC-osflcyp073e03a1
ttattttgggatactaccaggaccaggcaggatggatgaattatcggtgcccagcatcaccatatggcatccttcaataattgaaaagagacagtacttacacgaacgcgcgttacacaaaccaactctgaac

SEQ ID NO: 14625 - DNA, 311 bp, Oryza sativa
  Clone ID: uC-osflcyp073f04b1
cgttgtgaccaccaccccggccgccgcggcggggacgacggcggcggcggccgaggtgaagccggcgaagcgctccgtcggccttggcctccccgcgcttccgccattattgcccggtctcgcctcccacggccagccccgtgtcgcgttcttttgcaagaggctggcgaggaaccgggtggccatggcggcgggggaggctccggcggggcccgttcgccgccaacgccggagattacccgattcatcaacgcccttcaaacaagagtgggtcaggattggggccacgttctcggtgaccacccctggcg

SEQ ID NO: 14626 - DNA, 371 bp, Oryza sativa
  Clone ID: uC-osflcyp073g08b1
gagagaccgtgaccgtggtcatgatcgccatcgtgagagaggcagggaccgtgagagagattacgagcgtgcaagtcatgaacgggaccgtggtcacatgcatgagagagatgctgaatttgccaacggtgagccaaaacatgatcaggaatatggctataactatgagcaacacaaaagccatgatgcttatgagacggagcgctcaaagcgacatgagcatgagtactatcagatgcaacctaacaacacagaacctgaaggccctgaagagggcgaggcatatgatgaaggtgactaccagtatcaccaagctgctgatgagcacaataactgaaatttgattgctgcactgcttgaacggttgttct

SEQ ID NO: 14627 - DNA, 235 bp, Oryza sativa
  Clone ID: uC-osflcyp073h07a1
ggcaggcagaacacaattatatcaatatccaaacggcagcttttcacataaataagataaccgatagctcaaggttgagaatcaaaaaccgaaagaaataggttctttgagcagagggcagaacataaacaaaaatgcctgttgcaaattgcaagactacaggtaaacttaaatgccataaggagtttgtttggcagcataagatgaaactactgggataagggtactctcttac

SEQ ID NO: 14628 - DNA, 319 bp, Oryza sativa
  Clone ID: uC-osflcyp074a03a1
cctcttaagacttactctttttttgtttcatcaatgagcattaaaccactaccttgagcaatcatacggttttgtcaccaccagaacacaaggtttattcatcaaagacccacgcacaaaaacggaagctttaggacgccgggtccatgaaaaaacaagcaacaggatgaacataccatcagcttatctgacaggaaggtgttgacaaccacacccctagcatcaccccgaggccgaaacagaaaccgcgtacacaacatcaaagttctgcgcacaccgggagcggatacacaggatggccggttacttatggaaaaac

SEQ ID NO: 14629 - DNA, 432 bp, Oryza sativa
  Clone ID: uC-osflcyp074a11a1
gaatcaaacagaagtatctgcagctggattcagagggtgaactttgaagtacgtgaccaatttcacccaagagttttgacactcagattccgggacatgttttcccatcaatatgcccgcaaatgaccaaaaagaaaccgagacagattgactggtaacagaaaccctcatgtagtctagaacaggctagaggcaaccaaagttaagccgattacaagttttgttcaatgagctgctgatatcaaaagctagcatcctaaaccaaaccagaaaaagcaggcgaccttcaaggcttgaggaccagggacaggccaaccttggagcttttggcgatggccttggtattaacctcagtggagatggtgacgagcgacttgggcctgaactcgtgctggatgagcgcacttgccatgccaaaagttgtgaagcgcg

SEQ ID NO: 14630 - DNA, 483 bp, Oryza sativa
  Clone ID: uC-osflcyp074b04b1
tcggcttgagagaaggagagaaatcttccccatctgggggtcttctgatatccttgcgcgcgagacgagccgcggctgaacaggggaggggcgcgccgatctccatgcgcctagcaaaccaaggtaggggaacctggaggcaacatcagtttcgctgcaatctgacaaagtggagggactaaaaattgaagcttcttttatgtctgaacaagacttgctttacttgggatcagatggattgctcggagaatattctaggacaacgagaaaaaggcacaagctctcgcttggaaggccctgctgcgcactggtttctgctgattcatttcaaggatacaagactactgttccttttggctcttggtgcttctgatattatctcagcgaaagaaaattaatccaagatggctctgcaaaacattggtgcttcaaaccgtgatgaatgccttctacaggtataagatgcccaggatgatcaccaaa

SEQ ID NO: 14631 - DNA, 204 bp, Oryza sativa
  Clone ID: uC-osflcyp074c11a1
ctctgaggactgtcttgggactttgggtttatttattgcccaacattacacataaaaaagcgcacagaacaaacaaactcgaagcacttatgacccgaactggaaatacttatgacgaacgaaatactgaaaagaccatcaggggaagtaggcgatgattgggaggagattcggtgcatcactcttccccaaatacaaaatccc

SEQ ID NO: 14632 - DNA, 240 bp, Oryza sativa
  Clone ID: uC-osflcyp074d07a1
gcttaacatccaaatttggccatttgtccattccctcttcaaaagtataaaccatttttgggtcctcaaaatttttcagaagaacatactacgaactcaacacgagcaatacaaaacttttacaaattgatctttttgctgcccccctatgcacaaatttttagaaatcgttgacgcctttttttattagttgatgcccgactgcttgacctcagggcccttggccttgatggtgaaggg

SEQ ID NO: 14633 - DNA, 319 bp, Oryza sativa
  Clone ID: uC-osflcyp074d12b1
accacccgttgcgtgttggggcggaggtggagcggacgctccgcgcggggaatttgaaatacaggcgcggtaaccccaccgtggacgtcgacctcgtcgccagggacgggcggctgcaccgctccgtggagcccagcggcgcatacacggagatctacgaggcgctcgagctccgccacggggacgggacggggtacgcctggaagggcgagctgaacgccctccgtaacattaacgaggttatcgagcccaaactcttacacttggacgacaggaaccagagcgatgttcatgcaagcatgctagacattgcaggaac

SEQ ID NO: 14634 - DNA, 209 bp, Oryza sativa
  Clone ID: uC-osflcyp074e03a1
gggccaataaaaaatccactcaaaaaatggttcacaaagcaaaagaaaaaattcaacatatcaggggggtttatctagccaaatggcccgatcaacgccccttcgagccagggggaccaaaccattaccctgactaaaaccatagggaaaaacccgggttttacaagaagaaccgggaggccactcaaaacaattgggggggggtgggg

SEQ ID NO: 14635 - DNA, 439 bp, Oryza sativa
  Clone ID: uC-osflcyp074f12b1
cctctactttgctccctcttctttgccgcggcgccgacggggttccttacctaacaaatggcacgatgtcgcgcgccacggtcgccatcctcttctacatcctcacagccgccgccgccatcagcgcggcggcgcaggccccagcggagtcgccatcgaagagcacggcagctgccacccctgcaaaggcacccaccgtcgcatcggcaccgaggaaggccggaccagctgccgcgccgacgaccaccgtggctacctccgcgcctgctggtggcgacgaggtgtccatcccccctacgccgttcgccaccgtggtgtctcccgtcgccgatggacctgccgatgcggctgacgcccatttctccggtgccggtgctctcaagaggtgcgctgccgttgccggtgtcgcggatgccattgccacccgtaccttctacta

SEQ ID NO: 14636 - DNA, 275 bp, Oryza sativa
  Clone ID: uC-osflcyp074g08b1
ccggaccggacattgccggcccgacccacccgttcggttactggctgaagaaaagaatgaccccatgcctgaatgagcggatactgtcgccgctgtcgaacacgatgcgaggctgcccattcctgtcatgatcttgagattggacctggagctgctcagggcttcaatgttggtgttgagatcacaactgtgaggaaagtgaaggctgagctttgcaagaatactgcaatgatcaaggctgacatgatgctactactattcggggcgccccgggc

SEQ ID NO: 14637 - DNA, 569 bp, Oryza sativa
  unsure (1)..(569): unsure at all n locations
  Clone ID: uC-osflcyp074g11a1
actcgtaataaagaggtcagattcattcattcactcgtttgcattagtatttccatctctcctgctgagttgaagagcaggaaatacttgatccaaccaccccatgggccatcaccatgagccttgaacaatactcctagcttatctcaggagaaaaggcaaagtagcagtactaattacagtacacacctacatttgattccgtcacagacttttcttctctcgatggacagcagacgagcgatctgccctaccggcatcaatggcacggtccacatacagcaaggacaaccaagaacaccgggcacccaccagcttactgtcctccattgccggactggagtgcacagctccagagttaaccgtgctgtcggaggccggcgtcgcaggagacgcccgtccagctgcagggcgtggcgtcgcgcgcgttccagtccgccagcgcgccatccggngcggcgagcgcgcgcctcgcgtcgagcagggacagcccgtcctggttcaccgccaccccgcattgacgacgacgagcacccagcagagggagagggagagtgagccagacccca

SEQ ID NO: 14638 - DNA, 511 bp, Oryza sativa
  Clone ID: uC-osflcyp074h04b1
tcgattttagacttggtgactgctacctcgcgatggggtcttcttcgacgccggcgtcgtcgtcgagcgagatgaggaagacgaatccgtccaagcagtcgcgcgcgcaggcgtagcagaacggtggcgccggacactccaagcttgccaggtacttccacccggtggcctactgggacaaggatcaactgctggacgccgtgcactggatccggcaggtgctcggcctcgcctgcggcctgctctggggagccgtccccctcgttggcgccatctggatcgcactgtttgtgactatttctactgggctcgtttactggtactatgcatacctgttgaagattgatgaggaagactttggaggccatggagcactactttaggagggaatgtttgcctttttcactcttttcctgctttcatggacactcatatacagttttgtttacttttgagaagcttctctgatgacatgttggccatggatggaagtttgtgcaccatgtttggt

SEQ ID NO: 14639 - DNA, 276 bp, Oryza sativa
  Clone ID: uC-osflcyp074h07a1
ttttgggaacagtccaagatcaggatcaaacagcaaattttttcacggtttgataccttccttacaaattttatatgtgctaacacaaaaaaagagaaggggaaattatatcccatttaaagtttatttaagcaccccaaatccctaaatttacaagcttggttgccagaagagaccattacacctgtgctatgggacaccttactagagggccctggtggtagttcaacatttaccgagaactttacagaggtagaattctttgcggtttctcta

SEQ ID NO: 14640 - DNA, 375 bp, Oryza sativa
  Clone ID: uC-osflcyp075a03b1
gttgattgcattagacacggccaactacacctggcgggggatctttggaagtttcgtacggctagccatactgacattaatacgaccacgataaacggtcgatctaccaggtgggaccacctctaaaggcatatagggtgggattaggggagcgatcttcttctaggactaccacctgctcgagaaggtggatgacttagcccaggagcacatccacgagtacgtggtccacgcccagggggtctccgccacggtgtacttttagtgcacccacgatcgtactcaacatctcctgccgcgacttcgttcggaccgcggactacaagaccctcgtcatcggccacttctccatcatgatgcacaagcgcgggaacc

SEQ ID NO: 14641 - DNA, 333 bp, Oryza sativa
  Clone ID: uC-osflcyp075a11b1
tcgcttagctactaatcgatgagctcgggaccatcacgtcgctggtagctcagctgagttcgatcgatcagccatggcgggggagaggaggtggagcacggcggcggcggcggctggatggctgcgagtggccgccgttgtggtggccgccgcctctgccgcctcgtcggcggccggcgagggggtcggccggcagacggtcccggcgatgtacgtgttcggcgactcgctggtggacgtcggaaccaacgacttcctgtcgccgccggcgtcgaggacgcctgagccaccctgcggaatagacctcccgcccgaggccgccgtcgtcgactg

SEQ ID NO: 14642 - DNA, 499 bp, Oryza sativa
  Clone ID: uC-osflcyp075b07b1
gttaaatgcagaagtttgtgttcctagaaactcgtgaagtgatctcttctgtgctgaggccacactgggcgaggagggttgatggaaaggcacaggtcgttcaggcacagggtgatgtgcttgaagttgtaccgctcgggacttccaaaggaaacggggtaaaaattctgttggaatcactttgtgctagtccagatgaggtcatggcactaggcgatggagaaaacgataaagagatgctccaacttgccggccttggtgtcgccctctgcaacggctgtgaggtgacaaaggtggtagccgacgtcatcggcgcgagcaacgaccaaagcggcgtggcacaggccatttacaaatacctctagaaaatgattccacctagctggcttagcatttctactgtggtgtggtagggcctaatatattttgcttgcagcatccatgtgcaagcgtaccatatttaaacttcaataattgtacgtggaagttggaagtacta

SEQ ID NO: 14643 - DNA, 526 bp, Oryza sativa
  unsure (1)..(526): unsure at all n locations
  Clone ID: uC-osflcyp075c03b1
gtggactacttagagctgacctttccaagggaatgacggacgaaaacgcaaggtgcaaaggacttcatttgatttgtttgcgaaaagcagaaatgcattatatatcttgcttcatctcatggtaggactttccgttatctaaagaaaaatcttccgtctaacgataattctgctttacatgcactagattcccaaaacttttggtcgatggaccgtatggtgcaccggcacaagattaccgtgaatacgatgtgctacttctcatcgggctgggcatcggagccacccctttgattagcattgtgaaggacgtgcttaaccacattcaaggtgagggatcagttggaaccacggagccggagagcagcagcaaggcgaagaagaaacctttcatgacgaagagagcctacttctactgggtgacgagagaggaaggctcgtttgagtggttcagaggcgtcatgaacgaggtgtctgagaaggacaaggatggagtcatngagctccataccactgctaagcgtgt

SEQ ID NO: 14644 - DNA, 512 bp, Oryza sativa
  unsure (1)..(512): unsure at all n locations
  Clone ID: uC-osflcyp075e03b1
catcatccggctgagcgacaccccctgcgtggtggtgacatccatgtacgggtggagcgcctacatggagaagatcatgcagtcacagaccctctcggatgccagcaagcaggcgtacatgcgcggtaagagggtactcgagatcaaccccaggcaccccatcatcaaggaactccgtgacaaggtcgcccaggacagcgagagcgagagcttgaagcagacggcgaagctggtgtaccagacggccctcatggagagcggcttcaaccttcctgatcccaaggacttcgcctccagcatctacaggtcggtgcagaagagccttgacctgagccccgacgcggccgtggaagaggaagaggaggtcgaggaggccgaggttgaagagaaggaatcatccaacatcaaggaggaggcggagccgtcgtcgtatgataaggacgagctgtagtgatgtgtcgccaccaactgggttgtttttatctagctcttgtgtaggntcgttaaaaatg

SEQ ID NO: 14645 - DNA, 245 bp, Oryza sativa
  Clone ID: uC-osflcyp075f07b1
tcgtggtagagtactcggcttttaagtgcgactatgatcttttacacatttggatgaagcataaaattcgtccagactcttggtagagtctataagaccgcgactgatcctcaagggtaatgaatggaaaaaatagcatgtcgtaataaaatcaatttcttattttgcgattcttggaacggaatacacacattctgattccctgcctctaatgaataattggatatgcgcccgtctccacttcc

SEQ ID NO: 14646 - DNA, 402 bp, Oryza sativa
  Clone ID: uC-osflcyp077b08b1
tgactatctccttctggcgagcagagcaagggaggggaggtgaggggatcctgctgatactatgcccttgacgtcctctgctacttgactcgtctgtaaccagtcatctgcctcgtcaattacctttgtgatccttcaaacaaaaactcagtattacttgcactctattggcaaaattagtcaagatagatgctctttgctgcatcatcgctaggctccatgggacacagacaaatcttgcatgcagatactggtctatccatcctaatgaaccttgctggaagcttaaatcaacactttcttctccaatgtcatcgagatggtactgcaagaatccatttgatagattgccacaccatatctatgatgctcctccttatgtatcaatcactgtcatcccat

SEQ ID NO: 14647 - DNA, 464 bp, Oryza sativa
  Clone ID: uC-osflcyp077c12b1
atggcaggccaggaaataataaaaagagggggattgttttgcctggggaggagatcgcacaagagcagatagttaatggccccgggttctcctccctcatattgttcacgatgcctgtgatcgttgctctcgctcctggcgatcagctacgcacgcccaatttttgcatcgagcacggacatctaccacaaaaacatggagctacgacgcgattaccaagggacaatcggacatcatgttcaaacaattcttaagtcctcttgcgctccttctattacgagcaacgttgtatattccgtgcttgcataataaatcaaagaaatactgacaccaatcgaactgataatcctagaacgcacgatattaccagcgacgtccgcttcacccaggtcgattctcagacatataatactaattgtgaactccaatgaactacaccaaactgagtgactaatcagcccatg

SEQ ID NO: 14648 - DNA, 353 bp, Oryza sativa
  unsure (1)..(353): unsure at all n locations
  Clone ID: uC-osflcyp078a02b1
acgctcattagtggtatcactgtgggagctgccaccaacatgcgcgttattttaaaagagaggggcggtaacaacatcnttctgaacatctaacagtcatacagggatgcaatcgtggttgaaaataatagagatgggatgacgggcaccattcacaaatccgctaacatcgtttaatacgacgctggtcgcgtaggtttcttgttatcaagcgccgcgtaagtcctgggacctcttgtttcaatcccaaaaacgatccaccaaaataaattttgtaccttggaaccaaccaacggatggattgtttatgtgcagttttcgtagctaattcaactggcggtgatttctttgcc

SEQ ID NO: 14649 - DNA, 408 bp, Oryza sativa
  Clone ID: uC-osflcyp078a04a1
gaagcggccagaatagggctgttcaggtcttcaaattgaaattgaagttacaattattatgttcttaagcgaaaggaaaattgccctgagaaccaagcaaataacgctgggaccaaacacctattgtgaaaaacggatgccatgtctgtatcggtcataacacaggctttcattgggaacacacaactggggattcactttccaaacacattgctaactgaaatttgggctaccaatgcgggcgcgaatttttccggcgggaaatacacatgttccaggttctggtcccctggtggatgccatatgtttactggaatgggcaggtcccattttctggttccctggtggaggccatatgtttactggaatgaacatttccttttatctttggcgcctgtgaacccttta

SEQ ID NO: 14650 - DNA, 469 bp, Oryza sativa
  Clone ID: uC-osflcyp078a12a1
cataatatatccattcacctcacaggtgtgcacaagacctgcacatgtaatacataacatatgcggtacaatacttcatatatagtactgcacatattattcagagggcacaacaatgtataaaagttgcgcgattattcacccaaagcaacaagctaagcatatgctacatgctcttaggacaggttgatcaagtagatcatggcagcttagctagcaaattaaaggctcttaattaggccagcacagtttcagtgggcatcacgatgttggcagccgatgtggtgttgagcatccaggtgtggaacggatggaagagcacctcggcagggcagctgaggttgggcaggacagggcagtcgatgaagctcttggcgtccttgtcgacgcagaggtagatctcgtacaactgcttgttcccaaatggcccgtccctgcactgcactcctggtgtcacacccagcttctg

SEQ ID NO: 14651 - DNA, 540 bp, Oryza sativa
  Clone ID: uC-osflcyp078b06b1
gcgtacttttttttacggcgtgggaggacaagaagtgccccggggggtttttctatcctgcacaggggaaggttgagacaccataacagctcgtgacccgatgcaggagcaccatttacaatcgatacgccacgattcaggacaaggaaagtttacgttcggaccaacagctgccgatgcgctctgcatgcagatgtctttgcacacaacgctgaccgactacaacactgcttacatgttgatgctagacctagaacttcgacgggactgccggttaatgacaccctccctacaggccctacgcctatcgcgcgatcgagacacgatgatctgcccatagttacatgctcggatgcaccccacggctgtcaacgatcaatttgaaacgtgcggacacagcaaccagctgagttcccatatggagatctagaactagaggtcgagatatcattttctcttaacatgggcgaacaggaagatcagagtttacgaggatagcccctttggcgctggatattgccccacgttattgttctggac

SEQ ID NO: 14652 - DNA, 223 bp, Oryza sativa
  Clone ID: uC-osflcyp078b08a1
tttcttttttatgcagcacacaaaccgaacccgactagggggggctttactgtgcattagcggggcgaacacccgtaagcaagagaatacactggagcaacacacccggatcacggccgcgaacccccacacggcacactttgcagagcgcacatggcaggataggaaaccccacatgggaggggggcctccacccctagaagacaagtgggcctaacggaag

SEQ ID NO: 14653 - DNA, 477 bp, Oryza sativa
  Clone ID: uC-osflcyp078c04a1
aattatagtctcatatttgcaaaatgtattgcaaacaaactggaaaaggtacagaggtaaaaaaaaaaaaaggatgctgcattagctaagatttagtacattcaaaccgtacaattgaagaggaaattaaggccgacaactcatatagtttgtgctttgcggaccaaaaaaacaataactcaaaacatggaaactttgcatctgaatggctatgaactccattgtttcactcacagaattccgtcaatctcccagttatccttttcatcgtcatgagccctcctcgcggcctctgaatcagcatcgtcttctgggaacctaggctcctccatcatacgcctgcgggggttgcggcggccggcctcgcgggccttgcgcttgcgctcgtccttcttgctctcgtagcggcggcggcgcttgatctcctggagcacgccggccctcatcacctcccgccggaaccgccggaagatggac

SEQ ID NO: 14654 - DNA, 407 bp, Oryza sativa
  Clone ID: uC-osflcyp078c10b1
aagctacctagcttaattacctagctactcgatcgagcatcagtctagatatggcggctttgaacggtaaggtggtggtggcggtgatggtggtggcgatggtggtggaaacccatgcattcatggttgctagagacgatcttgcaatggagattacagctgagaatatattctttgaccagaagcatatgattttacaagagcatccttgctggaaagcctgttgctactgctactcagatgctcgagtcgacgatcaaatcaccacgttcaactcgagctgaggcatctgaccttgcaatcgcagtttatcgctggaactgactgcgtcatgcttagtggatagagtgctgctggaccatacccttgacgactggtatatatcatgccaccgatattgtcttgag

SEQ ID NO: 14655 - DNA, 504 bp, Oryza sativa
  Clone ID: uC-osflcyp078d06b1
tccatgtttctccaaactccaagactccatcgccatcgacggcgtggtgaccatggcgtgctgcgccgccgacgccgtggcaacggaccgcatcgccctcgtcaaggccttcgacgagacacgcaccggcgtccgcggtctcgtcgaatacggcgtctctgccgtcccggacatcttccgccaccccgacccctacgccttcgtccccctcgctccacccggcgtctacatccccgtcgacaacctctacctccccgcgccgctcgccgtcgaggccgtggcgggagccgtgcgcgactgggggttcttctacctcgtcaaccaccacgcccttgtcccctccggcttcaccgtcgggctcctcgtcgccgtccgcgccttcaacgagctccccgtcgtggagcgcgccgagcactacggtcgctccgaggacggcggggtcagctactcctacaacgtcgacctgtaccggtaggacgccgcgagctggcgcgacacgatcca

SEQ ID NO: 14656 - DNA, 370 bp, Oryza sativa
  Clone ID: uC-osflcyp078d08a1
atctaaaggcaaaaccaatatattgatgaaaacactggacggcaactcctgtgatgctcatacattctgaagctatcgtaatacacaatcgtgacatcctacatggcgcatacacatgagcatataagtgattgggctagtttacaaaatggcaatatcctcgacagaaagcgagtgaaaaacaaggaaacgaatcaacccaccccttgtccaacaacttgtatgacgactggcgcttcacatcccagttgaaagacgcgctgcctatcctttgcgcgccaagcttcgcctgagctgcctttgaccctcgacccctacctgatgaagctagaggtctagcttttggtgatgtgggggcgctcttatccct

SEQ ID NO: 14657 - DNA, 326 bp, Oryza sativa
  Clone ID: uC-osflcyp078e04a1
tttcatttttttatcaaagagttgaacaatgaagatagatggcaagtgcctgaccgatttgaccaggtcgtgtaggaacaaggttcaaatcgaatgttcgttaggatgcctaacctgcatacatcactgcactcccacttgacacctatttaaacgtgctcggctcgccgctaccttatcctattaccatgcttgtggcgatccatccccctatgggcggtgaacccgtcgatgacctcggctgtgctacctgcggctctccccaagttaaaggagagagccctccccttggtgggggctgcctacttatctgcttgcagcagcta

SEQ ID NO: 14658 - DNA, 509 bp, Oryza sativa
  unsure (1)..(509): unsure at all n locations
  Clone ID: uC-osflcyp078e12a1
actctcagaacgtgacacacccatatatacacgacgaaccgatcaaaacaacaacacacaagacggtaggttcaccgacggcgagaaatggttggcacacggccatgaacggctgagatcgcacacacatagagacagacaatgtactctcagaaacgcacccattacacgatgaaaaccaatcaaacacgaaaaaaaaaaagcacaaaagaccgacaaacaacgcctgcgacgacggaggcatgtgggggcgaagcagggggcanccgcgtcactgacgctgggccccaccgccctcgatgacaaactcttttatttagccccacgtcacgcgtacccacacacacctacggagtcgagtactaccactccagctcactcaactcatcactcgctacacgcacacgtacgtacaactccggcgagtcgccggcggcggcggcgcgcgcgggccatgcatgtacttcacggtgtacgacgacggcgagccagcctttcccggatgcact

SEQ ID NO: 14659 - DNA, 120 bp, Oryza sativa
  Clone ID: uC-osflcyp078f08a1
gccgccctttttttttttttttatttttaatagaaaggagactatgctatggagatttgcagcgatgcccatggaacataaataccccaggacagatatatcaatggtacacatgatgca

SEQ ID NO: 14660 - DNA, 482 bp, Oryza sativa
  Clone ID: uC-osflcyp078g10b1
tatgtttcgattctccatgctttcctctactgctcattggtaacattcggcaaatttgacagatgggtatattggtcatcttggtggacctgcaatgctgccgctgcgatgccaagatcaggaaggtcctgggctgccttgaagaggagtactgcatcgagaaggtggagtacgacgtgaagaacaacagggtgatcgtgcgcgggaagttcgacccggagaagctgtgcaagaagatctggtgcaaggccggcaagatcatcaaggagatcctcatcgtcgacgtctggccgccgtcgccgccgccgccgtgcaagccgccgccgtgcgagaagcctccggaggactgcaagcccaagccctgccattgctgcagctgcgagaagcccaagcccaagcccaagccctgccattgctgcagctgcgagaagcccaagcccaagcccaagccctgccactgggagaagcccagccctgtcact

SEQ ID NO: 14661 - DNA, 348 bp, Oryza sativa
  Clone ID: uC-osflcyp078g12a1
aaacagcaatcataaacccattttactttattggccattgggaactacccggatatgaaggatttttggaattaaaccataaaaacccaaggggttattcagcctgggggaaggaaaaaattttggagaatcgacaagcatcacttttgggtgttatcctaaaacccataatgctggtttggagcaccgccatttggtacagcacctgccccttttggaggggtatcaaaaaagggcctcttccttgaggaagaccaggggttttccggggaataaaactccttggttttctaacccccatttggagccatggttttttctctttcttggggagaaggaataaatgtt

SEQ ID NO: 14662 - DNA, 166 bp, Oryza sativa
  Clone ID: uC-osflcyp078h08a1
aaaacaaaacgatccttaatgtaaaaaaccaaaaagggggtctttacaggtcagatctacccccctctgttcgtcctaataaagcatgccgttggaacaaaccacaaatccttacgtttttttttccctgtccccccccgccgacatttatacaatgcatacagac

SEQ ID NO: 14663 - DNA, 487 bp, Oryza sativa
  Clone ID: uC-osflcyp079a03a1
aatggatatgtaaagatcgacaacctttatgaacaaggttacagccctcatatttggtatataaaataaggggggtggggggtaaatttcagtcatcagctacataggcacatctatgtcatttctcctagccggaccagttaactttaatcccatggcaacatctgcatctgatacacatcaagcctttttgcatccacatcaacaagagacaatgcaatgcaatgcaaggtaaatcgatcatcaggtttagcaaagcaaacatgcgttgagctaagctacaacgctacatgcaggcagttcttgatgatgatgatgtctcagcccagtctttgccggattctcccttggaagcagcatgatgcctcttgtggccactccggctcagcagagagatgctgcttgctcttggtatctggacagcgccagccacgcagtctccagcttgggcacagctccagaccctggaagggcctttccccagtga

SEQ ID NO: 14664 - DNA, 542 bp, Oryza sativa
  Clone ID: uC-osflcyp079a11a1
acggcccgccctttttttttttttgtttggcaagatctcagtgttactgtttgcttgctcatgtagatatatatatgccagttaactcatggattgtatagccagtttaaaacggttacatataccattagctaagcttcctaagaagcagaaatttggcctatatgctgatgaaagacagctgcctccttagcttccattgcgtcaggtgcaccttccctttgtctactccactaattatctcatcaataagatccttaaagatggatttttcaatggccaaaacaattccttgccgttcactgtcggagctcttccactctttcatgccttgcattgcatcctctgctagcctgctatcttcctcttcagagcaccttatcattgaggaccgagactggatcatgtcaatctctgcacataagtccttgaaaagttgccacccacttaacttctttgactgaaagaactgcactgatgaactcacagtgaggttggcatccatttgctgggcgaggagttcatttgcaagatcaaatatg

SEQ ID NO: 14665 - DNA, 448 bp, Oryza sativa
  Clone ID: uC-osflcyp079c03a1
aaaggcaagaatattattcataaatgacgcatgatttttatcaaaacgcttgcaaatgatttcagatcagtagagtcaacaagacaaaactgtatctgccaaagcacacctccccaactccacccaattacgccattatttctgggcaaaagcaaacggcttcccattcctccccttcaccagtctcaaaccataaaccccacaacaaatcctcctaagtgacggcatataagatgatgaaaacaaagcaggatactccagagtcgtcatggcgaacttcaagttgacacttctcatgccacagccgctagtcgtgctgggcagcctagtaccggtagtgcgcgggcttgtagggaccctcaactggaacgctgatgtagtcagcctgcgacttggagagcttggtcagcctggcaccaagcttgcccaagtggagggcggccacctt

SEQ ID NO: 14666 - DNA, 494 bp, Oryza sativa
  Clone ID: uC-osflcyp079c11a1
gttcatccaaaaactgtcgctgccttcccttacccgactaaattggctatgcaatgtttatcaacagatcataacctagctgttaagttccaccatcgaggggtgtcaagaactaaaaatttcacatcaaaaggaagtacagaaatggctagaatcatgaaactctcgtcagatttggtcttctggagattctgcacaaccattcccaacacatttggcaacgaagtctattggagaacggacatgaacatcagcatcaccagaagtagcatggccttctcgagaatcctcaggtacattagcagcaacattgtcagcaggatcgacaggagtgtctcctggtctggtggtgaccggatgagatgacagctccgatgggaactctggcaatgggggaagcctaaattggctaaggccgtgttgcttagacagagactggatggtagattcgaagtaattttgaaatttattgcgttttttttaccctcctggat

SEQ ID NO: 14667 - DNA, 450 bp, Oryza sativa
  Clone ID: uC-osflcyp079d07a1
acaacatgatcatttgaagttcaatgggtggattaaacgaagcaaaaatacaacattacatgaagtttgacaggctcagcaacctgaaacaagaaacgctctggaacaaagctggaaaactgtggcagggaaccataatctcccagacccacacagttctctcccaacatctctctactttttacctactgcatctcactacacaaacctagaatggaaccacatatggcaactgatagacatgaaggtctggtaaatgaatcgccctaggctgcaatgagaactgctctgctgattgagaagtaagcggatcaacaatttctctgcagttgccaatgccagcataaggtttcctcgtactatcaagcagccaatcctggtccccgagatccatattatccatttccatagacggaggatcccaggtaacaaataaaatctttgaacttt

SEQ ID NO: 14668 - DNA, 266 bp, Oryza sativa
  Clone ID: uC-osflcyp079e03a1
gcactgcacaccgtacgcttagatcgctctacagtagagcggcctgcaaacgagagcggcgacttcgtttagcacaccggagaaaccttaggttccgtctcgaggcggtggttgtgtcgtggcgcgtctgggcgtaggagatggagatgacgtggagtcaaacaacctcataacaatactccaccattttttcttattgctcattaaaaccgaacctacatgctctgtttatttctcactaccaaatcatcttctcatgatgctgt

SEQ ID NO: 14669 - DNA, 441 bp, Oryza sativa
  Clone ID: uC-osflcyp079e11a1
ttttcttattctatctgttaatgaacataatatccactttattttgattaattgatgttcttgtacaactccattattgaaaatatcttccgaaagaaattagaaactgcacgagcctctgcatcggcaaaattaaatggccgagagcaaatgaccgaaatcaagataagagtccatataaaacggtgtgaattcaggcacttcatagttgatagttcgcttagccggtgtcctgcattccagcagcaattcccttcatggtcaggatgagggtgtcctccagccccggtgcatactcactggccgggtttagcttcaccagttccgtatccggttttgaccagtccattatctcctttggacatgtggtggcgctacgtgacatggtagttcgggtcggggttctcttcatcgactaagccttggctacattcagggtgg

SEQ ID NO: 14670 - DNA, 210 bp, Oryza sativa
  Clone ID: uC-osflcyp079g03a1
ctgtataacggacgagtgcagattactagggcgggctgaaatgggacaacatggtaccaatataacgttcccgggctcagtacacacgaagcccaataccgtatgggcaagaagagcttatataaaggtttgccaacatagccaacatgcttacccttggttctgcccaaacatgagggttattgaaacccccgcggtgggccatgcatt

SEQ ID NO: 14671 - DNA, 55 bp, Oryza sativa
  Clone ID: uC-osflcyp079g11a1
ttttttttttcttcttttttttttttttttttatttttttttcttgttatttttt

SEQ ID NO: 14672 - DNA, 78 bp, Oryza sativa
  Clone ID: uC-osflcyp079h07a1
ctcttataaagccaccatatagatcatttagggggtctagttccaaacggaggcgcatgttaatagaaactggcaagt

SEQ ID NO: 14673 - DNA, 353 bp, Oryza sativa
  Clone ID: uC-osflcyp080a04a1
gacacaaacaacaactgggaccatgagaatttcttactaacagtaaaggatcccagtttaaatggatcagggtcccaacaagaaagtttcaaagatgccggcaagaacatcaaagttcctggagcgcatcttattagcgggggttcactatctggggttccccagagaggaacctttccacttctaactttccaagaatattcactgccatggcgagaggcagatattatagggcttccatcagggctgaatgatgttttcagcgttgaaatgcataccattggcttcacgcgggatgttgctgaagtgctggcatgaaatgaatttggcccatgaacacccccagtgtttgg

SEQ ID NO: 14674 - DNA, 309 bp, Oryza sativa
  Clone ID: uC-osflcyp080a12b1
ttttatatcgcaggaacggaatactgctccctggtactcttctgtgttgaggcggcggatataaagaccaaaaacatatgcattgcaccaagggctgcagtaaactcaatcattggaacgacatacggtgacaagtggctcggagcatatgccgcctgctattgctcgtccaagattgcaagcaaaatggacgtcattggagcctgctacatcaaggtagacatgggttcggtctggaaccgccttggttcagaggtcaccgatgttgaatttgacccagatatagcttcatcaacggactgcgaaatc

SEQ ID NO: 14675 - DNA, 468 bp, Oryza sativa
  Clone ID: uC-osflcyp080b08a1
ataccgaagaaagatacttctgcaacgttatttgagggggtcagaaagttatgacagccgatacagcaactgttcttcgtgtgataattgattacaacatttgcccccaacatactacgtaaatctcagcacatgccgtagtatgcgctcctaaaagcgtagcattcttcactactgtacagacatcgcttgtgcactggttctattaaccttcaccaagccatcagctaccgtgaccaaacctgatgaaaatttacgcggcctgcaaaacttcctggcgcttgatctcaaacaccttctgtaacgcatcctcaacaaccttgtccggagttgaggcgccagaagtaactccgattgtgatagggccttctggtaaccagttctctttctcgacaagctcgccatgatttaacttgtagctgatcttgtttccaggtccaatcctttgttcactgtcaatccagtaag

SEQ ID NO: 14676 - DNA, 495 bp, Oryza sativa
  Clone ID: uC-osflcyp080b08b1
tacacccatccactccagagctccccgcggcacttggcaccaccaccaccaccaccggcatccggcggcgcgggcggtgatggcgaccatcaccacgcagctccggtcggccctcctctcgccggcggcctcgccgagccgccgtgccaggcgcgccccgtcgtccgtgcggtgcgactcctcggcagcgtcgtccctgtccgcctccgcgtcgctcgacgccgacttcgacaagaagcagttccgccacaacctcacccgcagcgacaactacaaccgcaagggcttcggccacaagaaggagacgctcgagctcatgagccaggagtacaccagcgacgtgatcaagacgctcaaggagaacgggaaccagcacacgtggggccccgtgacggtgaagctggcggaggcgtacggcttctgtggggcgtcgagcgcgccgtgcagatcgcctacgaggcgcgcaagcagttccccgacgatcgcatctggctc

SEQ ID NO: 14677 - DNA, 391 bp, Oryza sativa
  Clone ID: uC-osflcyp080c04a1
agcgacacgaaagtcatgtggtatatattccagataaagatgttcaacacaagatagcttcagaccaggcaatatagcaccagacacttggtgattcagggttcaacaaagtgatatatgatcgggtctacaaacaaacaaaaaggtccgatttttcgtttcccacagatgataaggatagatatatctaagcggctgagaggaaggccttcccgggggcaccagcagagaggcgaccatggcaaccaaggagcttagcattgacaccatcaggcatgattctaccctggcttttaagcctgacgtattcatcgcggatgaacttggtgaaaccccactttctactcttaaagagcctttggcgaccagggaacttgaacttggcacgacg

SEQ ID NO: 14678 - DNA, 510 bp, Oryza sativa
  Clone ID: uC-osflcyp080c12a1
cgtagcttggtcctatgagcggacgggccgccctttttttttttaatttgactttaaatgcccagcctgccttgttaatggagacgaggctagggtaaacatagcacaaacaccagctacgtagatatatgcatataattgaagaccactgaaggacatcaactaatatatgagtagttagggttgaggagcagagcacattgacggaaacccctgtgacttaaacatctagacctatagggctacacaagaattttatctatcaacaaaagctttgtagcataccaccaatgttgtgttgacaagattcactggctgaaacccaatatgaatccgtaaagaagaccaccaggctcgaagcatgtgcatttattaagggcagggtgcggcattgttagctgcaggcagatcttaccacatttatgtggacaaagaatgtgtacagtataccgacaaagcatagagattctaggttgcatcgttgtcacaacaccatcaaaaaaagccctt

SEQ ID NO: 14679 - DNA, 413 bp, Oryza sativa
  Clone ID: uC-osflcyp080c12b1
tcatctcatgcctcactcgcctagaacccctcctgctcctcccgatctccgaggcaatgctcctcgaattccccgcgccccgatctccccctgacgccaccctcctcctccgccccggatcgccccgcccgatctcgccgcggggtcgaatttccccttctcttgtctccgatcagggccgcctcgatcgaaggcggcgccgcgccgaccatcccaccttgtttggttgtaatttcttcttgtcgcgtgaggaggggggcgtggcggcgggggagagcgcgtgagcgtgcgggagatgggggcgccaaagcagaggtggactgcggaggaggaggccgagctcaaggcccgcgtggcgaagcacgggacggggaagtggaggaccatcctccgcgaccccgaattcaccgcgc

SEQ ID NO: 14680 - DNA, 225 bp, Oryza sativa
  unsure (1)..(225): unsure at all n locations
  Clone ID: uC-osflcyp080d08a1
tgatttttgtctgtagtgaatatnattcaaacaagggggggaaggatacaatccaaggggggttgaagatacaagcacatatatgggcaggattctggtaattaaacaatacaaaaagtgaattccttgcgtttcagacgctaaacctgtgccgctgtttaacaactaagtcaccgaaattggactgggcaagctcaccatcgattgaggaaaaagggtgaggag

SEQ ID NO: 14681 - DNA, 461 bp, Oryza sativa
  Clone ID: uC-osflcyp080e04a1
gtcgccctttttttttgattataattttacagcgagctaaatattttaagaaggttaccgccaaaatgccaatttcgatatagccacttatagggcctaggctactaggagaacagataaattttacgctatgcccgagcgaagaaactaggctgcatttctttggaacaaaaatcgctgaataagttacatggaaacacgaaagatcactttaatgcttcataaagttagaggatgatgcaagtattttcctaaaccaaaaaaagaccttgattcgccctccagaaccaactaaagttaatttagtgaaagaacaaactggtgtccacctgggttgaaagaaaccgaacaccaactaaacaacagtcttttgtactttgcaccagatacccaatctgtgtgagccaggatcagatctggtggtgcttctatgtctggctatcttggtcgagcggatcgaa

SEQ ID NO: 14682 - DNA, 257 bp, Oryza sativa
  Clone ID: uC-osflcyp080e04b1
ttttaaaacattgaccgggtctcacactctctaatgccttcatacactggtttccgtgtgaatcattctaattgcctaatgacacctggcattacacttcctcaaacgtctcccaatgccaatagtcgagggaatggacctttcacttctctcacattccttgttcttgtacatagtttctctgggaggctagcgcatattgacccaacctctcacatttattattccatatcgtaccttattaagacacacctctt

SEQ ID NO: 14683 - DNA, 471 bp, Oryza sativa
  Clone ID: uC-osflcyp080e12a1
acagtaaccccacatatataatgacagattaattaggcttcataaataagtctcgtggtttccagacgagttatgaaattagttttttcattcatgtccgaaaaccccttccaacatccgatgtgacactcaaaaattttcttttcgcgaactaaacacacccacaattcacagggagagatagggaatgaaatgagatcacagcatcttcctgactaaaaagctggagaagacataagaaaaaacataaaggaatttgctccgtttatgtcattaggcaagatcggcctgtaatgttcaaccgatacacagtttctggtaatgaatacatcaatatgggcatctgaatttccaaatgtaaaatttaagtttctcaaaaatggagatgatgccgccgccgccgccaggactttgtctatttaaatgctcacaaaagcctgacacgatttttctcatcacaaaagaatggtg

SEQ ID NO: 14684 - DNA, 95 bp, Oryza sativa
  Clone ID: uC-osflcyp080f08a1
ctaaagccaccatccacggctcatagggaatggcttgttaaataataaagtatcgacggtgaccgtacaccggtcgtcggtcgccgtgaccaaga

SEQ ID NO: 14685 - DNA, 379 bp, Oryza sativa
  Clone ID: uC-osflcyp080g06a1
gccgaggaaggcgttccagaggtagtcctcgaggtcgacggccgcctgggaggtcggcagggagtactcgccgccctggccgccgatggcgaggaggacgaggatgcccctggactggcagtgcttgatgtcggggccgacggcggagacggtgtggccggagatgtccagcttgtaggtgcccgggatgtagccgaaggcgctgaggaaggagatgatgacggtggtgtagaggccggtgtcgcacgcctcacggagggacccctcgagctggtccgtgttccggccccagaacacgacggtgtcgccggtgctctggccggcggcgaggctggacgagagcagtaggaccagcagcggggcaaggcgtcgggacgcc

SEQ ID NO: 14686 - DNA, 445 bp, Oryza sativa
  Clone ID: uC-osflcyp080h02a1
ctgacatgtaaactttgaattaagcattgtaactcagtaacactagagagtgacaaatgaaattacaaaattgttacaacaatatacgccagccgatcatcagagcaaccaagaaagcccgggttgcttcttcatcgccactccgacaagatcacctggcctctcactaaatgactcccgtatcttacctttcctggaagtcagttcaggatggattgcagagttcttccatcttttgcgttaggatttacgcctgcttcatgctgcagctgctgcagtctggtttccgcctacccagaactgtttcacagcatacagcaccttttcacgcaccatggggccgtcctcgtgatcgaccagcctagtgtttcattttatgccgagggcgagcctgttcacctttgtcaggatatcgacatcgtccctcattatgacggcgcctttt

SEQ ID NO: 14687 - DNA, 480 bp, Oryza sativa
  unsure (1)..(480): unsure at all n locations
  Clone ID: uC-osflcyp080h10a1
gaccacaaaaaatgttgagccactgcacacggtgcagtgtcagttgtagcattcacaacataccgagtttctttttaggaggtaaaactctacgagtctcacagcatagtaaaacgtagccagctattactagatacgagtagcattttttaagtcgcaaacaaaagggatacagtcccggcttaaggggtgtaaaatcagcttcactatcttcatgttcgccgcaacgggaaacagagcacaatcatctttgggtccaaaaatttacggcaaacctttgcgacgacgttgatttgtgaaccaatgacgagtttcctagatgacatactctgcttactgttgcgcgcactgaactctctgggcacctccaggcatctcatcgtcctcatcatacgcctcctgagcagcttgggctttcctgcgcatctcttcctcaatgttgttgacatcgtgcatngtggtctcctcgcattcatctat

SEQ ID NO: 14688 - DNA, 290 bp, Oryza sativa
  unsure (1)..(290): unsure at all n locations
  Clone ID: uC-osflcyp081a06b1
ctcacccgtgggcttccccctttcctcaaagcgccaatttagaccatggcggcgacactgacccgagcattcaaggggatgtacctctcctccccgagccattactactactacgnctacttcctccgcactgaccggggctcgctctccctccgcagcagggcctgcatgggggtgccgatgaccatgcccgggccgtggatgactatccagatggcgcacaaaaagggggccgggagcaccaacaacgggagggactcccccggacagcgccttcgtgttaagattta

SEQ ID NO: 14689 - DNA, 506 bp, Oryza sativa
  unsure (1)..(506): unsure at all n locations
  Clone ID: uC-osflcyp081b02b1
ttatttcggagctatcgcaatgactggttcggaaatatttcagtcgttccagggggttgagtgtgccggggatattatctcattatttattaaatacctggagaacaatacgtatcctgatgacagcaggatctttgtcccaccactatacaagggcaaaggaggtatgaagaaaaagattaaagatgcactcggtggatccaacgaaaagaaatcagcagtggagtttcctcatcgatttatatactgccctgtcttatttctctggtgaatggattgtggtctgtttccaactgaagaatatgaaacagatcggtattctttgcaacaacggtggcgacgaaattaaaaatttcgctttggatttgggaaagaaattaaacaaagtcttaggagactgcaactacaaaacagtgtcatttgatgaaaaatctctgtcattttttcccgtcttgggtacagnccaatgacagggtgttcgcagccatgtatttttttgaacattt

SEQ ID NO: 14690 - DNA, 374 bp, Oryza sativa
  unsure (1)..(374): unsure at all n locations
  Clone ID: uC-osflcyp081d10b1
gtcagtttccattattcttttatacttttttattgaaaaaaaaggaattttcttacttctgtcaataaatataatactatggacaagcacttttgtttgattgtattaaaagaaatactaacaaatgttaatgagatataaagagaatcctcctatccagtttactccttttgttggtgctatttgattgtgacttaaacggaccgatgatgtaaattcatttgttatacacttactctactctgcacaataggtctctgattaaatgnccgctgagggagggtttgttctggttgatgaattttcaagcaaatctgttaatgatctttacaaggtttctatgtgtttttatgtgttttctgtgagatctttac

SEQ ID NO: 14691 - DNA, 326 bp, Oryza sativa
  Clone ID: uC-osflcyp081e06b1
ttttcttcattaattgcatgctcgcacggggtcctattaggttgcttacgcatcttctgcatacatcaactcaaaatggggtgcacttggatatggacgtttttgtgccacaccaataacggcacggcggcgctgcggcggatgcacgacgccgacccggccctgtacctctccccctccgccgacctcgccgccgtcgaccgtgaggcctacaagcacctctacgcctcgctcgtccccttctcccccgcgcagccgcccccgctctgcaacctactggcaggccccgccttcgacggacagcagattttgtcccagattgagct

SEQ ID NO: 14692 - DNA, 369 bp, Oryza sativa
  unsure (1)..(369): unsure at all n locations
  Clone ID: uC-osflcyp081h02b1
gatccgatacaaggtgatgagtgctagacttgggcgtattttgaatgaaccccgaggtgttcttcgacatactcatcggcaagggcagggccggccgcgtcgtcatggagctcttcgccgacaccgtccccaagacggccgagaactttcgctgcctatgcaccggcgagaagggcctcggcgcctccggcaagccgatgcattacaagggttctgccttccaccgtatcatacccaacttcatgtgccagggcggcgacttcacccgcggcaacagcacgcggggagagtccatctactgcgacaggtttgctgacaagaactgttagctgcgccacaccggcccaggcgtgctctncatggccaacg

SEQ ID NO: 14693 - DNA, 452 bp, Oryza sativa
  unsure (1)..(452): unsure at all n locations
  Clone ID: uC-osflcyp082a06a1
tttgggggcttatgagcatggagggtcacactcacttagtcaaataccaagatcgatcgatcgatgtacaagtggatgcattaattcatcatcttgggtgttcttatattacaaatcaccaccatgcaagtcgccattaaccaccaacccagctttcctaatttaagtagtaatcaacaaaaggatgacctctcctctctccataccctcccagctcgctcgtcatcacaaaactaaacagcgcgcgcgaacgcacaccaacgcatngatcccgtttgaattgcgcgcgaaagagcttaaattaagaggatgaggagaaggtgtctaagatggtggtgtggagcgggtcgctgaggtgggtggcccagctgttgaggggccccttgccggtggcggcggcctgcactgcgaagcccaggaaggcgaccatggcgaggcgggcgtgcttgatc

SEQ ID NO: 14694 - DNA, 379 bp, Oryza sativa
  Clone ID: uC-osflcyp082b02a1
tttgttttgatataaccaaggggatctactaccatgatggcattaatgaacaatcaggaattcagaatactgttctgtagacaggatacaatggcacacctggtcctacaatatatcaagcaacacctgtgattatgtactgatgaaactgactttcttttctatttctccttccattcttctctccaataggcgataggcgaacaaaataaatacaatttgagatgtaacaggaaaagctaggggtgtagtttttgtcatatgaaatcttgttcttggtcgtctgttcggcgcgacgaagtatctccgtcgagcattctcttcgtcatgttggccctctggacaagacgaaccaatgcttgcaccacctctgacattg

SEQ ID NO: 14695 - DNA, 492 bp, Oryza sativa
  Clone ID: uC-osflcyp082b10a1
ttggtttgtttattcgggggggatgctcttgtttattatccttaacaccatatcaaattcacgacgaagtattgactctcgcctctcacgttttttcccatgtgaacaacaaaaataaatgtgagaaggcattccaaaatatcattcatgtccaggtatataaatgttacacaagatgctgctactctggaataacaaggtcaaactaaccttaatcaagtctaaaaaaaatgataggatctccatatcttctcctaggattctcaaaatggagcctagtagcttcttaattctcgcccttctgatccagtataatatcaggttaattgttcatctttgatgtctcctctgaccaaaatagagggattgaacctctgttttgcacaacagaacttgcttctgtaggccaaggtctagctccatacacaatttgctcagtctcagcatcatttgctactcagcctttctcattcacccccatctttaaatatc

SEQ ID NO: 14696 - DNA, 388 bp, Oryza sativa
  Clone ID: uC-osflcyp082c03b1
ttgttttgcatgttgcagctgaggtcaggtctcctggcatacatggaagtcggttgccacattaatacatcatgtacatgtcatgcgctactgatagctttggagtcacaggactccagattacgtcaagaatgctagtcaaccggtcgatagatgggttgcgagatgtggcataactgaacccaggttcgggcagccaatgtatactagtgaaagagatgtttaccaccgttgtgagaatcatcaagggccttggaacaactacgtgggatgactttaagtgcgtgagtctaaactatacagtactctagtctccacaaacttatagcacactcagtgggcaaggtatcccatacaaggatgccttcagacactgctgatcttgtct

SEQ ID NO: 14697 - DNA, 472 bp, Oryza sativa
  Clone ID: uC-osflcyp082d02a1
tttttgttgccttgaagattcggccatataattaatacaacccctagtgctgaagggataatacagagacgaaactaattatgcatgtctaaaagttcttggtcagtttttcagggacggcgagatcgaccgactatgcatctcaacagacacttattcagatgcattactaaaagtactttttttcagggacggagggcttaattacaatgacagatttattacaatactttactatccaagtttggcgcacctaggtttagtaagcctcaggtttttagccactcttggcccattctgttacagaaacagaggtatcactctagtccagaaagtaaagttgaccaagtcacctttactgagattaacgcaaaatcagtctttattttttgagtatcatagccatggattttctccttgaaggaaacataatgctggtcgaaactggatggaaacgcgcccacttcgaact

SEQ ID NO: 14698 - DNA, 422 bp, Oryza sativa
  Clone ID: uC-osflcyp082d10a1
ttgtttttttatttttctggtttttttttttttttttttttttttttttttttttttttttgggaaaacttggggattaaaccaagtttcccaagggggccacattacccaaaaaaactttgggcactttttttaaaatagctcctttaaaggtttaaatttggattactttgccccccggggatattattttcacaggaaactggtttaccagaggagactgtccttaggggacaaaaacttaccctgtttttggggttttcaaatgggggtcttggaaaacctgaaagggaccaacacccttgcaagagtttgaacaattcccaaaggcggattgggggccaccctttcccctgtttcaaacccgggtgggctgggaccccacctcatgggcctttttttggtggccggagggcactttt

SEQ ID NO: 14699 - DNA, 470 bp, Oryza sativa
  Clone ID: uC-osflcyp082e06a1
ttttggttttttaattttttgtgtttttttgcatcagaaacttgcagttcaacaacagtggtctaagctgaaccattagtggcacacatcaagtggcatacatgatcaggagccaaattgtctggcaaacaacacaggtaggtaatagtttgcaaaatacaggcatgagcctgattgtctggcaatcaacacaacacaaaaagctagatacatgggctacttgccctgcaagaccacatattgcataaacatagcagcaaacatttcacagcttgtcagactcccatggcaacagaagaagtgctccaactgtcttctttttgggtctggcatttgagggttcttgagcagaaacacaaactgaagctttccctgaagtaacctttactgatgcacttgtggagcttatgtgtgacaaattctaggatgggttggcagctatgaactttcaatacttttgagcaatcctt

SEQ ID NO: 14700 - DNA, 63 bp, Oryza sativa
  Clone ID: uC-osflcyp082e11b1
ccatacttatttaaagagaggacaccacatcacaaacggggggaattgttaacaagaaagaac

SEQ ID NO: 14701 - DNA, 491 bp, Oryza sativa
  Clone ID: uC-osflcyp082f02a1
tttttgtaagggtcaataaacgggtgcacatgctccattaaccatagcaacaagcacacacaagatctttcctgagcttcctgtcacagctcatacaagatcttcaacgaaaagattacagtacatgaaaaaaagtcaaggattcattcgtccatatgtctatttcttctataggcatatgtttcctcagattcattagaaaaaaccttacacctaccacagtaatcagctacacgtaggaaaaattcacaacacccccaagacgaaggtcaggaaaccccccccccctccccccccttgataacacagattacagaaagctgcagtcagccagtcactcctactaataaccagcgctgagctacctttccatccctttctatacatcatcgaacaccgatattagggaggcgcttacaaacaccacccaaagagcaaagggggtttaaacaaaaacacaaacccatatttaactttgaaagggatagttt

SEQ ID NO: 14702 - DNA, 125 bp, Oryza sativa
  Clone ID: uC-osflcyp082f10a1
ttttggatttttcaccccggtgtttcaaaactttctttttattttttttttttttctatcaatatcacccagaagtgcatcgacacaggacctaaaaacaaaccagaggacctactgccccctgg

SEQ ID NO: 14703 - DNA, 53 bp, Oryza sativa
  Clone ID: uC-osflcyp082g03b1
ccaccactcattgcgctccacaggccggcgaggtcggggaggcttttttacaa

SEQ ID NO: 14704 - DNA, 464 bp, Oryza sativa
  Clone ID: uC-osflcyp082g06a1
tttgttttagtcaaattttggacataattaaaccacatgaaagaaaaaaaagggtacacgccctcaaggcctttaaatccactgctgattacatgtacactcaattgtcagctgcacaaaaagtttataactcaagtacactagtacaaccttttcctctgtcccttttaattagtttagcttggccctttttattgacgttatttatctatgatatgagtagagggaggcaaccagttaatcttgtatacttacattacttttttttttcttggataattcacccagacggcgatccatggattgagagacagactgcaggaaggcagcttcatcaccaacatcgtcttcaacctcacggatgatctcctcgatgacagactccttggtgagcgtctccctgcacaagatgctccccatgtcgaacgcggcgaggcccgagtcgacgcccttcttgagcagca

SEQ ID NO: 14705 - DNA, 274 bp, Oryza sativa
  Clone ID: uC-osflcyp082h02a1
gtaaatcatacacggggggtaaatgaatacttgtccatgtccaaggtaccatgtctgaaaatatacacttcatgtatatagaggctttcgagagtttgctcccgctggactagagggctaaactactagtccctggatttttactctatctggattctgggctaagcatacaaacacaaaaggcaggtacctgatacctccacacactggaaaccattgggaaagggaaaatcccagcgctaaatggaagaaaaataagcatttgagctcattg

SEQ ID NO: 14706 - DNA, 471 bp, Oryza sativa
  Clone ID: uC-osflcyp082h10a1
tttttgtttaatagaacataggggcgtcgctgcttattgctgagatatttatcaaaaattgatcatcaattggttctacacatacacggacaaaagctggcactctgtagtctgtacccgtatacacacggacagttcgtacctataccattaccattacacccactctcaagtctcaactggaactagccaagctccgtacgcgtaaaccgggggagctcgccgcgccgaggcccaagcgaccaccgtccatccttgcacgccggcgtcgccacgacgccaccgactttgcggtgcgccgggcacggcaatgcgaggctgctccggcgagaccggcaaaacggcggtgggcggtgagctatatgacgcgggcgccgtcaccgggctcgcagaccagcacgcggcgggccggcgggatcttgctcaccagctccggctgcgccttctcgtactcggcccggacgaacgccg

SEQ ID NO: 14707 - DNA, 564 bp, Oryza sativa
  Clone ID: uC-osflcyp083a02a1
gatgacgcgtcgtagcttggtcctcttagcggcgcctttttttttggttgttaaagggtaagtgcataaaattccaactttatgagaaaactgagtgggcgcacctagaccatatcaaaggacaagctacatgaatgttccttccatgcataccggacatgacacttcattattcaaagtacagaattcacacctagaatcatcaagacaacagttgtgaattcaaagagaacccacaaagtgacaccacacagaggtactgataccattcaagtcctcaaatgggcggtccattactctttctcgccagcttagtgccactctgtgtggaacgtacctggacggtgaatgcgctcataggtgtgtgccccaaacatgtctctctgtgcttggatcagatatgcaggcagccgactacacctggaggtggcaaagtatgaaaggctagcatacatacctggagtgctaatgcgagcctccacagctcgagccacaacccaccgccatgcattctgcctgtgaaccatatgccttgcaatctcctgcccacgatcagattgggca

SEQ ID NO: 14708 - DNA, 204 bp, Oryza sativa
  Clone ID: uC-osflcyp083a10a1
gtttttgtattttaaggggaaacataattacgtaataccatccattttttttattgtcgacgaatttatcagatatgctctagatacatatcttgtgtgtatatagccggagctttgttttcacatatcctcacccaacgataattgtagtactcttacaataaaaccggtcggagagggagggaagagattattacatatgtg

SEQ ID NO: 14709 - DNA, 296 bp, Oryza sativa
  Clone ID: uC-osflcyp083b06a1
atcaggcgttcaaatgcattcaattgatataggggcgaccccataatggtgcacaagcaagggagatgagcaaaaccaggaaatatgggggccctcccaacgacaataacgccttcctcctggtgtccaccctaacaggtcaccatgacactccacatttttggatccggcatcttaatagaaggggacgggggcaatggcagccgcgacaccgggaacgggagggcacctcttgagagcaccggcaccggagaaatcggggtcagccgcatcggcaggtcctcggcgacgggaga

SEQ ID NO: 14710 - DNA, 318 bp, Oryza sativa
  Clone ID: uC-osflcyp083c10a1
ttgtttttttatttttgttgtttttaatttttttttttttttttttttttttttttttttttttttttttttttttttttttttgggggaaggaaaaaaattaacaggtttttttagggggggccccccttttccattatcatagggattggaccagaacccggccaattcaaaaaaaacattggggggccccccctggggaggaaaattggaaaggaaaaaagttttcctttttcccccgggcccccgggtttatggccaaaggattggtccccccccggcccccggtccggccttggggggaaaacggggggcatt

SEQ ID NO: 14711 - DNA, 527 bp, Oryza sativa
  Clone ID: uC-osflcyp083d06a1
ttttgttgaaacaggacacagggatacagataaaagtaaaataaaatatagaatagaacaaatatagattccacgaaagaatgtacagatccatatcgtagttataatacttttgccaaatttgtcaatttgtaacttatcatatagatactatccagatacagattaacatgataacatctcggcacactagataaatattggaagttatagttttcactttttggtcatcctaactgcaaatttgaagagctagcataaggtaaactttacccgtacataaatatgatggccctgtatggtcgagaaggttgagtatggatttcagaagtcagaactactccaatctatctcatttcatccatttccgggacagagtctatgaccaaatatacctaattgacagacataatagactgatatatactcatcttaatgctgattgctcgcaggtcaagccgcaaaatttctaatatgcagctgatgattactggactagttatgcctgcatgccactgtaatccttt

SEQ ID NO: 14712 - DNA, 413 bp, Oryza sativa
  unsure (1)..(413): unsure at all n locations
  Clone ID: uC-osflcyp083e02a1
ttgttttttttttttttttgttttttttttttcatatttttttctttttttattttcttttttttctttttttgtttctgcaacctataagattatgcatcaatctaagaactgtgctataaactgaccacgttatataaaaactaaataaattgaaaattgcatctttcatgtacatataaataattttgcatagcttaacaattcagatatactgcagatttctcttgcttcgcggaagaacacggagatatcagtgtaatatctggagtccagatgcccaccaattcctgacaaagcataaatgtaaagataaatctatttgtttggattaattaaattcaagatgtggcaaaatcgacttaagagttaatntnacaaatcattaacactggtaatatgcaatttgagat

SEQ ID NO: 14713 - DNA, 476 bp, Oryza sativa
  Clone ID: uC-osflcyp083e10a1
ttgttttttagcaatgcatagatattatcataggtttatgtatataatatgtcaatcttgttcggtcatacagacgattcgacgaattttgagcactaggtatttagcaaaactctcatttattccgcaggctctctccatatccaaggaaggaaggtggaaattggggggaaagggagataaaaaaggaagaaaaaaaatgcttcagggaagaactctatacatgtgcactcaaagcatcggtttgagaagctcttttctgaatatttatggcacttcagcagttcagctgctaggcttctggtctgtaccaggtgaggccccaactgatgtcacaaaattgcagactgcgcatttgacagaccttgcgccatactggtacatgagcagcatacggcagttcccgcagtttacatgcgcaacttgatttgcttccatagccaggttgacagtgtgacagcaagaacattgcacac

SEQ ID NO: 14714 - DNA, 487 bp, Oryza sativa
  Clone ID: uC-osflcyp083f06a1
ttttgttttttgaattttttggttttatacggcaattaaacctcgacattttattatatttgacacactggatatatagtcaataaactttaccgcaaattatgaaatgtacaggcactgcactgtaccatacgtagtttttgtgcagcatataaccataggctgtcacgtacgggcttttataccacatactagtccttgaacgcttaataataattaaaagggcgtgcatcacatcagaaaagtttcaacacgcttgcacacaaacacggaattactaggctcactcttggaggagaagatcaatctaatggggcgacttgatctgtgtcgtcacatccgtttttattggttgtcgcatcggccttcaggagttcagggtagccatgtcggcatgaaggcagtcacgcatgagttgttcatctgctctggagtaaacccgatctgcaaggtgggctcggcggcagcttccagggaatggaagaat

SEQ ID NO: 14715 - DNA, 360 bp, Oryza sativa
  Clone ID: uC-osflcyp083g02a1
ttgttttttcaaaaagattgggttgaaacaaatgaaagaatacagtgtgtgttccccgtccacccagttacatacatacatcccaaggagttcatcttctccttttttcaagagaactcagaactgcttggtacaaaccagtactagttacatgatcagtagcaatggcgtcgaattgcaggtattgcagatgaaaccacctttgttcttttccccctctagaataaagatggagaaggaagaaaaaaaaagaaatcaatagtaattacctcccagcattaattggcattggtaagaagagattagatgctgattagattaataatcaagctgatctctactccagggtcgtcgttgatc

SEQ ID NO: 14716 - DNA, 497 bp, Oryza sativa
  Clone ID: uC-osflcyp083g10a1
ttgttttttaagaagaattggtacttcttggatggtgaaaggcgcagtaataagaatgtagtttcacaaaaacatggaagatcagtattgagcatcgacttatttctactcctcaagtaagcattggatgcaacttggtttaatttgatgttaagaaacacaaaatgatgcatcccaacatgggcttcaaatggtttctctcatgcggtaccaaacatccgaagcggattattcaccaaatggctgcacaggcaataattccgctgttggatcaaaggtttgattacccacggctatccaaattaaatctacaggttcaaaatggagagttgatagggtctcgctgcagtgccttctgcacaagctcggtttgctcctgcacatggacggagcagaaacctgttgcggtggctgcagattgggcccttccaacgtattcgatgtcgtctatcgtgccccgaccaagcgccctcatcgcggtcaggaggcgaggattg

SEQ ID NO: 14717 - DNA, 236 bp, Oryza sativa
  Clone ID: uC-osflcyp083h06a1
aaaaaaaacccccctttatttttttttttttttttttttttttttttttctctttttcaaaaaaaaaaaacccttctatttatttccccaaaaaacactcatcttccccccccctccccattttccctcccctaaaaaacccctaaaaacttaatcacataatcccaacaatataccctttcccctcctcattttttccaaaaacttccacttcccctttctcactcccccccccc

SEQ ID NO: 14718 - DNA, 85 bp, Oryza sativa
  Clone ID: uC-osflcyp084a06a1
cagtaaaaattactagaagattcccaaaccaacaaagagaaaaagagaaaaccataaagacaaacacaacaagaaacgaacaaaa

SEQ ID NO: 14719 - DNA, 159 bp, Oryza sativa
  Clone ID: uC-osflcyp084b02a1
ttagtttggcggcctttctttttttttttttttttttttttttttttttttttttttttttttttttttttttttttttttttttttttttttttttttttttttttttttttttttttttttttttttttttttttttttaaataaaaaaaacaaaaa

SEQ ID NO: 14720 - DNA, 337 bp, Oryza sativa
  Clone ID: uC-osflcyp084b10a1
ggtgatggtttaccagatcatctgtatttttttttagaaaataatactactatatcatctatattagtgtaggaaaactggtagcacagctaacatttgatttcaagacagcatcccgaatacattaacaattgacaacatttttttttgttatttctaaacaacaatcctcaagcaaatattggtgtttgcaacctttttcttctcatcatttgtcatcactgtcaaaaacgacttgcctttccgacgaatgaactgcctgttgttttcttggagggagaaatcatcatccgagttcgatctccttgcggccttttggctgggcactggcaccccc

SEQ ID NO: 14721 - DNA, 177 bp, Oryza sativa
  unsure (1)..(177): unsure at all n locations
  Clone ID: uC-osflcyp084d02a1
aacaaaatgtcgatgctgaccacaaacgtcaccattcaagattctacattatatttgtttatacagcaggggttcagagtacaangattggcccggnngtagtatatcaaaccatttgnnnagcaaatacagactgnnagcaaanttgcaacatnnaannntttcgctgttgtttaa

SEQ ID NO: 14722 - DNA, 68 bp, Oryza sativa
  Clone ID: uC-osflcyp084d10a1
gccggaaaattattagcaacgggggtttaagggaaaagggtaatgttcacatagggggcatttagcgc

SEQ ID NO: 14723 - DNA, 178 bp, Oryza sativa
  Clone ID: uC-osflcyp084f02a1
aattaaccatcacgggagcatggcatgcaaatatatttatatgcacacaattgcatgcatatatatcagtaggaagcactaggttacgtgctgatgattacacaaagacacatgcctgatccctttgctcataatttaaattttctttgcaaaatcaatatgttagcccctgttaggg

SEQ ID NO: 14724 - DNA, 221 bp, Oryza sativa
  unsure (1)..(221): unsure at all n locations
  Clone ID: uC-osflcyp084f10a1
aagtcaaatatatatgttttacttagtttaatttgatcccaaatgaagaaaaatactcatcactcatcagtacacgacttctgatagatttagcttctttaattgggcacccagctaactagnctagcctctgacccatattgggntctctcccaaattcttccatggagngataannttagnagtagccaaatttattaaggggggattaaccccaaaat

SEQ ID NO: 14725 - DNA, 271 bp, Oryza sativa
  Clone ID: uC-osflcyp084g06a1
ggctcacattccatcatgatgtttataaatatagtataaggggcaggaaactaatcactgtaactcaactgaaactttaaaccagaagtatctttgcatgtccagacataggagtgagtgattacagggcccagactgttctgaaaccaatagaaaactactgtaaggagcaaattcgaacacaactgagcaaaaactgggggcagcagtttgaagcatattgaatatgggaaggttcttaagaaattgaaaacaaatggaaaaaagttag

SEQ ID NO: 14726 - DNA, 101 bp, Oryza sativa
  Clone ID: uC-osflcyp084h10a1
caagacttgcgcatccttcttattagcggccgtcgacgcgtgtgcgactttccggcctgtcgtactggcagacataccgtaggctatctgactacaacaca

SEQ ID NO: 14727 - DNA, 454 bp, Oryza sativa
  Clone ID: uC-osflcyp085a04b1
cttcggtggaggcgcaccaccaaagtccccacgcgcctcaaactccccaacaagagaatgccagattatccactcctccgccttcctcccctccccctcccccttccaccatgattcggattaccacccacctctctcccaccctcaagcctcctcctcctctatccctccacccccacctccctctccttcgccgccaccggcaccccttctccaggcccatctccgtctccgccgtcgacccgtccgacctccttgccagcgtcgagtccgtcgcctccgccgtctccgtcctcgccgccatcgtgctcgtccacgagtcgggccacttccttgccgccaccttccgcggcatccacgtctcccagttctaccgcggcttctgccccgccctcgcgcgctttcgacttggccccgtcgaagtacgcgctccgcgccatcccgctcgggggct

SEQ ID NO: 14728 - DNA, 380 bp, Oryza sativa
  Clone ID: uC-osflcyp085a06a1
gatctaaatattcaaatcattatattatttatctacatattataaggggaacttgctctccctatctttctcaaacccacatagctatgtacaagttatctaatacagctactgggcttgcttgtagctatgttaagttatacaccctgacactccatctcccatacctactttacaatcctctaatgtacaaaatttcagctgtatcacgctatgtctttatagcagcagaaggcagcataaaaatttccaaggcgttgttcaagtcaagatccctcttggaaggtcaccgagcgtgttagggcagccgggttcccctgcatgaaaggcaagctgctgatcgctgggtgagttgatgcctttgcctcatcctttgactc

SEQ ID NO: 14729 - DNA, 56 bp, Oryza sativa
  Clone ID: uC-osflcyp085b02a1
gaaaaaaaggggtttaaaggggaaaattgccaaaattaaaaaaattggtgggctga

SEQ ID NO: 14730 - DNA, 395 bp, Oryza sativa
  Clone ID: uC-osflcyp085b10a1
gtgggaaaatagtgattttattatgcgggtggagcattcatatgcaaaaatcaaatttatgcatacggtgcttatatcgatcacatacaaacattggaaaataataaaggggaaaatagcaagaaaaaaccaaaccctagaccctagctccggggcccacccactttatcgccggcactagctgccggaggccgagcccaccgaagtcgacgccagatccggcgccgcctggtgctgtgcctcccattggcgccagatccgttgcgtctttgccaaatccatgcaggagggaggcggtggaaccacccagcggtggaggaggtggagcccaagggcgtcgaaccggacggtgcttgccaccgtggcagatctgccgtgccgaaattggatccacg

SEQ ID NO: 14731 - DNA, 122 bp, Oryza sativa
  Clone ID: uC-osflcyp085c06a1
aggaactaactacaaaaaatgcggggaccaggaaccaccgaacgcagcaaaacccggaaacataccagaaggggcagcaatacaggggcagatattacagggggagccgaaaccggatacga

SEQ ID NO: 14732 - DNA, 411 bp, Oryza sativa
  Clone ID: uC-osflcyp085d02a1
tttttttttttttttttttttttttttttttttttttttttttttttttttttttttttttttttttttttttttttttttttttttttttttttattttttttttattttttttttaaaaggaaaaagggggtataaaaaaaaaaattaaattaaaaaaaaaaaaaaaaagggaaaaaaaggccctttataaaaaaatggccaaaaaaaaataataaaaaacaaaaaaaagaaaaggggcggaaaaaatttgtaaaaatttgggaacaaggggcgaaatattggaaaaaaaaagggtgaaaaacacaaaaattaaatgggtatttggtggaaaaaaaaaaaatttgggaaagaaaaaaaaatttttataaaaaaaaatttgtttgaaaaaagaaaaccaaggtttgggac

SEQ ID NO: 14733 - DNA, 137 bp, Oryza sativa
  Clone ID: uC-osflcyp085d08b1
tcgtttatatcctaagcgtcattttgtgctggggggtcatgtagaccatgggagggtggcgccaacctctacaagccacaagaacatgtctgcggctgagagtccctcaaagctgagacgtactttcctatctgcat

SEQ ID NO: 14734 - DNA, 169 bp, Oryza sativa
  Clone ID: uC-osflcyp085d10a1
aataaaaaaaaaaaaataaaaaaaaaagaataaaaaaaaaaaaaaaaaaattaaaaaaaataataagtgcaaaaaaaaaaaagaaaaaaagtaaagttggtttaaaaagagaataagaaaacaaaatgccaataaaaggataacatcataaaatgaagaaagcgacaga

SEQ ID NO: 14735 - DNA, 118 bp, Oryza sativa
  Clone ID: uC-osflcyp085e06a1
tttttttttttgggttttttaaattttcccggttaccaaaataaaaaaaataaaaaaaaatgtattcacaaatgaaaaaagagaatgaaaaaaatgctaaacgcaagaagcaacaagg

SEQ ID NO: 14736 - DNA, 330 bp, Oryza sativa
  Clone ID: uC-osflcyp085e12b1
gttgcgtccgctgagatagcagcgaaaggagatgagacgaagcctagccacacgtcatgcacacaccagtgacagaggtctagctcagcttatcgcagtccatctaggacgcaatatggtaggcagattgaagaaactgccctagacgcggaactcctgactgaagggacacgggggctggtatactcgtggacgtgaacaggccctgaaagctgacctaacggacgatcttatcaggaaggttgcgaaaggtcaggccctggtgcaggcgcttacgtaccaacggattattacacccgagaaccggcagggcttgcgacaccggaacat

SEQ ID NO: 14737 - DNA, 305 bp, Oryza sativa
  Clone ID: uC-osflcyp085f04a1
gggggaaaaaaaaaaaggggaaattacctttaaataaaaatgtttacaccaaaaggggaaaaaaaaggggaccttgaaaaaagggggaaaaattttgaggttaaaggccccttttaattaaaaccaaatgtggaaaaaagggggggggttaaaaaaaaacgggattttagggtttttgagggctgaaaaaaacctgggcttggggtgtaaaaaaaaattaggggggggggcccaaaggggggcccgcggagagcccttaaaagccgaaaaaaggttttttaaaacgggagaactcctttttggaa

SEQ ID NO: 14738 - DNA, 168 bp, Oryza sativa
  Clone ID: uC-osflcyp085f08b1
tcgtttatatgtaaagagatatctgctccttgggaggaataataacgacggaagtacggttataaccactaacatgatacaagaagaggcttaggctaacttccataaaaacttatacatattatactagctgatgatagacctacagcattttaaatagacctgtat

SEQ ID NO: 14739 - DNA, 129 bp, Oryza sativa
  Clone ID: uC-osflcyp085f12a1
attatatatttatttataattttttaaaacaaaaaacaaaaaagtgaaaacaaattaaaaaaggaaaatacgggaaaaaaaaaaggagaggatccaaaaaatacgataggaaaaaaacaggaaatcata

SEQ ID NO: 14740 - DNA, 196 bp, Oryza sativa
  Clone ID: uC-osflcyp085g08a1
aataaaaaaataaaaataaaaaaaaatgaattaacaaatgaacaaaaagaaggaaaaaaaggagaagcggaaaaaacaaaagggaaaaaagtatggtgggtgtaaacacatgattagaaaacaaatgccaatatgaggataacatcagaagtgtagaaagggctgaagattaaaccaactggaaactaacggagga

SEQ ID NO: 14741 - DNA, 424 bp, Oryza sativa
  Clone ID: uC-osflcyp085h04a1
agccaaaggcaaaggaaatttcccgcaaatacttattcatatgttttgacaacattcctcccgacgcatgctcattgcggcagacgcagctgaccacctagagcttttagttcaccattattatttagaccaagcatacgtcccaagatcagaacacatgcttacaagcgaaaatactaatagcctggctggctgcttcacagaataaccaaacgacaacctcaacagataaaaatgccacggaatgaaaacaaagccaggaatcgccaccagaagtcccatcttactcatcaaacactccatcattctcctccaacgcatgctctgcccaggggagaagattgcccagtttaccttccttaacaggagcagggttcaccatattcttagcctcgaagcagtgcagaacagatttgggcgaccc

SEQ ID NO: 14742 - DNA, 142 bp, Oryza sativa
  Clone ID: uC-osflcyp085h08b1
atatccaaatagacagctatcacaacgggggaattttttagatcaagcagtcgttccaaccactacaaaccacaagcactgccttccgcacacggtcatcattaaatgccgaaatcaaaaacaactgaacagctacctaaag

SEQ ID NO: 14743 - DNA, 163 bp, Oryza sativa
  Clone ID: uC-osflcyp085h12a1
gaaccacggaacaacaatattatagtaaaatacaatacagtgaataagtgtgagacgcaacacaccaaattgtgacatggaaaagtggagcttgttggcactacagataggtctcatgaggggactcccaaacattactaaaaggcggacaagttagaagcgg

SEQ ID NO: 14744 - DNA, 152 bp, Oryza sativa
  Clone ID: uC-osflcyp086a04b1
cttgtttcttgaccttgtcaagagtgctggtttcccctctggcaagtacctctttgctggtgtcgcggatggacgcaacatctgggctgatgatctcgccggatttcttaccaccctataagtatttgaggctttggtggggatggacaagc

SEQ ID NO: 14745 - DNA, 451 bp, Oryza sativa
  Clone ID: uC-osflcyp086b04a1
aaacagccaaagagatcattgatattttaataaacatcatgcataaaccacgcaggttatcaagtcagttttaaggtccagcacaactcttgcacactagggactatgacacacaaagagcggcagcattacaaggtttgcgacaacataatagttattcagtattcactcatgcaccaacagaaacatcctgcatggtatcaaaagacccagcataggttacgcaaacattttggctttggttgctccaacactatgcttcagggcctaatagtagaacattatttcttgccgcgcagctttgttccaagagccctttcaagcttcccgatgatctgctggttcggaatagctttacctgactcgtactcctggatcacctggggcttctcattgatcatctgtgcaagctgtgcctgggtcatcttcttgtccagccttgcttgcatga

SEQ ID NO: 14746 - DNA, 539 bp, Oryza sativa
  Clone ID: uC-osflcyp086b08b1
agccaagatacaggagcgatcggctccgcggcgttcgtcgctgtaaaatccattgttcatcgtctccctcaccggcgtttgtgttcgtgagtgtgagagtgttcctgggctgagccaacatcgaagtcagcaactccatctccaaggttctctggatggccaccctcagccccacctcgctgcccaactggaacaggatgcggatctcggtgaacaccatcacgcagaaccgcgccaagtcgctgcggcggctgcttgcgtcactgcggaacacgtactacgtcgacgacgaggtggtgccgatcagcttcaacatggacagccgcgtcgacgcggcgacgctgaacgccgtcaactcctccgacgctgaaccagtactaatcaacaagacttgtccatcgtgatgaacctgcttgtcagcaacacagttgtaccggatgagctacagaacactgtcaagaccaaggaggttaagcagactaaggaaggaagacctgttaggcaccgagtatgtaatcctagagtgagtgggcccggat

SEQ ID NO: 14747 - DNA, 70 bp, Oryza sativa
  Clone ID: uC-osflcyp086b12a1
tttggggggagattaaaaacattaagataataactaatactattccatttacaactagttaatgactgga

SEQ ID NO: 14748 - DNA, 413 bp, Oryza sativa
  Clone ID: uC-osflcyp086c08a1
aaccaaaacataggaggtttcatttcttcttctcaaagtagtgtagcatctttccttctttcaccattacataagcttaagcaataacagataacaaatcctcctcctcctttaggtaaaatattcaaacacaatacccttataagtacttattattaggaaagtagcgtgcatgggcataaatggcagcggggggcaggttaagaatcacaatgctgagcagcgaggaaacaaaacaccataatgggacagagcaaaagcctccgaaagggagcttttaggcagaaggcttctcccacttgaggggctttaccacctcccaggtgaagtttgggtcgtcccttccgaagtgaccgtaagccgccgtcttgaggtagcgtccgttgccgcctttcttgaggtcaaggttgatg

SEQ ID NO: 14749 - DNA, 426 bp, Oryza sativa
  unsure (1)..(426): unsure at all n locations
  Clone ID: uC-osflcyp086d04a1
aataaaccttttgtggttcattgcatttcgaagtaataaaagtaagtttagttacattgcaagatgaccaaagggacattcatcgttataggtagtatagatcaggccggaggctagcaacaacggagcgatatcgatcgagcaagtcgaatcagcacgatcgaattcaacacttcatcccatgcggtccctcgaggcatttcttgaagatggttcccggcagcaattggccgtaggtgtggatggtgtagaacatttcgtccgcgcatccgttgttgacgtcattgatcagcttgttgtgcgggcatgcgaatgtcttgaacgccttacagcacaccttcacccctgtcgtcttgcacttctttcccagctcgatggcgggccccttcatnttgtcgaaccgcaccgggcacaccggcgctagcg

SEQ ID NO: 14750 - DNA, 518 bp, Oryza sativa
  Clone ID: uC-osflcyp086d08b1
tttcaccccttaccctcggtatcgagactgtcggtggagtcatgaccaagttgatccccaggaacaccgtcatccccaccaagaagtcccaggtgttcaccacctaccaggatcagcagacaaccgtctccatccaggtctttgagggtgagcgcagcatgaccaaggactgccgtcttctcggcaagttcgacctatctggcattccagcagcaccaaggggcaccccccagattgaggtgaccttcgaggtggacgccaacggcatcctgaacgtgaaggctgaggacaagggcaccggcaagtcggagaagatcacgatcacgaacgagaaggggcgcctgagccaggaggagatcgaccggatggtgcgcgaggcggaggagtttgcggaggaggacaagaaggtgaaggagcggatcgacgcccgcaaccagctcgagacctacgtgtacaacatgaagaacaccgtcggcgacaaggacaagctggcggacaagctggagagcgaggagaag

SEQ ID NO: 14751 - DNA, 345 bp, Oryza sativa
  Clone ID: uC-osflcyp086d12a1
gggccagtaaaggaaacattatcatcatatcaaggggaaggccataagtcatacaatacacacacacataaaaaagggctgggctgttgatacaatggggcctacgcattaatttatttttagacaagggcaatttaaaaaaacagatggatgccgggccgcctacttttacttggatctggctaaatcggaaaggggaacatttagaactggaaggctttcttcttggacttcccgtccttttccgggttccttttccttttggttggattttccggcaccatgtcgttgaaaatttccttttggttccggagcttatcctcctccgggggttccttggacttg

SEQ ID NO: 14752 - DNA, 414 bp, Oryza sativa
  Clone ID: uC-osflcyp086e08a1
aggaggctccagatcaaagttcaattatatccatttaagtttaaagtctgtaagattcaggtacgaacatgtagtttagatttagtaaaatgcaaacggacacaacatggaccctctacacgatatcatccaggaacaaacttcactacaaagtacaggtacagcctctctctcagacacagcataaataactgaatttagctccaatttaagccatcccgccactagttgccgtcctgattatctggaacaaggatgatccaatgacgacaaaaatgaagaacccaagcaccatgggtccaacagggtagtcattcccctttttcacagtagtctcaggcactgaacccctcttcgggataatcttctggaactttgcgctcttcctgtcagcaagacgccttgaggtagtca

SEQ ID NO: 14753 - DNA, 551 bp, Oryza sativa
  Clone ID: uC-osflcyp086e12b1
tctttgtagagagcattgtgattggtatgccacacagaggtaggctgaatgtcttgggaaatgtcgtgaggaagcccttgcgacagatcttcagtgagtttagtggtggtaccaagcctgccgaagaaggggagggcttgtatacagggactggagatgtcaaataccatctaggaacttcatacgataggcctaccagaggtggaaagcatatccatctgtctctggttgcaaacccaagtcatttggaagcagtcgatcctgttgttgctgggaagaccagagcaaaacagtactattctaatgatcttgacaggaccaagaatttaggagtcttgttgcatggtgatggaagcttcttagggcagggtgtagtgtatgaaaccctgcatctcagtgctcttccaaactacactactggtgggacaattcacattgtggtcaataatcaggttgctttcactactgatccaagggcagggaggtctttgcagcattgcacagatgttgctaaagcattggatgctccaatttttccatgtgaatggtga

SEQ ID NO: 14754 - DNA, 397 bp, Oryza sativa
  Clone ID: uC-osflcyp086f04a1
acgcaccaagagagaaaatttaatccaaacagattaatccacatagtaaagtctcaggttttactacaataatgccaatcacggaaaggagcttagcatagtcaagctgacaacatcggtaagatgcatttccatcctccaatccaagcagagtggatgacgagttggttgggcagcagatgagggaaaaattctagcatatgaacttcagcatgggcagtcagttgtcccggtaaaaaaaatagctatggctcctaaagggactccttgatcagcttttccgtgagggatttcgggagtcccattacactgtcgaaggtgccaacaatagcttccacaagaggtgaagtcagcgggggctttaccaggaggccaccggtaacatagaagacattgc

SEQ ID NO: 14755 - DNA, 444 bp, Oryza sativa
  Clone ID: uC-osflcyp086f12a1
gggaaatagctcgaatcattttaaagatgaatggcaagcgtttgatatccagattttttttcaaatatggctatctgatagttatacaacatacaaatgaggatagccagagagttcatagacataaaaatggattttgcaatcatgtgtatcccttctactttcattctacgccaaaaagaagcacatgatgctacactgacaacccagatcatacaacatattggaatttctcaagtctgatccgtttggagttggattctctagtctttactggcagctgtcccagtttcgcgagtctatttcttcgccttctttgttctcttcgtagtttgggttttccttgtaaccttcttagtggcctttcctgcaaccttcgccttcttctgtcccttccccgccggtttctcagcttttcttttggtttttgccttaggttgatct

SEQ ID NO: 14756 - DNA, 412 bp, Oryza sativa
  Clone ID: uC-osflcyp086g04b1
gatatctttcgttgtctcctgcagctactcgccttcttgcgccgccgccaagacgagtcgcggctgaacagggggagggccgggcggcgatctccatcagagcggaggggaggcgatcctggcggctcaactattggatagcaacattgaggattgcggatgttaagaattttgatatcactagcacgattgcccctctcgccgactgttgaccaaggagaacgtccaccacgccggggtccaggcttctagaatgggagccactattatgtgcctaacactacacgtccagggctatactggatttgaagagaagaaaaaggggtgttcaagaacataggaaagggatgggacttggaagcataaatggactgagggcaagcaccttaaacgtgacattcttgcttttttc

SEQ ID NO: 14757 - DNA, 396 bp, Oryza sativa
  Clone ID: uC-osflcyp086g08a1
gttccaacaaatatatatacagataccccatccaaaccggaagctcttgggctacttttcttaaaacaccagacacacatacagcgcatggaagcttcgtgtgatatcatgcactaccaaagacaaagcaacaggaagcgtgtttggaattacacagatgatccaggacctttaccctggcgcacatggtaaacaaattgtacttcatggtagttcaatgcacagggtcactctgattctgaagttccagttctattaacccaacttgaccgccttgaatgtgtgccagctcgtcctttcatgagatcagctggaaggtcgtccctgcttagatctggggaagcatgcggtagtctacccttttttttaatccaaaaggccccgagacctggtttc

SEQ ID NO: 14758 - DNA, 223 bp, Oryza sativa
  Clone ID: uC-osflcyp086h04a1
tttttttttttttttttttttttttttttttttttttttttttttttttttttttttattttttttataataattaggttcaataataaataatttatatttaaaaaagggaaaattataaaaagtttaatttcaaaaaattttatatgctgaacaatttttttgtcaataagggattaatggtaatttatttaaattgtggtgataaattaaaaggggtttt

SEQ ID NO: 14759 - DNA, 437 bp, Oryza sativa
  unsure (1)..(437): unsure at all n locations
  Clone ID: uC-osflcyp086h08b1
ttgtaagcgcagcaggaatgtactctccattgtcctatgcatttgctcaggcaagcgtggagttcatttacaatatcatacaagggattttgtacacggtcatcatctatgcaatgatcggatacgattggaaagctagcaaattcttttattttctattcttcattgtttcaagcttcaactacttcacatttttcggaatgatgttggtggcatgcaccccatctgcactgcttgcgaacattctcataacctttgcactccctctttggaacttgtttgctgggttccttatttttaggaaggcaataccaatttggtggaggtggtactattgggcaaacccagtatcctggacaatatatggtgtcattgcatcacagtttggagggaacggnggatcgatttcagttcctggtgggagccatgtagcaatg

SEQ ID NO: 14760 - DNA, 416 bp, Oryza sativa
  Clone ID: uC-osflcyp086h12a1
aaagaaattggcacatctatttattggaaaattattgatgtatatattttataaaataataaaaggtgaggaaagcttcctgcccagtttttttggtcctcagttcggctccttcagtccatcgtttgatctcttctacccatctgctcaatcaattactggctgtcctccctcactccacccgcactaaacctgatgttaattcatcaacaactaacatatttccctggaagtacgtgtactcgcacgcagttaacgatgatcccttgttagagagagatcgtgccgatgccgatgcagatgcaggcaccggagcttcaattcacgaggagttctgaattccggcctcttcatcgcccgctttgccctgcttgtcactagctccggcgacctgcgccgactcctgtgcctccttg

SEQ ID NO: 14761 - DNA, 134 bp, Oryza sativa
  Clone ID: uC-osflcyp087a06a1
attataaacactactactttattgaatcatctccaagaaatgagtttaagctttacaagaatatattctatttatgtgaattactaatatctttacctaaccaaaagaataattcattgttcacgatttttgag

SEQ ID NO: 14762 - DNA, 219 bp, Oryza sativa
  Clone ID: uC-osflcyp087b02a1
gaagtgttaatttaaatacttaatagtaatagactctatgatggtgtatttcaaaatgcaccaaaggcgttaattcggccgaacattaattaagtttcacatattcgggctccattccggttttttacaatctatcgatttacagagtttctgaagccttccggaataacacttggcacatcatgttactaatacttaacaataggttgcatcctaaaa

SEQ ID NO: 14763 - DNA, 447 bp, Oryza sativa
  Clone ID: uC-osflcyp087b10a1
ggcctatagtttatatggatctgcctgatccttattattatccactttgcatcatttgctacaaattgtgcaatacatcatgggtctgttccatatagcagtatatatttgtttcaaaaagaacaaagtccaaggctgatcctcttcttttataggaaaaagagtttcttctggtccttttggtgcagggtttgagaactttactggatggtccaaatgaaggtacaatcaaatatggcccactgaattctcattgagaagcagttttcagaatgggagtaacacacatgctaggtaaacatcttggaaggatcacaggtataaactaaagatactgcattaaaagaacttgagtatacctttacataaaaggagggttagttcacatgacaatcttaggcttcaggatgcttgacttgatctctttgtgcgggtagaacaacaccg

SEQ ID NO: 14764 - DNA, 161 bp, Oryza sativa
  Clone ID: uC-osflcyp087c06a1
ctgaaaattacacattcagcatgatttcagataaacataccactaagggacctaccatattgatcaatttatctaacaagaacctgaattccatcatggacaattcacagtattgagtaacctttaaaacaagaatggctatttccttaattgaaacttcc

SEQ ID NO: 14765 - DNA, 399 bp, Oryza sativa
  Clone ID: uC-osflcyp087d02a1
gctaacgtgggagtaatattattatgtccatctgcacaagggttcttttaaccctcaacagagcatacttgtagaatcaccactaagatatatttacaaataataacaataatatttggcttttcttaacccttaggagaacgagagggcacacagattctgtacaaccccgatacaagggaggaaaaacagattccgctgcttgggctgctactgtggttgatccgatgatggtttttaggaaattgtagcactccagcctgcaggcattttttctccgtttacagggttcgaactggcatcggtagaagctttcatccatgccatcaactgccacggtattctttctcatggccaaatgcaacaataatattgctccccctcgtggagtctgaactg

SEQ ID NO: 14766 - DNA, 415 bp, Oryza sativa
  Clone ID: uC-osflcyp087d10a1
ggggagctcaattgaaagccttcggattagcatttgggggctttttaccccaaaaataatagcacaacaaaacttagcttttcaattacttaatttaggatagttgatcaaataatttcagctatccctagccctgtagcacactcatggggaatacgtagcagcttaatcattccaagggcctgcctcccttttcggggaatgaattatggcatggatattctctggagaagaaccccctgcagccattttatcctgccacttgattgattatgccattactttccaaaattacaacccctaaactacggccttgggatcattgggttgccattttcccttggctttgaaaaaccctgtccatgtccaagaaattccgccacgtttttacgctttcctaaatttttttgctctc

SEQ ID NO: 14767 - DNA, 430 bp, Oryza sativa
  Clone ID: uC-osflcyp087e06a1
tttttttggctcaagaggtttgtattgcatggtatattgggtcaagctatccatagtgttgtacattctgtgatcaatataatgaactcctgaagtgtgaaagaatggattgtagcccatggaagcaaagaacatgactttacaaaaggggaggaaacaatgaaggcaaaaaaaaaaaaaaactgtggggggttaatactgcatcaaaccaaggggggggggggggttcaccttgagcgtctaaagcgagccgccaggaagcaatgcttgaatcagacagaaagaggagtcccccaaaggctttggccaaatctgagttggccaacccccccatggctgccggaccttctctggatgcaaaaccctgaacattcaaacacttttgccgggaatattcaggggaaagaactttgtgcgcccgtgagatttt

SEQ ID NO: 14768 - DNA, 324 bp, Oryza sativa
  Clone ID: uC-osflcyp087f02a1
acaaaaaaaaagaaaacatgactcgcaaaagtcccattacaataaacgatcctagggagggggaacatttccaatttttttttggggcctaccattaaccaaaaacttagcaggaaaaaagggggaccatggatgccatgtttaaaacaggagcccccggaaaaaagcataccaagagttcaaaaggggcataaaattcaaccctgaaacaaatccaaaaacattttgaaaggacaccaaaaatcccaaaaagaggagtttacatgaaaagggcttgtgaaaaccgaaaaaaaactgccttgtaaaaaagcgattaaaaaacca

SEQ ID NO: 14769 - DNA, 462 bp, Oryza sativa
  Clone ID: uC-osflcyp087f10a1
aatataagactttctagcattgcccacattcatttagatattaatgaatctagacatatgtatgtatttagattcataccacacatatatactgagaccactgaggacagtaataggcaaatcggggacgatcatcaatgcaaaaaaaaatacatgaggatgaaacgaatcgctacatgagaaaaaaaaagaaaaaaaaaagaaagaacagaacaaacagactggattagtattttggcttgtgaacctgctgcgttgtccggtcataccaggggatggcaagcgagaagcatcgccaatgtgacgacgatcgcggcatgagcctgcatcctgctcgcgagcgacggcgcctgagctgttcttgcaggcggcagcggcggctccgccacgtccgagcccgtcaggaggggcatcggcgacatcgccggcggctgcgccggcttactgatgatctgcagcagg

SEQ ID NO: 14770 - DNA, 453 bp, Oryza sativa
  Clone ID: uC-osflcyp087g06a1
ccatcacagcatgtaatcactactgtccacacaatcaattaattcgtatgacggactactgataatgtcaaacagaaatggctcgttctggaacaccgttatttctgatactgcctgttacaccatactgtaatgctagcattcaaaatgaaatcaggaatgtagatataaggcagtgccgtacattagaaaggatagttttactttgtctgggaatcaaaagataatctgaatcaatatagctaggattatttctgagatgcagctttagcagctgaacacaagagcaaggagaactcttcagaggtagcaatcaaatcatttgcccatttcccagacaatggcactgtcctctttgatctttttgtttatccaaacctcaagcagcatccctgcgccaactccagcagcacacacagcgccatagattgccaatgcagaaggcaaagatcg

SEQ ID NO: 14771 - DNA, 394 bp, Oryza sativa
  Clone ID: uC-osflcyp087h02a1
aaatacttaatagtaatagactctttgatggagtattacaacatgcagcagtggcattaatacgccagtacattaattaagttacacatatgcaggctccattttggtttcttttaatttatcgtattacagaatttctgtagccttgcagatgatcacttggatatcatgtactagtaattaacaataggatgcatacaaaagatggcccaacgacaacagaagatgcgtgcatctgacattgtctggccttatttgttggtagtactccaattaattaacaagagatgatgcattcttgtgccttagtttcttcacatgcttggctttacgttgagcctattcgcaatctttacccccaacgactcatcacactgggagaggtagttgaccc

SEQ ID NO: 14772 - DNA, 462 bp, Oryza sativa
  Clone ID: uC-osflcyp087h10a1
aaattccaaattcactgttttacatggataaatggaaggaacaggcaaagaattattctgcatattacagtcaggctagcttcctaagcaaagttataacagcacagctattgtacatgaccagcaactagactacaagtcacaccaaagtcaagcacaacaactaggtgtgtgtggctatcaaattgttaacaactcttgtactacccccaggtcaccatgttcattgttgcggtgccctcattgtacagtacccaacacagctccaaacggcaatgttgggctagaaagtcctgcatccataacactaacacaagcgaccatcacatctggtccgctgaattacttctcgtcaccatcagcatcttcctttgaattttcctccttagcatttttgtctttgtcatcttcagcattgtcttcctcaccttcctcatcatcagacatactatttattacttc

SEQ ID NO: 14773 - DNA, 457 bp, Oryza sativa
  Clone ID: uC-osflcyp088a08a1
atcaacatcgatgtctccctttcgcccttggagcagagcaatccaacagcaaacagggcgatgagacccaaagcaaaagaaatgaaaacgctaacaatttcagctgaatcttcacagcaactatctaaatgttgcaaaactgcaatatgatatacatttctgggttctgaagctatgcttggtgagcaacatctattccagcctcggtaatgagctgttctgtcaacgaaaagagcccggcaatttccttttcagcatcaagaatcatatccatttccttgtttggtttggtcttggaaacaattctagtactgtttacacttggcgatgcaaccagattgatgccagaatcagttttgccacttctcaggaatcccttagccatatctgcaagtttcttcaatgtagtagtagcagcaagtgccttcaccttcgcagcttcagttttgaagatttt

SEQ ID NO: 14774 - DNA, 123 bp, Oryza sativa
  Clone ID: uC-osflcyp088b04a1
aattattctatatatttaataaaattataaattattattatactataatataatcgaatataaattgtttgcctgaacattataaaatctttcttattgcacgattgtgaacaaatgctattt

SEQ ID NO: 14775 - DNA, 198 bp, Oryza sativa
  Clone ID: uC-osflcyp088b12a1
cactggtacctatcaacgaagggcggcaagttactccgaaggacgggaaacatcatattacctttccagcaggcatttgtactgagattgacacgttcaggagctgatccagaccgatgggttaattagacacagaactgattacactgtcaaatgatacgtgttcctatcttagacttgggagcagatggtactaac

SEQ ID NO: 14776 - DNA, 295 bp, Oryza sativa
  Clone ID: uC-osflcyp088c08a1
aatcagaataaagtataatcatgtaccaaacctccatattaaatagacacctagagccataaaaggtatatcattttttgaaaagctactagtaatttctacttgagcggatacaactaaaaccgcaaagaccacagatgtatatcacaaaccgacaaattaaaaccatatgttcatccggagatattacatccccaattttcgagaccatccatcctttccgaccaggacgcatcgcaggtcatcctcgttaagccctgaacgatataagggcaataaggatccatgaacagct

SEQ ID NO: 14777 - DNA, 103 bp, Oryza sativa
  Clone ID: uC-osflcyp088d04a1
aataaaagcatacataattttaatacattcgtttaatggaatataaattgcatgtttgaacaatagaaaatcaatcttagtgtatgaaggtgaacagatgctc

SEQ ID NO: 14778 - DNA, 441 bp, Oryza sativa
  Clone ID: uC-osflcyp088d12a1
ccgtgcggccatggactctaaaaggataacaaaacatacgtacttaactctcctatagttattccagaggccatccgctctagatcaaacataatgcaaagttgcaaacacgccggattactccaaaccccaccccgacatgaacctgcacgcatgctcgcgtgtacatcgcatcgaatccgcctcacgtggcgagtacgttcaagtacagaggatcgagaggccgcctagcctaacgcatgacgtggccttcgttggccttcttgaagagctgcgcctgagccgcggcggcgtggctcgcctcctgagctgagcgcggcgctgaacgcgtccttcacctgctgcgtggtgaaggggaacctgctgttcaccatggagttgagaagcgacgcccctgccctcgcggttgagctcgcccacgcccgtcttctccgcgtagtt

SEQ ID NO: 14779 - DNA, 280 bp, Oryza sativa
  Clone ID: uC-osflcyp088e08a1
aaaattctaaaagtaattatgatgaactaataccaaatctgttattttaattacacacaaaaaggccataaatacatgtaggtttaagaaaagttaaaagtcaataattggtaatagtatataaatagttgcccaaggacaaacaatttagatcattacgggaggcatccaccccaaattttcagacaaaagtggcatatcgcccactctatggatcaaaaattcataacaggcggtctgatatgattttcatggctgctagcccaagaaccaaatcaag

SEQ ID NO: 14780 - DNA, 104 bp, Oryza sativa
  Clone ID: uC-osflcyp088f04a1
aattagagacaccttattttagtcaactacaaatgcatcattcaacttgatgcattgctttgaacactagcttgcctttactattaaatgaccgtaaacagggt

SEQ ID NO: 14781 - DNA, 442 bp, Oryza sativa
  Clone ID: uC-osflcyp088f12a1
aaatacttaatagtaatagactctttgatggagtattacaacatgcagcagtggcattaatacgccagtacattaattaagttacacatatgcaggctccattttggtttcttttaatttatcgtattacagaatttctgtagccttgcagatgatcacttggatatcatgtactagtaattaacaataggatgcatacaaaagatggcccaacgacaacagaagatgcgtgcatctgacattgtctggccttatttgttggtagtactccaattaattaacaagagatgatgcattcttgtgccttagtttcttcacatgcttggcttcacgttgagcctattcgcaatcttcacccccaacgactcatcacactgggagaggtagttgacccagatggcgcggagctcaggggagaccttggggtgcgcgagctcgccgg

SEQ ID NO: 14782 - DNA, 394 bp, Oryza sativa
  Clone ID: uC-osflcyp088g01b1
gttgttggggagcatgggcagcaagtcgtacccgacggtgagcgatgagtacctggcggccgtgggcaaggcgaagcgcaagctccgcggcctcatcgccgagaagaactgcgccccactcatgctccgcctcgcgtggcactctgttggcaccttcgatgtgtcgtcgaggaccggcgggcccttgtgcaccatgagaagacctcggcgagcagtcccacgccgccaacgccggcctataccttggcttcaggcttctcgaccccatcaaggaccaacttcccatgctctgctacgccgacttctaccagcttgctggcgttgtggccgtcgaggacaccggcggacctgaggcacccttccatccgggcaggcaggacaagcctgagccttc

SEQ ID NO: 14783 - DNA, 222 bp, Oryza sativa
  Clone ID: uC-osflcyp088g08a1
aattctatcttgaggttaaaatggcaacagtgcatttgtttcaaatacaaaggtttccagcacgacaaaaagggtcttgaaagtggatacagatttaattgtaccatgaaaataaacagattcactgccagactatacctctggcaagactgcgcgcaactaccatgagtcctgactgtgagaggacaaaacacgcaaactgaggaccaaacctttcaaaaa

SEQ ID NO: 14784 - DNA, 103 bp, Oryza sativa
  Clone ID: uC-osflcyp088h04a1
agagtggatagaaaatttttttatttccattcaaagcaacgtattctccagtttgataagcctaacatagaggtccgttgccacctgttgatacggacacgta

SEQ ID NO: 14785 - DNA, 125 bp, Oryza sativa
  Clone ID: uC-osflcyp088h12a1
aatctattggaggctcctttagaagcagcaaacattttgtagcatggcggagccacctcccttgccttccccagcagatggccggagaaatggtccccccagatgtcatatgtgaagtcttttct

SEQ ID NO: 14786 - DNA, 53 bp, Oryza sativa
  Clone ID: uC-osflcyp089a08a1
gggagggaaaaaaaaaatttttaaattttttttaatatttatacaaacttttt

SEQ ID NO: 14787 - DNA, 348 bp, Oryza sativa
  Clone ID: uC-osflcyp089b01b1
ttactactagccagtaagctagctaactaactacgtggctatggcccccaccgtgatggcctcctcggccacctccgtggctccattccaagggctcaagtccaccgccggcctccccgtcagccgccgctccaccaactcgggcttcggcaacgtcagcaatggcggaaggatcaagtgcatgcaggtgtggccaattgagggcatcaagaagttcgagaccctatcgtacctgccaccactcaccgtggaggatcttttgaagcagatcgagtacctgcttcgatccaagtgggtgccttgtctcgagttcagtaaggttgggttcgcttaccgtgagaaccacag

SEQ ID NO: 14788 - DNA, 259 bp, Oryza sativa
  unsure (1)..(259): unsure at all n locations
  Clone ID: uC-osflcyp089b04a1
gaagttaaagagtaaatattttatttgcacaattgataccagtttagtacatttgaagagagacaatctatcttaacaagaggtttgaagcatggacatgtacgggctgtgcagggaacaacccaacagttttcagcattgtgagcctccagcaatgaagatacatatttctagcctggactcgttgttccgtttttgcttgatcattatgaatttgtaaggttttaacgnagaaatcctgcattaaccgttcttagaa

SEQ ID NO: 14789 - DNA, 120 bp, Oryza sativa
  Clone ID: uC-osflcyp089b12a1
gggaacaatcgaatgctatatatcgccccataaatgctcgaagaaaagcgaaaaagtacaagggcgattttacagggctttggtatgttaagcatttttttatacaaaaaggtcagaact

SEQ ID NO: 14790 - DNA, 255 bp, Oryza sativa
  Clone ID: uC-osflcyp089d04a1
cagaagttcagcttgatactatcacacacagtacatactgcagatttgcagaacaatggacggttgacacagttcacatggagaacatcaggaccaaagctagcacaggcgttacataataacaccaccttataaagtgcaccaatatatgctccaccattcgcccaatgcgatcactatttagtaggaaccttgtttggagacataacgtattcctcttaaaccttgctaaaaacaaccacagatggaaagaaa

SEQ ID NO: 14791 - DNA, 91 bp, Oryza sativa
  Clone ID: uC-osflcyp089d12a1
gccaaaaatttttggataaaattgggtacctacattgacactacattaaaaaaaaatttccgaattctacagtcaaaactgtgactggagc

SEQ ID NO: 14792 - DNA, 171 bp, Oryza sativa
  unsure (1)..(171): unsure at all n locations
  Clone ID: uC-osflcyp089e02a1
ggcaaccaaaaatcgatttcagatttattgacaataatacaggtatgagagtctgaaatcatttctaaccacttacaacacttacaacagcggctaattacatgcgcaacttattcgaagaatcactgaaaattcacatttttcctaatncaaaaacattgggcaagttcg

SEQ ID NO: 14793 - DNA, 88 bp, Oryza sativa
  Clone ID: uC-osflcyp089e07b1
tataaacagagagagcaacgtaagcattggggatagtacttacagcgaaaagcctcaaaacactactgggtcagcaaatataacgttc

SEQ ID NO: 14794 - DNA, 142 bp, Oryza sativa
  Clone ID: uC-osflcyp089e10a1
tttttttttttttttttttttttttttttttttttttttttttttttttttttttttttttttttttttttttttttttttttttttttctttttttttttttttttttttttttttctttttcttttttattttttctttt

SEQ ID NO: 14795 - DNA, 276 bp, Oryza sativa
  Clone ID: uC-osflcyp089f03b1
ttatgcgctcactctcgcgcgcgcgcacacactcgcatcgtcgcaccgatcgcggcggcgacggcgcagatctcctccgcggcggcgtctccggcttgcgctggttcgtcgtcgtctttctggttcggtgactctcgtgcggatctgatgagcttgttgttgtcgttgattcgtttctttcctttattttttattttatttcttctttttctttttctcttcttccttctcctctcttattatttttcttttttccttttctttttcttttttttt

SEQ ID NO: 14796 - DNA, 87 bp, Oryza sativa
  Clone ID: uC-osflcyp089f06a1
attaactctcaacttttttttagaactgtagctaatttttatacactcatcacgggggcacgttgaatgcactccagataaaactgg

SEQ ID NO: 14797 - DNA, 125 bp, Oryza sativa
  Clone ID: uC-osflcyp089g02a1
ttttttttttttttttttttttttttttttttttttttttttttttttttttttttttttttttttttttttttttttttttttttttttttttttttttttttttttttttttttttttttttt

SEQ ID NO: 14798 - DNA, 328 bp, Oryza sativa
  Clone ID: uC-osflcyp089g07b1
tcggtactagactggtctggttgagctgtatggtcgcaaccctagcctgcaagagctggttaaccttgtggtggtatgtggtgaccatggcaacccatctaaggacaaggaggagcaggctgagttcaagaagatgtttgaccttattgagcaatacaacttgaatggtcacatccgctggatctccgcgcagatgaaccgtgtccgcaacggtgagctataccgttacatttgcgacaccaagggtgcttttgtgcagcccgctttctacgaggcattcggtctcactgttgttgagtccatgacctgtggtcttccgacatttcgc

SEQ ID NO: 14799 - DNA, 437 bp, Oryza sativa
  unsure (1)..(437): unsure at all n locations
  Clone ID: uC-osflcyp089g10a1
aaagataagattatcccagcgtgtcatatgatgcagaaaacagcccaggtttcttttgagtaagaaagggaaacaaacaggctcaatctttctgaaggtccaaaggaggggcacaggaagaaacgggnaaatcaagngctcagtgccctcttagttgtacacccatattacttgnnggcgttgctgctgtaacttttttggttaacccttgtattctacccttatttcacnnncgcgtcccaagaaattcctttcttcttgttccaccgtctttccttgcgtagcccgcggatgggcggtacattgccaggccttccgttgcacacaccttccgtaatgttcgggccccagttggaggttggggccagaagtgcgagtcgagccaggctccaaaaccgggatgttcccggctcgccagtttcatggtgccgagtgtg

SEQ ID NO: 14800 - DNA, 165 bp, Oryza sativa
  Clone ID: uC-osflcyp089h06a1
gctcaggttggtcatgcatcaacaacgtgaaaatgtctagacattacagggagaattacatgaccaaagaaaagacgattcatcacaggagtcgcacaaaaggagaacaaatttataggttcattacctgatgcctatgaattaatggcccttaaccttgaaaca

SEQ ID NO: 14801 - DNA, 57 bp, Oryza sativa
  Clone ID: uC-osflcyp090c02b1
ttagattagagattggtgtggtcaatgcacactgttgactatatagaaggtcttgat

SEQ ID NO: 14802 - DNA, 111 bp, Oryza sativa
  Clone ID: uC-osflcyp090c10b1
gtgggttagagtttggtgtaaccatagcccaccggtgacaagctagagggggtacacgacaaatgatgggaacgctcttgtctaatctagaagccagatattctaggcacc

SEQ ID NO: 14803 - DNA, 88 bp, Oryza sativa
  Clone ID: uC-osflcyp090d06b1
ttatagtagaataagcagaggagcatgcatcaagggatcaattatggcgtactcgacttcaataattcattcggcgtttgtttattat

SEQ ID NO: 14804 - DNA, 51 bp, Oryza sativa
  Clone ID: uC-osflcyp090e02b1
tcgttagagaaaagcatgctgagaagaaaacaaagttatataattaatcta

SEQ ID NO: 14805 - DNA, 316 bp, Oryza sativa
  Clone ID: uC-osflcyp090e10b1
ctgggctgggcaatggtgggccccacacatcctatctcctacacccgctacgccctgtgtgtctgtctcgcagactggcatccgtgtttttcccacccaatctcgacggcgagctcgagcacggcgcgaggaggcacgggaaggagcactgctacgatgcggtgacgacagtgccagccgcgacaatggcgcccgtagccccaggcgatggtggacaacggcgacgacaacgaagagaccgccatccgtgcgcgcatcctttcccatgcgagcggcggtggtgtccgcagtcgctcggttcttctccttgccgctt

SEQ ID NO: 14806 - DNA, 102 bp, Oryza sativa
  Clone ID: uC-osflcyp090g10b1
tcgttccggaacgcgttcctcatgctctgcgcctgcgcgcaggagcgcgccgtcgcgtacctgctcaccaacgccgagcgtgtcgtctagtgttatgattta

SEQ ID NO: 14807 - DNA, 412 bp, Oryza sativa
  Clone ID: uC-osflcyp091a02a1
agggaatatgcttattttaaaaaataaaaataaagagcaacacttatgttagtacaatgcagcactgaatagtactacattactaaaactatatactgcaggtaagcaaatcacattgcatctaacttttcttgcaaaaagtaaactgtgtacatttctgatattgttccaggagatccactgggcaattagtatctcaattgtccgcagattcttctatggttcgtcgactaaattttctgtttgacttctaccataattccatagatcatgaagttcacctctaaaccaaccaagtataacaataagccctaatgtacatggaacaaggtacagcagcgcaggttgaccatgcccgtccattaggaagagcgcaagataggtaagggaaaggccaacagcatatcccacc

SEQ ID NO: 14808 - DNA, 569 bp, Oryza sativa
  Clone ID: uC-osflcyp091a02b1
gcgtgacgcggcgacgccctatggcgacccaccacgcccgtcgtctacccgacgacgacgtcgtacttttgctagtactactcgattgtttgtttatggaacaataatatttaaagtaataaatataaattataaattatatatttaaattttattaaaaaaaataataatattaatatatataataaaaaaaaatataaaattatcattttaaataaaatataataattaatttatttttatataattaaaataaatatatttaattttattaataattaataaaaaatatatttttaataataaataattaaaaatatattaatataaaataacatataataatatataaataatatttttatatttttaataaaataatttaaaaatacaatattatattaaacataaaattataaaaaaatatattaatttttaatattaataaaaaattaatataattttattaacattaatatattaaaatatatatattaattatattaaaattttatatataaatattaaatatatattattttaaaatactatataaacaattaaatata

SEQ ID NO: 14809 - DNA, 364 bp, Oryza sativa
  Clone ID: uC-osflcyp091a10a1
gaacccatacaaatatattaataccgtatgtacaaaatatctaaacggcagacagttctgtttgcaaggcaagagtaatttgccgggggcgctatgtgataactcgaccacaggaggaccaatatacagttgaacccacacgcaccttcgcgggaaaaacaaaacgtttttaacaaatatgaaacaaattcttgaggcacaaaagtttaatgaaaaattttagaaaatattataccgggaaaattgaaaggacggctaacaattttcccatttccctagtcaagggaaaactggctactacatatccaactggccagcttccatatgtttatggcaaacccccttgttaaagaattattcaagg

SEQ ID NO: 14810 - DNA, 182 bp, Oryza sativa
  Clone ID: uC-osflcyp091b06a1
gttaactatcctgtttaagtgtccatttattacgctcacaacacatcctgatactccgaacgccattgctgggctcgggacgcgatgcggacacagatccccactacaccacttgaacacaaggcatcctgatacacgaggtttcaccctaagtaagtcggggaatctaagcgcgattctga

SEQ ID NO: 14811 - DNA, 314 bp, Oryza sativa
  Clone ID: uC-osflcyp091c02a1
aaggaaaaaaatttaaaaaaattaaaagggcaagggaaaaaaaaatttaaaggggaaaatttaaaaaatttaaaaaaaaaaatttttgggaaaaaaaaaatgagggaaccccaaaaggggttccaaaaaatttttttggaaaggggggatttttttttttgaacccagcgggggtaaaaaaattgaaaaaacctttaagggtttaaaaggggggggctttggggttttttcttcgggggtaaattaaaaaagggggctttttgagagggggccaaaacaaaaaaggggtttaaaaaaagggggggagtttagaa

SEQ ID NO: 14812 - DNA, 289 bp, Oryza sativa
  Clone ID: uC-osflcyp091c02b1
ttttgtgccgccgccaacacacaggggagggcgcgccgatctccatctggctggcgatcgagcagagcaggggatcctgttaaaagcttccatccaggaatggcaatggtattgagaagagtactgaaacatggtgtaatcccaagagatgcagctcaagtagttggcataagaggatttgcatttgcaagcaaggcaaagaagggcggaaagggttgcggacgatgctgttaaaacccctgtgcttagtcaagttcttaagagtacaacagtgttttggggcaatata

SEQ ID NO: 14813 - DNA, 414 bp, Oryza sativa
  Clone ID: uC-osflcyp091c10a1
agcatggaaaataagagagtagaagttaggaatcgtagttccgaacacagccttacatatttaaatacaataaattagggaagtacatggaattagtactctcaattttttttccaaaacagtaaaattgaattactgcatctataccttgaatgcagcaatgtcgttcatgaaacgcataatctttgcacaagctataacggcacttgaacgtactgttgtcaattcaaatgattccttcgttactgcatcaccctggccaactgcagcagtcacacagagtagtggaacagtactggacagggttgacaaagcaacccgctccttaaatgctggcttgtaattttgatgcaaccattcaaattcttgcaggtaatacgtggatagattttggaactcttttttcatgcaggt

SEQ ID NO: 14814 - DNA, 442 bp, Oryza sativa
  Clone ID: uC-osflcyp091c10b1
tcgttagtatcagtgaactgctattgccctcccaagggaaatatactagtatgtcaacttccatccctctccctttcttcttctctcatggtgttgtgcatgctaggataggccatcgtccaatccagccatcggttgggcttctttctgctggtgccccggcaaaagtctccttccgacgacaaagcagtgcgcatcgacatgctgcacatgttgtgtcctcagaatcaatcactcctgtaaaggaagtatctagctttgagccctctgtatgggggggatttctttatcaactttcaccccattccccctacataaaatccgctgatttttatcacttcaaatcgctctcttttccttaatttcgcctctcctcgatattttttatttttctttcctacgcttcccaccctcctatacttcctttatcatcttttttcat

SEQ ID NO: 14815 - DNA, 75 bp, Oryza sativa
  Clone ID: uC-osflcyp091d06a1
aatattaatgtcaaggtacccatcccggtacgaaaaaaaaacaaacccttaactttaaggaaacagtgcaaccgg

SEQ ID NO: 14816 - DNA, 406 bp, Oryza sativa
  Clone ID: uC-osflcyp091e02a1
gaatataaagaagcaaaattcacaagcaattttcagataagtaaaggccatattacgatgcacagatccatggaccatggggcatgtttaatgtaaaagtcagtcctaaaatacatgatctacaataccatattacaatgcaactcactaaatccacagatcacttgaaaatccataaaccacgttggctgaaacaaccaaatccacagaccacgtttcaataaaacaatgtaggctcaaatttgcaggtaaccgatggaaaacaaaaaaaaaacgggatttcaaccgggggtggaggccggcgaggtgctgcaacggcgaaggggagggcagagaccggtgaggcgcataggcgatggaaggaggcatgggagacggtcggcgaggaggagcgattccctccctg

SEQ ID NO: 14817 - DNA, 405 bp, Oryza sativa
  Clone ID: uC-osflcyp091e10a1
gaactctgaatgttaaggtgcataaacagtcagtacagccattattaacctcgccagaagttttaggcccatcattatatgccagacaaaccattacctatatgatgagatcagattaaaaagccctaattctcatcgtgctcatttgctcattacatctgcattgcaccatccaagatccatatctgcatatccatagctgatacagctccatcgtgaaaacgtttattcctctacaaggttttgcatgctactactaatgcactatacctttagacattcccaggttacaataccgagtaaacaagctgcctaacaaacattacaatacttgatatgttgtatgatcctgaaggccctagccaagcaattcaagcagactcggcgaacccaatcctgtttttg

SEQ ID NO: 14818 - DNA, 372 bp, Oryza sativa
  Clone ID: uC-osflcyp091e10b1
tctttgacgcgtgggtgagaattagcctgaataagaagagattggacaagaagaccttggacggtgcaaaattggcaagggaggaaagccatcgtctgagagccgacggtttaggtgatgacatagttcctttggacaactacctggacacgcagtactttggagagatcggcatcggcactccaccacagaacttcactgtgatattcgacactggaagctccaacttgtgggttccatcagtgaaatgttatttttcgatagcatgctacttacaccacaggtacaagtcaaaagggtcgagctgtttcaaaaagaatggagaatcttgcagcattttctatgggtctggatcaattgctggttttttca

SEQ ID NO: 14819 - DNA, 408 bp, Oryza sativa
  Clone ID: uC-osflcyp091f06a1
aaaggcaagaatattattcataaatgacgcatgatttttatcaaaacgcttgcaaatgatatcagataagtagagtcaacaagacaaaactgtatctgccaaagcacacctccccaactccacccaattacgccattatttctgggcaaaagcaaacggcttcccattcctccccttcaccagtctcaaaccataaaccccacaacaaatcctcctaagtgacggcatataagatgatgaaaacaaagcaggatactccagagtcgtcatggcgaacttcaagttgacacttctcatgccacagccgctagtcgtgctgggcagcctagtaccggtagtgcgcgggcttgtagggaccctcaactggaacgctgatgtagtcagcctgcgacttggagagcttggtca

SEQ ID NO: 14820 - DNA, 427 bp, Oryza sativa
  Clone ID: uC-osflcyp091g02a1
acgcaatatgagcacaactatataacttaataagcacattacagcacacacatggccaaggcagttatttgaatcagtctccaacatacttcaaatcatagaccacaccatacagcaaacatagtataaacattgtcatagagagtacagctgatagcagcttgtaatattctagcattactttggtagcatccctctacaaaacatagcagacatcaccagctcttcatcttggccatacacattcaacatggtttgctagtgacagaccacactgaccagaacatttcgtctcctcagtaggcaccagctgccatgagcagctcatcaaggctccagatgccctcgttgcttgccccgtcttgtgtagcatcattttgcagaaggttgtccattgattcatctgagctgctctcaacataaggta

SEQ ID NO: 14821 - DNA, 130 bp, Oryza sativa
  Clone ID: uC-osflcyp091g02b1
tactcgcctcctaccgccccaaaccctagccctccgcccgctccccctcccccgcggctgcggcggccaagaagcagcagggcaggagggtcacggccgacgtgctgtggccgtggatgctgaggaaggt

SEQ ID NO: 14822 - DNA, 418 bp, Oryza sativa
  Clone ID: uC-osflcyp091g10a1
gcttctgaaatatgtcgcaacaatgaaccagcaacaacagattcgctgatggaccttccaggggatagaacatttgtagaatcactcatcataagtgtaacgccttctttggagagctcttccaatgcttgccgatcaaatatttttccatccactggtgattcgtcaattttccagtcaccagtatggaaaattatgccatcagcacaacgaagcactaagccacagcagtccggaattgaatgagttacacggaggggctccacctcaaatggcccagcctgaaatctcttccttactctaaaaaccttaagcctggacgagagaaaaattccaaactccttcaaacgcctctttattagctccatggtaaaagatgatgcgaaaatcggtgtgcttgaatccagcgctgggatta

SEQ ID NO: 14823 - DNA, 354 bp, Oryza sativa
  Clone ID: uC-osflcyp091h06a1
gaacaaaagccatattatttttcctcgcctatattatgtaacttgttcttacagccataggagcgtactatgcgtaagaaacagcaataagcttctgttccgtcctctattagctactccatatagcagtaagtaagttgtaagtagtactccagttactagtactataaatttaacaagggcgatggatggatggtgtgttacagtagtataattgagatggaagaggtaggatggatggtcaggcgaagagcttctcggcgaagatgtcaagaagggatagggcctcggcgacggtgagctcgaggcggaacttggggccgtcgtagtggtgcagcacgggcctgaaggcgt

SEQ ID NO: 14824 - DNA, 67 bp, Oryza sativa
  Clone ID: uC-osflcyp091h06b1
gtaatctcctactccgatcaatcgatcatctcccatcggtggttgcagcagacccgatctttctgtt

SEQ ID NO: 14825 - DNA, 343 bp, Oryza sativa
  Clone ID: uC-osflcyp092a02b1
tcggtaggctcgccatgaagtggcacccggaccggtgcgtgagctaccccggcgaggccaatcggcggttccagcggatccaagaggcgtactccgttctgtccgacaaggggaagcgagccatgtacgacgccgggctgttcgatcccctcgacgacgactaccaggatttctccgatttcatgcaggagatgctggtgatgatggataacgtgaaaaacgagaagcctgacacactcgaggactctgagaagatgctgtaagacattctctagaggcttactgctgaagtcctctattatctcttcacttttcccttttctctacctccatactctttctt

SEQ ID NO: 14826 - DNA, 140 bp, Oryza sativa
  Clone ID: uC-osflcyp092b06b1
tactaatctagaaaaggagcaaaacatgactaataggcatcatttcacatgacacacaaattaagcaaagatagaggccactcagtttatgacaatggtagcatgagtaacatgcaggcacagggattactaaacatgaa

SEQ ID NO: 14827 - DNA, 69 bp, Oryza sativa
  Clone ID: uC-osflcyp092d08b1
taacgacatagagaaggagcagaacagcgagtgtattttttgggagagaagtcaatccactgcagataa

SEQ ID NO: 14828 - DNA, 134 bp, Oryza sativa
  Clone ID: uC-osflcyp092e04b1
ttattttctagaaaaggagcaaaacatccagtttatgcatcttttaacacgacatacatattatggatagttaaaggccatcctattcacgacttatgctagcatgatcttctgtaggaaatttaactttataa

SEQ ID NO: 14829 - DNA, 93 bp, Oryza sativa
  Clone ID: uC-osflcyp092f08b1
taataacctagagaaggagaaaaacttggagtatatttttgggtacacaagttaaacagttgcaggaaagacaacggcaagaaagttaattat

SEQ ID NO: 14830 - DNA, 159 bp, Oryza sativa
  Clone ID: uC-osflcyp093a04b1
gtaatgaccctacgtcacaggctgagcttgataacttcatggttcagcagcttgatggaaccaaaaatgagtgggggtggtgcaagctgaagcttgtagctaatgcattcctggctgtgtcactgtccttttgtaaagcttgtgctattcatcatgaat

SEQ ID NO: 14831 - DNA, 161 bp, Oryza sativa
  Clone ID: uC-osflcyp093a12b1
acgcgtgggcggacgcatgggtacgaatccggcagtggcagccatgacgccctccgccctcgcccacctagcctccgactcgccgctccccgccttctcccccaagctccagggcgaggcccggctcggcggctgggcccgcgctgaggcggctggctgtg

SEQ ID NO: 14832 - DNA, 214 bp, Oryza sativa
  Clone ID: uC-osflcyp093b08b1
tttttatgatgtgtgccgctgacccgcgccatggccgctaccttacggcctccgccatgttccgtggcaagatgagcaccaaggaggtggacgagcagatgatcaacgtccagaacaagaactcgtcctacttcgtcgagtggatccccaacaacgtgaagttcagcgtgtgcgacattccgtcgtgcggtcttttcatggctttacaccttca

SEQ ID NO: 14833 - DNA, 95 bp, Oryza sativa
  Clone ID: uC-osflcyp093e12b1
tcttgattgcatccaccatggcgccgccgtgctacatatacttcgcctaacacctactcataactgactgaatcccgaagacctacatcagtcca

SEQ ID NO: 14834 - DNA, 74 bp, Oryza sativa
  Clone ID: uC-osflcyp093h08b1
ttgttttcaagtataagacctatatttgttgattaaggtaaaattatcagggtcctgtgctttaattgaattgt

SEQ ID NO: 14835 - DNA, 294 bp, Oryza sativa
  unsure (1)..(294): unsure at all n locations
  Clone ID: uC-osflcyp095a04a1
aatctaacatacccaaactgatattatcacaatgttagccgatgacaatggaaagagtaatctaggtacaagcggatcattgacggtggagacaagacattggctgcaccacaacacccaccagtggcgccaacaaggagcgctatccgttataggacgagagaaaaagtaaaacatcacgatgtgaagtgaaactgaataattctagtagaccatgatgatgatggataggctccttaggacgcccgccgncctttagcgtcttgctgctcccatcttgtccactggaaggct

SEQ ID NO: 14836 - DNA, 101 bp, Oryza sativa
  Clone ID: uC-osflcyp095a12a1
tttttttttttttttttttttttttttttttttttttttttttttttttttttttttttttttttttttttttttttttttttttttttttgttttttttt

SEQ ID NO: 14837 - DNA, 90 bp, Oryza sativa
  Clone ID: uC-osflcyp095c07b1
tactcctctaacggggataagacacggcctacggggggctgcttaaatgataccgtgggcttaaccacagccgtaaacgggacaaaacac

SEQ ID NO: 14838 - DNA, 417 bp, Oryza sativa
  Clone ID: uC-osflcyp095c12a1
gtaatgtaatcaaaacttatttttctttccataacagagacgacagccccaaatacttgacttgtccactatgattttcttgacaaacttaggtaccagataacattgagaaaagaaaaagaaaaacataacataccacctataacttaccatacttttaacctaacaaaattactctccgaatgctaaatgtgcgttggagtttcttatgggcggaactgaaatctcaagggcacgagcagattgattttgctcggggaaaaaacccaagaaatttcctcccaagcacccacactcacaggcccatcacaccaacatgaataactttagcaagctcttaattcacacgccagaaatccacctgccggaacatatcaccacggccgaagtcgtagccgctgggtatctctgggaaat

SEQ ID NO: 14839 - DNA, 80 bp, Oryza sativa
  Clone ID: uC-osflcyp095e07b1
aactcggttgtgacatagccaagggaggttttatatacattctccctcatattcaaaacgactgacagataattacaaaa

SEQ ID NO: 14840 - DNA, 60 bp, Oryza sativa
  Clone ID: uC-osflcyp095e12a1
aattatattacaaaaatgggggttacacatgaacataaaccatgttgcatcttggtgatg

SEQ ID NO: 14841 - DNA, 131 bp, Oryza sativa
  Clone ID: uC-osflcyp095f03b1
gtctttttttagcgggctaggacacggactatgtaggggggtaaaatttacgcataggtctaataaaaaacatacagtgggacaagagacttcctgatagttgattctgtgggcctgcaatagatacttta

SEQ ID NO: 14842 - DNA, 430 bp, Oryza sativa
  unsure (1)..(430): unsure at all n locations
  Clone ID: uC-osflcyp095g12a1
ttttttttttcatggtactactaccacacatgaaattattgatcggttgcatagtactttacatatggaattattgataggctgtcgtttatggattgaatgaacagcacaagcacatcaaaggttccagtttctgaagttctaacccagccatgatgcaattattccacgaatttggtttagactagattgggtaataacaagagctaactggacttgatcaccaacatccgacgaaaccgaaggggcaatgggggccaaaaaaaaggtgctgtaaaatcaacaatttattgacacaaaaaaaaatgtagtaactagtaatttactcttttccttagtcacagnatgacgcagcctgacttcctgctttcgggtaacgagggttacacattttaccctcagaaattagaactggcgatacccagccctc

SEQ ID NO: 14843 - DNA, 86 bp, Oryza sativa
  Clone ID: uC-osflcyp096a04a1
acaaggaccaagcacagcatcttctattcgtaattttatatcatacatcaaacaaaattacaaaacatccattatcactaacatat

SEQ ID NO: 14844 - DNA, 97 bp, Oryza sativa
  Clone ID: uC-osflcyp096a09b1
ctgggctcgtgcggaagcatttagagcgaaggggggctatttcacagagggggacgggatgccaccagacccgacgaacgagagaaactttcccctt

SEQ ID NO: 14845 - DNA, 118 bp, Oryza sativa
  Clone ID: uC-osflcyp096a12a1
cgatgcatgcacgacgtacgtcatggctatggcattcattatatagcggcccgtcctttttttttttttttggttttttggaacaacttcaaaagatctggtaactgttaagttacta

SEQ ID NO: 14846 - DNA, 98 bp, Oryza sativa
  Clone ID: uC-osflcyp096b05b1
gcctcctccaccggtagtacctgaacaaatcctggggtatgtgtcttcacaattccccgattactccaacgccctcatcatgaaattgccattcttac

SEQ ID NO: 14847 - DNA, 81 bp, Oryza sativa
  Clone ID: uC-osflcyp096c06a1
aatgaaaacattctttgtatatgcttttgcagttgtttgtcatccatataatccaagaatttcacctatgactttgaaata

SEQ ID NO: 14848 - DNA, 100 bp, Oryza sativa
  Clone ID: uC-osflcyp096d02a1
ttttttttttttttttttttttttttttttttttttttttggtttttttttttttttttttttttttttttttttttttttttttttttttttttttttt

SEQ ID NO: 14849 - DNA, 116 bp, Oryza sativa
  Clone ID: uC-osflcyp096d10a1
gttcactactttcctcttacttgtatttttgagatgccacaacaaaggtttacataaacaactcaggccactgcggcgaaagctccaagcagaccctggctaattagcatagcaca

SEQ ID NO: 14850 - DNA, 386 bp, Oryza sativa
  Clone ID: uC-osflcyp096e01b1
ctcgtcatgatcgaggactcctcgatcgatcttaatcttattgccatgcataattagtgtgttaattacgtgcttaattgtatgtgtgaagtgtgcattagtcacagtttgtaatgtaataatgtttcgcttgttcgactgtatgatctcgagttgggtgatatatacgttgataaaataaaggaaaatgtttgtgttggttcatatgctctatcattaatatatattcttctttactattcttttttttcatcatttattttgtttttctatttttaattgttccttttttttctttctttttctttctatttttttcatcttttttttttttgttacttaaattctaattttatttgatctttattttattatttctttttttt

SEQ ID NO: 14851 - DNA, 52 bp, Oryza sativa
  Clone ID: uC-osflcyp096e09b1
gtcatatccaccagcaccatggaaaccaatacgggagcttgttacgccgtac

SEQ ID NO: 14852 - DNA, 81 bp, Oryza sativa
  Clone ID: uC-osflcyp096f02a1
aaaataaccaaaactttttaggtttcatttcttcttctaaaaaaattgtacaatttttccttgcttcaccattacctaagc

SEQ ID NO: 14853 - DNA, 65 bp, Oryza sativa
  Clone ID: uC-osflcyp096f10a1
caacgtcaacattttccaacctttattctacagataccttccctagctgtgccatcctcggaact

SEQ ID NO: 14854 - DNA, 248 bp, Oryza sativa
  Clone ID: uC-osflcyp096g01b1
ttctgacgctgacccctacgctagccacccaggggccatgattacggtaaatctcgtacggcgcatggtggagggggcaacagcaacgtcattcacgtctcccacgagggataggaccaccataggcctacgccgaactacggtggattcgaaggcattcagtcccttgcaagaaacccgcccttaccacggtggcggaggatcgccaccggcgacccataggaactactgtaaggccggtgaggaca

SEQ ID NO: 14855 - DNA, 117 bp, Oryza sativa
  Clone ID: uC-osflcyp096g06a1
aaacatggtcttcatatattgtcttacattccatcatgatgtttataaatatagctataacaggccatgaaactaatcactgcaacttaaactgaaacttctaaacccagaagtatc

SEQ ID NO: 14856 - DNA, 313 bp, Oryza sativa
  Clone ID: uC-osflcyp096h02a1
gggcattaaaacatctttttttggttaactaattattactgaaaaagctattacaacaaatgtctgaatgaacataagcaatagaacatgactcatatcatgactgttcagattaattgaagggatacgacattgctatttggcctttataaatcgctcatttgtaaatccctgaaataggctgattcttacaaggagaaccatacgaagctcaagcaccacagatagatggctattctgagctatcgtaaaacggctcataggaagcatctgagaccttaattacttaatgcgcatagcatgtttgtttttc

SEQ ID NO: 14857 - DNA, 232 bp, Oryza sativa
  Clone ID: uC-osflcyp096h10a1
agaattagcgactattttcatagcatcaagcagcacaatatatgtctgatacagcacaagcattcatcaataataatacgcagttacacatacttacatagacatacaccgtgcttaactgcttatttaagcaggggcccaagtcgaaggtcacctccttcacatggatcacatatatactttactctgtgacagggaaaaaatgcagaagtcccctcaagtttgtccactc

SEQ ID NO: 14858 - DNA, 455 bp, Oryza sativa
  Clone ID: uC-osflcyp096h11b1
tgaacatgtaatttataccatataatgctatgatctcatctaagaatcagaagatccacaacttttatgtccaactgaagtttcgtatagatgagagagactgagaggaggatgaaataattacttgaaataagaatgacattacaggtagcagtagcagtatttattaaccaaggtttttttagttacaaatcagtttcagaggatctaactttgaggtcattgctttttgtagtatggtgcttcaatcttgtattttatatagaaggttaattaaaattttcagtgttattatagcctttttattatttttttttctatgttgtactatcaattatcttaatacattcattattatttatcctttttattttttatatttttcttttaaattttcatttttattatttttttttctttaattatttttttttcttatatctttttatttttat

SEQ ID NO: 14859 - DNA, 470 bp, Oryza sativa
  Clone ID: uC-osflcyp097a06b1
gctatacatgggattaactcatcactcactaagcttgttaaattttcgaccatgtcggacaagtgcggcaactgcgactgtgctgacaagagccagtgcgtgaagaaaggtaccagctatggcgtcgtcatagttgaagccgagaagagccacttctaggaggtcgccgtcggtgaggagaacggctgctgtatgtgcggcaccagctgcttctgcaccgactgcaagtgcggcaagtgaagtcacgaagcaacctgaacacttttcgacggtgagttacctaccttaatttgttccacaataaaaaaccacccaatttgagtgtggtttgtgtgtgtagctgataatttactttattcaatctgtgtgttacttgtttaattttaactattgttctactttttcgattttttcctttctttaatttatttatttttttctatttcttttgtaacactttcctttttttc

SEQ ID NO: 14860 - DNA, 80 bp, Oryza sativa
  Clone ID: uC-osflcyp097c06b1
ttgagaggaccaagggaaacatcggcgggaaatttatcaaacgtgccttagcctaatcccatcgcgaacgccctggccga

SEQ ID NO: 14861 - DNA, 118 bp, Oryza sativa
  Clone ID: uC-osflcyp097d10b1
tatacgcttgcatcctatcaacagaaacagtagggggaaatctatagatatgtgcgatcgtgctaatcacattgatgaacgacggggacgaatactgctagtaacctagtttatttca

SEQ ID NO: 14862 - DNA, 290 bp, Oryza sativa
  Clone ID: uC-osflcyp097f10b1
gtgagtctatggagaaaagggctaacggttctccaagaaatgaacctgaccggaagccattgaggccactatctccttggatcacagacatattgcttgctgcacctctgggtattagaagtgactattttagatggtgtggtggagtcatgggaaaatactccactgttggagaattgaagactgtttcaactgctttcagtctgaggatctggtattgccccacaacttatgctattccttgcctagatggttttgagtcattgtagctgtagttaaactaatatttt

SEQ ID NO: 14863 - DNA, 481 bp, Oryza sativa
  Clone ID: uC-osflcyp097g06b1
acgccgtccgcgtgtctgcagggcaggcaaccaccgccgccgacgacgactacgttgacggcgacgaggagacgatgagctaccagaaagtgccgcctcctcaggacggctaccctcctccagggtactcgcagccatacccgccgccaccgtccggcgggcagtacccacctacgcagtactacccgccgccgaaccagcctcctccggggtaccagggctacttcagcgaggggcagcagccgccatactactacccgcccccgcatgatccccaccaccaccatggtcaccaccaccaccacgaggaccatcaccaccacggtcaccaccaccatggccaccacgacgatgactgctgccttggctttctcagaggatggttggccattctttgctgctgctgcgtgctggaggaatgttgctgctgctgctgctgatggcctgaatgctttgaagctccttgtattaactattcttg

SEQ ID NO: 14864 - DNA, 74 bp, Oryza sativa
  Clone ID: uC-osflcyp098a06a1
ggccaattcttattttgattcaggggaatttcggatctatttactacgtgcaacctacaatgtcacgtgctcat

SEQ ID NO: 14865 - DNA, 206 bp, Oryza sativa
  Clone ID: uC-osflcyp098a07b1
gtctcacacgggcgtgaagaggtgcaggcagcgggccgcatacaaaaccgagccagaaggcgcacattcatccaattattaagggctcctctaagtggcctaagcacacgcagaaccaggacacacccgcgagaaaaaaatcctataaagaaatggattgggccatgacccaacgccgccaagatcctgtcctttttgtgtgcgca

SEQ ID NO: 14866 - DNA, 382 bp, Oryza sativa
  Clone ID: uC-osflcyp098b10a1
aaattgaacactattaatacatagtttaagttacatcatgatttattatgactggcaaagacccaaaaaaaaaaaaactctcacacaatgcaaacaatagtagagtttagatgcagtctatacctgactagaaaggattatgtagtagctgcagaaggtcgacgagcgtgacaaactgttaaccatatacgacgcatacacgacgtatattatgtatcacaaacgacgtagaaaattaacagatacggttcaccatgacttaatcaaagaaagctgattactatgctggttggacacttgctaaccgcagggcaaacttaaggctacagcgacgacatcagttaaatctaggccaacttagacgtaaatggttatcttgcgt

SEQ ID NO: 14867 - DNA, 77 bp, Oryza sativa
  Clone ID: uC-osflcyp098c07b1
tcggtcgaacccgggcgaagcaagaagcagggagggtgttatatacaaaacttcgacacttacctccattcaccaat

SEQ ID NO: 14868 - DNA, 101 bp, Oryza sativa
  Clone ID: uC-osflcyp098d02a1
ttttttttttttttttttttttttttttttttttttttttttttttttttttttttttttttttttttttttttttttttttttttttttttttttatttt

SEQ ID NO: 14869 - DNA, 56 bp, Oryza sativa
  Clone ID: uC-osflcyp098d03b1
ctcgtatataggagaggaagacagaggcgaaggggtgttttacacaacccagacgc

SEQ ID NO: 14870 - DNA, 68 bp, Oryza sativa
  Clone ID: uC-osflcyp098d05b1
gtgggtcgaaggggaaggggggagcagcgaaggggggacttttttagcaatgcccgccataacccccc

SEQ ID NO: 14871 - DNA, 166 bp, Oryza sativa
  Clone ID: uC-osflcyp098d11b1
gtcgtcaaactcatcatcgtgtagttttaggccatctgagggcctttgaatggctctcggcctccttcatttttcatagcatttgtgtagtgtgtgcaaatccatcatcgcatcttcatatctgaagaaatgaaggtgtccactcagctaaagcccttggcctctc

SEQ ID NO: 14872 - DNA, 344 bp, Oryza sativa
  Clone ID: uC-osflcyp098e02a1
gctctgaaactaaatctctttataaatatcaaatagagcactaatacgagtaaagctaaaagccgatatttcttatctacatgatgagactacgactagttcacggttgttgccaaataaggttaatatttacatcacctacgatgcaatcttggtcaggctacaaaaggctatggctaaatatttggccaggccgacaataggccttgagtttgttttcacttttcagaaccacggggtgccatgttcggattccattatgcacaggtttccctcgaaggataatgcccgtttccacgagaatccgtgacgcctttttggaaccgactgaggtggctcagatg

SEQ ID NO: 14873 - DNA, 126 bp, Oryza sativa
  Clone ID: uC-osflcyp098e07b1
cctgccggacgagcgcgaagataaaagcatggaaggatttttttaacagtcgccgagagctacctcgatacagaagtaaggtgagtacttgacaacctaaaccatgcaacccatgagaaatttctc

SEQ ID NO: 14874 - DNA, 127 bp, Oryza sativa
  Clone ID: uC-osflcyp098e08b1
tcgtcgaaggcgcgggaagcgaaaagcaagggaggagtcggtgaagaggcagggacgccatccaccatacacccaaggaagaagtgctgcccgaagcaggccaaggacgcgaagagcaaggaccccc

SEQ ID NO: 14875 - DNA, 131 bp, Oryza sativa
  Clone ID: uC-osflcyp098f08b1
ttcgtcggacccgggggaagtcacgagcatggggggagtcagatacgacgccacgacggttaccaccatcgaccagaacataaagaacaggacaaattaaaaaaaaaacatcatgaagaatgtcacctact

SEQ ID NO: 14876 - DNA, 285 bp, Oryza sativa
  Clone ID: uC-osflcyp098f11b1
ttctttaaaaacctcaccatcatcgacccacttgttcctagcgatctagaacgagagacttggcaatggcgggaagcggcgagctgaagctgctgggcgtttggagcagcccgtacgcgatcagggtccgcgtcgtcctcaacctcaagtcgctgccgtacgagtacgtggaggagaacctgggcgacatgagcgacctcctcctcgcctccaacccggtgcacaagagcgtccccgtcctgctccacgccggccggccggtgaacgagttcgcaggtcatcgtg

SEQ ID NO: 14877 - DNA, 155 bp, Oryza sativa
  Clone ID: uC-osflcyp098g06a1
agagggagcatccacctttgctgctctaaggaaacggcatttattaaaccactattatttattcatgccaaacaccagccactagttccagttgacaactcaaacgacaaatcctacacttccaaaaagtttacaatttaggtttcttcaaatta

SEQ ID NO: 14878 - DNA, 60 bp, Oryza sativa
  Clone ID: uC-osflcyp098g06b1
agcagtccggcctccccaaccagaagaaaagagcaacccaggggagactttttaaacaaa

SEQ ID NO: 14879 - DNA, 86 bp, Oryza sativa
  Clone ID: uC-osflcyp098h10a1
tttttttttttttttttttttttttttttttttttttttttttttttttttttttttttttttttttgtttttttttttttttttt

SEQ ID NO: 14880 - DNA, 292 bp, Oryza sativa
  Clone ID: uC-osflcyp099a07b1
tccttttaagtatgtgaatgggaaaatccattcgttagtaggtgaaggcacctctgaggtggggtattacagctgttctaaagttacaaaggatgacagataatatgcattctttaactatcgtttggctaaaatcattttttttccttctcttccttgctgcttcttactggcaagtggcaacccaggtttgatggttcataatcatttgattccttgctttacaactccaaattattgttaagcctaacccccaaagatgatttttggtttaataggataatttatttac

SEQ ID NO: 14881 - DNA, 437 bp, Oryza sativa
  unsure (1)..(437): unsure at all n locations
  Clone ID: uC-osflcyp099a08a1
acaccaatcatcccaagcaaagaaatgataactgacagagtgattgtttagacatgcttcaaacataaaaaaacacgcgcaaagccacaatttattatcagtgttgaagcgacatcatactatcatggagacggataacaaatagttgtccattgagaacgaacgatgaaacgacttgagcagggagcatcttttattcacgcagagtacttatggctggncaagtgatagcagcaatcgatggcccccgtagaagataacgcaccggaagcttaatcatcgtactcctggcggcgatggggggtggtgcttttgataacgctgcttcttttcatcatcagagtcattgtcatcatgtttcttgcggccgtagcctccctggtattcgtctcccccgccatagctcggcttgttgtatccacccatctcatacgcag

SEQ ID NO: 14882 - DNA, 268 bp, Oryza sativa
  Clone ID: uC-osflcyp099a11b1
actgcaacctcaacaggcttgtgtcccaggtcatctcctcactgactgcctccctgaggttcgatggtgctctgaatgtggatgtcaacgagttccagaccaacctggtgccctacccgaggatccacttcatgctttcctcctacgccccggtgatctcggccgagaaggcctaccacgagcagctctccgtggcggagatcaccaacagcgccttcgagctcgcctccatgatggccaagtgcgacccgcgccacggcaagtacat

SEQ ID NO: 14883 - DNA, 392 bp, Oryza sativa
  unsure (1)..(392): unsure at all n locations
  Clone ID: uC-osflcyp099b04a1
atctcaagctggtattggtattatcacatcaaaggtaattaaacgctgaaagtagggaaacacacggcagtatttacacatggaagatgtttacacacaaacacacttctttgggttgtcgctagcccttgataggagccagcaggctagctgacacgtnaccggtctctggtagtactaacagagacagcaagctactaggaacagagttaacaagataagatagcaacatactagataattaattacgtattagataaccacaaggaccagcaaacatgggcgtgacaaagagatcgaccagcctccgatcaatgggattatttcagttcagcgatggctgctcctggtctcgtcgctgtacagccagtcgtagaccgtggggagttggg

SEQ ID NO: 14884 - DNA, 168 bp, Oryza sativa
  Clone ID: uC-osflcyp099b12a1
caaacaaaagacctaaagacatttttaaagggggaaataaaaattatcaggtttcaaaaaaccaaaaaaaaacgggcccggtttattttttttacccctttgggtgtttctccagaaaaacaaccccaggggcgggcccacaattaagcccgacttttgagttccccg

SEQ ID NO: 14885 - DNA, 143 bp, Oryza sativa
  Clone ID: uC-osflcyp099c02a1
tttttttttttttttttttttttttttttttttttttttttttttttttttttttttttttttttttttttttttttttttttttttttttttatttttttggaatgtttgattttaaaagggataaaaaaaaagggggagag

SEQ ID NO: 14886 - DNA, 439 bp, Oryza sativa
  unsure (1)..(439): unsure at all n locations
  Clone ID: uC-osflcyp099c08a1
aatggtcgaaagaattgcatgccctgccctttactcctataataactgaactgaaatggctacccagtagtctcctgatggacaacttctggaaaccgtaacatcagctccaccaatcttattgtgctacagcaaagttacttttnttttacccagtgtaagtcacaactgaacancagaagttccgaatacccagcaattgcaattttaacgtaaagggaggcacgaggcactaggtcacaagnaaaggccaaaggcattaaaagttacaagnncgttgtcatgatactatgatcactattttatcttccatccgacaacataacactcacgatccacagcatgcagatttctgcaaagttgtggcctcagcatcaccctctggtttgttgatcttgatcgtgcgaacctcagtcttggaatcagtctccgcaagtct

SEQ ID NO: 14887 - DNA, 515 bp, Oryza sativa
  Clone ID: uC-osflcyp099d03b1
atactttttggtattcccatacactttgtttgtcttttttgtctcgcggtcgagagaaaccccgaggagagagagggagattatccttctttttttcttatttattttaacttatttttttattctttaattttttttttttaaattttttttatcataatattatctattttattatatttttttttttacttattattttttatatttttaatatatacatctatttttttttatatttttttttttttaatcttacccatatctttacttattttttttatttatttttttttatttattttacatatctcttttttttttctttttttttcctcttttcctaatccattatttcttcacttctttttatttttttttttacttttttcttcatttttttttaattttccatcttattttactattcttcttttttttttttttttatttttaaaaatttattttttttcatcttttatctttcactttttatattttttatatctttttaa

SEQ ID NO: 14888 - DNA, 83 bp, Oryza sativa
  Clone ID: uC-osflcyp099d04a1
ttttttttttttttttttttttttttttttttttttttattttttttttttttttttttttttttttttttttttcttttttt

SEQ ID NO: 14889 - DNA, 436 bp, Oryza sativa
  Clone ID: uC-osflcyp099d04b1
tgcatatatctagtgatcttcggctctttcaacacaaccaactccactgcatgggtggtccttacaggtgccatggtcctcctcgccctccctctcatcatccctgcctcctccagttgttctcatgtggacacacatgaccctgaacctactgttcaactcaaccacgaagattcaagaaaaccacttttgctcaatagtgaccacagcacagagtccaatgccatgatgcagaaaacagtggaacacccaatgcaggattgttgcttgggaacagtactgtagaagggacgcatgttggttctttgcgaggagcttagtgcaaagtagcttatccagtgcgtctacttctggcttttcttccttgcccttcttctgtggtgcacacttttcggtcttgtgtccattctcctctttcttctatttctcctattcc

SEQ ID NO: 14890 - DNA, 360 bp, Oryza sativa
  unsure (1)..(360): unsure at all n locations
  Clone ID: uC-osflcyp099d12a1
aaggggaaccatttgcacaatatatgttttttgtttgtctacaccaagggtacttttccaaaccctatttttcatgattaaaacagatcaagaaaaaaaagggttagaggcccggttgaacataggtagagcagcattcttttgcttttcacagagaaaaggacctttcatttcactgggaaactagcacaccaacggggttgcggtttgcagggccgcctccaccaaaagggacctggaaaggcggggttaaaacggccgaatgcccaaagattttaggccggngaatgggtcctagggctccagttttagggagaccattcgggactgccggtttcgtttgggcgcccttacgaaccc

SEQ ID NO: 14891 - DNA, 435 bp, Oryza sativa
  Clone ID: uC-osflcyp099e08a1
atattgaaaatggtacatcatttttatatatatcagagtggtagcatttcccttaacaatgaagggtatgaaaggcaaaaatgggggacaaagttcctcaacgtcctataacaacttaaatttcgagaacaaatagagaaatattaaatataattacatttagaatcggctcgggagcattttatgtaactaacgtacagagaggagaggcatcaggcgcagctaaaaatacattattgatcaaatttttaccattttcaaatcgtttccgagtatagggatctttgtcattgcaaaattcaggcactttgtcccaaattcagggcagtgagagatacagagggccaagagctagctcacattcttcttcctccggttccagactccctctggcagttgaagttgacggcggcgaccgggaggcccgggttgtag

SEQ ID NO: 14892 - DNA, 420 bp, Oryza sativa
  Clone ID: uC-osflcyp099f04a1
ggctggaaatggatatattccccaagcgtgacaacaacttttgagtgccagtgtgtgtgtgtgttcccctcccctccctgcttaattacatcatctctaacgtaaatgattcgtgatcttcaacgggagggaaaatgacgctctcttcgacccctccagagcggttttcctcccgagacaaaaagcacaaaatccaaagcctccccaaaagggctgtacaaaatggccaaaaaggcaagaaaaaaaaaggggagaatcgaatgatcccacattcggaatccgacctcgagggcgacgggtggtatatggagcgtctgaccgtgctagctccggagcgcgaccgcgggcctcgtggcaccagcgaggccgcgtggcctgcgcgaacgccgtgcgcggcgctctcggcgggctcccgcggcg

SEQ ID NO: 14893 - DNA, 360 bp, Oryza sativa
  unsure (1)..(360): unsure at all n locations
  Clone ID: uC-osflcyp099f12a1
ccaaatgctggattataagcacagaacattgatataaaagtccatgattcatgtctccctggttgcaaattacatgatggtcatgggccctaatggcagaccttatgaactcaaactggaaaagatcaacaacattggtgcttgngtaaagatgtgctccaaccacttaaccttggggaaggcggccccgggttttccgccgcgttggccgccgacgcgatctaggggggggcgcgtggtcgccggagggggcggtagaggccgcgttgtaggcggccttgccgacgagggaaaatcccgaagggcgacgatggcgatgccgagccccggcgtggccttggcccaattggttccccacca

SEQ ID NO: 14894 - DNA, 107 bp, Oryza sativa
  Clone ID: uC-osflcyp099g08a1
gaagccaaaatcatccaaatttctacaatgacaaccgccgatttacaaggttccaagattcccatacaacctcgaaaaaaaattcccactacggtttcaaagtgtgc

SEQ ID NO: 14895 - DNA, 306 bp, Oryza sativa
  unsure (1)..(306): unsure at all n locations
  Clone ID: uC-osflcyp099h12a1
gtatcaagatcaacactgcagcaactaaactcccctgtgttcttgagtgaatcactttcaacaagggccattattttcagaggagaaggcaaaaacactcttgtgaaaaattcagagaaatgcaaacgctttgtgtgaagcatcgtctccatcttgttgtngatcagtgcatgacgttagacgtttgtactcgtacaatggtcggtacgccggtctttgaggctccaagggtgtgcgttcctgagccttgggcgtagcccgcgggtcggaagcggtaaggccgccggtgtccgtccgattcaccgg

SEQ ID NO: 14896 - DNA, 412 bp, Oryza sativa
  Clone ID: uC-osflcyp100a04a1
catcttacagactaaaaatccattatttttccagtatttacacaactccgttgcagctgagcttgctgccgttacaacgatcggtagccctatacaacaaatcgatccgtaatacgcctacgtcgccatacgttacgtacaccggtacacgtactctgagtgcattctactctcgtcgaacacgagcagagaagctgctgattttgctgctcaagttcgatccactacacgacggaccttcgctggtcggtatcaacgatcgggctcctcacgacgtgctcgtcggagacccacttgaggtttcccctcgacgccggcgacggccggctgccctgcccaccgtacggtcaccgtgaagctctgcttttcgtacgcccaggagaagcgcaacaatggcggatgcacggtgacc

SEQ ID NO: 14897 - DNA, 57 bp, Oryza sativa
  Clone ID: uC-osflcyp100b04a1
ggaaaaaaaatggaaaaaaaattttccaaaaaaaaacttctttttttttttttaaaa

SEQ ID NO: 14898 - DNA, 134 bp, Oryza sativa
  Clone ID: uC-osflcyp100b12a1
attcgtgattttgacgtctcattttgggatattggaagatgatctgctctcatatggcactaccaaattccataccatgaccacacgtacatagtcacgttcaagatgccaaggttgtaaggtttacaaagcaa

SEQ ID NO: 14899 - DNA, 234 bp, Oryza sativa
  Clone ID: uC-osflcyp100d04a1
gaactgttacttatacttgtactattgtttgtaaattagtgcacaataacgtctcatcgaaataggaattcttatacagctatcttttgacgctacacggaagttcgacgctgggaaagtttgactacaaatggactcaacattatgacaacccaacatagcaggtttttaacaaacttgggcgcatttccagtcaagtaggaatctctaagcccatggtttgaaggaactggt

SEQ ID NO: 14900 - DNA, 263 bp, Oryza sativa
  Clone ID: uC-osflcyp100f12a1
aagccctaattcttatcgtgctcatttgctcattacatctgcattgcaccatccaagatccatatctgcatatccatagctgatacaggtccatcgtgaaaacgttttattcctctacaaggattttgcatgctactactaatgcactatacctttagacatttcccagggttacaataccgagtaaacaagccttgcctaacaatacatttacaattactttgatattgttgttattgatcccttgaagggcccttagccaa

SEQ ID NO: 14901 - DNA, 63 bp, Oryza sativa
  Clone ID: uC-osflcyp100g07a1
gacactatatgaagagctatgcacgtacgccatgccacgcgttacgtcaaggcttggcatcct

SEQ ID NO: 14902 - DNA, 231 bp, Oryza sativa
  Clone ID: uC-osflcyp100h04a1
gaaagaagattcgatatttcgattggtagttggggcattacaagtttacttgcttgggacaaaacagaatgaacagaatagaatgtatactttgccaagtcgttcccgattgcttgcctttcctaattgacacaaacccgcagttaccgggacacaaggctgcaaccctcaactagcacacttttaatttattcaactaaaattaggccttaaaactttagacttgaaaac

SEQ ID NO: 14903 - DNA, 67 bp, Oryza sativa
  Clone ID: uC-osflcyp100h12a1
gttcttagttatctttactacaaaaacaagtcaatctgaaatgaataacattgctgctgatgtgtgg

SEQ ID NO: 14904 - DNA, 148 bp, Oryza sativa
  Clone ID: uC-osflcyp101a07b1
tggtcgcgtgggctctttttccactacgcactaggggtagcactctggtattctgccatggcgactgcgaccgaggaggttgccgctgcggatgctgcccgcggcgaggcgccgccgtcgtcggcgacagcagtggaagaggaggcta

SEQ ID NO: 14905 - DNA, 376 bp, Oryza sativa
  unsure (1)..(376): unsure at all n locations
  Clone ID: uC-osflcyp101a08a1
aacaggcaaaaccatattccagagactagagtagagtcttaaacatttcaatcacatccatttcacaatgtcaaaaaggcaaggttcagggctaagttttaaaagactaaacttgaaagtaatgcagttagctagatagatgtagaacaaggnccaagtagctccattgattagggttggaaaagagaacanccgctccgaaatcggttcccggcgaggcgcttcaagcggtaacgactttcttggaaacctttgcggcgggcgccgcgaccaaccgaactttcttggggcttcgcagcgccctgggggtcggccgaccgagggagggttgcggtccgttagccgggcaaagaatgtccttgaacctcctttcttg

SEQ ID NO: 14906 - DNA, 316 bp, Oryza sativa
  Clone ID: uC-osflcyp101b03b1
gctttgctggagcagcgagcaccgtagcagcagcagcaggagcctcctggtacacactgcactacacagcgcagcagctagcgatagtgtatcgcacttactggatacgcagtcgagcatctccagcagcagcagcagcggagtgatcagcgatggagagcagcttggtcgacacagccgccgtcactctctgcctggcggcggccgtcggcgggcggtgccgtgccggcagcttcttgaactgctcgtgctccttcaaagagtacagggtgagcgcatcctacttcattgggcggtttctgagcggcgcgcggtt

SEQ ID NO: 14907 - DNA, 289 bp, Oryza sativa
  Clone ID: uC-osflcyp101b04a1
agaatggagaaagtcaaggttcgataaatattgcttcacttgtacaaagtacagataaaaatacattgatacatgacacggagagagccatgcacaccacttatttggacacacagagggcaaggctgcagagaaaatcaagcaacacaagctgaactcacggccccacctgtcagcctctcactggtcgaggccggagactcttgtgaaaaacagcaacaccacgcatgcagaagaagacaaattattacacacacaaatggacgacacggcggccggtgacgtaccg

SEQ ID NO: 14908 - DNA, 444 bp, Oryza sativa
  Clone ID: uC-osflcyp101b11b1
gcatgcacatttgaccatgcatcttctagcaaaagcgttccatttctgaggaatggaacaggcagtaacaaaagaaaacctagcagacacctccttctgccaccagattaagctcacagctgaattgaagagttacatcaaagagattgcagattgtctagaagaatcaaacaagttctatgtagtgcgtatgaacagaacattcatggaacaggacagagtgtactttgcgactgagttttcaaagaaatacattgtgaacttggttcgaggcaagacagcaaacattagagtgcagattgcaggtcgaccctcaacaacttaacatcggtggtggttagctttgtagcatccaacagcatcaacttacacaatctgcatcttccacttttataggacacaagtcacctcatgctcaccttaaatgctctgtgaaagttacct

SEQ ID NO: 14909 - DNA, 375 bp, Oryza sativa
  unsure (1)..(375): unsure at all n locations
  Clone ID: uC-osflcyp101b12a1
gtaccaccagtaactaacatgcaacaantcatcattctcattggttcaagaagatttcaaaacatttatccggtccggttcaatccattgggggcaacggaaggnaaaaaattttttggcccccaggtaaccaaccggcaaccccaggnaagtattggggggaagggaaaccattccttgggaccttccttggttccttcctctcttaagttgaaaagcttaaacaggtaagggctaaggtaacaactcccaagaggccaaagataagacaacagcaatcctgaaacacatgagcccaaaaagaacgtgcggcgatcccaagccaagtacactggcagacgtattggatgtccgtcgaagatttagcgctgtgcc

SEQ ID NO: 14910 - DNA, 405 bp, Oryza sativa
  Clone ID: uC-osflcyp101c08a1
gttgaaaatgatgctcgagcatgagaggtttctacttatactaaagcaaagttgtctgtcaaatcagctataaaccagcacagcatatttgttcacacgtaaaggtcatatgaacaaaggagattataacagctcgtcatatgagcagcaagtcagttcaaaagtatgacatcatgtcgtcaatgaatgaaccagtcgaggcattggtgtcgcccattgatgcttatgcacctgcaaaatgtaaccttcaccttggtagaatcgccaacttccatagttcaggcaagtatgacgtgagaaagctcacacatctcccagaagaaaaacagaaaagttgatgagagagattgggataagatgggacctttcttcttgcatagtgaaggctcatgaactgagggaaat

SEQ ID NO: 14911 - DNA, 372 bp, Oryza sativa
  Clone ID: uC-osflcyp101d04a1
gctacaatggagtgataatgctatataatcaggtaggaaccacatgcaagaacaatctcaagaaaccctttcacagacaatagtccggcatgttttgaactcggaaaactagtattgctaaaccccctaacaaaaaaggcataagcatatgccaccgattctacccactgagaaacctgacctgactcctaataacatgcaaacggagagcatacgttaaatatatcttaaacgcaacagcatgcaaacgcacctaatatgaacatagatacccactgcttataataatcacctagtgttagccaccaccagaaccgttctatttaccgatgacgaccacctctgggttgacatctacagcagcacaccagc

SEQ ID NO: 14912 - DNA, 485 bp, Oryza sativa
  Clone ID: uC-osflcyp101d12b1
accggacctgaattcccgatccaacccacccattttgttgtacccccatcacccggttacttctttcaagggcgagtttaagagatcgtggttctagtacactactcatgagaccgatactaccatgtctctccacagccatcactacctcatgcacaacgacaaccacaaccaccggaacgactacctgaccgttcgcgagaccaacgtggaggaggacttcaacacctgcaccggccagttcccgcgagcgcaagcagagcttcctgctcaagtccgactgatcgaacctgctgtgtgtacccttgtacgtacgtacgtatatgtgtgcccgtacgtagtcgaggtggtcatgtgatggcttaactctacgtgtatatcatgcttgcgtgatgtacctgcctacaccgagcttagctaattaccacctttttttttgtccaactgaagatcggtatgaaaaataaatttctgacctgaatata

SEQ ID NO: 14913 - DNA, 239 bp, Oryza sativa
  Clone ID: uC-osflcyp101e08a1
aagttgttaccgattgccatattaaaattaaatgcgtggtccactccatagcacaaatttcatctggagtcaggcacagaaaataatcatatgggttttatttattgagcactccaatgtggggatcgatgagctgctttcagctatggaatgaattgcgtagctctccagctgtcaaagcaaatgccatgttggatatgtaggtggtctcttagtttatctgttcttcggtcttggcc

SEQ ID NO: 14914 - DNA, 304 bp, Oryza sativa
  Clone ID: uC-osflcyp101f04b1
tctttatataccactcgtttcctccacaaagagggagggaacaagggaagggtgtcgtccgccccccaccccgatctgcctccgccgctccgctcctccgcgcctgcgaaatctaccaacgctaactcagtaagatgggtgccggcggcaggatgacggagaaggagcgggaggagcagcataagctgctccggcttcatgtccttctctcccctctgtcactggaagttcagctacttcaagatcatggactccatgactccttacttctccccccttactccctacttccatcatcttcctt

SEQ ID NO: 14915 - DNA, 134 bp, Oryza sativa
  Clone ID: uC-osflcyp101f12a1
aataaagattttttaaatttaaggaaaaaaatgttatatattatttatttggggaaaattgggagggtataaatattgaaaaaaaaaagaatgaggaggtaaaagggggaaatgtggggggggtttaaaggggg

SEQ ID NO: 14916 - DNA, 67 bp, Oryza sativa
  Clone ID: uC-osflcyp101g08a1
gatgtgagaattatagtttataacgatgatgtgggtgtgcgtattacatttaatagtgaatgaacat

SEQ ID NO: 14917 - DNA, 255 bp, Oryza sativa
  Clone ID: uC-osflcyp101g08b1
cacacgaatctaatggccaccgctttccacaccatcgccgccgcccgcccccgccttcctctcgctgcgttcgcttgcctctgccccggcccccgccccgccaccagaaagcttagcctcacctccacggcggtctccaccatagactccgcgcccgctagttcgtcggacgccaagaagacgaccaccgtcttcgtggccggctcgacgggccgcaccggcaagcgggtcgtggagaagcttctggagaggggc

SEQ ID NO: 14918 - DNA, 400 bp, Oryza sativa
  Clone ID: uC-osflcyp101h04a1
ggtatgaagtattttaatttcacaggttgaaccaatacttaggtacatcaccttgatagtgccaagcctgaattatgggataaagttaattattcatgcatacaagagttcacacataaaagttctactgacacagtgtaatatctaactgatcagtctccttgaagaaggcacatgcatgattgagatagttgcatgatacggatccatatttatctttcatctgacataaaggcctttcggtcctcctgttcaggataatactgaggctgatgcatgatgttgaattgcaggaagtttcttggatcataatggatcatattttgcacgtactcgctcgtagaagctgaacccatcatgttcactggttgcagtcctctttcactctcagcaactttgc

SEQ ID NO: 14919 - DNA, 96 bp, Oryza sativa
  Clone ID: uC-osflcyp101h12a1
ttttttttttttttttttttttttttttttttttttttttttttttttttttttttttttttttttttttttttttaatttttttttttttattat

SEQ ID NO: 14920 - DNA, 164 bp, Oryza sativa
  Clone ID: uC-osflcyp102a08a1
tttttttttttttttttttttttttttttttttttttttttttttttttttttttttttttttttttaaaaaaaaaaaaaaaatactctaaaataaaaaagaaaaaaaagcccgccgtatggttttttttaagcaaaaaaaagaaataggtaatcccaatttat

SEQ ID NO: 14921 - DNA, 329 bp, Oryza sativa
  unsure (1)..(329): unsure at all n locations
  Clone ID: uC-osflcyp102b04a1
aaccaaaacataggaggtttcatttcttcttctcaaagtagtgtagcatctttccttctttcaccattacataagcttaagcaataacagataacaaatcctcctcctcctctagggaaaatattcaaacacaatacccttataagcacttattattaggaaagtagcgtgcatgggcataaatggcaagcgggggggcaggttaagaatcacaaatgctgagtcagcgaggaaaacaaaacaccataatggngacagagcaaaaagccttcgaaagggaagcttttaggccagaagggctttctccccacttgagggggcttcaccac

SEQ ID NO: 14922 - DNA, 250 bp, Oryza sativa
  Clone ID: uC-osflcyp102c08a1
gaataaaagctagggcatgcataatgggcactcttaccagacgcctcaatgttcagacagactaatcattcaagttctcaaagaatgggcacaagatagctcaggacaatgttttccatctatcagatcatccctttttgtacagttttaccaagaattacatttcacaaacagcaaatgaccactttaaaagaactatctccaaaaatgggcttcacacaataaggttgtttgaagtccatgggaaacc

SEQ ID NO: 14923 - DNA, 61 bp, Oryza sativa
  Clone ID: uC-osflcyp102d04a1
tttttttttttttttttttttttttttttttttttttttttatattatttttttttttttt

SEQ ID NO: 14924 - DNA, 378 bp, Oryza sativa
  unsure (1)..(378): unsure at all n locations
  Clone ID: uC-osflcyp102d12a1
atcccaaacaagcgatatatatttcataatgaacataaatctgcttctacaatatactccatcagtaacatgagcaccaaccacaaggtttattagagacaatgccagccccatgctaggacaangcttatttcagctgtttcttcctcttcatctttcttcatnncatcgtcctcctcttattcgccataatnnttatcgcccatttttcgcattacgttccattaagattattaccctattttcttttccccagtttcttgaaatgttccaaacattcttatgtgttttacaaaccacgccggccgtttctttgatcggcgtggaccgacgggcctttgacctgccaggttagttttttcaggcctggtcgatgcc

SEQ ID NO: 14925 - DNA, 195 bp, Oryza sativa
  Clone ID: uC-osflcyp102e08a1
ttttgttgtaaaggcagaagtagagatttttcttctttttttttttcatttcagaatatacaattggccaatggtgggggattcgaagactacccaaaacccattaatttccccctcaatttacaaccctttcaaaaaaatttagtgaaattttaacggttagtaaaagaagcatttcttctggatggccataat

SEQ ID NO: 14926 - DNA, 51 bp, Oryza sativa
  Clone ID: uC-osflcyp102f04a1
aaacccttaaagggaccatactatgccagggaaattcacatgaagctaaac

SEQ ID NO: 14927 - DNA, 437 bp, Oryza sativa
  Clone ID: uC-osflcyp102f12a1
gacttcttgagaattggataaatgaatgctcacaagaagaatgtagttgtgcaatacaatcataaagaaggtcacatgcaagaaacaatatgctaaaagtacatgtggaaaaccatcaagattgaaatcaatgactgaataggttatcgaatcggttgaaaaacgactgaaaacacttaataacagtaccagttagcacttttcgcccacaaattcttcttcagtttcgattttgtcggtcaacttcagttcctaacaaggcaaacaacaaaccaattaagataaccgaggtagcctaggtaagtaaaacaagtattagattcatttcaactttctgaggcaattgcaaggattaaatagaaagcatatgaattaggtacgggaagggtaaaaggactgcatttgcctccattgccgaatcaaatcttcattgtcat

SEQ ID NO: 14928 - DNA, 202 bp, Oryza sativa
  Clone ID: uC-osflcyp102g08a1
ttttgataactgaaatcaactacaacagaatttaaccaataaataataagaaaagagagtaaaatatcgtatcattggtccattgtaaactgaattgcattctccagaacacaaattttcggtgttacaaagcacataggccaggtggtccgtggcttcctatcgcaggtattggtgtgtttgaacagttggtacgaagcta

SEQ ID NO: 14929 - DNA, 100 bp, Oryza sativa
  Clone ID: uC-osflcyp102g10a1
ttttttttttttttttttttttttttttttttttttttttttttttttttttttttttttttttttgtttattttttttttttttatttttaaatatttt

SEQ ID NO: 14930 - DNA, 78 bp, Oryza sativa
  Clone ID: uC-osflcyp103a09a1
aaaattccctttttaagaattttaaaaaaaccaggccccaattgggtttttttaccccacctttttccttggttcttt

SEQ ID NO: 14931 - DNA, 361 bp, Oryza sativa
  unsure (1)..(361): unsure at all n locations
  Clone ID: uC-osflcyp103c01a1
aatctgtgtcaacttgagacggtattggattatgcattgcttttaatgaatttatcatgctcatgtccactggccaggattggaccgttctgttgccagcctgccatcaaacacaagggtcttcgttcactcgcttcccaaaatataagccacgctaacactagnattaaaacatgggaaaaatgccatgnagccgttccacgcattaacaattattccctccggtcaaagatttcattgtcaaggatttccaaaggctacctggaacattaccgaaacctctttctttacaaatgcccattnacttcaaccaggatcgaggtttcaaaaggaaccccgaatctttcaaattaacagttac

SEQ ID NO: 14932 - DNA, 58 bp, Oryza sativa
  Clone ID: uC-osflcyp103c09a1
tttttttggttttttttttttttttttttttttttttttttttttttttttttttttt

SEQ ID NO: 14933 - DNA, 56 bp, Oryza sativa
  Clone ID: uC-osflcyp103d05a1
aaattaaaaagcaatttaatagggaaaggcatattgtattaaagattaaagttagt

SEQ ID NO: 14934 - DNA, 338 bp, Oryza sativa
  Clone ID: uC-osflcyp103e09a1
gcctgccaacattttcagctgaaactacttattcaacaaacaaaaaaggcactttgccctctcttccaacatcagcatgatcaacaataacccatggtttatactaggctccttttttttttcccacatatatatgtatacctttgatattcagtatcaagattgtatcaaaatgcccctagattttcaatacggtgattcccccaacctttgagtcagccttgattcgtttttggtaaattcgccagttgcccccttgttgccctttcttgtcaggttttctttcctcaaggaacggtgttagtatgttagttttcacccgcggatccctttttgag

SEQ ID NO: 14935 - DNA, 107 bp, Oryza sativa
  Clone ID: uC-osflcyp103f05a1
acaggaaactgtttcataaatgtaacatatcatacggacttgatgggtcattaaaccaggacccaaggtagacatcagcacccaccaagtactttgacgtatcagag

SEQ ID NO: 14936 - DNA, 270 bp, Oryza sativa
  unsure (1)..(270): unsure at all n locations
  Clone ID: uC-osflcyp103g09a1
actccactccatcaatctttaattggtatctccccatgaaccattcaaactattttcatgacatcattcaagattgttaagaaccctacttgtatttattagctactcatttgngcccaccttcttatttgtgcatttttgcaaacngaaaaggtggcttatatcaagggttgcaaaggcccagcctcaagtttttttgctgctgaccaagggtccctgaaaccagttagggcccgacatttttgggggtaccctcctgagggtccctga

SEQ ID NO: 14937 - DNA, 424 bp, Oryza sativa
  Clone ID: uC-osflcyp104a01a1
agatcaatcgaacaacagctctttgaggccgtctattcagaaggatttggctatgttgcggtaacagaaaatttacttctttaaaccatcttacagaaattgaaacagataacacaaatcagacaaggtaatcctccgccaactttaagataaccatctcaggaaaatgtctacaacagtcccaactgtagcatttttttttacagcgataacagttacggtaacaaacccactgggtagagcaaagcctccacaggaacaaacccaccccccaccagtgcttttgtcattccccactcttatgtcaaagacaaagatatgtcgatacagcagcttctaaaatagctcctctttgtcacaaaattcaaaaatcaaattcgccggtagccttgttgaatagaacatctcggccatttaaatgcat

SEQ ID NO: 14938 - DNA, 61 bp, Oryza sativa
  Clone ID: uC-osflcyp104b05a1
aataattgcttcttttgattattcaatcattaaattatgacgatcgtgcaaaataatctgc

SEQ ID NO: 14939 - DNA, 53 bp, Oryza sativa
  Clone ID: uC-osflcyp104c09a1
ggaattattacaacaataaaacatacgtgccgtgagaaaatctgataaaccga

SEQ ID NO: 14940 - DNA, 57 bp, Oryza sativa
  Clone ID: uC-osflcyp104g09a1
attacatgttgagaacataattgaagggggaaaatatactagtacatcataataatg

SEQ ID NO: 14941 - DNA, 108 bp, Oryza sativa
  Clone ID: uC-osflcyp105a01a1
aaaaatatcatatattcgattatatatatatatataatagcaaacagggtacatccattagaactcagaataaccggaattgaaaatcaaaagggacaaacacaagca

SEQ ID NO: 14942 - DNA, 345 bp, Oryza sativa
  Clone ID: uC-osflcyp105a10a1
aaccaacccgaaagggttgatgccccccccccctttgccgccttgtttattccccaacttataccaaatgaaaccacaagttggttttaaaaggcttttttttttaaccccaatatttttgaccggcctggaaaagggggccctaaatgggcccatttgcggcccacctcaatttgggggttacatactggggggcctaaacagggttttcctttcttaggactggtttaacccctttgggtttggcaagggttttgtggcttataccgggaccaatgggtttggtgacaaggaggtttattcccatgggcaaggcttgggggttggccaatgttacgccggggg

SEQ ID NO: 14943 - DNA, 407 bp, Oryza sativa
  unsure (1)..(407): unsure at all n locations
  Clone ID: uC-osflcyp105b06a1
cagagaagattataaactttccatcagatattacatatacagcatcgtcagatggaatacaacagtataattcagcaaaccagtcatagctcaattgaaactaagttactaactactggtctattagggcccagtttcttgattcacacacgcgcataatagnaaaacataaacgaaatagttgaaggttagcatcctgcagggaacagtccgaatcattatgttgctcggtacttgcctggaaacctcaggtctgaatttgcgggcttttcgagcatgttcaaattgtcacatttcacctgaaagttttgtggttaccctccttccttctgggtccttcattggccactggcccccgagaggttgcttggctgctggctgcctgcctgcctgcctgcttagcattg

SEQ ID NO: 14944 - DNA, 440 bp, Oryza sativa
  unsure (1)..(440): unsure at all n locations
  Clone ID: uC-osflcyp105c10a1
gacagcgaaaaatgaggagatatattaattacggggtatcgtttcaaggatgagttcggatgagtgatcgatcactctccacatacttggatcggtctctctcgcacacgtacaacgacaagggtgagacggtacaacagtcagcggcaacaaaacacggcacgtacacgnnggtagtactacagaaacgcgctcaacgttcatagggcgattttggttgagtaaaaaccacgcacacctacttagtacttagctttttatccttttttagttgttacaccccacacggccgttcgacgatctcattcggcctagccgcgatcaatgggccgttccggccggcccagtcttcgagcgttatgctttccatctttcccgttggctgtccccgttggccacaaccaggccgacgccgttcgtcccgttggccgccatcgcgc

SEQ ID NO: 14945 - DNA, 62 bp, Oryza sativa
  Clone ID: uC-osflcyp105e02a1
gggaaaaaaaaagggcccaagaaggaacaaaagggacggaccctaaaagaaggaaggggaag

SEQ ID NO: 14946 - DNA, 360 bp, Oryza sativa
  Clone ID: uC-osflcyp105e10a1
ggatgaattatggtgccagtatcacatatggtatccttcatattgaaagagacagtattacagatgcggttacacaacaacctgaaaaaaaaaaagaacaggacaaactgatagagcaaactgcagtagctctcttgcagtttcagcatagactcaaaaataatgtaaacaaaaggataaaacgtccgaagtaatatctagaacacttaataactaattggctgcatacacgccgatattcaactagccaacctttcgcaaggtcgaattctcaaacccctttcatccatgcttccccatgctttctttcttacttgccatgggagcaaaccagttcactacctgggatcaaagaacaca

SEQ ID NO: 14947 - DNA, 201 bp, Oryza sativa
  Clone ID: uC-osflcyp105f06a1
cgctgaaaagatttattgcgacgctttattgcttattcaaatatggtacagtttcagaatttcagcttccaaaccaataaatcagaaacaatactgaaatactgaatgcacacatctacattggccaacattccaggcatttcttcaggatggggattaattatggccaactttcaacaaagcttattaaactgggtctat

SEQ ID NO: 14948 - DNA, 52 bp, Oryza sativa
  Clone ID: uC-osflcyp105g02a1
aaaaggggaaaaggaaagggtccaaaaaaattgggttttacttggacaaagg

SEQ ID NO: 14949 - DNA, 465 bp, Oryza sativa
  unsure (1)..(465): unsure at all n locations
  Clone ID: uC-osflcyp105g10a1
actagaatcatgaactccataaatcatggattcatggcagattggtagccattcctggcatttgtcaatattacagtaaaaatatttccctattgttctgtatcagttcacactcaacatacatcncggatcacttaatcaccagggtaaaattcaggcaataactagtcgccaaaatggncatgttctaaaagtgttgattttaacaggnagtaataaacaagaatactttttatacccccgggggacttgttagttctcatggacgggattataaccagaaaccaagttctgaaagaaaacacncttcaggcagtaacgggattataccagcctctgnatgattaattttgatattttgctggccaacgttctgaaactctggaactgaaacttttggggtttcctgacaataatgtctgattggtcactggctttaatttgcctcaagccgctgtcagcaag

SEQ ID NO: 14950 - DNA, 385 bp, Oryza sativa
  Clone ID: uC-osflcyp105h06a1
atgtaaatggttgatttctattaggtaaccgttcagcaaactgtcggtttgggcagcagagagttcagcaaaggggtcaggtgcttgggacccgagtatctgacatggcatacatggaaagaaaaggtgctgcttcttgtcttaacatgaatagtagaaggtatatatccccgaagtactggttttagaccatgtatgttaacatatgtcgtactattgatgagaaactgttcagtgaatcatgtagcctctgcagttgatcagctggagatcacttcctcaagctcttaatgatgtaggcgccgtagaggtccattgagtacttgattgcgttgatggcatcttttggtgggagaaactcattgacagcaacttctttgttctc

SEQ ID NO: 14951 - DNA, 88 bp, Oryza sativa
  Clone ID: uC-osflcyp106a06b1
agacacctagctagctagctatattgaggtgaggtgggggggacttttacaagagacctggggggctacacaacctaaccccaccccg

SEQ ID NO: 14952 - DNA, 153 bp, Oryza sativa
  Clone ID: uC-osflcyp106a08a1
aaaaaacatggctaaaattgattaaggggagaccacaggctacaaacaaaagtttaaagggttctccaaaaggggtaatgatacaaatggccccaacccccgaaggacaattttgggaacacaattttttaaggggaacacaaaagggggtat

SEQ ID NO: 14953 - DNA, 267 bp, Oryza sativa
  Clone ID: uC-osflcyp106b02b1
gccggttctatccgatccgatcacgacgggagaatcaaccgggatcgcaatggcgtcgaggagagccgcggcggcggcggcgctgctgctggtcgcggcggcggtggcggcagcggcggcgggcgctggcgcggagggggaggagacgaccgctaacgccggctagctggactgctgtcgccactgcaggaaaaaccaatgaacaacgctgcgagcagtgtcccactggcccgactggacgaactcctgttcccaggcctctacgca

SEQ ID NO: 14954 - DNA, 191 bp, Oryza sativa
  Clone ID: uC-osflcyp106b04a1
gggggaaaaataggacagggtttattatattcagggcacgaaataatttttaaaacccctccttcgttcggacagaaaaaaaggggctaaatagctaaactccgggtacgcacgtacaaagcgcaccgcatgataaacaccttagagagtaagaccatctaacatgaccacccaacgacatacgctacggg

SEQ ID NO: 14955 - DNA, 104 bp, Oryza sativa
  Clone ID: uC-osflcyp106b12a1
ggcgctctcagcatgcattttatttaggcacgtttcattttttaaaaaagaatagaggatacgtattgttggcagacactcactttttaaaaaaatacataaac

SEQ ID NO: 14956 - DNA, 372 bp, Oryza sativa
  Clone ID: uC-osflcyp106c08a1
gaagaataaaactatataccaatatacgtctcatggaaaataatggactagctatacaactctagccattcaaagggcactggagaagtgaaaatttatacacggtcccttaataagggaggtttggacatcatgagcaaaagaagagaaaggcacgttttatcctctggaccaaaccaaatatcacctggtaccttttcgccactgtggacccccccaataacattgacaaatgtttgcttataccacggaacgttccttttttctttttgggtaaggtgccccaaagttgctttggagacacccaagagccgccccctttgtgccccgcatgcttcttgtgcaagccctttctttctgaaagctttacca

SEQ ID NO: 14957 - DNA, 154 bp, Oryza sativa
  Clone ID: uC-osflcyp106d04a1
aggaggaaacagctttcaaggactcggggggtgagaaaatttaaatggccaaaaggagccccaaaaccaggacattcttctggccgacaataaaattatacctcaaactttgcgattaatactaaccctaccttgggggcccgcaattcctact

SEQ ID NO: 14958 - DNA, 406 bp, Oryza sativa
  unsure (1)..(406): unsure at all n locations
  Clone ID: uC-osflcyp106d12a1
ctctagcaacaaacgtgtaaatgctccccaaaatacaccatcaccatgactccatgcatagccacaatatcacaagtatcgctacagccagcggcgccatgttccttttctgcgaggacgcgcgacatacacgtganttctgaagcctctactgacctagacacaggggnngaagttcatgaccaaatgtggttgggttcatttcaaattccattgnnntactgcgtgcttaattttgatgaaattacacagactccgactttaatttttctttctttangcgtgcatgatcccatnnggatggaagaaannacgaaaccttactactgcccttcacaccgtcctcctccattcaagctttcttcctcaagcagctttctgatcaaagtgccacaccccatgcccc

SEQ ID NO: 14959 - DNA, 67 bp, Oryza sativa
  Clone ID: uC-osflcyp106e06b1
cgaaatttttctcctctctctcaactccggcgagaggaggaggcggcactggaccgctcttggggat

SEQ ID NO: 14960 - DNA, 627 bp, Oryza sativa
  Clone ID: uC-osflcyp106f12a1
gagctaacaccgcacacgcacgcacacgaaaccttgtcccctccagatcgccccccctttttcttttctcttcctgctctctccccctcttcccccccccccccccctccccctctcctccccccccccccccccccttcccccccccccccccccccccccctcccctcccctccccccccccccccccccccaaccctccacccccctcccccccccccccccccccatccccccaccaataccccccaacccccacacccacccccacccacccccccccccccaccatacaccccccacaatatacaccccacccctcccccccccccccccccacacacccccccccccccacacacccaacccccccccccacaacagacaacccccacccgccccccccccccacctaccagccccccccccctccctccctccaccccccccccaaaaccaacaccccccccccaccctccccccccccccacacccccccccaccccccccccccctcctcaccaccacaccacccccccccacccccccacccccccccccctcctcccccccccccacagccgcccacccccccccccccccccacacccccccaccccccccccc

SEQ ID NO: 14961 - DNA, 142 bp, Oryza sativa
  Clone ID: uC-osflcyp106g06b1
ggagatgggtatctcggccaccgcccaccgccaccgccgcgccgtctccgcgcgcgcgcgcgcatcgtgtcacgatctcgcgagaccccgaaccccacgaaccctcgccgcgtcgccgtgggccgtcgcggtgggggaggag

SEQ ID NO: 14962 - DNA, 85 bp, Oryza sativa
  Clone ID: uC-osflcyp106g08a1
atataaaaaagattttgggattatggaaggaattttatttaggggtccaggggtggaacatgacataacatgagaccgcttaggg

SEQ ID NO: 14963 - DNA, 239 bp, Oryza sativa
  Clone ID: uC-osflcyp106h06a1
ggccaccgccggcgagaagggcgccttggcggcgctgaccccctccgcctcttcccgcgcgcggccccgccagccggccaccgtctcgggtcaaatcgaatcgaatcgaatccaaagaggaaaatctggggttcagttgaaccctaatgcccccaggttaggtcagcctcgctgggtatcgcggctgctgaggtttacttggagaggggtaagggtggaattccctcggagggcctgat

SEQ ID NO: 14964 - DNA, 262 bp, Oryza sativa
  Clone ID: uC-osflcyp107a10b1
actgtccatccatggtggtggtcagacaaccccagcacacaagaaatctgccatttgcccagtccaccgctgggttgcagtttttgatgaagagattgacttgacctgagcaccctttcgattgtaaatagcagtttttgtattgctgttggttgagtgattgggcattcatccaatacatatcttggcttcttggttggactccagtaaccgtggtcgcgtgccctcatttgcttgttcgctcatcgacgtattttttctt

SEQ ID NO: 14965 - DNA, 421 bp, Oryza sativa
  Clone ID: uC-osflcyp107d06b1
catctactagggtttctctctctctcctccccccctagacagccgtcgatgacgccacaccaccgatggggatggcgagggtgagggtgatttgcatctcacagggcaacttggtgacgtaatttatgagtcagcacagttagtctctgacatgggtgagagcatttatcttccgaccttaatctgtcacctacttctgatatcaacttattggagagtcgtgatattcacatacttctttccttgtggcgcggtgctcaaaggatggttcttctgctggagtgacattggtaacatcattagtgtcactatttagccaccgaaaagtcagagctgccactgctatgacaggagagatgactcttaggggctcttgtgttgccagttggccgtgttaaggatatggcacttgcaacacata

SEQ ID NO: 14966 - DNA, 305 bp, Oryza sativa
  Clone ID: uC-osflcyp108a02b1
gcttccagtggtagttagtctactgaacttttaggagctgaagatactcggagctaggtaagatgtcatccagaacgggcaggctgggacgtgtgagcctagcgagtctgagcgtgctagtgatccatggttactgaaaggggcagcctgtgaactacaactgctccgacagctagctaactgagcagaagagctttagcaatggcgacgccggggcagcagctgccgccggggttcaggttccacccgacggacgaggtggtggtgtgaccattctttactgatgaccgttcttcttttattca

SEQ ID NO: 14967 - DNA, 417 bp, Oryza sativa
  Clone ID: uC-osflcyp108d06b1
atttgttagaacaggataaacccccaactaattggacataatgaaaccaatgccggggattctgccacgttttattactgcgtgaatctgatgccttttttgagctataaatatagctcctgagcccctcctccactacacaccaaaacctctccaatccccaaatcctgctcatctacttttccagaacctttctttttcgatttcgtgttcgagttctttgtgattgcagcgatggcgttcgtggatctgaccccgaggcaggcgaggaaggcgcacggcggcgatggtgggacctactacgagtggagccccgcagacctgcccatgctggaactcgccaacattggcggtgccaagctgtcgctcaacgccggagggctctcccctgcccagtttttccgactccggaaaggt

SEQ ID NO: 14968 - DNA, 282 bp, Oryza sativa
  Clone ID: uC-osflcyp108e02b1
tcccgggtggacccaccccgtccggttttgtttcggccttcctcctgacccacctccggggcccatgccacccgaaccgggccacccaaggcggtgggaaacccaacccgggataaccctagatctctctccgttccgcctcgtggctcccccaaaccctagatccccgtcatgcaccaccccagggcgcgctacccgcccggctacacctccggcggcggcggcggaggcggaggcggaggaggaggcggccgtggtaatggcggtgggggatttggtgga

SEQ ID NO: 14969 - DNA, 539 bp, Oryza sativa
  Clone ID: uC-osflcyp108g02b1
gtttgctacttcaagaacatccaggtggtggacagcagcatccagctgaaggcccccaagggggtgggcacctacaccgagcagtccaattgctacgatgttcagaacggcaacaatggcgactggggcacctacttctactatggcggcccggggaagaactcgaattgcccatgaatttggtgatgaagaagctgatgatatatatatatttatatatatatatataatatatggtgacagttttaatatttcttttattttttagcattttgaaggcaatttgtattttcctaattgttatctaatatttgttcattcatttttaacagggttgtttatattcgttattttatctatattttaattaggtttaatatgcttttttttatttcatttcattcatttattaacttttttattttttaggcgactttttggttgttctttgtttatttatttaccaaccttagtttgttgtatttaacatctatttttttaattctcttatatatcttttactattttatttatatttt

SEQ ID NO: 14970 - DNA, 407 bp, Oryza sativa
  Clone ID: uC-osflcyp109a02a1
gcggccgtccttttttttttttttttttttttttgagaagaagagattatatcccaccatcgatcgattacaccatcatcaataactgaagagcagcctgacagatgattaaaattacatgtccatccacccaaaacacaagtgattaataggtggattatgagagaagatgaagaagaagaagaagtctagatgtcgaagacgttcttgccggtgaacttgacctcgatggggctgacgttcttgccgatgctgcggaagttctggccgacgccctgcctgccggagttgaccttctccgggtagacgccgtccttggggtggaggtactgcacctcgccattggggaagacacggtagaactggatagttgatcttgcacttggagcggagcctggtgcccaggg

SEQ ID NO: 14971 - DNA, 480 bp, Oryza sativa
  Clone ID: uC-osflcyp109a10a1
ttactttttgtttttcttttttttttttttttttttttgtttttttggaaaacacaaatccttaaacggaaaggactttttgagggaattttgcaccccattttcatggttggacaaccctcctatatgatttcacattcacctttgctgggtcaattaggggtttttttaattaaacgaaaaacaaaacatgtggcccctcgcaaaagaccacttggatatgagggccttgtatttaacaataggatgcttacaaaagagggcccaaccacaacaaaaaaggcggccatgtgacattggctggcctaatttgggggcggtcctccaattaattaacaggagaggatccattttggggccttagttttttaacatgctgggcttaacgttgggcctattggaaattttaacccccaacgacttattacactgggagaggttgttgacccaaatggcgcggagctcaggggagaccttggg

SEQ ID NO: 14972 - DNA, 482 bp, Oryza sativa
  Clone ID: uC-osflcyp109b06a1
gccttcgtggagcacaaaagagatggattgacgattcacggatcacattctttttttgtgaacaagaaagatccatgcttgtattgtggtcgaacacgccttctctgactgctgctgcttgctcattcattcgtaggggttcctgaagctcttgaggagatcggggatgtcgtaggcgagcatgtcgtcgacgccctgcaccagcttgggcttcagcctctcgaacttgtcgaagttgtaggcgctcagtgtctccctgtactcatccacgctggggaagtcgccggccggcaagtgcaactccttctgaaccttggcgaactgctcgtcgagggtgtcgagcagccgctgctgcgccttggccttgcccatcagcgccggcatctccttcttcaggtggctgattatgtgagcatggaccttggctgaccttgaacgcttcacgaattcgttgattcgacggtcacaggtttttttggaat

SEQ ID NO: 14973 - DNA, 517 bp, Oryza sativa
  Clone ID: uC-osflcyp109c02a1
gaagagatcactagcattggcacaagaccatcaaaatttcaattttcaggtacaatgctaataagattttgcacaacagacgatgtccttgaggacggcagtacaacaagaatatggtcatgctgttgcaaaaaagaacagaaaaactcccctgttattcacctttagggagggagtcaggacggtaaatctacttacgacatgcacgccaatgtgctggtgacaatttacatgtctccaggaattaacacctgctggaaaagcctacagctgggcttcagggatcagtcatgcttgcacatctacatttggtcccagtcaatagaactgttgttttcaaaattataacttggttgctgtagacggttgcgacccaatcggctcatcatggcaagtccttccatgactttgtatagcgatgaccaccacctatcagatggaacctcatactgagcgagtgtatcatcaatttcggtgttgtgctttcccttgaggacattttgtagagtgattactg

SEQ ID NO: 14974 - DNA, 239 bp, Oryza sativa
  Clone ID: uC-osflcyp109c10a1
agctattacattttttttttttttttgtgttcttcatattactgaataaaaggaaatattctgactatggcctctaccacgcactggttctaagccaatttaggccggaacccttaagtgcaggacaacggagggggcaaactggacagtacaccgtcggtgcggcaacgacccaaactaaccctacactggggtggaaaagggactatatggggaccaactcgaaaaaggccggccta

SEQ ID NO: 14975 - DNA, 499 bp, Oryza sativa
  Clone ID: uC-osflcyp109d05b1
ttgaagatgattacatttttcagactgtatgtccttggtgagaaagacatttaaaattcaactttggtcctgaatggattggtgaggagagtacatatgtatcagctgatgaatttgagccactgcccatcaagattagtgcaaaaaagatgggaaatgtctcacgtttcatgaaccatagttgttccccgaatgttttctggcagccagttcagcatgaccatggagatgacagccacccacatatcatgttctttgcactgaagcacattcctcccatgacagaactgacttttgactatggtgttgctggatctgagtcttcaggttctcgtagaactaagaactgcttttgtggatcatcaaactgccggggagtattttaattgatggatgtattttcattgggttggatcaacacacaaacctatttgccagaacttcctgcctgtacccccagattcgagctctggtattatccctgagaatgaccatgggt

SEQ ID NO: 14976 - DNA, 429 bp, Oryza sativa
  Clone ID: uC-osflcyp109d06a1
tcgcgatctagaactagttttttttttttttttttttttttttttttttttttttttggtataaacaaaatatttttgttgcgaatatacccaacaaacagggggtctccaagtgtggacacgggggagaagacagagggggcgcatgtatcaagtctatacacacgagcagaagagacaccaccgcgggcccccatggggctcgcaaataacccccccgcgcgggggggaaataaactccaagcgggcgtaaaacctccttgggcaccccaccatttgcaaattggagaaccacccctttttacaccaaggggggcccccaagggggccaccccggcatcaaaaaagatgccccccgggggaacaaagcaaagggggccccccgcaggaacaaaaaaaacaggccaaaggttgcgctcacacactggg

SEQ ID NO: 14977 - DNA, 296 bp, Oryza sativa
  Clone ID: uC-osflcyp109e02a1
aggggaggaattaaccattaacaactccattttttcatatcggaaataagtttacagaatttccaaaacaacacctgtaaagagacgattatctttatacaagacagttaccgaggcgtgtttgtgaatgaaggagaaggagaagatcaggtccccttgacggggtccaagatgggaactgggaccacggggcccccaaaggggatgagtaccaccccccccgacacaatgtttagggggaagtttttgggcgacggactgaggcttaccttggggggcttcccgacatggggggg

SEQ ID NO: 14978 - DNA, 392 bp, Oryza sativa
  Clone ID: uC-osflcyp109f06a1
ggcaagcatgaaccatgccacactgcaaacactgcatgatagcatcaacattatgctgtacaaatgatactgcactgtttctacttccaattaaatatcagggcccaaggggctcttgttacatcagaagaccaagaacaaaaaagaaagaaaagcaaaagaggaaacaaagcctttcaagtagtacaaatggtggcgaaggaaaaaggaattctgtatgatgaaggggtatccaaaagcacactgcaaatcagcttcagttgttagtgattagcttatttcggaactaaaactctccttttttttttttggctgctgctgtaaactggtactcgcggattgttagaatcaaaactttgtttgcctggccaaatcttcctaattttacaatt

SEQ ID NO: 14979 - DNA, 362 bp, Oryza sativa
  Clone ID: uC-osflcyp109g02a1
gtcctttttttttttttttttttgcacgaaatgtagggatattatcacaatggaggaagcatgtgttgcattcaggattacagatacaactagaaaagggaagaaaaagctgagttaacaacagaagacacgcccttggcttacatagtctatacacatcaagcatacacacatggggtgatgctttgtcaggctcctaggtacgtaggaaggaagcttccatggactgcaggatactcgctgtgtccaacctgaagtttcggaagcttttacctgggcggctgtcaagagtttgtgggtcagatcctgttctagtaataacggggtttctcaacaggcgctcgttccagttgaggaatttt

SEQ ID NO: 14980 - DNA, 443 bp, Oryza sativa
  Clone ID: uC-osflcyp109g04a1
ggggaaccaagatacattttgccaaaaacaaaacgtaaccgtatatcccagcccaccaatggaaactcacggtaggatctagacaagaacaaaaccatatacattctacagtctaaatgtaaactgccctacaaactgggatacggagatgcaccccgccaccaggggggggctctccaacaaatgctaagcccccagcaaaaaaaatatattaggggcccaaacagcatgacaagctagtgccctcaaattggagaaacttcccagggtcacgcttgcacaatccaagccaccgaccgatgggccactaggaaaatgacttccggtgaagagactatccaagaaggctctatcaccggtttcaactttcgcaagtataaaattttgcgagcctaaaattttcctgcctaaatggcagactaaggctccaaaattgattgcct

SEQ ID NO: 14981 - DNA, 456 bp, Oryza sativa
  Clone ID: uC-osflcyp109g12a1
gaaagaatattcagtctgcttgaacgaagatgataacatcagtggtagctgagagtctatttacaaaggaacctgatcatcatcattatgtacaaaggatgaagaagccacaagcaaccaaggaagtctataaatttcagtggcagtatattgacagttgagagtttctcccttcatttcagcagccataggcatgatcaggaaggcgttttcaacgaatattgtcaggtatcatcgcgaccgtcaccaggaagtactcacatcccacaggcagattgtacgggttcagcatggaagcgggcgaccggcggtcaccgctatcaaggcgtgaagcttccatctggtcaccgtgcgagggcagctttgctatgcgccgttcgatgtgcacaatctgcccgattatgtaagctgggtgccgaggatgctgctccgtgaatagggccactgattcctttg

SEQ ID NO: 14982 - DNA, 399 bp, Oryza sativa
  Clone ID: uC-osflcyp109h08a1
aaaaatcccccgggaaaaaaaaaaagggggggggaaaaccccccaaaaaaaaaaaaaaaaggggggcccccaaaaaaaaaaaacccaccaaaaaaaaaaacccccccacacaatttaaacccgaagggccccggggggaaaaaaaaaaaaccgtaggggggaaacgccccaaacccccaaaggggggggacccccgggggaggggcccaaaggagggggaggaaaaagggccccttaacccgggaaaaaaagggaaccaccggggcccacgggggggggccccccaagaaaaaaaaaaaccctaaaaaaaaatgcccaagggggaaaaaaaccccgcctctgaggggggaaaaaaaacaggggggcaaatggttggggggaagaagacccccccccccc

SEQ ID NO: 14983 - DNA, 401 bp, Oryza sativa
  Clone ID: uC-osflcyp110a04a1
caaagaaagcaacgacccatgaaaacagggagggacacgttcatgaatggacaattttgggaggaaggagtatcacacaacaggcaaatctgaaacttgttatagggccttgcaaaagtagaactacaatataggctcaaattggtatttaattctggggcttttaggtcatatatatatatatatcagggaaaggttgggttcatcgaagggaaagaaacctaaaatcaactggctgaaatttcgagggggggacaaatgcttaaaaagggggggggaagaaggttgcaaacaaacaccaagttttttttattccggttaccaaaaactttgccgggggggggacggcttttttatacaagggacggagcacaacctttatatatacaagttataagggg

SEQ ID NO: 14984 - DNA, 451 bp, Oryza sativa
  unsure (1)..(451): unsure at all n locations
  Clone ID: uC-osflcyp110a04b1
cacccctggggattcggatcccacctcgcgcgctcggcccgatcccgtcctgattcttctggaaccttccgcgcgctcgattcgtgctccgccgacgcccgatctcgcctaggtgtatacgctacatttacaattgattgatctggcttgtccacccctcacatgagctcacaagtctccacatcacggggtttgccctccccaagcaagcttgggacatttgagtcccctcacacatggcaaatgtcaggtcctacaggccaggctgaagctggtagcagcgatgaccaggatatcaggctgttgtctgtttcttggaatcaggactttggttgcttcgctgctggaaccagcaatggctcaggatctttaattgtgaccctttaaggagactntcagagggatctgaagagtgtgaatttggattgtgaaatgctgtttccgtgcaaca

SEQ ID NO: 14985 - DNA, 376 bp, Oryza sativa
  Clone ID: uC-osflcyp110a12a1
gactcttaagcacttcaaatgaaatgagtcataaggacaggattgagattctgggagaactatcaatctctaactcgcattctttttacagagttgatgataacagatcacacttatttgtagttgatagaaagaaatcaccagctgctattggacgaccattttacaaccactgccaaaagctacatacaccgcgacacaattttgccgaagcattttagaaacaaactagctcgatcttatgtagtcatcatataccttgtagttcttttgtttctcttggggagttctttgtctgcttctctcctcaacatgacaattgggtcatggacgtgaaattttccttttttatggttaggtaaaaggtttccttcgc

SEQ ID NO: 14986 - DNA, 428 bp, Oryza sativa
  Clone ID: uC-osflcyp110a12b1
tctttctttagcatctaatgaacctacctactgcgggtcctatctcgtgcgtcggcccggatcgacccggctacggcgactagggcgccggcaccctcgtcggaaatgggagaggacggccggactcgattccttcctctttacctgggagcctgcgaacgagggccaccctgccaagctctgcgaccaagcgttaaatgctgtacttgatgcctgcctcgccgaggaccctgacagcaaggacgcttgtgagacctgcaccaagacaaacatggtcattggtctttggtgagagcaccaccaaggctaacgcgggctttgacaagactgtcagggagacatgccgtaacatcggttttgtgccagctgatgtgcgtctcgatgctgaccactgcaaggcgcttgtgaacatcgagcactattcccca

SEQ ID NO: 14987 - DNA, 435 bp, Oryza sativa
  Clone ID: uC-osflcyp110b08a1
tttttggttttttttactttttatttgtgtaaacatccagatagggcaacctaacaaacggaggcgcgcgaaatagacacggcatgctaagccgaaacgtcaaaagataaagaaattgtatgtttctacggatgtatctctaagcctgcctgtataggaaggatcggatcggagtaaggtctatcccctgagcatttgaagcacctgctgcagcgtgggagcaaatctggtgacgtggagcttgatatactgctcaatccagcatgacacaatcccgaactgccacccttgcttgtgtatagatttcggggccctgatcgccgggtggaccttgccgtacttggcgaagagcgtgctattgtcggaggagatgctgaactcgacgtcgcgcagagaactctccctggccggaccaccgcaaaacaccatggatgc

SEQ ID NO: 14988 - DNA, 392 bp, Oryza sativa
  Clone ID: uC-osflcyp110c04a1
aaataccaatctcaatgcatattagaaaagttaattcagaacgttagatagacagcctaagcttcacatggtcagagccacaacacacgtgcaaattttcagacatcttgtgcattccattctaggagtaggtgaccatttgagaagatagtagttggctgcttctaactcaactttctgacgaacatagacccttactggtattctcattgtagtcaagagcatgttccaagtattcatggaacataatgcagcagtacaagcacaagaacagtagtgctctttctgcatcaacaacgctgcgaaagagaattcttcatgtctttcacttcacaacgttgaatcacttggaatctatcactgactggttcccgttagcagaattgtcctcc

SEQ ID NO: 14989 - DNA, 485 bp, Oryza sativa
  Clone ID: uC-osflcyp110c12a1
gaagcacaatatattttccatcagccattactgatgattgtattatttgtctgctcggatgaattcttattcatcgatgtaaagcatccgatcagtggttatcagtgcaagcttgaagctagaacgagctattaggagttgaaaggcctctggttgtagcagtccaagttggcgccgtagctgacgcccaacatgtcgcagtagcgcttgtagaacccaatccggtcggcgactctgctgtccgcgccgtggccgcactccacgccgccgttgatgatgttggtcaccacgccgtagcccggcacgcgccccgccgcctggtcgttgccgttgggcgtccactgccctgtcatcaccgcgtggcacgacggcttgggcgactgcggcgtcatccagaaccagaacgccgtcttgaagggagacggtggcgtccgacgccaccaggttcgggttgctcaacaagttggagccgatggcctgccccg

SEQ ID NO: 14990 - DNA, 483 bp, Oryza sativa
  unsure (1)..(483): unsure at all n locations
  Clone ID: uC-osflcyp110d02b1
gacacatagaaggttttcatggagaaagtactggtgctctccttgatatgtatttcactctgccaaggatgggtggtgcaatctttagaatatgatcatacagcaagtattgagtgccttcgcgatccgatgaagccgctgtacaacggcggcatcatccagaacggcgagttcaacagcggcctcatgggctggtccacgcaccgcgacatcaaggccggcctgagcagctcgccgtccggcaacaagttcgcncgtggntgcagcgcgccgactccctctccggcgcccgcgtgccgtcgcgcagcgtctaccaggaagatccagctgcagggcgacacccactactcgcttgcgnngtggtgcaaggggtcggccggcgcccggcacgtgaaggcgttcgtcaagacgcccaacggcaggcgcgtcgtcgccgcagcgtctcgcccagtccggctgctggagcatgctcagggcgggatg

SEQ ID NO: 14991 - DNA, 671 bp, Oryza sativa
  unsure (1)..(671): unsure at all n locations
  Clone ID: uC-osflcyp110d08a1
acactttgaagagatatccggcgcatggacgcgtaccgtaggttggatccttttttgggggcggccttttttttttttttgttttttttttttgaaccaagggatccaattattattcactaattaagcaaaaaaggaaataaaaacaagtacaaaattgtttgacaaaaaaaaaatggagcacgctagcacgaggacaatgtacgtgtcacactttcctagaccttaatgttgaccaggcgctccgacgccaacgacgcggcgtccaccgtcatggcgcggacggtggcgttcgttcccagggacgggtggctcactgtcaggttgtagtcgccgtgtgggaggtcgagctcgacggcgccgtcggcgccggtcgtcgccgccgtcttgtgcgtcttccactcggcgatcagcttgtcgacgagggtcccaacgggcaggttcttgaagctgttgtccgtcaggcacatcacgtagcaacccttggcgtgccacgccgcccacattatcatcccgtttaccgacgggtgcgcgtacccttccctcagcacctgctccaagaactttacctgggtgggtcctttgacgacatcgacctcggtgagccacatgggaagcttgagctgcgcnaacgtgtcgagggcgctccttatgtaagggatttttggggg

SEQ ID NO: 14992 - DNA, 511 bp, Oryza sativa
  Clone ID: uC-osflcyp110e04a1
ggcccagaagaagagggcggccaccgggctgacgaagccccggctcgtgtctccggcgctgcaggcggtggtgggagccgcggagatcccccgcaccgaggcgctcaagcgcctctgggcctacatcaagcagcacaacctccaggatcctgcggacaagaaggtgatcgtgtgtgatgagaagctgaaggtcctgtttgctggccaagagcgcgtgggattcctggaggtcgccaagcttctgaacccgcattttgtgaagtgactgccctcatcagtggagttgagttagcttagatggtttttagtgatcttgaagggggttcgtagattggttttgttggcctgagttagctcgacttcgtagcctcgtaggtttacctatttctctggagacaatggtagggtgcctctggcagttgtagtaacactagtaccgacgttcttagcaacttttagcacgtatccgtggtaatgtattagcaaatggagatgtggtctggccctgggg

SEQ ID NO: 14993 - DNA, 469 bp, Oryza sativa
  Clone ID: uC-osflcyp110f08a1
tttttgggtttttttttttttgttggggatgattcttttttcactaccgtaaattaaagttcacttggccctacttgtcaaccacaatgccattacaggattgaacacgacaggctaaaaatgtaccttcagaccatgcgtaaaggttgagaaaacgtttctcaattgaactggggcatctatggcggccccaaaagaaaaaaagttaaaaccaccggcgacgtaattacagttcataattggaatcgggggaagggatcgagaactaccgttttcatggaatgaggctagacatgacaggggtcatatttctcccatgttcgggaaaacttcgtgaacttgtgcaaaccccaatcagcttaaagttggggatgagactacatggggcgacattgcacaaccaacatggacaaatttggaacggtcgccgttaacatggaaactttttccttttcgggcttaaaggtct

SEQ ID NO: 14994 - DNA, 405 bp, Oryza sativa
  Clone ID: uC-osflcyp110g04a1
gaagtaagcaatcttggccaagcatttgtatattcagtacttaggtaggttttttttcccaatgtacaaatagttgagatgccaggctatactaaagctaccaatacatttccagccttaattgaggcctcagcaggaaataaacagcacactacaccaccctatagctaaactttgcttcaacatgaccggaggacgtttcctcttaaaacatgggaaccgtgtatctggagcttgcaactcttagccttctcagttgagcagagacaaatacaaagccaaaaaaaaaaaaaacacgaaaacgaagaagaagaaaagattagggttcaagcagaaaaccgtagaaacaaatctcaaacaaggcctcgcttaggatttgcacaaatgctaatcaagtgtggatga

SEQ ID NO: 14995 - DNA, 473 bp, Oryza sativa
  Clone ID: uC-osflcyp110g12a1
tttttggtttttttttttttttttttttttttttttttttttttttttttgttttttttttttttttgtttttttgcccgagggcaaattgttccaaacaagagggggagggagggtcacgggggtttaaaaggggaaaggggggaaaagaaattccccccaattaacataaagggcccacaaaataaaaccccccaaggggggtgatgggacccaatttgggtgaacgcacccgagggggggactttttcccaaaaaagggggggacaggggggaaaaaaaaggggttttaccccgggggaacccccgggcccaagaggggcggggagggagaaaaaaaaatttttcgcggggggggaaaaaaaccaagggggggggaaaaaaccagggggggggggggaaaaaaacaagtcttgttggggggggcggggtttaaaacaaggggggggccttgggttcaaccaaaccggggg

SEQ ID NO: 14996 - DNA, 398 bp, Oryza sativa
  Clone ID: uC-osflcyp110h08a1
aaaaaggaggccccacgggggaacatttaaagaaacaaaagcttccagacgggaacaacccccggggccaaggggaccagattcccccccggggggttcacgggaaaccccggccaaggccccccccggggggacccccaaaatggcaaacccgggtccccccccaaagaaaaaaaacccccgggggcaacccaaggagggggggccttccccccagaaacaaaaaaaaagcccagttcaccccccgggggggcccgggggggaacccccaagggggggcgggaacccccccccggaaaaagggggccccttttttttgggggcccccggggggggccccaaactggaggggccccaggggggggggggccccctggagggggggccccacagaaaaa

SEQ ID NO: 14997 - DNA, 383 bp, Oryza sativa
  Clone ID: uC-osflcyp111a04a1
aaaaaaacaaaaacaggtttattcattaattcgtttatttgggataacccaggaggggggcccccttacataataccccagattcaagccccgggcctgggcctgcagttaattaaacaacccctggggtggggtcccaattaaaaccctggaacccaggccgtccggccggagtaaaacccatcacgcccattttttttggggggctccggccatagcacagcccggccgtataataggccgtttaatccggggcttattaatcaaggtccggggggaattaattaacccgggtcggtggcctaacacagggggggggccgtaattaaataaccggttaaataattacccggggaaaaggggggggcacccgccaaaataat

SEQ ID NO: 14998 - DNA, 470 bp, Oryza sativa
  Clone ID: uC-osflcyp111a10b1
tcgggtcatttgaccctgccaggcaagatcgttttgatgtcaccaagacatggccagaggatatcatccccctgcagccagttggacggatggtcctgaacaaaaacattgataacttctttgcagaaaatgaacagcttgctttctgcccagcgataattgtccctggaatccattactctgatgataagctgctccagacaagaattttctcctatgctgatacccaaaggcaccgtcttggcccaaactatttgatgcttcctgtgaatgcaccaaaatgtgcataccacaacaaccaccacgatggctccatgaatttcatgcacagggatgaagaggttaactacttcccttcaaggtttgatgctgcacgtcatgctgagaaggtccctattcttctcgtgttctacaagctgtcggaaaagtgtgtcattgacaggagaacaattttcaacagcttgtgagag

SEQ ID NO: 14999 - DNA, 441 bp, Oryza sativa
  Clone ID: uC-osflcyp111a12a1
tttttgtgtctttccacattcttgcagtaataataatactagtacatcaaacattgggaatcacatcagtgccatactatacagctagtcataaacatcatacttccgagagatgcctggatctgaatacaccatgcaaaaaggatatctcaaatacaacatcagagggtctttcaacatacagagtcctaccggaagggcatttgctggtcatgataccgccgtgctattggcagtttccatactgttgttgattgcgagaaccaccttgattataggtcgggcctcgacctggaccagatgcaccataaggggcaccctgttgataatatggtccgccaacaccatagccactggcaccaccaccccttggaccaccggctccgcccatgccaccaccaggataagggggaggacctcgttcctgctgtggatatgggc

SEQ ID NO: 15000 - DNA, 377 bp, Oryza sativa
  Clone ID: uC-osflcyp111b06b1
tgtcgccgccgccgccgccgcgcgacgtcctagcttcccggaccgcctccgcgtggttggatccggcgagaggggagaactgttgtgttccttggaagcgggagctggatgaaagctgggaggaagaacctacggcgggcgtgcagcgagggcgccgtcacgctgggggagggcgagagcatcatgcaggtcctcgcgctgcgcggctccaacgtcatcgaggtgatggacgccaagggagtgaagtctctggccttgttcccggccaagttccagaagagcttttggatcaagaatgggaatttgggggttgttggatgctagtggcccgggatcaggcgctcgaatcagggagcaagatagcctgtgttgtgtcc

SEQ ID NO: 15001 - DNA, 223 bp, Oryza sativa
  Clone ID: uC-osflcyp111b08a1
ggggctaaaaaaaataatttcatgatccaatctgacatctgacatataaacactggtcatttacttgggaataaaacatgtaaaggggactcctgactcctgagtcgatactgactttttttagggagggaatttatatcgaatggcataaagccatatgcctaatttacatggacaaactccaactagggatgaactggtgatctgagaacgagggagagga

SEQ ID NO: 15002 - DNA, 372 bp, Oryza sativa
  Clone ID: uC-osflcyp111c04a1
gagacaaccccccgggaaggttggaattaattttttgaggggaaatttacattaacaggtggtcccagcccaaccaaaaatacataattggttggtccataaggatgggctggatgacatgcattattttatttaagaaaaaccatttgctaaaagggagcccacttggctttatctactatatacgggaccaggtccctggctgcattggagggtggggggggttcatccttgggcacatttttggggaatcccaagacgcttttttggggggccaaacaaaaaccggggggcccggctgggttttggattggcacgaattttggtcacttcctcggagaatttttgaagggtggggccgcccttggggaa

SEQ ID NO: 15003 - DNA, 474 bp, Oryza sativa
  unsure (1)..(474): unsure at all n locations
  Clone ID: uC-osflcyp111c10b1
gaaagagaaaaagaaaaaggaaacctcaaattcccattcttcctcgtcttggggcacaactccgatttagggttagctcctcctcctcatcgctgattaggattcgattcgaccggatccctcgccgccttcgccatggatgatggtgatgagcccgtcccctacgtcatggatgagggtgtgctactacccttgctgtttccgccgccgctgccggccgacgacgacgccaccggcggcgtgagcccaagctgggtgtacctcgaagacagagcttacgtctcccccgatgccgtctccaactccaccaccgncttcttcaccaccaccaccggcgtaagcatccatgtctccttttgcctcgcccgcccgncgngcctttnctacctttgcgttcactgcccccgccccggcgacggcgagggcgcctacccgttcactgtcgatccccaagtcctcggcacgcacaccaat

SEQ ID NO: 15004 - DNA, 440 bp, Oryza sativa
  Clone ID: uC-osflcyp111c12a1
aacagtgaaacctgctaccactttattttctgtagaaaattacaagaacgtgttgcctccttttgacatattcgttcgatattcttttattctttccctctctgtgtacagaattacatgtgacaactgccttctgctttgcgtttcccacacctacggaagaatgggtgcccatcttgaattttatatacatgtcgcgccttgttaaaatgaacaattcgtatacacgaaccgaaaaccacaacacaacggccactgccattttgcactttcatcattccaaaatgtgcagcccccatttcgctagttctctacttccttgtaccctttatcatgggggcgggcctgaggagcaagtgcaatgcctagaatgtttggactcacaggggaaactctttctgaagaacgtcagggtgcgtgaatcacatgcagcgatcatg

SEQ ID NO: 15005 - DNA, 406 bp, Oryza sativa
  Clone ID: uC-osflcyp111d08a1
cgtagcaatagacagagttattccatgtaaacagaccacatgcatataatacagaccattcaaaagattggtaatagtaaaaatacaagttcgtgaatggcgataatacttaaagctacctccaaatagcgtgtagcattgcgtagcaaaccaagcatataacttaggacaaacattcagttgcagcttcacatcatcgctgcttatcataactgcaataacagcgcagatggagcataaactaagtatatttcgtagttctagcttatatataatatcagaatcaccaactgtgaaccatccacaggatggtcgggggactactgatcagaatctactcctttgaggtgtggatggcagacacggtggagaccatagaattcacgccacatttgttgcggacgtt

SEQ ID NO: 15006 - DNA, 424 bp, Oryza sativa
  Clone ID: uC-osflcyp111e02b1
ttggggacctgggaggccgcgcaagaatgctgctgctgctgcctctcccgttgctccgccgcctgcatctccactgaagcggggtgttggacgcccaaggaagaacgccactcctctagtcaagcctggacctgggaggccgtctggattcaaacgtggaccaggccgccctcgcaagaatgccactcctcctgtgctgtcagtgccacccactgctgctgctgtgttgggagtgaagcgtggccgtgggcgccctagaaaggataaaccattgcaatcttggtctgtgctctctggcggtgctgcaatgactaagagagggcctgggaggccaagaaagaagaggccactggaactggagtggtttgtggcagcacaggtagacactgcaatgaaggtgaggctggagcccgtcaaatggagt

SEQ ID NO: 15007 - DNA, 455 bp, Oryza sativa
  Clone ID: uC-osflcyp111e04a1
attggtattctattgtttctttttgcatgtttttttttttttttactttgtttttgggcaataccaattacttctgttttttttttcaccctaacgaagtacagactaccacagggacaggcatggcttccttcccagattttgtacaggagacaggcctaacaaaaggagggtgggggggcaaaaaaaaaaaattgatttctggggatgcaccgtgggagagggggtcgataaggaccgcacacttttgcaaggcttcgtggaactcggactttttgacggttcccaggaccaaagttggtccgtaagagacccccaccgaggggggtaagattgcaggccccggagggagcagggggctgttttcaatcccgcctgtgaaggggccataaaggaaatcggtaaaagggtttttaccagtgagcgggtcccaaatttcaatttccaaggggaaa

SEQ ID NO: 15008 - DNA, 448 bp, Oryza sativa
  Clone ID: uC-osflcyp111e10b1
agcttggtgagctgcagagatggccccctccgtgatggcgtcgtcggccaccaccgtcgctcccttccaggggctcaagtccaccgccggcatgcccgtcgcccgccgctccggcaactccagcttcggcaacgtcagcaatggcggcaggatcaggtgcatgcaggtgtggccgattgagggcatcaagaagttcgagaccctctcctacctgccaccgctcaccgtggaggacctcctgaagcagatcgagtacctgctccgttccaagtgggtgccctgcctcgagttcagcaaggtcggattcgtctaccgtgagaaccacagatcccccggatactacgatggcaggtctgggaccatgtggaagctgcccatgttcgggtgcactgacgccacccaggtgctcaaggagctcgaggaggccaagaaggcgtaccctgatgca

SEQ ID NO: 15009 - DNA, 410 bp, Oryza sativa
  Clone ID: uC-osflcyp111e12a1
ggacgaacacatataccttcgttgcaatcacaaattcgcaatcaaaagatccaagttcatcacatggccaactgcgcgagagatgacacaacacggctgaaccgctaaaaaaccgctacgaaaatgttttaggatcatctgggcattcttctctgtttaaggttggtaacagagcatgcagtgctaccttcgtctcgggctcgtggcacgaaccgccaaaaatcgacggcgatatcaacctcgttttgtttgtgaaacttgtatgtccgtggtaggttgtagcgaagctggaacagagggaaatacagattatcatagcaggaacaaaactggaaacagaaaacatatgttttgacccgtaaagccttaaatgtagaataaactcatctagaaaccaatcaactttttgg

SEQ ID NO: 15010 - DNA, 372 bp, Oryza sativa
  Clone ID: uC-osflcyp111f08a1
caagaatctgaaatctagcgaataccattaattttttgaaggacggagattccatggagaagaaacagcgaatgtgattatggacgcgacattgaggtatatactttttttcatgacttcatttaaagggattttttttgctccccatccgccatgtacatcggaagagaagaagaatgctaatttcaagatcaaaacactgggatcgaacaataggcttggttgttggaatgagcccgactttggcagcctaaatggctcgtaaaatttcgggatgaactcctcggcctgcatgtcgatcggattcgggctgaatccaccgtcctccctttccggagaattctttttttcttcctgggctttttttccatg

SEQ ID NO: 15011 - DNA, 521 bp, Oryza sativa
  Clone ID: uC-osflcyp111g04a1
gtgccaagatgattacaattattctgtaatgggatcatcgagccctggctgccgaatgcacacgacaattacaaaacgctcagctaaatatatctggaaggtttccgtgagcagcctcaaagatcctccggaccgttgatgtccttgttctcaagcacggctccatctgggatctccaacttccctgacttggcggtgatggtcaccttacccttgagtgtaactccagagccgaaccagacatcaccagagaccttcaaggtgtcaagctcgacaatgctggggattgacttaaaccgggccaggaaattggcaaccttcttgaactcaggtccaagctcaatcgaagggtttgatgggtttgttctggctgggttgcggatgacaaagccatcgaccaaggggtacaaatcagactgtacaagcaacatatcagatgtagccttgactggcagaaatctcgagcgggaacattaatgccaattgctttttcaaagaccgaatggctgctccagctgcag

SEQ ID NO: 15012 - DNA, 420 bp, Oryza sativa
  Clone ID: uC-osflcyp111g12a1
ggattggatatgttccagatctgaataactggtctcatcaccatcatagttcacaacatataatttctcatcacaagggtcggggtcatcatgcagcaatgggctaccaatatttggggcatttacattggtttaaagcatgggttcgacgaactacagctgaaacaaaaccagatagtccgctaagttcagatgaccttatagttatatgaagctcaaaaattgcaatgaccacgtagctcctagattcccagcatggtatattcatctttggaagcacttgtaggtcacaagggatcagagattctccaatgggaaatcacgccacacatccccttgggctggttggctttcctgatctatggcgggtgctggatcctccgccttctccggttttacgggcatggggggcggcacggg

SEQ ID NO: 15013 - DNA, 453 bp, Oryza sativa
  Clone ID: uC-osflcyp111h08a1
agcagaaggcaaaggaaatttcccgcaaatacttattcatatgttttgacaacatttctcccgacgcatgctcattgtggcagacgcagctgaccacctagagcttttagttcaccattattatttagaccaagcatacgtcccaagatcagaacacatgcttacaagcgaaaatactaatagcctggctggctgtttcacagaataaccaaacgacaacctcaacagataaaaatgccacggaatgaaaacaaagcaacgaattgtcaaccagaagtcccatcttactcatcaaacactccatgattctcctccaacgcatcctctccccaggggagaagattgcccagtttaccttccttaacaggagcagggttcaccatattctcagcctcgaagcagtgcagaacagatttgggcgacccaacagcaacaggtacgtcttcagtagcg

SEQ ID NO: 15014 - DNA, 439 bp, Oryza sativa
  unsure (1)..(439): unsure at all n locations
  Clone ID: uC-osflcyp111h09b1
tggaaaaccgaccaatctccatacaacttagaggtctgacatgcatgaaaggctcaccagctagggccagggtagtatatgctcctgtgctggaagttggtgaagagggacgcctacaacgtgcttgcaaagttataactgatgcctttgtcaagtcgggcctagtacttgaaagggatgcgaggcaagaattgaagttgcacgtgaccataatgaatgtgaggcacaggaagagcaagagatggaaccaaagaaacgactcattcgatgctcggaatattttcagaaaatatggggaacatgactggggcgaatacctcattcccgagatccatctttcgcagcgattcaagttcgatgaagagggtactactactgctgctcttcaatccccttgcctgcggcggagatgcnaacgagtgagtttcataataacaca

SEQ ID NO: 15015 - DNA, 125 bp, Oryza sativa
  Clone ID: uC-osflcyp112a12a1
tttttttgttttatcaacatcacctattcaaatttataagctcctgatgtaactaactcccaacggtcagttttgataggaagaacaaagtataaaatcatgcgagaatctatctggtgctcaag

SEQ ID NO: 15016 - DNA, 60 bp, Oryza sativa
  Clone ID: uC-osflcyp112b08a1
ttttggggttttttattttctttcgcttatattacacattattttatacaatatttttta

SEQ ID NO: 15017 - DNA, 318 bp, Oryza sativa
  unsure (1)..(318): unsure at all n locations
  Clone ID: uC-osflcyp112b08b1
tgnctgactgaagcttggtccaacgccatgtatctggttaaaagacgttgctaacctcaccgcggctcgccaaataatcacatgaggtggctgttcatatctggcatatgctaattgcgaaactcgccggttccctatggctgcctgtgtgccttagaaataatggcgaatgtttgccctatcatgaaaagatgcagcattcttctgatagcctttctcctcgcaaacgcatccagggagtcttcttgagagcagcggtggacagcccgaggcgaacggtccaacagatctccccgatgacagagggcgaggccacta

SEQ ID NO: 15018 - DNA, 441 bp, Oryza sativa
  Clone ID: uC-osflcyp112c04a1
ggtaatatatcatatttatttatgaaatgaaggaaacaattacagcagcaagcacataattaagaaatatgttattattggttaattgtgcttgtcctccgttatgatcatcttgtcgatgttgctgagcacctaggcatccctgtgggccatgttggtggcgtcatcggcggtgagcggcggtggtggaatggtgcagggctggtagtcggccacgtactgctccctggactgcatcatgaagtcgcgggcgcggccttggcgggggcacgccatggactccgggcacagctccacggtgcggtccggcacggtgggcttgtagcggagcaacgaggcgttgcgcgtgagcacgtgcagcatgtagtcgtagacgttgtccatggccatgttgttcgtggtgaatgcgctgccggtcaggcccatgcgctgcgcctgtgc

SEQ ID NO: 15019 - DNA, 371 bp, Oryza sativa
  Clone ID: uC-osflcyp112c12a1
agttaaaaagtactagaccctttcaccgctttaattgaaaagcggtatcatatcataattcatctacacattcttcactcaaatattagtttataaataatacagatcgagattaataatcttactatatacaaagtacatcatacttttatacatactcaactggggctaactgtccagtaaccatagatccaattccaaattatgtcatttcagataagatcatcatccaagtgaccagagtccatcaacgtacatctgaattgtgatgtcgcgatgccttcctcttgttctttcttcattcccatggcttcttaaggttataatatgcccaaaggccttgacgtgcattccgggcccttttttcccac

SEQ ID NO: 15020 - DNA, 400 bp, Oryza sativa
  Clone ID: uC-osflcyp112c12b1
tgtacatttggagaaagctaagatgatcgatgggtagttgagctccagatccgattatgaaattgcagaccgaatactggggcataaagtgggcgccatgtgaatcaagacatgatcctgtgcttggggcagcctactccaaaggaagaaggccagctactgtgccggaaaggacttctaggtgaaacgatagttgcttaagaggttgacatatagatgaatcatgataaggcatatggttgaagagttcttggagctacacatgctgaacaggaggactaacaacatgcaataagagtaatgatatgtgctctagaagctgacccaacaaacctgaaagattttccagcactaggtgtgagtgacactaatgagacggagctaggagaatcatatgcat

SEQ ID NO: 15021 - DNA, 462 bp, Oryza sativa
  Clone ID: uC-osflcyp112d08b1
tgttcggagagagagagagagagagaggagagcggcggcgatggcgtcgtcgccgtcgtcggcgtcgagcaggttctcgccggcgctgcaggcgtcggatctcaacgacttcatcgccccctcgcaggactgcatcatctccctcaacaagggcccctccgcccgccgccttccgatcaaacaaaaggaaattgcagtgagcacaaatcctccagaggaagcagtcaagatttcactgaaggactgtttggcttgcagtggttgcataacatcagcagaaacagttatgcttgagaagcaaagcttgggtgacttcattactcgcatcaactctgacaaagctgtcatagtatcggtctctccacagtcaagagcatcgcttgctgcattctttgggctttctcaatcacaggttttcagaaaactcactgcgctgatcaagtcgatgggccgtaaggcagt

SEQ ID NO: 15022 - DNA, 349 bp, Oryza sativa
  Clone ID: uC-osflcyp112e04a1
ttttttttttttttttttttttttttttttttttttttttttttttttttgggaaaccaaaaactttaccattcaccctttttttttttttttacacatttaattttgggcacgaccaaatttgggcatgaagaacaaaaaaattggcccaaaccaaacaccttgacttctttggcataaacattattacaacagacttacaatttggcacattatcggggggacaaaccattttatttccaacatccaaatgaagctttggacttttaaatattatttatggttaccggttaaaggattttttgggggcctcccctggatttttcacgcttttcgggaccggagaatg

SEQ ID NO: 15023 - DNA, 555 bp, Oryza sativa
  Clone ID: uC-osflcyp112e04b1
ttgttgtgctcctccaagctactagcagtctcccgcctccgtttacccggtccggctccggcatggacgacgccacgtcgtcgtcgtcgcgggcgccgcggcccaagacggaggagctggacgcggcgctccacgccatggggttcgagatcgagcgggtctcccccgcggaggtcaccggccgcctcctcgtcacccccacctgctgccagccgttcaaggtgctgcacggcggcgtgtcggcgctgatagcggaggggttggcgagcatgggggcgcacatggcgtcgggctacagccgcgtcgccggcgtgcagctcagcatcaaccacttccgcagcgccgccctcggcgacaccgtcctcgtccgcgccgccccgctccacgtcggccgctccacccaggtgtgggcggtgaagctgtggaaattggatccatccacgaaggagaagggggctcagatctctgaatccagggtgactcttctctgcaatttgcccgtgccggagagcgtgaaaaatgcaggggaggccgctcaagaaatactttaaactg

SEQ ID NO: 15024 - DNA, 389 bp, Oryza sativa
  Clone ID: uC-osflcyp112e12a1
ttttggggtttttaaattgttttgttttttttttttgtttttttttttttgtttttttcttatttgttttttggggaaaatataaatttggtataaacggcccaaaaagaaaattgttccgggcattggcaaaaaggggaaaattacaaaggcgtcttaaaaaaattcaaccggatataaaactctattggagggggggaccaagaaacaagaaggaaccaaagaaaaggaaaaaacctgaaaaggaggggttatttcaaggttccacggagttgcccacacccaaatgggggccactaaaacctttgaggggccacatttaggacaaattttttcaaaagggtaccaaaagggttgggggagaactttggaaaaaaagggcccttggt

SEQ ID NO: 15025 - DNA, 506 bp, Oryza sativa
  Clone ID: uC-osflcyp112e12b1
tcgtgataagcgactcacagaaaatgttgaataccttgttgagctcaaatgattgttttccagtgaaggggcttctgaacatgacaaatttgggacatcttgttcaacttctgaaaggaacgaacttctatccaactgcctctgtgtgtaatacactccaaaggatgaacatttcggtattgatcctctggaagccacggccggatataaacctgaaattgtatgcaacagtggtggtccagtggaatcagtcctaaatgacgagaccgggtttctctgagagccctctgcccctgaattttcaaaagccatgctgaagctcgcgaacgatcacgatctagctgtcaatatggtgtaaacatgcaaggcgccatgttgtgcagaagttctcaaccaagacattcggtgaccttttgaacagctatgtgcttaatgcgtaccatcagaggattgagcgatcccccaattcggtggatgtaattgcctcggatccactggaatagaac

SEQ ID NO: 15026 - DNA, 323 bp, Oryza sativa
  Clone ID: uC-osflcyp112f02a1
ccaaaaaccccgacccccaaaacccggaaaatgggcggccaacccaaagaccccaggaaaacaaaacccacctgggatacccccgggggaaaagaaaagggaaaggggccccatggggaagaccacaaaggggaacccatcccggggggcaggatttttggggggcgccgcagtgggcccattccccctcatcggggccccgggggataaaacagcccaattgcaaggcgggcccactcatcagggggggggccccctggacgatttggggccgctcccgcccccggggggcccctttaacaacaccccggcctccaaagggg

SEQ ID NO: 15027 - DNA, 512 bp, Oryza sativa
  unsure (1)..(512): unsure at all n locations
  Clone ID: uC-osflcyp112g04b1
tcttttctccccccccccccccccccttctcaccacaacctgctagcaagctcagagctagcagcagccatggcgggcagcaccaagctgcggccattcctcctgacgctgctcctcctcctctccaccaccgtggcttccatcctcgcggagtacgacccggaatgcgactgcgacaagcccaagcaccccaagccctcgcacccttctccctctcccggccaccccaagggccccaagaaccctacccctcgcccccccaagggccccacctacccgtctccggtcacccgcccgccgccgctcgtcgcccctcccaaggtccccgtcacccacccgccgaagggccccgtcacccgcccgccgccggtcacctaccccacacctgcggtcaccacccccccggtcgtcgtcggcccgccggtcacctaccccacacctccggtcaccacccctccggtcgtcgtcggcccttccggaacctacccgacgccgncgagacatacccgacg

SEQ ID NO: 15028 - DNA, 433 bp, Oryza sativa
  Clone ID: uC-osflcyp112g06a1
aacaaagaagcaagacatgattcatgcgaaacatacagttcaacacaacagctagcaaacaagcacgactaactcattacatttatataataccatgatgatacacgaaggatgcatagaaccggacggaatttctcctgtcctcaaagagatgaataaggcggtaggtgccccttctcccgtaggcatatcagtgtgttgtacaaactttcttttatgggggtgaatgtgaggcccaagtctctcagcctttgattagagaacttgaaaggttggaccatctgcttgctgtcttcacacttgttacaggtgattggatactgtggaaagagttctctgatcatctgaataagctcggaccggtgaagcacactagcaatgcagagataacgcccatgcgccttggggtcttcatacaccagtgcatgtgcac

SEQ ID NO: 15029 - DNA, 153 bp, Oryza sativa
  Clone ID: uC-osflcyp112h02a1
tttgggggtttttaagattatacgtttttatcactattaattaacataaaccaactcttggacacagaataagccgaatgaaaagttcaacaatttacaaaaacacgtccaaagctgcgaaaccacttaacagaatgcaacccactggccaag

SEQ ID NO: 15030 - DNA, 497 bp, Oryza sativa
  Clone ID: uC-osflcyp115a09a1
aatctaacatacgcaaactgatattatcacaatgttagccgatgacaatggaaagagtaatctaggtacaagcggatcattgacggtggagacaagacattggctgcaccacaacacccaccagtggcgccaacaaggagcgctatccgttataggacgagagaaaaagtaaaacatcacgatgtgaagtgaaactgaataattctagtagacgatgatgatgatggataggctccttaggacgcccgccgcccttagcgtcttgctgctcccatcttgtccactggaaggctcactcgtcatcgtcttcatcctcttcgctgccctcgtcgtcatcctcatcattgacctcggacttggacttgtcagattcctcctcgtcgtcctcctcttcctccttggcgggtgccttcttggcagtgctctcgcccttgttgtaggcagcaatggccttgttgtactcggccttgagcttgttggccttggctacataggga

SEQ ID NO: 15031 - DNA, 369 bp, Oryza sativa
  Clone ID: uC-osflcyp115b05a1
attgtggagtccatggagaacaaaattaacaaaaatttgagctaaaaagggagcaagaaacaagacaaaacacaggataaataaaagggagaaagaacagtacacaggaagacgcggcaaaggggggaaaaaaaacgggcaggcaaaagccccacaagagacaccttggggcggacatggcgacaccgaggcggaaacgggggggctaaagggggacttttacacagaaaaaagtacaccggggaaactacggggaaaaaaagcaggcgggggggaaaaaatgggggaaaaattcgcgaaaaggttcgtgaaaggagaaataacgggggaaagggcccgaaacatcagccccattccgaaggggggggg

SEQ ID NO: 15032 - DNA, 437 bp, Oryza sativa
  Clone ID: uC-osflcyp115c01a1
aaagcaagaaatagggggcaaaaaaaacgggtgcccctggcacaaattaaaagatcgattgcattgatgagcttggtacaggtatactcacccgttttttgaagggagaaaaaaaaagggccaatcaacctttacgatccaattgggggcccggcgctcttttgataatatatggaaacccagggcagttatgccacaaatcccaatgttagggtcgttttggcagatgcttgcttaaaaaatgggagttggaaaattttccaggcatttatcgcccgggattccctgaaccacattattttatagggccctgtagtgaagactggagaaaaaaaacattttcccaatttctgtttggaggtacgcaaacccaccaaggcctcctagcggaacccctcaaacagttggccagttaattgcccttgggctctgggaaa

SEQ ID NO: 15033 - DNA, 407 bp, Oryza sativa
  Clone ID: uC-osflcyp115c09a1
atgaacataatatattgtaatgattttattttgctacaatgccgtgttttttattcaccacgaatgagattaaatccgtttgctcaggagcagcaaatccagcctaacccaaaaaactttgcatgaaccaccacaaaagaaacaaaaaggactggaagtgccaccttccttaagctacaaatcgatcttttaatacattaaactagagctcccaagtaagtttcaggttttctcaagaatatagccagtggaataacagcggtatggctaccgcaaagtgcctaatctgcacgagattggccggcacgggatgagaggatgatgcccacatgagaccatacagggcaagcgccttctgcgaaaatgaggatgaggatcatgcccacttaaagctctggttgctgggc

SEQ ID NO: 15034 - DNA, 452 bp, Oryza sativa
  Clone ID: uC-osflcyp115d05a1
aacgactcgcacgagacggtgcgaacttctattgatagagcaggaaaaaattacaagattacaaccctggagggttataaccaggaaaaaggaaaaaaaataccaccacccacacggtgacatcgccaacacactagcccaggagaaggctaacaccggaccggccgccgttaagcgtgaccgaccgccactagaccaacaaagggacacagacgagatcgcctgaggggtgagacagcacaacaacgcccttaggaggggggataaccatcgttgtcggtccgaccaaggtcgaactgggtttttacccgccactcaccacctgggaattcacggctgacgcaccgatgctccaccaccacacaagctttgccgacatgtgggacccctacaccggcgtcccccgccggacagtctttccgcgccgaagaccgtgccacacccaccagcag

SEQ ID NO: 15035 - DNA, 468 bp, Oryza sativa
  Clone ID: uC-osflcyp115e01a1
agccatcagcaaagccgaagagatagttgtcaatacttaacagtaagcattcatgccgagagcataattatggggccacatgcaaggggaactccagtccaacaaaacaaaaacaccaccacctaataagtgctagcgcagggccgcatgcatacagaatttcaccttctatcataaattatacatggactacgactttttgacacactcgattaaacaggggctagagtagcagcagggcacattataatcgcgcgatttcatactagctacttcatgtattttttttttcagtcaggctttcggctgttgacgatcgtcctgttgacctgaagaagacgatgatccaacctttttgaaaactctaccaccgaagagatctttcccaaacctccccttgaaggagaactgcttcttaaaacggtttcggaacattgtgccactgcgttttgccacaagggcagactg

SEQ ID NO: 15036 - DNA, 349 bp, Oryza sativa
  Clone ID: uC-osflcyp115f05a1
ggggccaaaacaaaataaagctggaaaagcccggggcccccccccaattaacaggaccattaccccggccaaaacacaggcccctaggcatcggaaccccaaagggggatgggtccgggggaccgggtaaaagaaattgaatggccgaggaacggggcccggacccccatgtttttgggggcggggacaaccccccccccaaagagggggcccaggggccccaaggccaacggggcgggggggggaaccccggggggggcccccgtctgaaggccggaatcgcgccccccccggtaaagcccccggggaaacctctcggttccccgcggggccagcccaaaccccccgg

SEQ ID NO: 15037 - DNA, 286 bp, Oryza sativa
  Clone ID: uC-osflcyp115g01a1
aaaaaaaaaccccgcactttttttaattttaaaacacggggaaatcacaaaaaaaactttccccaaaaaaaaaaaaagcaaaggcccttccatttacaaaaaaaatttttggggcaaaaaaaaaaaaaagggtggaaaaaacgggttttaaaaaaaaaaattattcttgggacgttaaaaaaaaaaaaaaaggggggcgcaaaaaaaaaaaaaatttaaaagggttgggcaaaaaaaagggaaatctccggcccacctttgggggaaaaaaaaaattaaggggggg

SEQ ID NO: 15038 - DNA, 285 bp, Oryza sativa
  Clone ID: uC-osflcyp115g09a1
tccgccgacgccacccaggccccgcacaagctctccgccctccccttccaccacctcctcttctcccgcgcgccgcccctcctccgcgcctcccgccgcctccccctcgcgcccctcgtcgcctcctccgacgccgccgccgccgccgaggccggcgtcgaatggagcgagacggaggaggccgatgagggttcccaggaggaggaggaggaggaggtggtcgaggagcaggcggaggcggaggaggaggcggtggtcgttgtggaggaggaggaggaggaagtg

SEQ ID NO: 15039 - DNA, 385 bp, Oryza sativa
  Clone ID: uC-osflcyp115h05a1
atcaaaaaaggggcaatattcatcgcagaagaaatcctcctaatagtacatcaaataaggtgcaatattcattgcagaagatatcctcctaggagaacatctggattggacaaactttgaagcctcaggatggggttgcttggggaatcgcaaaactattttgccaagctaaaaaaaacaggggatgcaataacagttctaaaagataaccaaaaaatgctccggggggattgggcactccatggctaactagaaccaggaagcgggtgaagggctttaaggggattcatgagacctcccttaattggaccagcctccggtgccggcttagggctaaggaaaggattagggtcaggctttagctttggctttggtaggggctccc

SEQ ID NO: 15040 - DNA, 116 bp, Oryza sativa
  Clone ID: uC-osflcyp116a01a1
ttttttttttttttttttttttttggttttttttttttttttttttttttttttttttttttttttttttttttttttttttttttttttttttgttttttggttatttccttttt

SEQ ID NO: 15041 - DNA, 379 bp, Oryza sativa
  Clone ID: uC-osflcyp116a06a1
ggcaaggtgtaaagtttcaggggaataaccattttcctaagagaattcacgttttctgtgggcatgaagtcaacttacaatttataaatcttccattcacacttacagtatgtaaagagaattcccacccaaaatttctctcatgaacagaccaaaagatgagggcattatattcatgggcatgtgccaaataaatgtaaccttaagcattccatttcagttggaggtgtttcactaacagagaggacgatggtttccagagaagggtgcgcgacttgtgctataatgtattggcaaatgcatgcgctttttattctgtggacatgttaacttaaacttttttgatcaagtacatgcagctgacagtaacaaaccacag

SEQ ID NO: 15042 - DNA, 453 bp, Oryza sativa
  Clone ID: uC-osflcyp116a08a1
gaaaatggggaattacatattgcgcacctgcaaatttcaccgaaaaaaggggggcaaattacagttgaaaattgattccctagcgggagattccaatgttgggagcttgacaaaacatggcatggctgattactgatactgatagtagatcgatccaccgatcaagagggaaaagaaaagaaaaacaacctttaaaagagatcccgaccttggttttccaacccaaaatcctccaccaaaaaaattgaaagcaaaattagcttccaacaagaaagagtaacaataaacatcatccttatttctcctttaaacgatcaaatttaacttaattttaaggcacttttttattaaacctttcctcctaaccaggtaggtagtctgctttttttaccttagttgttgatctgcgagattttttttgctgttttccctttgttttttccctggtgagtg

SEQ ID NO: 15043 - DNA, 412 bp, Oryza sativa
  Clone ID: uC-osflcyp116b10a1
agatgaatgaatatgttcatttttcatgttttgggacagaaatgatgagattctgccttttacggatacatacatgctattttgcacgccatgagaccgatctataattaatgcagcctctccacaggctacatgacgaacattgcattactcgctataataatcagtcaggtggaactgctagagtagagcgcaaaatatgggcaccagggatgcccttgaagtctcccaaagggatggctaaccacatgtagtgacaaatgccggcattcctggtgagcaaaacacggggacgatccctttgggtctaaatttcagagcagttggcaaggggcctggggacgaggacaacctcacaaatgttcatcttatggctgaacttgcaatcaagattggatgctccggtgtcatc

SEQ ID NO: 15044 - DNA, 299 bp, Oryza sativa
  Clone ID: uC-osflcyp116b11a1
ggggcctgaaaaatttttttttcctcatcctttttattaattccccccaaaggggccgttcccagggagtttttttggccttataaggcaaggaaggaactaaacccccgggggcaggggaattgttttaaacaaaaggtttattaaactccaggggttaaacaaaccggggggtcaaaggaaatcccgctaaaaaaaaaccccggggaaagtcccccttttttttttggccccaaagccttttggggcacccccccgttttgggggtttttttttcccccggttttttcgcttagggg

SEQ ID NO: 15045 - DNA, 389 bp, Oryza sativa
  Clone ID: uC-osflcyp116d01a1
acttctatgccttcagcaattggacacaaatatggtggacacacttttacccttacacaacccgtttgttccctgcacactctacagtagaagtacataaccagatgcgctatggtagtgggacttgtgttggtcccccttgccctaccccttatcttacctgagggctttggtttggagggaattgaagagaattggaagggattgagcgagaataattccacaccataatagatatagaataaatcctgtccaatccctcttttatggggattaaccgaataaggcctaaggcagaggcggcgagtgccctgtattgctgtgtattccatttcgagcggctctacgctaccaggtccataatcgatcacggtggactataatatggt

SEQ ID NO: 15046 - DNA, 118 bp, Oryza sativa
  Clone ID: uC-osflcyp116d03a1
acccataaatcctggcccaatttaaataagatttaatggctagggaaaacttgttaaaaccagaaaaccggggcattggcgggggggattccaaaatatttggggtagggagttaaac

SEQ ID NO: 15047 - DNA, 395 bp, Oryza sativa
  Clone ID: uC-osflcyp116e06a1
caaatccagggaaaagttcaccaattcttcaagaacatatacacacatctcactcacatatactacaaactagtcactaattgaaatttctacaaacttatccaagaaaaagaaaaaactaccactcgtacggaagcgacgactagagttgttacagttgggaaaagagatgacaccaatggttagaggcaaccactccctgcgtgatcacgcgcgcggtcaaattacttcgggtaggccgcctcctcgtcgtcgccgtcggcgacctcctgcgagataacctcgagcgacatgcccttggactccggaacgagcagcgtcatgatcgtcccgaggaagtttgtgccggcgagcacgaagagcgcgttcttgatgccgatccccctggggtaccc

SEQ ID NO: 15048 - DNA, 423 bp, Oryza sativa
  Clone ID: uC-osflcyp116e08a1
aagggaaagaaacataaatatgttgaatcttgaccacctttaaattaatcatcacaaagcttggacttggccctaacgcaacagcgaacacacacaacaaaaacaaattattggtatttatgaagcaatgatacaacagggccggagcaccatgaaattatgggatgctcctggggaactgttgacaaataggggataatcctggcattacagagtcgcaaacagcgtttcttcctttttctttccgttggggagattcctctttctcttgccatattatttccttttaccgtcaccaagggacagcagcttcaggctgtggtggaaaggcttgtcgcgggacccttttgcaacggctgctcgtgagagagaagtggcccttgttttttaaaccgaggattaaccctttgcgtgctggaagga

SEQ ID NO: 15049 - DNA, 121 bp, Oryza sativa
  Clone ID: uC-osflcyp116f10a1
ttttttttttttttttttttttttttttttttttttttttttttttttttttttttttttttttttttttttttttttttttttttttttttttttttttttttttttttttttttttttt

SEQ ID NO: 15050 - DNA, 141 bp, Oryza sativa
  Clone ID: uC-osflcyp116f11a1
ggaaaaaaaggccaggcccttaaagtttgaaaaatcaaaacatgacaaatcccgatcaaaagctgcaaaaaggggatgatgacccgaaacctggatggatgctgcccaaaggccgggttcgcgtctttgcccgtttccacc

SEQ ID NO: 15051 - DNA, 262 bp, Oryza sativa
  Clone ID: uC-osflcyp116h01a1
acagtccaaaaaagttgagctctttgatttgccgtttactaattcagtgtcattgtacagttcgaacacgtaccatcgaacttattaatataccttagtgctcccattggccaattgatatacatcgaactggaacagtttttccctgtgccattcaaatgtttttggcagacggagattgggttttattgcagtaatggaacgcatggcctttcaaactattccatttagtttccaaacaaggggaaaaatgggggggggg

SEQ ID NO: 15052 - DNA, 217 bp, Oryza sativa
  Clone ID: uC-osflcyp116h03a1
ggacaatatatcattagtgagaaactttttacttaagttgggacacgccgtttacacaaaccacactgtgcagaggcgaaagaaaaaccaaacccttccctgcctgccaacactttcagctgaaactacttattcaacaaacaataaaggcacttttgccccttttttttcaacataaagctattatcaacaaaacccatggtctttatacctaggc

SEQ ID NO: 15053 - DNA, 495 bp, Oryza sativa
  Clone ID: uC-osflcyp116h12a1
aataagccataatatcacagacgttttcaatatgaaaagatgttaggaaaaaatgaaggggaccttacagggtaacagtacctgaaaggtcataggatgcacgggtggaaaaagttaattaagcctgaaaatgatcaaatacagatgttgcactaattacaggttaatacatgataaaaaaaagtactagtagggtctaattaatccatcttctcaagctgacatacatgccggggcacagaacaatgacacaagtacttagtcaataggaacttcaacctccatattcacatcagaattgtcaagaatcttcataaagtctggcagagtaaaatttgaatcttttgtatagccagcttcttttaaaacatggatcaaaactttctgcctctgctgctcagtcataaaagaaccagtcagatcccgcaagatgctcaagatatcatcaaatgccaccttcccattgcagtcggtgttataaaccctgaaaataaa

SEQ ID NO: 15054 - DNA, 331 bp, Oryza sativa
  Clone ID: uC-osflcyp117a07a1
ggacgaaaatgaaacccatgatttaaaaaaactaggtgttccttttttttaaaaggggcccaaaaaataccagtattaatttttttcaactgatctaaaggacccaactagtttggaaccaccaaaggtacagaagggtgttacaaagttggaacacacccctattcctactttatttttaaactgatgtacagaacgggccttaatatactccggggatacaaaacaatgcgcctgaattccaacattgcttatgggggagtacatttttgaacttgatgcttcggcctactccttaacagggggatccacccaacggccattggccctt

SEQ ID NO: 15055 - DNA, 396 bp, Oryza sativa
  Clone ID: uC-osflcyp117b03a1
atatcatatattcgattatatatatatatataatagcagacaggttacatccattagaactcagaatcaccggaattgaacatcaaaagtacaacacaagcagcagcagcatcagccagcagcaaacgacatgattacccacgcttttggatgaagaacaagaagtacgagaagaagaagacgatggtcgaacaccttgatcgagctcaacaatggcgatcgatcaccaatcacctacttggtgaactcgatggcccaggcgttggcgtagatgtaggtggccttgaagccggtgaatccggcggcgcgggcgagctccctgaactccctttcgtacctctccttgccgccggggttgtgggcgagcatgatcatgtcgaccgggaacaccccctg

SEQ ID NO: 15056 - DNA, 549 bp, Oryza sativa
  Clone ID: uC-osflcyp117b11a1
gcgtacagtacaaaaattgatatgtctgctcaagatttatttaggtaatactgtgaccaaaagaaccccacaagtcacgactcacaatcaactctgcggttcgacctacaagacatagatttcaagccgttttgtggaagagatcctggagatcaagtatgtcagcaagaactccagctgcagtggtatcattgccagctccagcgccctgaatcaccagaggggcgctctcgtagcatctgctgtatatctccaccacattgtcacttcctctcaaccttcccagtgcagagtttttcgggagttcttcaaggcccacttggcaccctgtgctttcaatcttacagacatagcgaagaacatttcctttcaaagatgctgcctttactctttcttcaatgcttttatcaagctgtactaaaccactttcaaggaagtcctttgtggacattgcatcaggtcctaattcactgccgtataaactctcacattaatattctccatgctaattgttgccccagagcctaattagatcaatgccttttagct

SEQ ID NO: 15057 - DNA, 427 bp, Oryza sativa
  Clone ID: uC-osflcyp117c07a1
cgtgcacgccgcgtacgctgcatgctctctagcggcggcctcctttttttttttttttttttttttttttttttttgagatacaaaatcccaatctgtttaatatcatatgaacattgattcatacaactcgtggcattcacattggcccatgtttgaatgatcttatctatgtatgcaccatgacatattggggggcatcaaatttttgttcttctgctggtgctgctggatgacaagagctggagcctgaacatgctacagttacaccagtctttggctcctttcacagattcagcaacaaacaaggatctttacatccctggggactgaaagatctgttacgaaatggcagcagcttaaacatggaggccgacaagggaggccttagctccatccttgaggccgagcaaggcatcttgctcccc

SEQ ID NO: 15058 - DNA, 294 bp, Oryza sativa
  Clone ID: uC-osflcyp117d03a1
ctccctgcttcctatttcatttaatcccgatggaaagcaacaagcagttcaaaccccataaccaaagcgaactcaattcagggtaacataacggacgaaaaacccctaacactggatggatggaaagagggcttttcgactggagagagccactggacaccataacgacccggctcgaggataaaaacattttgccccggatggttaaggataactggccagaagggcccccaccaaacagttccttccagtccccgccggagtccccgccgtaaccgccgccacggttgccac

SEQ ID NO: 15059 - DNA, 573 bp, Oryza sativa
  Clone ID: uC-osflcyp117d11a1
gaaacgcactaacatgtatacatgtataacacgaccaaaacaaagccttatttgttagggaacaaagtaacagctggtggcgaacaagtaacaaaatccgatcagacgagcacacggtactacactttggagacgaaacgcaatggctctcgcgaaagcaaaaaactccctacatccatgaccaggcatatgcatatgtgtgcttagatggccgcgaagtactccttgctttccttggggtcaggcttcatcgacttgtcaccgggcttccatccggccgggcacacctcgtccgggttgtcctggacgtactgcaacgcctgaagggccctcatggtctcatctacactgcgtccaatggcaaggttgttaatggtagagtgctgaatcactccctccttgtcaatgatgaaatgtcctctcagagcaattccctggtcagggatcaagacaccaaaggacttcgaaattgatttagtaacatctgaaatcaatgggtatttcagatcaccaagcccaccagatttcctgtctgtttgcacccatgcaagatgggagaacacactgtcaatt

SEQ ID NO: 15060 - DNA, 456 bp, Oryza sativa
  Clone ID: uC-osflcyp117e07a1
aagcgaacaattctcacctgcagagaatgttatacggttttgcagccaattttatacaactgtcactcattcactttccaagaatacaccaagagcttcatagatatagcatacaaaagattaagaaaaatggcagagtctgcattagctcagtcctcatccacaaagattgtttcttgcttgaagagtcccccaaacacgggcctcacatccggcttggattccggctgctttggtgttggtcttgtcttctgcgccgcgggcttcacaacagctttctgtggtgccagcttttttgcttttgcctggccctttacggtggcgatctgcgcttttggttccacctcgtttgagtcctgagtggccactcctgcaagttgtgtgcttgagcttttcccatgagaagtccgggccgaaccttttggtttttgtcagaaggttttccagagaagcttg

SEQ ID NO: 15061 - DNA, 220 bp, Oryza sativa
  Clone ID: uC-osflcyp117f03a1
acaaaaaaagggcaatcccttgattctttgggggattaacaaaagggcaaagatgcaacaggggcacaaaccatagtccatattcccacacacaccacaaacttattttcctccaaaaacgtaaacaactttttttaaaagaaattaagtggtacaggtacaaacaatggcgcgcaatttaccccaccaaccatgtaacaaaaactcgggggaatgaaga

SEQ ID NO: 15062 - DNA, 558 bp, Oryza sativa
  unsure (1)..(558): unsure at all n locations
  Clone ID: uC-osflcyp117f11a1
acccttcacaaacacgtacgagagatcaataagcagagagcgtatcaattacaacgtgataattcgatatcgagtcggcatatcaagagcgcttcgtgatcggcctcctccccgccgccggcacgagcggcggcggcgaatcacctccctgccacgcccacaccatgtcgccaagcgacggcttaagctcctgcttgtagaagtcccggaaatccggtgagtcgccgccggtcttcctcacctccaccacgtgcacctccggcgccaccttgaagatctccgcctcgatggccagcgcgcccttccgcccgtcctggctcccctccagctcgaccctccctttctccttcagcttgaagctgaacctccccgcctccgcgatctcctccagcttggagacgatcgccgtcgtggtctccctggtggagaaccgcgcctccgacctgcgctcctccgngtcgaacattttggacaggtccagccctctcgaccgccagatgatgtcgaaggcgttcatgctcgagggcctcacgtcgatcacccgcgacgacatgatca

SEQ ID NO: 15063 - DNA, 205 bp, Oryza sativa
  Clone ID: uC-osflcyp117g07a1
gaacagagaaaaaattaagaatgtaacttacattgtttgaaccaccctaattcattgataactgaaaaacgggcaatgataagctttatttcgatacgaagagatcatggacataatcaccatggggatcctttgcactttaacctaactaccatcagagccatctgtactaattaaaacagtcctaggtaggacacctagctaa

SEQ ID NO: 15064 - DNA, 245 bp, Oryza sativa
  Clone ID: uC-osflcyp117h03a1
atgggcaaaatgaaagcaaaaactcttgtgagctgtatattgagaaattgtaacacattattgagagtttgaccagattcagaaccaggtgcagcataacactgagggaacacattcctttgttaagggaattacctcaccatggccgaccaaaaacagaatgtactcctcacccaatgccgtgttggtaacattctggagaacatactctgctaaatgacagctagaaataggaggtatatacg

SEQ ID NO: 15065 - DNA, 551 bp, Oryza sativa
  Clone ID: uC-osflcyp117h11a1
gttcaagaactctccttgacacttgggcaacatgatccctaacaacatacatgcatttaacccactggtgattcccactcagattacacacaatacaaatccactcgcagactgccttaaaaaccaccaaattgattcaaaagtaacgcggggtatgagggatcttcccaccgagactgactaaacctacccacagacaattggttccactggacccatatttttcaaaaacagatggttatgacggtatcgtcctcgcaaccgaagggaacttgcagttatggatatcctcacttcccgctggcaagctgggtgcggatgagcttggcggccgaaaccatgttggaaagggcgggcttgacctcgttgtacttgcgggtcttgagaccgcatacagggttcacccagagaatgttagtgtcgagcaccgtgagcatcttgttgacgcggtccgaaatctcctgtgtggacgggatccttggggagtggatgtcataaacaccagggccaatgccagcaccatacttcacaccctttcggaagacggagag

SEQ ID NO: 15066 - DNA, 363 bp, Oryza sativa
  Clone ID: uC-osflcyp118a03a1
gaaaaaaacaaacagacttagggggtttcctttttttagataaacacccaattttggttgtttcaggaccaggtgacggaattaaaaccctagaacctgggagcaaaaaaggcctttcaatttcggtgggaatccatggataaaacaccttttccggggaagaaatgaacttgggaatttaattaaggccagtttttttgtgccacccagtatttcgctcaaaaactttgcccaaatacccatcccccggtgccaaagccatttaaaaggctgactcatcaagaaccccctgggggggagattttcctttttaaaaaacctaaggttggccctcataaataaccttttgttgataaacaaaat

SEQ ID NO: 15067 - DNA, 403 bp, Oryza sativa
  Clone ID: uC-osflcyp118a11a1
aaacactaccacaacaagatcttgattgggataaaagtcataggcaagttctttcttatccattcacaattcataccaacgtactagaaagcagaggcatatgccttgcatcttaacaccaccaaatctgaaacaaatactggcgcatccagtctccgacgcaaagatgtaattcagctcggtaccgagggacggaaccagcagcagagctagctacctattgcttgaacgcgtacggctgggggagcgagatggggccccggcggtcgtcgccgccgtcgagcagccgttgcacccgcttcttgggggagtactgccggtcgaagtgcttcacccaggaggggcggcagctgttgacgaagttggcacgggacttcttgcactccgcggggtagaggagccc

SEQ ID NO: 15068 - DNA, 485 bp, Oryza sativa
  Clone ID: uC-osflcyp118b09a1
gatcccaaatgttctcattgattgatagcgatatcatagaagcagtgacacgaattaagatttaaaaccaaccccaagaaggatcgcatatccaactccaccgaatcgatccaagaactccgcctaatccaaccaaaccatgggcgatctcatctcaccaacacgacacgaactcataaaaagactaacaccaccaccacctcctccttatttagggactcgacgactcaagacgactgatactggcgaaaggcgaaggggaacagcacagatctaggagagctggccgcagtcggcgatgacgaccggcttggcggtgctcccgccgtgggatcccaccttctcgatggccttgacgacgtccatgccctcgacgacgcggccgaacacgacgtgctttccgtccagccagctgcagggcacggtgcagatgaagaactgggacccgttagtgttgggcccgggttcgccatggacaggatgcc

SEQ ID NO: 15069 - DNA, 375 bp, Oryza sativa
  Clone ID: uC-osflcyp118c08a1
aaggaaaagttatgggcgccggataatatcattactacagttcattggagatatgctacagtaactttttcctcccttgtaaaaagaaacccaaaccttatctacaaagcaacacacacaccggacacaaagggcttgaacgaacggagcagacgagacaaacatggacaactactactaggcaagcgacaacacctaggttattcggggatacagagggcgggggtaaccgtgggagaaacgggggggatgatcagactctgggcttgctagccttcttggaaatggccaagcggatggatttggggggctgcataggcttcccggggggggtcttggtgggccttttggcgcggactttggcggtggggggga

SEQ ID NO: 15070 - DNA, 357 bp, Oryza sativa
  Clone ID: uC-osflcyp118c11a1
agcgtggcaacctgggaatacgtccctgatgcattctcataaaacgtacacagcgatcgccatcaggattgacaactcattaattaccaaaaccaccagcccacatgacaacatagttttgcacacaagcaaaaatcatataggcgggccaatacaataaattaaccacttattcttagatgccaaagaacatgaataacgtgtgcaaaatcaggaacacgggaacaagaccagacaggaaaacaagaaacttggggaaccaaaaaacaatggattggaagggaactgaacgggcatatgggcacacgaactgcgcagcgttgaggtctagtcacttggcatggtatgtcgacttag

SEQ ID NO: 15071 - DNA, 398 bp, Oryza sativa
  Clone ID: uC-osflcyp118d10a1
tttttgttttttttttttaaacatcatcttttttttattttaagggccgggaagaaagtcacagctgcctatttacatggtgtcctttattcattattgcagtgaaaaaccgcacatgataaaaccctaggtttggttattcactgaagccaacacggggtactatagaaccctcagtttggtaaggaaggctgcacagaagtccaggaaaaggagctgaggccccgtaactctctgcatatccagcagatacttctcgtctctgctcttgtaaagctggatttcaaacttgatcacagcagggaaccttccggttacattgccattatccattataattgagtcatcaacaaagctgtggttgacatctaacatattagtggcctgaggatacccaa

SEQ ID NO: 15072 - DNA, 52 bp, Oryza sativa
  Clone ID: uC-osflcyp118e01a1
ccaatccataagtgcaaagagggcgcaaccacaaagagaagtccccctgccg

SEQ ID NO: 15073 - DNA, 362 bp, Oryza sativa
  Clone ID: uC-osflcyp118f03a1
ggggaaaaacctcaaaagagggcagtgagagcctgttttcattaaagatgaagacacttgccccacgttttccggggaacccgcccccaagaaccttacctaaggacggtttcaaggggaaacctgggaaaccccccacggagaacaaataaaaatcttgggacggcacaactggaggggaacatggttcatcaaaccgaaagacctctaatggctatgaccagaccacagacaacttagagcagggtcttcaagaccagtcctcccaggaggaaacagggcctttaggataaagaaacgaccgttggcaggtcagaacagggttttcaccccaagaaaacggggaaagcaaataacgaagc

SEQ ID NO: 15074 - DNA, 86 bp, Oryza sativa
  Clone ID: uC-osflcyp118f06a1
cgtgcgcagtgcagcgctgtcacgtagcgtctgtggactctctcatttgtagcggcgcgcgcctcttttatttctttgttgttttt

SEQ ID NO: 15075 - DNA, 382 bp, Oryza sativa
  Clone ID: uC-osflcyp118g08a1
gaccccaaaagtcctcattgattgatagcaatatcatagaagcagggacaggaattaagatttaagaccatccccaagaaggatcgcagatccaactacaccgaattgatccaagaactccgcctaatccacccaaaccatcgggcgatggttattttaccaccacgacacgaacttataaaaagactaacaccaccaccacctcctacttatttagggactagccgactcaggacgactgatactggctaaaggcgatggggaacagcacagatctaggagagccggtcgcaatcggccttgacgaccgagttggcggagctccccgcgtgggatcccaccttctcgacggacttgaggaactgcatgcactcgacgacgc

SEQ ID NO: 15076 - DNA, 336 bp, Oryza sativa
  Clone ID: uC-osflcyp118g11a1
tttttgtttatttttttttgtttcttttttaaatggaatggaatgactaaggaacatttgtgggagggcgagggaaagtgtgaagtccatattattacagagtattgctgcatgtttagaactaccataacattaccgaggactcaccatcccaaaaagcacgccgctactacttgcatcaacactagcaaaagctcgagatgaggccaagtaagtcccatttgtcgaacttgatgcagacccactcatagggcccttgctcatagcacgtcctgagcctgcctggggagattccagccggataagaacacgctctggcactatctcaagatgagc

SEQ ID NO: 15077 - DNA, 465 bp, Oryza sativa
  Clone ID: uC-osflcyp118h10a1
agttgaaatccagcatcatcaaattacagatacatgaactgcagaactggcaaacttaacaacagaatgatcgtgtatatagtagcactcttattccacttgtctcaccccacaaacaaacgaatacttctgagggacaagcaaaggcaattacatcacaagataaaatagactcaatatcaactctccactctccagggatactggtagatacaaattttccaatcagtgagcaatcagaaacacatgcttggtgttggagcagcagcaccaccagaagcccgtcccgccatcatcttcatcgcgagcggatcccatgccttgccctcggtgtcactgcaatttccagtcttgtttggatacatgtcagccacggtggtggaatcagcgtcgctctttgcagccagtgccttcagacgaatgcgctccgccctcgacccgattgtttgaccaacaatggaggct

SEQ ID NO: 15078 - DNA, 474 bp, Oryza sativa
  unsure (1)..(474): unsure at all n locations
  Clone ID: uC-osflcyp120a06b1
gcttaatctggcttgccctggatggttcaattgggccggtgtgtgctganaagtgtggtgaatgcaagatatcaattgaagacatggcaactagttcattacgatgcgttgcttttgcatattgtccttgtgaaattgaaagaatcccaaaggaagacatagctgattggaagttacctgaggatgacctgactctgctttgtattgtgggtataaaggtatgtggtggttatttcggactatctgtgtgtttgagggaattcgatgtattaatttggcacaaataatcagaatcccttgagatgcttatctgttgaagagcatcatgcatattgccctgttcttttctatctccctcttgcttatgaagaaatgatttttgctttttaaacaagatataggataactttgatgaattgattcgcagagtacatggataggctttgacaaaaacatctgatatatattacaatg

SEQ ID NO: 15079 - DNA, 507 bp, Oryza sativa
  Clone ID: uC-osflcyp120d10b1
atttcatcaagaaccacctagcgagagcgagagggatcgtgagagatagagcgcggcggcgatggcgtaccagaggggggagacgtcgtctgtggtggaggcgttcacgctgtcgccgctgccgtacccggtgatcctgatcctgctcatggtgatgctgctgctgggggtgtcgtggttcttcacgtacgaggacttcatggaggaggcggcggagcagctcagctgggcgctgctgctcgtccccgtcgcgctcgtcctcctcatccgctggatctcctccgtcgacaccttcgacggctacttcagcttctacccaaccgagcgccgctggaaccgctacgacccgggccccgccgaggggagctccccatggggcgtcgccatggtcgtcctgctcctcctcgtcctcgcctccttccactccaccttccaggacatgtggaagccctgatcagtgattctactgctactcgtcgtctttgatatccgcacgcctatatgcgt

SEQ ID NO: 15080 - DNA, 498 bp, Oryza sativa
  unsure (1)..(498): unsure at all n locations
  Clone ID: uC-osflcyp120f10b1
ctttgctgatgtggcagcgattctcgtacaggtgttagtgagacatccagctgtaggccctgaagcgtttcgaagacgctataggcttgacatggacagcgattgtggtaaaatgtttgtgacaaagctctctgttcacttgttcaatggagatgccagccaagcagccttccgcatcttgtctgactaccggaaaggcaaatttggctgcgtggccctggagagacccccaacatgagcaatggagatctcagatattcttagatgttaatagctgctctttgttcatagtaccacacacaacaattacagtgccctttgtagcaaccgtcacagcacgaactttcagatgtaggaggatgcaaaatgaattggcaatatggccccctctgtctagaggaaatgtagtgtggtagtaggtagttatttgaatgtaaatgaactgagctgatttgtaccaagatctttgtaggtngctacaaatatcatgtgtggatc

SEQ ID NO: 15081 - DNA, 491 bp, Oryza sativa
  Clone ID: uC-osflcyp120h02b1
ctgcgggaccgatcccggaattacactgggtcgacccaccccatcccgttttgatttatagggttttggatgtttattctctgggacgatcgaaaaaatgaacgagggggaggtgcaccggacgcggattttctcaaagatttgaagaccaacaataaggcaagccactcttcgatcatattgctcctagtttataaaatgtgttgattgcaaatttgcatgtagttgcattattttccgtaggaacttgttaaacttaacccttgtcgctccaccacagcagtacctcgatacttgcgctctttgggcgtaggtatccttttgcaccatttgtttatgtcaggtttatatatggttatcgatgtggaaaaacttgggttgtgaaaggtttataaaacccgactcggggagtcggtgactttgaaaacaaaaagggtttatgggagaaaacttgcggtgcgaatcctctcctgtgtgggttggttttttag

SEQ ID NO: 15082 - DNA, 487 bp, Oryza sativa
  unsure (1)..(487): unsure at all n locations
  Clone ID: uC-osflcyp121b10b1
ccgtcatccgctacggcgagatggcgcaggcgacgtacgacgccttcaaccacgagaagctctcgccgcacgcgggcctctcgaggttcgccgcgtgccgcttcttcgagcgggcgcagctgccgggccactccgcggcgtaccgcgtcgccaggttcgtgtacgcgacgtcgtgcgtcgccgtgccggagccgctcatcctccggtccgcgtcgcgcgcgcgcaggtgcagggagagcaactggatcgggtacgtcgcggtggccaccgacgaagggaaggccgcgctcgggcgccgcgacatcgtcgtcgcgtggcgcggcacggtgcagtcgctggagtggatcaaggacatggacttcgtcatggtgccacccaagggcctcctccgggacaaagcttccgacgccatggtgcatcgagggtggctgtccatgtacacctccagggactctgagtccagccacaacanggacagtgctcgaga

SEQ ID NO: 15083 - DNA, 461 bp, Oryza sativa
  Clone ID: uC-osflcyp121c06b1
ggctactgtcgacaaccgggttcccgagcatcggtccaggttcgaggctcgatcatggggcggtcagcctcccctgtggacggataatcatattcggtggctccatcgctgggctgcactcgccctcacagctgttcctcctcgacccagcggaggagaagccgacatggaggatcttgaacgtccctggccagccacccaagttcgcctggggtcatagcacatgcgtggttggcggcaccagggttcttgtcctgggtggccacactggggaggagtggattctcaatgagctccatgagctgtgcctcgcgagcaggcccgacgaagatgagtgattcccaactccattgcttgttcttatttatttagatcctatgattattactgatatctgttgttgtcacaaccctatgtaatagtagtaaaacggaaacaaaaggaggattactggtaggttt

SEQ ID NO: 15084 - DNA, 443 bp, Oryza sativa
  Clone ID: uC-osflcyp121f02b1
atgagttctggatctgcctgttgctcaccttcctcggctacatccccggcatcatctacgccatctacgccatcaccaagtaattcatcattagttactacatcatcaaccaaatcctcaagggatgggctccaaaccgcttcatctatcttctcgattgccgtgtgcttgttggaatttggaaatgatatatgcatccaaaattcagtcctgagtgctccaattcttgtcatctagtcattttcaatgtccccccagtctcttcctctaatgtttgatgatatgtagaatctcttgctgttaatctgttgctttcgtgtgaataagctcccctcttatgtatatctatctatgacttgttttactagtaaacttgattattgagagcttgagacttgcttccctgtctgtctgtatatcttgttccaacactggaactgaat

SEQ ID NO: 15085 - DNA, 470 bp, Oryza sativa
  Clone ID: uC-osflcyp121g06b1
gcaggagcccttccttttcgcggccaccatccacgacgacatcgcgtacgggcgcgagggggcgacggaggcggaggtggtggaggcggcgacggcggccaacgcgcacaagttcatatcggcgctgccggaggggtacgggacgttggtcggggagcgcggggtgcagctgtcgggcgggcagcgccagcggatcgccatcgcgcgggcgctggtgaagcaggcgcccatcctgctgctggacgaggccaccagcgcgctggacgccgagtcggagcggagcgtgcaggaggcgctcgcctcctcctctggctccggccgcaccacttaggtggtggcccaccgtctggccaccgtgcgcaacgcccacaccatcgccgtcatcgacgacggcaaggtggcggagcagggctcgcactcccacctgctcaaccaccaccccgatggctgctacgcgcgcatgctgcagc

SEQ ID NO: 15086 - DNA, 318 bp, Oryza sativa
  Clone ID: uC-osflcyp121h02b1
cagaaactaacccctctcactcccactaccatggagccgtgcaagttccggccgtggagctcgttcgacacgaagacgacgacgacgaacgcgggagctccggtgtggaacgacaacgaggcgctgacagtggggcccagggggccgatcctcctcgaggactaccacctgatcgagaaggtggcgcacttcgcccgggagcgcatcccggagcgcgtggtccacgcccgcggcgcctccgccaagggcttcttcgagtgcacccacgacgtcaccgacatcacctgcgccgacttcctccggtccccgggcgcccag

SEQ ID NO: 15087 - DNA, 117 bp, Oryza sativa
  Clone ID: uC-osflcyp003a02b1
ttggtttttgaaatttggggggtttttttttttttttttttataatatccatttatatttctataccaagcaacacaaatgacagttaaactccacctcagacagatccaacagaaa

SEQ ID NO: 15088 - DNA, 204 bp, Oryza sativa
  Clone ID: uC-osflcyp003a04b1
ttgtttttttaagttaagggggtttttttttttaattttttctcatattctttgaaacagaacaagttgtcggcacaacgatccataacgcaaggcaacaaaaggaaggaacatacgcgggcgtaaacatacgctacgtgcagagagcacggactctgagtgcaactgactctccaagaacacgaacagagaagctgctgactg

SEQ ID NO: 15089 - DNA, 299 bp, Oryza sativa
  Clone ID: uC-osflcyp003a05b1
ggttaaaatcatgttttatttccacaagggttcaaatgcagaaaagaatcaaagatgggggggggtcgttgaacacgttgacataaccttgctgatctagaacctaaaataatcagagagacagaatggggaaatgcagatgaaagcataagaaagcttcgatctatgcttcgatctgcatgttccaaggcatggggaagcttttgcccagggggaatgccaggccttccaccttcaccattacgctttttttgggtcccttcacgtcggggggcccgtgcaggtcctccttgggacct

SEQ ID NO: 15090 - DNA, 462 bp, Oryza sativa
  Clone ID: uC-osflcyp003a06b1
ttggttttaaacgattttagggctttctcatttgctgccctctcgcagttttatcacgagcttaaattttgtacacaattgtacatcatgcagggccatgtaaggaatgaatactttcagggttaaacttcttctctgggggaagaccggggattagaacatctactgcctatccaagaacatgtaatccgcagttgtggactggaacccattgtgagccgccgttgcatctgccatctccttgaggaaggagacgacctcctctgacgagttaagcaggtagcgggcgttggaccgcttccttccaacagcgcaggagaaataattctcgcccttgaggtcaaggaccgaggacccttcgcgccagtcatggtggctgtttggggtgccctggcttgatgaagatgatgacgatgacctcttccgagcagcctgtgccttgggtgtccttgactgcgagtt

SEQ ID NO: 15091 - DNA, 63 bp, Oryza sativa
  Clone ID: uC-osflcyp003a07b1
tgggttttttgattacaaggggtttaaaattattacttcaaccaataacacatgctacaacca

SEQ ID NO: 15092 - DNA, 94 bp, Oryza sativa
  Clone ID: uC-osflcyp003a08b1
ttgtttttgaaaaaagggggtttaaattttatattttattttattaatattaaaacattactttaataattctcaactacccaacacccatact

SEQ ID NO: 15093 - DNA, 457 bp, Oryza sativa
  Clone ID: uC-osflcyp003a09b1
ttggtttttagaaatatgaggggaaggttcagtttttaataacagaaacagattccagttttcaatagcagcagaacaagcgcatgccacaagccaaaataaagacataggaattagcaatgtaaatactcgcattccacaacagccgaagggcaataatcaggctcagaacaagtttaaaccgaacagaaaatagagagttttaaacgacacagtgcacacagcgggcatatgataataacggtcaatgcaacgagtgccatggccgtgcacaaaacttaacgaattagtaaaagctagatatcttaaatgcagacacgcaaaccaccacttgaacgaggatcatttctttttggcggcagccttggtcaccttggcaccggttgggtcctttttctccacgttcttgatgacgccaacagccaccggttgcctcatgtcacgcaccggaaaacga

SEQ ID NO: 15094 - DNA, 115 bp, Oryza sativa
  Clone ID: uC-osflcyp003a10b1
ttggttttttgacccacgggggttttatttttttctttttatttatacaaatatattttattttcacttccgatacaacggccaaaaaaaccagaccataaagggagtcaacaaa

SEQ ID NO: 15095 - DNA, 380 bp, Oryza sativa
  Clone ID: uC-osflcyp003a12b1
ttggttttaaacgattggggggctttctcatttgctgccctctcgcagttttatcacgagcttaaattttgtacacaattgtacatcatgcagggccatgtaaggaatgaatactttcagggttaaacttcttctctgggggaagaccggggattagaacatctactgcctatccaagaacatgtaatccgcagttggtggactggaacccattgggagccgtcgttgcatctgccatctttctttgagggaggagacgacctcctctgaccagtttaaccaggtagcgggccttggaaccgttcctttcaacagcgcaggagaaataattctcgcccttgagggcaaggaccgaggaccctttgcgccagtcatggggg

SEQ ID NO: 15096 - DNA, 102 bp, Oryza sativa
  Clone ID: uC-osflcyp003b01b1
ttggttttttaaggtggggggcttttttttttttttttctaaatacattctttttaaaagaccactatgccagcacatctgcacattaaactaactgtaata

SEQ ID NO: 15097 - DNA, 398 bp, Oryza sativa
  Clone ID: uC-osflcyp003b02b1
ttggtttttttattttttggggataaatcattgtcattaaaatgagaaatttaatggaccatacaggtttttgtagagccagaaacaaagaggctactacttaacatcaaccaaaacgattgatattcctataaaatttggagaatggagcttttgtaaatctagtaaggccaatatgtgcataaaaacaatcttaaggccaatggtaaggggaacaaagtaacacagaccgaacaaaactttttgacctcgtaaaaaatctttgaaatgttccggatggttgaagcgcatgctatctgcgcaagaaacccatggctgggtatacgtcgttgagggggatgtctgctatctcagcagtttttcctgatccttttaagagaacaccatccaaataaccc

SEQ ID NO: 15098 - DNA, 187 bp, Oryza sativa
  Clone ID: uC-osflcyp003b03b1
ttggtttttgaaggaaagggggttttatttttttctttcttaaaacatacaataaaacaacattacatcacaacacaacaagcgatgaacctaacaatcatacccacacaccacaaccctaccgtgacaacacatgcataccccgcacccagaccagtgacgaaaggaaactgcatcaataacaacg

SEQ ID NO: 15099 - DNA, 468 bp, Oryza sativa
  Clone ID: uC-osflcyp003b04b1
ttgttttattaagcacattggggcacacacatggccaaggcagttatttgaatcagtctccaacatacttcaaatcatagaccacaccatacagcaaacatagtataaacattgtcatagagagtacagctgatagcagcttgtaatattctagcattactttggtagcatccctctacaaaacatagcagacatcaccagctcttcatcttggccatacacattcaacatggtttgctagtgacagaccacactgaccagaacatttcgtctccttagtaggcaccagctgccatgagcagctcatcaaggctccagatgccctcgttgcttgccccgtcttgtgtagcatcattttgcagaaggttgtccattgattcatctgagctgctctcaacataagggaatggcaaatacttcattttgggatcgaaggtgggcatgttttgtgcgagattaggcatgcca

SEQ ID NO: 15100 - DNA, 126 bp, Oryza sativa
  Clone ID: uC-osflcyp003b06b1
ttgttttttttattttggggggttttttttttttttttttttttttttatttatatacaacataatttttcatcacaattgtacattatgcaaggccatgtaaggaatgaacaaatcgggggataa

SEQ ID NO: 15101 - DNA, 295 bp, Oryza sativa
  Clone ID: uC-osflcyp003b09b1
ttggttttttgatgttggggggtgtttgtttaacgatgtttccacaacaccagtatacagtatttgagttacttaaacaaaaggtagcacaacaatggtatacaaaagtgtgcattcaaattgatgcacagaagtaataaacaactagatacttagaatgctaacgctttggctaatttattcattcaccctatatttacaattgttaatcccaaaacagaacttctttagaggacttttagctaatttcttcagtgttgatgtcatatggattcagagaactaactggcagcat

SEQ ID NO: 15102 - DNA, 145 bp, Oryza sativa
  Clone ID: uC-osflcyp003b10b1
ttggttttttgaagaggggggggttaattcttttccaaggcagctatttgatttaatttgcatcttttttcaaaacatagaccacaccttttagccaacatagtataaacatcgtctgagagagtacaattagatagccagtttg

SEQ ID NO: 15103 - DNA, 127 bp, Oryza sativa
  Clone ID: uC-osflcyp003b11b1
ttgtttttttaaatttgggggtttttatttttttttttttttttttaattatataaaaaactaaataattcaactcaattaaccataatgccatacaaaataccgaatgaacaaaaacgcacataaa

SEQ ID NO: 15104 - DNA, 127 bp, Oryza sativa
  Clone ID: uC-osflcyp003b12b1
ttggtttttgacattcggggggttttatttttttttttttttttatattcatttataaaacactaattttcatcacaattatccaaaatgcaatgcaacataaagatagaccacatccataggtaaa

SEQ ID NO: 15105 - DNA, 97 bp, Oryza sativa
  Clone ID: uC-osflcyp003c01b1
ttggttttttgaattaggggggttttttttttttttttttatttatttttttttatacataaaaataaaaaaaaacaatgaacgataatacaataaa

SEQ ID NO: 15106 - DNA, 338 bp, Oryza sativa
  Clone ID: uC-osflcyp003c02b1
ttggtttttttttaatgaggggttgaatgattctaaacattatactgcttgccatcttaatatatccaacattaacaagggcggtagtagaatcattagtacacatgattctacatcactctctatttttgctttttttttttaacacattttagatgatgcacctgaaactgaacagaagctgctttactactacaagggatgcagcaccagaaagctgcaattttccccctttttttttcaggttttatacacagtgaagaaaagccgagagactaaactctgaaaactccaagggtttacactagacagcagcagctgcagcatcaccactcacc

SEQ ID NO: 15107 - DNA, 466 bp, Oryza sativa
  Clone ID: uC-osflcyp003c04b1
ttgtttttaacagtgccaggggtcacaatcttgccattcttgaaagaattatgattcacaggctggttctcagacaataatgtggtgcaggaaaaaataattcgcacagcaggttaccgaccacttggagtaccacagaaagatttcaacggttgaagtcaagttaatcgataacatcaaaaatgatttctgaacttgttgcacaaaaaaatgatagttgagaaaacaataaaagttccaagcagggaagtctctagaaattcgaggagcatgaagaaaaccatttagaacacccggatcacttttcccatagtgctcttcaggtacaagcatctcacgttctgccaattcttcttcaaaagagagacaaggaagttcacgctcatttgcacattttggaaaatttgcttctcctccatagcacagttgcctacagcaacaccccatgcaagaaccttttttaggt

SEQ ID NO: 15108 - DNA, 238 bp, Oryza sativa
  Clone ID: uC-osflcyp003c05b1
ttgtttttttatattatggggtttttatttttttttttttttttttttttttttttaaatttttttattatatttaacaaaaaaaataaaaaaaaaaaaacaaaaaaaaaccaaaaaaaaaccaaaacaaaaacccaaactaagaaaaaatcccactaaaaaaacaaacaacaccgcgctagagacaggcccaaaaggacctccccaagggtctccccacccagacacccccaacaac

SEQ ID NO: 15109 - DNA, 116 bp, Oryza sativa
  Clone ID: uC-osflcyp003c06b1
ttgtttttttttgtttggggggtattattttttttttttttttactgtaacttgatacaaaaggtttcaacagaacaataaaatattttgacaggaggcaaccaagaggaccaaaa

SEQ ID NO: 15110 - DNA, 118 bp, Oryza sativa
  Clone ID: uC-osflcyp003c07b1
ttggatttttttttttgggggggttttaatttttttttcattatactgttttgccatttaattatatccaacattaacaagggctgaatgtcaaccaacatacccaaacgatcctaaa

SEQ ID NO: 15111 - DNA, 101 bp, Oryza sativa
  Clone ID: uC-osflcyp003c08b1
ttggttttttgatctaggggggttttaaactttttttttttctctttctattaactaaatacatacaacctaaaacactgggctaacgtccatggtaacat

SEQ ID NO: 15112 - DNA, 344 bp, Oryza sativa
  Clone ID: uC-osflcyp003c09b1
ttggtttttttaggtgagggggttctctcatttgctatcactttgttctcagcagtcaataaaggagttcacctttaagcagacaaggccaaaggatatacaaacgctacacaaccctccctgttaaactgctgcatcttttaaatgacgccgactttaagttagatggttgctacttgctagaaacaaccagaactatacattaaagagcaaacaagactggatctactttgatgttatctctgaacaatgaactgggataatccactaacattgtaacacatgaactaaactaatgtcctgtaaggtatatgggtgtccattgctaatgaaaccatgctgaa

SEQ ID NO: 15113 - DNA, 113 bp, Oryza sativa
  Clone ID: uC-osflcyp003c10b1
tgggttttttgatttaggggggttttatttttttttttctttttttatttattatttaaacaatttccatcataacacacacccaataaacaaaaatttatatacattcacca

SEQ ID NO: 15114 - DNA, 112 bp, Oryza sativa
  Clone ID: uC-osflcyp003c12b1
ttggtttttgacgcgcgggggggtaaatatatttctttttttcaaattataaaaacactgcaacatacatcaaaacaaagaccaatcaaaacagccaacatagtgacagccc

SEQ ID NO: 15115 - DNA, 102 bp, Oryza sativa
  Clone ID: uC-osflcyp003d01b1
ttggtttttgaattgtgggggtttttatttttttttttttttttataaatatttgtataacaggcttattaaatagaactagcgctttaccaatacagggca

SEQ ID NO: 15116 - DNA, 115 bp, Oryza sativa
  Clone ID: uC-osflcyp003d02b1
ttgtttttttaaataaatggggtttttttttttttttttattatatatataattgcaaaaatggctaaaacaagagaaaaaacgctggtccccaatacaacactaaaatccaaca

SEQ ID NO: 15117 - DNA, 123 bp, Oryza sativa
  Clone ID: uC-osflcyp003d03b1
ttggttttttatttttgggggtttttattttttttttttttttttttttttttttttattcattttttgccaacacaaaaaaccactaaaaaacaatatacaaagaacccaaaaacccctatc

SEQ ID NO: 15118 - DNA, 387 bp, Oryza sativa
  Clone ID: uC-osflcyp003d04b1
ttgttttgacagcgaaaaaggaggagatatattaattacggtgtatcgtttcaaggatgagttcggatgagtgatcgatcactctccacatacttggatcggtctctctcgcacacgtacaacgacaaggggagacggtacaacagcagcggcaacaaacacgcacgtacacgggtagtactacagaacgcgccaacgtcatgggcgattggtgagaaaacacgcacacctactagtactagctttatccttttttagtgtacaccacacggccgtcgacgatctcatcggctagcgcgatcaatggccgtccggccggccagcttcgagcgttatgctttcatcttcccgttggctggcccgttggccacaaccaggccgacgccg

SEQ ID NO: 15119 - DNA, 295 bp, Oryza sativa
  Clone ID: uC-osflcyp003d05b1
ttgttttttttatttaatggggttttttttttttttttttacacatctacattgaaagtgatcttgctgacgatacaacgagcggtagccctatacaacaaatagaaccgtaatacgcctacgtagtcatacgttacgtacacaggacacgtactctgagtgcattctactctcgtcgaacacgaacagagaagctgctgattttgctggttaattagatccaatacacgacggccttcggtggcgggatcacgaccgggctcctcacacctgctcgacagagacccactggagg

SEQ ID NO: 15120 - DNA, 433 bp, Oryza sativa
  Clone ID: uC-osflcyp003d06b1
ttgttttacagactaaaaaggcattatttttccagtatttacacaactccgttgcagctgagcttgctgccgttacaacgatcggtagccctatacaacaaatcgatccgtaatacgcctacgtcgccatacgttacgtacaccggacacgtactctgagtgcattctactctcgtcgaacacgagcagagaagctgctgattttgctgctcaattcgatccactacacgacggccttcgctggcggtatcacgatcgggctcctcacgacgtgctcgtcggagacccacttgaggttcccctcgacgccggcgacggccggctgccctgcccaccgcacggtcaccgtgaagctctgcttctcgtacgccctggagaagcgcagcaatggcgggtgcacggtgaccgcgacgttcttgggcatgtccaccac

SEQ ID NO: 15121 - DNA, 120 bp, Oryza sativa
  Clone ID: uC-osflcyp003d08b1
ttgtttttttaattttggggggttttttttttttattttaatttatatatattgataatactggctattacggtacaaagggtggtggaccaatgaattacattgaatacccaccaccgt

SEQ ID NO: 15122 - DNA, 143 bp, Oryza sativa
  Clone ID: uC-osflcyp003d09b1
ttggttttttaaatttttggggttttttttttttttttctattattttttaattatatattaaaaaaaacaaataaaattatacaaaaaaaaaagatataataacaatacacaaccctccctattaaactactccatctttta

SEQ ID NO: 15123 - DNA, 155 bp, Oryza sativa
  Clone ID: uC-osflcyp003d10b1
ttggtttttgaaattaaggggggactcaacttttattgaatgcaccaacctatatgctataccaagagtaacctagtatcgccgcctaacaacacgccttaagaccaatatacggaacaatgtgtacatattacctagccaatgctattgccctt

SEQ ID NO: 15124 - DNA, 399 bp, Oryza sativa
  Clone ID: uC-osflcyp003d11b1
ttgttttttttatttaagggggtttattttttcagtttttacacatcttcgttgcaactgagcttgctgccggtacaacgatcggtagccctatacaacaaatcgatccgtaatacgcctacgttgccatacgttacgtacaccggacacgtactctgagtgcattttactttcggcgaacacgagcagagaagctgctgattttgctgcttaataagatccactacacgacggtcttcgctggcggtatcacgaacgggctccttacgacttgctcgtctgagaccccattgggggttccccttgactccggcgacgggcggctgctctgtccaccgcacggtcaccgtgaagctttggtttttgtaccccctggagaagcgcatcaatggcgggtgc

SEQ ID NO: 15125 - DNA, 292 bp, Oryza sativa
  Clone ID: uC-osflcyp003d12b1
ttgttttacagactaaaaggggattattttttctgtttttacacaactccgttgcagctgagcttgctgtcgttacaacgatcggtagccctatacaacaaatagatccgtaattcgcctacgtggccatacgttacgtacaccgggcacgggctatgagggcattttactttcgttgaacacgaacttagaagctgctgattttgctggttaatttgatccactacacgacggccttcggtggcggtatcacgatcgggcttctcacgacgtgcttgtcggagacccactt

SEQ ID NO: 15126 - DNA, 127 bp, Oryza sativa
  Clone ID: uC-osflcyp003e01b1
ttgtttttttttttttggggggtttttttttttttttttaatttaaataaacttacaaaaaactcttatacaacacaaagacccaaaaaacaaaacaaggtatggaatgacaaaaacactacttgat

SEQ ID NO: 15127 - DNA, 372 bp, Oryza sativa
  Clone ID: uC-osflcyp003e02b1
ttggttttttaactgggggggattaaaaaacattcttaatttgggtgactacacatatacttggctaaacaaagctaaatatatctttatcattgggaagaagttcacgcaagctgcaggacttaacctgcaactacattggtaacactggatacccagtcgaatcaaaacgatgacaaatgctgggtggttcgatgccgatcaccgtagcaaacctgcacggtattgggccgattatgaagaatggattctagcgttcagagttttacgcctggcctgagccacctgcgcgcttcagtaccttgtaaaccgatgagaaattcaggtcgcctaatcccaagcttgttgctttcttgaacgccttggtggaag

SEQ ID NO: 15128 - DNA, 399 bp, Oryza sativa
  Clone ID: uC-osflcyp003e04b1
ttggttttttttaaacaggagtggacagcatagaagatgcacacacatatatattattatttatatacactactaagtagaaaagaatgccacagacacggtaataaaaatggcagtagatacataagaaataatttaattacactagctagcagtggcacatctgaaaaaacaacgtgaaataaaagggaaaaaaagcaagcagaaagctagctcatcactttattccagaaacggtacagtgtagtgactcgctcgctcctccctctggcgaaataatgtcgtcaatgcctcaatcgtgcagcagcaagtgctcggtctccggtgatcgccgtcactggtcggtcgctggcggtatgtgcggcggcttgtgctttttcggaggtgctttaggttttg

SEQ ID NO: 15129 - DNA, 74 bp, Oryza sativa
  Clone ID: uC-osflcyp003e05b1
ttggtttttggagggggggggttgttatttttttatttattattaactacatgtataaagcagattactacggt

SEQ ID NO: 15130 - DNA, 189 bp, Oryza sativa
  Clone ID: uC-osflcyp003e06b1
ttggtttttttaattgggggggttttattttttaatgctttattaactacctgcataattaacactacaacagtacaataaatggttgcaccttaagcatgccacgatgcgtctgctgcggagcgagccaccaatcccattctcagtttctattacaggggcgaaaaacactggttaccagatgctagc

SEQ ID NO: 15131 - DNA, 362 bp, Oryza sativa
  Clone ID: uC-osflcyp003e07b1
ttggttttttatttttgggggttttttttttaataatgctgtttttatttcctgtaatacttgctgcccccaaacacaaatctgtgatcgaagcacaagttcttgggagttcaacacggttaacaccacaagaaactccttgcaaaacagtaaagatgcatgtgtcctatgggaataaccaagtggggcttttttatatgctgggggaatgcatacatctggctgaacgtgtagtcatgtaaagcgcgcgttgctcaactgttacttttgtgggggttgattgacgcccggaacacctgaaaccccacaactggtgggttggttactgatgcttcttggacagaattttcaaccaaatcttt

SEQ ID NO: 15132 - DNA, 118 bp, Oryza sativa
  Clone ID: uC-osflcyp003e08b1
ttggttttttatatcagggggtttttaattttttttttcattttttattttcttttaataaaaactaaaacaacataaaaaaaataaactaataggaattaacacaaaacccaacaca

SEQ ID NO: 15133 - DNA, 294 bp, Oryza sativa
  Clone ID: uC-osflcyp003e09b1
ttggtttttgaattttgggggtttttttttttttttatactttttttgttttatcttttttaattcgaatagacaaacattgcaattaaaaaagggggaccttaggttccaccctaatgccggaaggattaaaaaaaactactggaactcctattttaaaggggcatgggactctgggacatgcaccttggacagggtttaagggccaaaaggagacataggagatctacctctttatctttggggggagcttaaataaaatgttttcccccctggaggaacttaccaagaaac

SEQ ID NO: 15134 - DNA, 234 bp, Oryza sativa
  Clone ID: uC-osflcyp003e12b1
tgggttattgaaaaaaggggggtgttatttattaaaacgcttgcatatgatatcagataagtagagtcaacaagacaaaactagatttgtcaaagcacacctctctaattccacccacatacgccattatttttgggcaatagcaaacggctttccattcctcccttttaccagtctcaaaccataaactcccacaacaaattctcctaagtgacggccatattatatgtttta

SEQ ID NO: 15135 - DNA, 351 bp, Oryza sativa
  Clone ID: uC-osflcyp003f01b1
ttggttttttttttttttgggggatcaggttatatataatcacatatttatataacagagcacaagaagaaattaaaaagcactcatcactatatatttagctggagagataaaaggacttattattattacttaatcatgctctcgcctagctggtagtagtacccaagcacgcagcagctcaagctcagtatctggggatgtcctggcggtggtggtcgtctgggtggccctctttttttttgtctccggcggcggtggcaatcagcgggggaaggcggcgatctcgaccccctttttgcccagggaaggctggggtgggtcgtacgcgcttaagaggcggtaggagga

SEQ ID NO: 15136 - DNA, 340 bp, Oryza sativa
  Clone ID: uC-osflcyp003f02b1
ttgtttttgggtaaatatggggagctgatttataatttgtcatgtcaattcacatccagtcagcaggagataactgagctagaggttgcaagatcctttgccagcatactgcatatctacatcacagggagctaacataaagacgatgaaccaagagagttctagttgggcattaatctagccatccaaatctaagcagcctcatgcacatatattacatagcatggccaacattgaccaaacatgttgcatcctatcttgaatctgttagttgaagacaaccagttctctccatcaggccactttcacggttgtcttcagcctctttgcagcctgcacg

SEQ ID NO: 15137 - DNA, 387 bp, Oryza sativa
  Clone ID: uC-osflcyp003f03b1
ttggtttttttttttttggggtttttatatggacatcaagcttattgagtatgctctgtttctcatccacaagaaaaattaacagaccaagttttgctggttttcaaatctaagggcaggccaaattatactccaatttccaaccaagcttgcaacaacgggggaaatttggggcaaaaacaaggaactaaaatcttttctgccgatgaatagcttccgaaaggggtagattccactttttcaacaaggttgcactgcattgggccattatctttgaggcttttgtgattgcctcagtcatatagaagttctccacaacagttttgaatggagtacagctcacttgttgctttaccgggggcttcacttcagaggaaatagtggacg

SEQ ID NO: 15138 - DNA, 108 bp, Oryza sativa
  Clone ID: uC-osflcyp003f04b1
gaattattggggtttttttttttttattttattttatgtaaattggataaacaggctttgccaaaacaaggaaagatgctaccaggtaaggtatggaaagaccataac

SEQ ID NO: 15139 - DNA, 435 bp, Oryza sativa
  Clone ID: uC-osflcyp003f05b1
ttggtttttttatttttttggtttggacatcctctcaaagtcttgggaggaaaacaaatttttccggctaggggaaccatggaaaatgggcaggtccacatgaacagttcacttttttagcaattacagagagagttcatgaggtttaacatctggaaacttttgatccttgtagccagctgcataatcctgccctactgtttattggaaagaaataggattgaccccctacaaaatttttcagcagcgacaacagtacatgccgattgccgcaccaccatgcgcatcttacagttagaattctgccacaatttctttgcaaggttacactacatgagatgggcacggccggccaggcctttagtctgaaactctattctggtacttctctttgcctgattgtgaaagcccgttgatggcattagcaaagaactc

SEQ ID NO: 15140 - DNA, 452 bp, Oryza sativa
  Clone ID: uC-osflcyp003f06b1
ttgttttttttttttttttggtttttttaagacaagaacaatttaaaggtggcattcttcaaaccagaacatgccatgacaaggggatgcgatagttagcacctagagtactttttagcgaggatttaactcatgtcaacaatgtatcaaaaaaggatggcacaaaaatttatcattactatccatcaccaacagcgcgtcccactgtaactcaaaggagagcttcagccctgatgatagcaggttcagtcaaattgtactttatccagctgcgtaatcatctcctcaaacttcaaaatctgtctcaaaaagtaatcaccatggttcttggttaacttggattcaacaacatgaataatgtcctcatcaatatagaagtcaaagtctgcactggatatgacctttccgtcactgtcgattgaatgcattttgtgcttgtatgtcataagaat

SEQ ID NO: 15141 - DNA, 360 bp, Oryza sativa
  unsure (1)..(360): unsure at all n locations
  Clone ID: uC-osflcyp003f08b1
ttggtttttgaatagaagnggggattattataatccttagctgtaggtgcactgggtgatgggtcaacaccagagaatcaagcataaagaaactgaacatgtggatgatcgagaattacagcagccacagtatcccagaagcccataacatcaggatataacgaccaatgttatttataggacaccatcctgtttgtgctgataatgtttggaccttacttgataccgggtcaagggttactaacaaatgggtcaactaccaaactttttacctgcaatgcttaccaaaatctgacgtggaaatgaagcgagggaaatcaattgcttcagaaaaatgcataaccttgctagctttgactt

SEQ ID NO: 15142 - DNA, 343 bp, Oryza sativa
  Clone ID: uC-osflcyp003f09b1
ttggttttttattttttggggtttttttttttttttttaatctcacaagagccaacaatagactccgattttacgcattgacacataaaacacattaaggttttgatagataaaaagatctccagcaggagtgtgacaccacatagtctgtaaggaccgtctgggtttattgaccaacattacagataagcaagcgcacaggacacacgaacaaactcgaagcactcataacttcgtaggaaaagcacacgacgattacgaactggaaatattcatggggaacgaatacttaaaagaccataaggcgaagtaggcgatgattggggaccaggttggacccgtt

SEQ ID NO: 15143 - DNA, 419 bp, Oryza sativa
  Clone ID: uC-osflcyp003f10b1
ttggtttttttactactagagagacaaactattgattaggggaattgtaaactgtacagaccgaccatgcggtaaattgttgaatgtttacaaggtcagcagtccaacgactccaaccatccatccagacattgaatgcgaaaaggagattatttatccaagtcatcaacaaaaagaaaagtatctgatcactgtacagtttgcgcaaccaccattgcataaccatggcacgcctggacaagagagctgaagaacagtgccatcttgtgtgaggaagcgttgttaccattaaaaagcattgatcccaaattgcatccgcacagctccagaaaatattcacatcacaagatcctttggagattgtcccacagcacactgcactcaatcagatccataaatgctgatggttgtctgcctaa

SEQ ID NO: 15144 - DNA, 440 bp, Oryza sativa
  Clone ID: uC-osflcyp003f11b1
ttggtttttgtatgctgtgggatttttttaaactaaatcatattggtttcaagctgtttggaaaatcctatgaatacaccataggaaaaactgctcatttgaagctataggattatacataggcaagaagcaacgtttttggcctagtcaaaatctggcaaaacatgccatagtatcatcgacgacgagcacaagctgcttgtctaatcgtccagctcaatgatcttcacaaccgaggaatctcccaccttctggcagacaacatcgcgatcatgcgactttatcacaccagaaactttaccgtggtcaagagcaaccttcaaaacggattcatttgtagcgttggttgattcaactggatgcctcggaacagcaagcatcggaaagaggcctttaactatgagcgattgtcttgcttcaaatgcgccagtgaaactcca

SEQ ID NO: 15145 - DNA, 130 bp, Oryza sativa
  Clone ID: uC-osflcyp003f12b1
ttggttttttgaacacggggggttttattattctaatctctatcaaaggaaaggctatactagcagtcattaacacaagccaggaggtcccaaagctgaaattacgaaagccatttacccacggagttac

SEQ ID NO: 15146 - DNA, 416 bp, Oryza sativa
  Clone ID: uC-osflcyp003g01b1
ttggtttttggaaggggaggggatattattccaataatgaatctataagtgtttcttaattaactcgttgatcaccaactttacaaacatcgactgacgggtccttcttgggacgacccaatgcattcctccggcacaacaatgtcgaatccactcagcgggcactctgcctccgcatacttgctgacgtatatctccggtccgacgtccagcgacgaccaccttctcttcgccggtggcgtgcccggatcctggtagaagtagagcgcctgcgacaatgctccgacgtcgagctcccatgtcctggggtcaccgatccacccctggcctttcgccgtggggtagccgaactcaccccacaccgggtgcggcacgagctgcaggatctcctgcggcttggggttgctgtacccgtc

SEQ ID NO: 15147 - DNA, 377 bp, Oryza sativa
  Clone ID: uC-osflcyp003g02b1
ttggtttaattatgaaacggggttaattaagctcagtgtaagaacaaccatgtagatgatcatcagttaataattaattgagcactgcacaattgcgacgaatgttgccttgcgacccggtcttgaccccaacccggcccaacttggtcatagccgtgacgaaggcctggttgaaggcggcgctgctctgggcccaagaatccacgatgggcctggaccgtgggtccgagtacagcacctggtcagagcccagaaggcccatcccgttctgcaggttcttgaagtactggttgtcgaaggcccgcggcgttaccgggtccatggtcacggggatccgcgggtccacgttgggtgggcacgacctctgtagctgggct

SEQ ID NO: 15148 - DNA, 445 bp, Oryza sativa
  Clone ID: uC-osflcyp003g04b1
acacaagtgggccaccatctcattctcatctcaaatcactagcttggctagatgccaatggccgtatggtatatacatttggcccgttcttcacacatcctgctgattcaaatcatccatttcatgggcaacatctcacattttcatttcatttcatttcatatattcttcttcttcaacacctacgtactactaatttgctgctacaagagtcttgtatgcatatacaaaacctcaaggctgtggaacctcttccttcaacttctccactgaacagttctcacagatgaatacagacaacgtccgtccatctcaataatacagtcttcttcatcagccttgttccgtcttgtgttccaacaagctgtcccagcggcttttcaggatctcgtatgcgtctgaacatggaagtgcgattacacgggagccgccgtcagttggcagc

SEQ ID NO: 15149 - DNA, 417 bp, Oryza sativa
  Clone ID: uC-osflcyp003g05b1
ggggagaatggaaaaagtcaaggttcgataaatattgcttcacttgtacaaaggacagataaaaatacattgatacatgacacggagagagccatgcacaccacttatttggacacacagagggcaaggctgcagagaaaatcaagcaacacaagctgaactcacgggcccacctgtcagcctttcactggtcgaggccggagacttttgggaaaaacagcaacaccacgcatgcagaagaagacaaattattacacacacaaatcgacgacacgggggccggcgacgtacggggaggtcgtcgccgccgccggcgacgttgtgatgaggtcgatcagccgaagaggtggtgctttttctcgccggtggactcctcggcgctcttgtggtccttcttcttttcgtggtgcttgtgga

SEQ ID NO: 15150 - DNA, 390 bp, Oryza sativa
  Clone ID: uC-osflcyp003g06b1
ttggttttttaatttttttggtttttttttttttttttttttttttggttttttttttttttttttttttatttttttaaaattttttttttattaaaaaaatttaaaaaattaaaaaataaaaaaaaattttttttaataatttaccaacccaaaaaggggaaaaaattaaaaaaaaaaaaaaaaagcggttgtaaaaaaaaaacccacaaaaaagaaagccccaaaaaaaagggttttaaaaaaaaaaaacccaaccttatggaggggaagaataataagggggaagccccaaaaaatatttaaaaaaaaaccccccccttttttgaaaaaaaaaaggcccccttttgaacaaggggaaaaaaaaaaaccggttttaaccccccaatg

SEQ ID NO: 15151 - DNA, 297 bp, Oryza sativa
  Clone ID: uC-osflcyp003g07b1
ttggttttttgagtaaaggggggttaataaattttatttttttttcttttttttacaaggtccaaccctgactccataataaggccatgtgacataatataatagaaggggggcataccttcgacattaaaactacggaaaactttcaggggttcttagggaacagcagttcaacttgcaaactcaacatgaataccgctcctttcaagacattttcagccagaagtaaaatttaagaggggtaagcaacatctttcagaaattgagattacctcgaaacaatggcagctagaggcc

SEQ ID NO: 15152 - DNA, 382 bp, Oryza sativa
  Clone ID: uC-osflcyp003g08b1
ttggttttttaaatttgagggttttattttttttttttttttttttttttttttttttttttaaaaacaaacgggggttaatcataaaaaatcttcccggagaattagatgcccaaaattcatagggttcttcagcatcttacaacttacaaggggggccaaatcccagcgcaacttttttaaagtaagctgtagggggaaaaggaaccatttttaacaacgggaaaaatattggttttggagggaaaccttttgaaccaatttattgggaaataaatttgggggatcgtttccgtccgatctaaaaaaaaccgggcttttgtacctaaagggggtttggcctccaagtgaccgggttgacctttttggtggggagggtttt

SEQ ID NO: 15153 - DNA, 386 bp, Oryza sativa
  Clone ID: uC-osflcyp003g09b1
ttggtttttttattttttgtgttttgaatttgaaaaaaaaacagtattagagaatggataaatcataccccgatgattgtcactgagagccttcaacttcatgtccaaagctcccatcatcacaaaccaaaggaagccaggccatacatatacgggctcctgaaatctctcctgaaacagtctctcaagcttcatgttctccaggcaaagtgagaagaattaagttgggggcatggccatcaggggagacctccactgttgccaagtacacataaccagccctaactcacacaactcttatgcccttgtaactgagatatgggggtcaaagagaatatcttctgggatgcccatcttgcaattccgttcctgacgactctagggat

SEQ ID NO: 15154 - DNA, 423 bp, Oryza sativa
  Clone ID: uC-osflcyp003g10b1
ttggtttattgatgatggggggtcaactgaaacaaccttttattgagtacccacaaacaagttggacatcgacatgtcacacaagttgataaaaacaagtaaaaagctttgacaaacatggctatcagcggctaaaactgatatcgtcaaccattttatacagatgattaacaacagccagaaactagagaagaagagataagagttccttccaggcatcacaatttattgtggagatagtttgagtgagccaacgccactggggttctctctaggaggaaatttgttctagtgcattatcttaggtcttcagctagttcttgcccattgctgctctgtcctgttgcctaagcctctcaccttcacggcaaagatagttctggaatttctccttgccgccgaaaaggaagatccccgcgaggc

SEQ ID NO: 15155 - DNA, 99 bp, Oryza sativa
  Clone ID: uC-osflcyp003g12b1
ttggtttttttaaccaagggggttttatttttttttttttttttttttattttatttaataatctaaaaccaataatcatatcttttaaccaataacat

SEQ ID NO: 15156 - DNA, 163 bp, Oryza sativa
  Clone ID: uC-osflcyp003h01b1
ttggttttttagaacgagggaggttatattcataatattaaatttcctacatctagctaagcatatatataccgatggagaggatactgctattatcaggggatggtatgacatgtacagtacaggtgcagctttaatttaccatcagacagtggtggagaat

SEQ ID NO: 15157 - DNA, 376 bp, Oryza sativa
  unsure (1)..(376): unsure at all n locations
  Clone ID: uC-osflcyp003h02b1
ttggttttttgaaccccgngggtttttatttttttttttttttttttttttttttcagggcagaaatttttctgaaacaaaaggggtccatcatcctcctttatcatctccctccttaattaaatcatcccagaataatcttttttttcctccgggaggcagtattttagggggggacaaaaaggcggggccgtaaataaataaatccaaagggggaatttacgaagcaggcaagctttaggggttattaatctccttaaattaaggcctcctcctccttaatcaacggcgaggggggaagtgctgcggtttggcggcggccccctccccggggggcttggcttccttaacggttttaaaggggcccacaagcgcc

SEQ ID NO: 15158 - DNA, 168 bp, Oryza sativa
  Clone ID: uC-osflcyp003h03b1
ttggtttttggatattagtgggtgtttttttttttttttttttttttttttttttattttattacttaaaaaggataattaattaacaaaaaagggtattaagcacgtacaaacagagggacaagggaggggacaaattatctgggaaaaacacgggggaagagggga

SEQ ID NO: 15159 - DNA, 161 bp, Oryza sativa
  Clone ID: uC-osflcyp003h04b1
ttggttttttgaagatgggggaaaggattattttttaattactaatacatatttcatttttcatttttaacttttcaatttcttaccatttccttttattggttcctgggaaatagccatggaatctctttacatccaacaacaaccgtaagggcaatata

SEQ ID NO: 15160 - DNA, 442 bp, Oryza sativa
  Clone ID: uC-osflcyp003h06b1
ttggttttatgcaaaacaggggatttatccacaaaacaagtaccaactgcatgaagtatgatgaatagctagctagactaaccacacactcacacgacatcagacaactcctgccgcaaatgtaaaaaaacaaacaaacaagaaaacacatcctcccgatattcttttccaccactgacaaataaaaaatatcaaaaagggacgcacccattaattttcacagaagggattttttatcttagggttcccgtcccgtcccgtccctatcttcaccacgcttcatatcagggtggcaaggacctgcctcaacgctccctgcacattccaatgcatatattcacagagctagccatccaattttgggaccagcttgtgcagggttgatgttccctggaacacggttgttcgcccacccttgaggtactcacgcagctcgtcttgg

SEQ ID NO: 15161 - DNA, 376 bp, Oryza sativa
  Clone ID: uC-osflcyp003h07b1
ttgggtttttgaactttgtgggttattattgcaaaaacatcatcttcttcttcatcttcttagtgtacacaacaccaactcgatcatcatctcgtcgccctaaacccatctttcccaacccaaagacaacgaactcgctggccacaaatccatccaaccacaattaaccactgctaagctacggtcccccactttacttgccggggacgaagttggtggcgttcgcccaggctctgttgttgacggggtccgccaggtggccgccccggttcttgagggggcccttgccggtgactatggcctggacgaacaaacctaacatggagaacatggcgaggcggccgttttgatcttctttaccttgagctccgtaacc

SEQ ID NO: 15162 - DNA, 355 bp, Oryza sativa
  Clone ID: uC-osflcyp003h08b1
ttggtttttgagaaaaaagggggtggcattgccattgtgcttcaccttaaacacttatatatgtgaaggtgaccaaaaattatataacactaccatgtagtagaaagctggagcaggagggacaaagattacagcaattcggtttaaggacacttaggtgagtgcagaattgcagtcaagttaaagcgaaacaggaaaatctggaaaaaaaataatcctcttttttctttctttatggacaggctggatcacacggtggtagactgatggatggtctcaatgtccaggcctttgagcttaacaaccggttctacatgccccttgagcgtatggagcttcctaagcctggcaaact

SEQ ID NO: 15163 - DNA, 359 bp, Oryza sativa
  Clone ID: uC-osflcyp003h09b1
ttggtttttttttttttttggttttttttttttttttttttttttttttttttttttttaatcctcaaaaagggttacttatgcagggaaaagggttttatgctttttcatacagggggacagggggggtccatataattgggaaaaacaaagggaagatggatttacagcagcgtttttaaaatacaggggacttatagctacaagctgatcacacaagggaactttgctgctgatgatgatatggaacatgttgttatagcttacccccaccacgggttggcgccggtcctgaagtcggtctccacccacggcacgaaaagaaccttgccgtcgtcgacgttggcgtgcaccaatgc

SEQ ID NO: 15164 - DNA, 177 bp, Oryza sativa
  Clone ID: uC-osflcyp003h10b1
ttggttttttatttttttgggtttttaattttttttttttttttttttttttttttttttttttttattttttaatttaaatttttaaataaaaaaaaaaaaaaatattaaaacaaaaaaaatattaaaattaacaaaaatatataaaaatataaaaaaaaaaaaaacaaaaatctt

SEQ ID NO: 15165 - DNA, 452 bp, Oryza sativa
  Clone ID: uC-osflcyp003h11b1
ttggtttattaagaactaggggaatttttttcagtctggttgcgaggtctgaatagttaatatgaatcatagtttcatttttttttcttgatccactctatctatttcgtgttccagatactagaataaataatatccgacgaattagaatcatcttgatagagataacaggggctttctatgtattatcaataggagcaaattctaacaagtcacacactcagattccagagataccgaaaccaaaaaattccacggtcgaactaccagaatgtctagaaatgtagagcttaaagtagaaaggctcttttggatggaaaaactatgacttcgtagttttcgttagtagaaacctaattcattaaaattccgtccagtaaaacggaagaattataaatttctaaaataatagataggaataccgcgaataaagccattgcgacccccataaa

SEQ ID NO: 15166 - DNA, 140 bp, Oryza sativa
  unsure (1)..(140): unsure at all n locations
  Clone ID: uC-osflcyp003h12b1
ttggtttttggagaaaggngggttttaattttttttttttttttttttttttttttgcttttttttttttttttttttttttttaaaaattaatcgttctttacacaacctctgttttttattttattctggggcggccc

SEQ ID NO: 15167 - DNA, 456 bp, Oryza sativa
  Clone ID: uC-osflcyp005a03b1
tttcttgatctgatcgtcggacatggcgtcgcccatgctctccgccgccaccgtgccactccagggaggcggcttgtcggagttctccggcctgaggagctcgtcgtcgctgccgctgcggcggaatgccacctccgacgacttcatgaacgcggtctccttcaggacccacgcggttggcacgagcggcggggcgcggcgggcgccgacggaggcgaagctgaaggtggcgatcaacgggttcggccgcatcgggcgcaacttcctgcggtgctggcacgggcgcggcgacagctcgcccctcgacgtcatcgccatcaacgacaccggaggcgtgaagcaggcgttgcaccttctcaagtacgactccacgctcggcatcttcgacgccgacgtcaagcccgtgggcgacaacgccatcttcgtcgacggcaaggtgatcaaggtcgtcttcga

SEQ ID NO: 15168 - DNA, 449 bp, Oryza sativa
  Clone ID: uC-osflcyp005a04b1
tagtttacgagcaccacacaccatcagcagcagcaagtcgatcgatcgcgagcacacactaccaagatcgagatggcccgtgcacagctggtgttggtcgccctcgtggcagctctgctcctggcgggcccacacaccaccatggccgtcatcagctgctgccaggtcaactccgccgtgtcgccctgcctgagctacgcccgcggcggctccggcccgtcggcggcctgctgcagcggcgtcaggagcctcaactccgccgccagcaccaccgtcgaccgccgcaccgtctgcaactgcctcaagaacgtggccggcagcatcagcggcctcaacgccggcaatgccgacagcatgccctgcaagtgcggcgttagtttcccctacaccatgagccctttcatcgactgcttcagcgtgaactaatttgatcgatcgatcgtacccgc

SEQ ID NO: 15169 - DNA, 327 bp, Oryza sativa
  Clone ID: uC-osflcyp005a06b1
ttcatcccagagcaagaagctcatctcctcctgctgtcgcatggcagccatggccaccaccgggtccagcctcctcaagacctccttcgctggcgcgcgcctccccgccggcgaccgcaaccccaccgtctccgtcgcgccgcgcaccgtcggagccatctgcaactccatgtcgccgtcgcaggacactcccccctacgacctcaacgccatcaggttcagccccatcaaggagtccatcgtgtcccgcgagatgaccccgcggtacatgaccgacatgatcacctacgccgacaccgacgtcgttgtcgtcggcgccggctccgc

SEQ ID NO: 15170 - DNA, 534 bp, Oryza sativa
  Clone ID: uC-osflcyp005b01b1
ttcgtgtcaccgacaggaggcgcgtctcctccctcctcacctccatctccataaacacagcaggctcacgcacacgcctccgccccggaggaaggaaggaaggaaggcaaggaagccaagcccgcgaccccgacctacccccaccaattcaaccctccctcctcagatccaccaccaccgagcgcccgcgatgacggccaagggcggcgccgcgccgccgccgggcggcgcgggcggcctcccgaacggccgcttcttcaccgtggggctcgccaccgcctggtactcctccaacattggcgtcctcctcctcaacaagtacctcctcagcaactacggcttcaagtacccaatctttctcaccatgtgccacatgtccgtctgcgcccttctttcctacgccgtcatcgcctggctccgcgtcgtccccatgcagatcgtccgttcccgcgtacagctcgccaagatcgccggcctaagcctcgtcttctgcggctccgcggttccggcaacgtcttgctccgctacctcccg

SEQ ID NO: 15171 - DNA, 538 bp, Oryza sativa
  Clone ID: uC-osflcyp005b02b1
tgtccaacaagattcaaggtggtttatatcgaaggatgcgattgtatctggccttggtcttctcggcatcaagcaaggtggaacagaagctgcattgtccaagccccgcaggaagagagttgtccgaaagaaagttgcctcaacctgaatttagttggatgttgtctaatgctggaacaattttgctttagttccactacgccgtattgagttctacccagcaaggcgaacgagggaaaccgtagttggcagccagccttgcagtctgtcgtggaaggcatcgaagcggcggtggtggtcataactgggagggttcagaactggaggccctttaccattttgtatcttttttcttctcgctttctgataagaattgacatcccaatttcttgtactgttgtgagccaagtagactcggcatagttgtagtcctggagattggtaaagatacagtcggtaatatgagcaaaaccattccatttttgatttaggtcatgtagttgccgatgtattgcttgagcattacaaagttgatgcc

SEQ ID NO: 15172 - DNA, 512 bp, Oryza sativa
  Clone ID: uC-osflcyp005b07b1
tcgttatggtccaggaggccgagaagtacaagtcagaggatgaggaacacaagaagaaggtggagtccaagaatgcgctggagaactacgcctacaacatgcgcaacaccatcaaggatgagaagatcgcctcgaagctcccggcagcggacaagaagaagatcgaggatgccatcgatcaggccatccagtggctggacggcaaccagctcgccgaggctgatgagttcgatgacaagatgaaggagctggagggcatctgcaaccccatcatcgccaagatgtaccagggcgctggcgcggacatggccggcggcatggacgaggacgatgctcccccggcaggcggcagcggtgctggccccaagatcgaggaggtcgactaagcgcgaaatttgctagtgatccgcgctttaagttatcttattgcattagtgtctctctgatgctgcgttttaaaaaactttgctgctatgatgatacccttggtctgtttggcagtctttttggat

SEQ ID NO: 15173 - DNA, 525 bp, Oryza sativa
  Clone ID: uC-osflcyp005b09b1
tttttaagttcccctaaaggcgctcttcttggccttgctagttatgattcagatgatgaggacgatgagggtgataatgaggataaggttccagtttcaaacttatcgtctgaaactaaagctggcgcagctcgtccaggagaaggtgaaaaagccactgatggtgaacagcatggaaatcataatgaaagaaattctgtggtccaaaatgcttcattaggcgaagatcgtaaatttaatgatgaaatgtctcataggaactcaagtgcagaacttaaacaagagctacgtgttcatgacacacatagtagggaatttccttcagatgccaaaatatcaagtcagccgaaggatgtggctcctaccctggatgagaaggcacatggatattcccaaaatggaaaagttccaccttcaggcaataatgttgaaaattttagcattatggagagcagtcaagggatttagggcagagcagcactgaggaagattttgtacaggagcccaaggctgttcgaagaaaag

SEQ ID NO: 15174 - DNA, 466 bp, Oryza sativa
  Clone ID: uC-osflcyp005b10b1
tgacgaccttctcggacttcgatccgatcactgagcgccgccatgtcgagaggcagaggcaagagcgcaggcgcgtcatggttgcagccggcgccgcgtcggtcattcttatcatcatcgtcatgggcggcgcggccgtcgcctacaacgcgagcttcggtgatggtggctcctcttcctcctccggttcagcgtcaggtggcggcgcgcagcccagcctgcacggcgtgtccaagatcatcaaggcgatgtgcgcgcagacggactacaaggatacctgcgagaagagcctcgccaaggccgccgcgaacatcagcgcgtcgtcgtcgtcgtcgcccaaggacgtcgtgcgcgtctccgtggccgtgatcggcgacgccatcgagaaggcgttcgacatgtcgagcgcgatcgtcagcgacgacccgcgggtcaaggccgccgtcgcggattgcatggagatcta

SEQ ID NO: 15175 - DNA, 236 bp, Oryza sativa
  Clone ID: uC-osflcyp005c01b1
tataaatccgccaaggctggaagcggcgcggcgccacgccacagagacgcgcacgcacggagcactagcagaagtggcagagaggaagagtaacctagcttgttgattccgccgccatggagaaggcgctcgtggagcggctggaggcggcggtggcgcgcctcgaggccgccgtggcctccggggcctcgctgtcggcggcgccgcgggacctcggggacgggctggacgcggtg

SEQ ID NO: 15176 - DNA, 351 bp, Oryza sativa
  Clone ID: uC-osflcyp005c04b1
ttatcttccgaacaagcacaaccgtctttacatggaagctcgccccttggaggagggactggccgaggccatcgacgatggacgtattggcccacgtgacgatcccaaggtgcggtccaagatcctgtctgaggagtttgggtgggacaaggacctcgccaagaagatttggtgctttggacctgagaccactggccccaacatggtggtcgacatgtgtaagggagttcagtatcttaatgaaatcaaggactctgttgcggctgggttccagtgggcattaaaagaaggtgcattggctgaggagaacatgcgcggcatctgcttcgaggtatgtgatgtggttctcca

SEQ ID NO: 15177 - DNA, 188 bp, Oryza sativa
  Clone ID: uC-osflcyp005c05b1
tacatgctctagcttacagctcactaccagtgtacattgttgctagttagctagagctagatctcgatcgagacaatggcgggtgctcgcaggacgatggcgctggttgcgtcggtggcggtggaggcggcggcggtggtggcggaaagggcctccctcgccatgtgcttgcggagcgtgacctctta

SEQ ID NO: 15178 - DNA, 152 bp, Oryza sativa
  Clone ID: uC-osflcyp005c09b1
tagccaccgccgccgccgccgccaccaccgttgccgttgccgcctccaccacccgccctcgaccacagccatgccgccgaagctcgacccgacccaggtggtggatgtgttcgttcgcgtgaccggcggtgaggtttgctcggttttatttt

SEQ ID NO: 15179 - DNA, 306 bp, Oryza sativa
  Clone ID: uC-osflcyp005d02b1
ttccccacacgcctcacccacctctggagatccgatcatccatgcatggctgcttctcccctgcgcctcctcgccatcggcgccgctgctgtacctttcatgcgtggtagccgccacccgcgaggacgacgagccgacgccgtgtctaggccgccgagatcatcgtccttcctctgccaaagcagttcgccgagcgagccgccgggatcgccggccggtggcggcggcggcggcggcggcggaggaggaggaggaggaggagggaagaagagcgcgtggcgggcccccctccctttcccctaggcc

SEQ ID NO: 15180 - DNA, 508 bp, Oryza sativa
  Clone ID: uC-osflcyp005d04b1
cagagagcttgcggaagcgggggtttggtgcgggcgcgcgcgtgtgaggggggagagaaggccaggaggaggcgacgccgtcgcccgagggaggcaaaaatccgatcctcctcctgccctgctcgctcgctcgctcgcctgcgctgcgcgcacttggccccgtcccgtccgttcccgctcgccaggcatagaaagatggtgctctgggtcttcggctatggctccctgatctggaaccccggattcgacttcgatgagaagatcctgggcttcgtcaagggctacaaacgcaccttcaatcttgcttgcattgaccatcggggcacgccggagcatcctgcgaggacctgcacacttgagtccgacgaggaagccatatgctgggggattgcatactgtgtcaaaggggggcttaaaaaggagcaagaagcaatgaagtacttggaaaggagagagtgtgagtatgaccagaagatctctgtggattctacaaggaggagatctttga

SEQ ID NO: 15181 - DNA, 485 bp, Oryza sativa
  Clone ID: uC-osflcyp005d09b1
tgtaacggacgcctcaacaagtgtggtgtcatcagccctcgcttcgatgttggtgtcaaggaaatcgaatcatggactgcgaggctgcttccctccagacagtttgggtacattgtccttactacttcagctggcattatggaccatgaggaagctcgcagaaagaacgttggtgggaaggtcctcggtttcttctactagaaagatatatcttgttgacactctacggggatttcttatacagtagatggattctcccagtaggtgttagtggaagagcattttattagcagttgagtcaaaaaccttgttaagatgatcctcgaatgtctgaattgccccttaatgccataatgttgcctgtttaattttgcttggcgacttgagtaagctgctgtattcttgctccttggatgccgcatgctttttttgtaaacttttataagctattactgaaaaattctggaagatattctatccttttt

SEQ ID NO: 15182 - DNA, 314 bp, Oryza sativa
  Clone ID: uC-osflcyp005e05b1
tgggggcacattcgaatctcaccaaaaaccagcggaggcggagcagaaaacagcagccaaggaatcatccatccatggccaacgggctccccaaccccctcctcaccgccgacgccgcccgatccctcgtcgactccgtcgacgccttcctcttcgactgcgacggggtgatttggaagggggatcagctaatcgaaggggtccctgagactctggacctcccgcggaaaatgggcaagaaattagttcttgttacgaacacactctagaaagtcctgaagactgcctgcgaagaagttcagagcacttggact

SEQ ID NO: 15183 - DNA, 511 bp, Oryza sativa
  Clone ID: uC-osflcyp005e10b1
tcgtttcgcatcgcacttgtagctctcgacccccgcatctcatccctcctctcgcttagttcagatcgaaatcgcaaatggcgaagattaagatcgggatcaatgggttcgggaggatcgggaggctcgtggccagggtggccctgcagagcgacgacgtctagctcgtcgccgccaacgaccccttcatcaccaccgactacatgacatacatgttcaagtatgacactgtgcacggccagtggaagcatcatgaggttaaggtgaaggactccaagacccttctcttcggtgagaaggaggtcaccgtgttcggctgcaggaaccctgaggagatcccatggggtgagactggcgctgagtttgttgtgggagccactggcgttttcactgacaaggacaaggccgctgctcaccctgagggtggcgctaagaaggttgtcatctttgcttccagcatggatgcccccatgtttgttgttggtgccaatgagaaggagttccagccttg

SEQ ID NO: 15184 - DNA, 454 bp, Oryza sativa
  unsure (1)..(454): unsure at all n locations
  Clone ID: uC-osflcyp005e11b1
tagaaacaaacccctctcactcccactaccatggatccttgcaagttccggccgtcgagctcgttcgacacgaagacgacgacgacgaacgcgggagctccggtgtggaacgacaacgaggcgctgacagtggggcccagggggccgatcctcctcgaggactaccacctgatcgagaaggtggcgcacttcgcccgggagcgcatcccggagcgcgtggtccacgcccgcggcgcctccgccaagggcttcttcgagtgcacccacgacgtcaccgacatcacctgcgccgacttcctccggtccccgggcgcccagacccccgtcatcgtccgcttctccaccgtcatccacgagcgcggcagcccggagacgatccgcgacccgcgcgggttcgccgtcaagttctacacccgcgagggcaactgggacctnctcggcaacaacttccccg

SEQ ID NO: 15185 - DNA, 375 bp, Oryza sativa
  Clone ID: uC-osflcyp005f04b1
tacgggtgcacctggaaagtatgttgagctgaaggagagcgttcaaagtttccagggtgtattggacgggaagtatgatgaccttcctgagcagtcattctacatggttggaggaatcgatgaggtcattgccaaggcagagaagattgccaaggagtccgcttcataagcgatgcaatttttaacatttggaggtcaacatgttgcgccttttatgtttgttagccaggacatgtacttacatgcaggaggcccggccctgctgatcgatgtttttcccctccacttttttccaaataaggatttgcagtgacctatttgtttggcttactgcccttcaaggaagaattgagttctcttttaaaataaaaatct

SEQ ID NO: 15186 - DNA, 174 bp, Oryza sativa
  Clone ID: uC-osflcyp005f05b1
tacttctctcacaccaaaaccagtaaaaaaatatcgtcaccttcgccggcgagatggtccaccgccgcatcatcctcctcctcgccgccgccgccgtcgccgcgacctccgccgtctttcggcggtcctacggtttcttcgacttcaacccgatccgcttcgttacggttcact

SEQ ID NO: 15187 - DNA, 434 bp, Oryza sativa
  Clone ID: uC-osflcyp005f07b1
tgtgaaggagtccgatcttttgcctcttctgtatcattatcgtcaggagatatgttattctcagctgcttctgccggattgacaaattaatcggataacaaacacagggtgctaaatggcaaggctagtgtgatctatcctgcccgatttatgacatgggcacgacagattgcatggttcattgtcaagaggaatagtcgctggatcttcctgaaggtgtcacacagttcaataagtgtttatgtgcacatctaggttcgaagcctgggaactgggctagttgtatattcgattgtgctagaaggccttcacccttttcctccaaaagaaggctttcttctccttttgaaaacaaaaagaggctccaggttgtagtgttctaaaagctcccttctttacctacctcgtgtcttcaacctcttttttattttttt

SEQ ID NO: 15188 - DNA, 512 bp, Oryza sativa
  Clone ID: uC-osflcyp005f08b1
tcggagcccccgggtgctcgtgctcgtgttgggttgaccggtttgactgttgcggaacatttccgtgatgccgaaggacaagatgtgcttttgttcattgacaacattttccgtttcactcaggcgaactctgaggtgtctgctcttcttggacgtattccatctgctgtgggatatcaaccaactcttgctactgatcttggaggacttcaagagcgaattacaactacaaagaagggttccattacatctgtccaagctatttatgtgcctgctgatgacttgacggatcctgctcctgctactacttttgcacatcttgatgctactactgtgttgtcacgacagatctctgagcttggtatttaccctgctgtcgatcctctggactccacatccagaatgctcttcccccatgtgttgggtgaggatcactacaacacttgtcgttgtgtccaaaagggtcttcagaacttcagaatctttaggattttattgcaatttggggtttg

SEQ ID NO: 15189 - DNA, 413 bp, Oryza sativa
  Clone ID: uC-osflcyp005g01b1
gccgttgtcgtctgctccgattccgctcgcggcagggatccctaccgctctcgtcgccgtcgccgtcgccgtcgccgacgagatcatccgccgcgatgcctcggtactattgcgactactgcgacacctacctgacccatgactctccatctgtccgtaaacagcacaatgctgggtacaaacataaggcaaatgttcgaacctactatcaacaatttgaggagcagcaaactcaaagcttgattgatcaaagaattaaagaacatcttggacaagctgcagctttccaagttggtgctccttttaatcaacatcttctcttatttccaggaggtgtgcctcgtccttgtctttcaattctgccaacacctggcatgccacttggtgttcctcaagtacctggtgcacctttg

SEQ ID NO: 15190 - DNA, 319 bp, Oryza sativa
  Clone ID: uC-osflcyp005g02b1
acactccacacaggtaagaagccggcggcggcggcggcgatggtttccctcaagctgcagaagcggctcgcctccagcgtgctcaaatgcggcaagggcaaggtctggctcgaccccaatgaggtcaacgagatctccatggccaactcccgtcagaacatccgtaagttggtcaaggatgggttcattatcaagaagccccagaagattcactccaggtcccgtgcacggagagcccatgaggccaagcagaagggacgtcactctggctatggtaagcgtaggggtaccagggaggctaggctccccaccaagatcc

SEQ ID NO: 15191 - DNA, 470 bp, Oryza sativa
  Clone ID: uC-osflcyp005g03b1
ttcgttaattgaatgtgctactattgctaatgggtgttcgaaggttggtgcagttggaataaattgcacacctccaagatttatccatggcctgatactctccattcgaaaggtcacagataagccaattctgatatatcccaacagcggagaaagatatgatgctgagaaaaaggagtgggtggaatcaactggcgtgtcagacggtgattttgtttcctacgtaaacgaatggtgcaaagatggggctgtcctcattggcggctgctgcaggacaactccaaacaccatcaaggccataagtagatcacttaaccaacgccactcttcgctgcatttacctgtggcatagagttgcacgctctttcaggtgtgctactcatgctggtacctgaacctgatgaacatatcctggaggtccttactagcagcatgatgttctctgctgcaatgagatggctctgcactta

SEQ ID NO: 15192 - DNA, 529 bp, Oryza sativa
  Clone ID: uC-osflcyp005g04b1
ttcttccaatggtgatgtcaggcagagagtgtgagagagaaagacgaagcagtcaataaggaggcggagaaagaggagtgggggaagaagagacgcgctcgggatagattccggccatgtcgtctgcgttcggcgacttcggcccgctcaccgagcggcgccgcgcctagaaggctcgtcagcagctcatgctcatcatgatcgccctcggcacggtgtccatcatcattatcctcatcgtcatgggcgccgccgccatcacgtacagcttgaagaaatccgatgcggactaaggccgcttcatggtctcgatctacggccccttctcaggctgctgatgtggagacttccaccactgctgccttctcttttgtaatgcttccttttactccttgtcttacatattttttttctttgcgctctcacttttttccctgtctcctttctcctcctgctttcctatgtctcttatccccttctctcttttccccatggcttttttcctctccttcttgtcctttcctctttt

SEQ ID NO: 15193 - DNA, 473 bp, Oryza sativa
  Clone ID: uC-osflcyp005g06b1
tctcgccggccaggagaggtatagagctgtcacgagtgcatactacagaggagcattgggagctctcctagtctacgatatcaccaagcgccagagctttgatcacatccctcgctggctggaggagctccgtggccatgcggacaagaacatagtcatcatgctggttggcaacaagagcgatcttgaagacgagcgggccgtgagcaccgaggatgccaaggagtttgctgagaaggagaacctcttcttcctggagacctccgctctgcaggccaccaacgtcgagaacgccttccagaccgtcctgtcagagatattcaaaattcacagcaagaagaacatggcagcggacccaaaagcaaacggcgctgccccatcgctagcagggaagaaggtcgtcgtcccgggcccagcgcaggagatccccaagagcaagtgctgcagttccatgtgatcttactctactcaga

SEQ ID NO: 15194 - DNA, 424 bp, Oryza sativa
  Clone ID: uC-osflcyp005g08b1
ttgcagattccgttgcccgcactacagtaagccctccaatgtcacaagatgcacaacaacatggatctgctggccaaaatggtgtgacatccacagacttgagttcgaggagctatctgaagagtgcaagcattagtgcttccaagtgtgtcgctgtcaaggacaataaagaaccagaggatgattacatctctgaagaaatggaagggtcggtcgatggattgtctgaacaagtctccaggatgcactcctagtgcacaacgatgacgatgatcagtgcaagattctgtgaggcgcaccagatgctgataatttccaagcagaatgctgcactgcaggtttggactttggacaaatgcaagtatgcaacagccagcccgagatgattggcatcttcttatgctcatccatgttcacatattct

SEQ ID NO: 15195 - DNA, 412 bp, Oryza sativa
  Clone ID: uC-osflcyp005g09b1
tgtgaggctcttgaggctgcgcgtatcgcgtgcaacaagtacatgaccaagtctgcaggaaaggatgccttccacctcagggttcgggttcacccgttccatgtgctccgtatcaacaagatgctttcgtgtgccggggcagataggctccagactggaatgaggggtgcttttgggaagccacagggaacctgtgctagggtggatattggccaggtcctcctttctgtgcggtgcaagcccaacaatgctgtccatgccagcgaagccctccgtcgtgccaagttcaagttccctggtcgccaaaagatcattgagagtagaaagtggggtttcaccaagttcagccgcgatgaatacgtcaggctttagagcgagggtagaatcatgcctgatggtgtcaatgcttagc

SEQ ID NO: 15196 - DNA, 524 bp, Oryza sativa
  Clone ID: uC-osflcyp005h04b1
tttgcctgctattgcatcagtgcttattttggtgcatgaggtgtgaatatattacatgaacttgcgaggtggttgcattataatacacaaacttgtaaaacattcgttccggtgcacaaacttgaggtttgtgtgaaccaaggtcaaaagggcaaaatatggctaatcttgctgagttgagtgttgattaggatgccatgtaagcatgcatgttaggactatgccatatacatatgcatgtactgagtaaaacatagaacaagacatactgattgaacaaagaaagacatatagcaaaccgataaaggatgcaagggatacaaaggaaggacaaagtggaaaccaagtacaaggttatttgcaaatataacatgtatcatgccctcctcacatgtgcacgccatgttctaatgagcatccaacttggtaataagttgccatgcccttttggccttggtttacacgcaccagacatgttcatgcaccaaaatgaacgtttaataagtttatgtgctgcaccccct

SEQ ID NO: 15197 - DNA, 481 bp, Oryza sativa
  Clone ID: uC-osflcyp005h05b1
ttctactgctcattggtaacattcggcaaatttgacagatgggtatattggtcatcttggtggacctgcaatgctgccgctgcgatgccaagatcaggaaggtcctgggctgccttgaagaggagtactgcatcgagaaggtggagtacgacgtgaagaacaacagggtgatcgtgcgcgggaagttcgacccggagaagctgtgcaagaagatctggtgcaaggccggcaagatcatcaaggagatcctcatcgtcgacgtctggccgccgccgccgccgccgccgtgcaagccgccgccgtgcgagaagcctccggaggactgcaagcccaagccctgccattgctgcagctgcgagaagcccaagcccaagcccaagccctgccattgctgcagctgcgagatgcccaagcccaagcccaagccctgccactgcgagaagcccaagccctggcactgcgagaagcccagccatgcgag

SEQ ID NO: 15198 - DNA, 401 bp, Oryza sativa
  Clone ID: uC-osflcyp005h09b1
ttccgaattccgaatccctcctcacttgctccctgcactgcagtgcaccaagcagcagcagcttccatgcttggcgattcgatgccatgtaggaagacgaagatgatgaagctagcgtagcctagtgatggctcaacccgccatggaagggacggtgcagggtggaggaggaggaggaggaggagcacaagaacctcgcggacagtacggcggaggcggcaagaacggcggcgacgcctccccgcgcaagcatgccgctgccgctgccgctgccgccttgccgcgacaccggcgatccaagagtgcttttttcgaatcgagcctggagccatgcaagcacgcggcggtgcacgatcagcgctgcaccccagcagcacaggcgacgccgagcttttattaac

SEQ ID NO: 15199 - DNA, 380 bp, Oryza sativa
  Clone ID: uC-osflcyp005h10b1
tagcgacccttgttgcgctccggctccgacggctgcccctggcgcgggtgcctgagccaagaacaggatcggaggccaggccccatgcatgcatgggaattagtgtgggactgatcactttatcccattagccattagctgattatcatccagacggacgcgccatccaacacacatagatcgatcggaggttgcttggccggacatgacgacgacggtcgccggcggtgccaccctgtgcgcggtgagggaggagcatgagctcctgtccacccgcctgaatgtgaacggcatccgtctcgccgcattgtgccgcggaatacatactcatatacctcaccgtgccagggctctccatgacgcccatgcgggtgatgggc

SEQ ID NO: 15200 - DNA, 403 bp, Oryza sativa
  unsure (1)..(403): unsure at all n locations
  Clone ID: uC-osflcyp005h12b1
tcagatcgcaatccgaaattcagagatccaaattcgcccacaagaattcacctctgcttgttgatcggagaggaggaggtgttcgtccagatgggcaaggtgagggcgttcttctcgcgcaagggcagggggaacagcagcggcaggtccaggtcgatgcgggaggcggcgatgaacgtggactggtcgccgaggccgtcggatctcgccgccgccgccgccgcgaagccccgcccgcccgcggcggaggacgagacggagcgggtgttcaggaagttcgacgcgaacggcgacgggcggatctcgcgggccgagctggcggcgctgttccgcagcgtgggccacgccgtcaccgacgacgaggtggcgcggatgatgcangaggccgactccgacggcgacg

SEQ ID NO: 15201 - DNA, 407 bp, Oryza sativa
  Clone ID: uC-osflcyp006a01b1
ttatttagaaaagaaaggctttcgtctcggtgggcaaaagcgcgagggcaaagcgaaggtatagcatctagtaggcgatggcgagctccggtttctcatggacgctgcccgaccaccccaagctccccaaggggaagacggtagctcctcgtcgtgcttgacggatggggcgaggccaacgccgacaagtacaactgcatccatgtcgcccagacgcccgtcatggattcgctcaagaatggtgctcccgagaggtggagaatagtgaaggctcatggaacagctgttggtctttctagcgaagatgacatgggcaacagcgaagtgggtcacaatgctcttggtgctggccgcatttttgcctcaggggctaagctctggggccctgctcttgcctttggaaaatt

SEQ ID NO: 15202 - DNA, 563 bp, Oryza sativa
  Clone ID: uC-osflcyp009a08b1
tctaaacaattcaaaggacgcagcgatggaaaatctggaggagtcaagtgttcgagctgctgacttaattggttcgatggccaaaaacatggatgcacaacaggcagcaagagccacaaatgcccctaattgctcctccaaagtgccagaagggaaagataagaaccgtgataatattatgccatcacttgaattaagtttgaaaaggtcaagatcgactggggatgatgcaaatgcaatccaagaggaacaacggaatgttttgagacgatcagatctctcggcatttacgaggtaccatacacctgtggcttccaatcaaggtgggacaggattcgtgggaagctgttcgccgcatgataatatctcagaggctatgaaaacggattctgcttacaacatgaagtcaaactcagatgctgcaccaataaaacaaggttctaatggtagtagcaataacaatgacatgggttccactacaatgaacgttgtgacaaagcctagtacagataaggagagagtaatgtcaccctcagctgtaaggctaatgacacacatcagca

SEQ ID NO: 15203 - DNA, 464 bp, Oryza sativa
  Clone ID: uC-osflcyp009a10b1
ttcggacgcgtgggcgagaagcctcttttggatctatccattcgggtcaccgtggcagttcggtaattttggcggagaggaggaggaggacgacgacgacgacgacgtgatgggtctcctcgacaagctgtgggacgacaccgtcgcggggccccgccccgacaccggcctgggccgtctgcgcaagcacgccgccgcccgccccgccgccgtcaagatcaacgacccgacaggggacgcggcgatggtggccgtcccgccgacgacgccggccggggcggaggaggcgccggtgaaggtgacgcgcagcatcatgatcaagcgccccgcggggtacccggcgtcgccgaggagcgcggccagcacgccgtcggtctccccgtcggatccacccctaccatcttgccggtcgccggcgccggtgagttcccgggattgcacacgctctctgtttttccaacttt

SEQ ID NO: 15204 - DNA, 370 bp, Oryza sativa
  Clone ID: uC-osflcyp009a12b1
ttcagtggcctgtccacccactccctccttgagcacaccgatgacgctgacctgctcgacagtgaggccatctatgacatctgccgccgttccctggacactgagcgcccaacctacaccaacctcaacaggctagcgtgccaagccatctcctcactgactgcctgcctgacgatggctgcgtgctccgaatgtggatgcgaacgagttccagaccaacctggtgccctacccgaggaggcacttgatgctttcctcctacgccccggtgatctcggtcgacatggcctaccacgagcagctgtccgtggcggagatcaccaacagcgccttcgatccctcctacatgatggacaagcacgacccgagc

SEQ ID NO: 15205 - DNA, 483 bp, Oryza sativa
  Clone ID: uC-osflcyp009b04b1
gcttattctgcaaaagcggctcttgaattgggttactcgttcgcatctggtgactcaaggtttactcgcctaatgaaggagtgtgatgagcgcattgctgaggagcttagtgaagtccctgttaagaaggctgaagatggagcagctgcgccctctgttgcttcttttgttgaggaaaaggatgatgctgcaaacatggataatacaccaccaatggtagaagtgaagccaaaatacaggcacgacttctacaacagtgctacagaagttgtattgacaatttttgcaaagggtgttcctgctgagaatgttgttgttgattttggtgaacaaatgttaagtgtgtcgattgaagtccctggagaggagccgtaccattttcagcctcgtctgttttctaagatcattcctgagaaaagcagataccaagtgctatccacgaaagttgaaataagactggctaaagctgaacagattacatgg

SEQ ID NO: 15206 - DNA, 328 bp, Oryza sativa
  Clone ID: uC-osflcyp009b05b1
tcgatggatcaaccgctctcgccggagacggaagaggcgcatagatgtcgtcggcgttcaccgtcgatgagacgggccccttcttcggctgtctcggcgccagctacggcctgatgttctgatgcatgggtgcggcgtacgggacggcaaccagcggcatccgcttggcggccatgggcgtgatgcacccggagctcgtgatgaagtgcatcgcgcccttggtcatggctggcgggctgggcatctacggactcatcatcgccgccatgctctggacagggatcagccacctggctaagccggactacctgtgtgaccgctactcgca

SEQ ID NO: 15207 - DNA, 535 bp, Oryza sativa
  unsure (1)..(535): unsure at all n locations
  Clone ID: uC-osflcyp009b08b1
gcgtacgccctcgccgactcggcctcgccaccgtcgacgactcgtcggagatggcctcctacccggcattccaagtaagcccggaggaagcagcgaagggtaaatggtacattgcgactgctgctaccaaccacatgacccgcgaccagagcgtcatctccaacctcaagcccgtgactggccgtgttgttggtggtggcaacggcgcaggattgcaagtgcatggcagtggagctgtgaacacagagacggtggcgatcccagacgtgtggtatgtgccggggatcaattgcaacttggtttctgttggccagctctgtcaactcgggctcgaagtttcgattttccgaggtgtctgcaccgtcactagagctagtgatggatctgtagttggcaaagcgcatagatcaggtgcagtctatgaggtggaattcctcanagttcccgttaattagcactggaaattcctcgctgcagtatcagttgtggtagtcagactcatatggtggctaatatcgcctactctatcgaatgc

SEQ ID NO: 15208 - DNA, 517 bp, Oryza sativa
  unsure (1)..(517): unsure at all n locations
  Clone ID: uC-osflcyp009b11b1
tgctgatctctcggaaggcgatgaaccaagtgcgccacgccatggtcgtgtgcgctagcaagaacctcgtcgtcttcctcaccggcgagtactacccaatcaactacaggcctggttgctacctgatctacgacgccatccacgactctctcactcccgtgcctcacgtcccgggacctgacagcctccttgccatcggcagcggaacatctgtcatttcctttggcggctcgggcagcaacgccttcgtcctcgccgagctactcatgaccgatgtccgcaagttccccgaagaagctgcgctcttcacgtggtggtctactgccgtagtgactcccagcggatacaccgccgctgactggatgaaggagaaggttaccctcccccctgaggtgcgcacgcccacctactgcttcgtttccnacatggcattcttcgtcggagaatcgtgcctgtgctgggtcgatctactcatgggcatcctgatttgnacctttgtccctctcgagatcaaccg

SEQ ID NO: 15209 - DNA, 353 bp, Oryza sativa
  unsure (1)..(353): unsure at all n locations
  Clone ID: uC-osflcyp009c07b1
tttaggtagcatttgaatggttcattctttcagttggggctccccaccttgtccataattccgttagtttggttgtatagttctggaaaactaactaggcttttcaattctgttctgtttgcaatgccgtgccacgattttgggggtgtaaagcttgtgtaatccttagtgtgttgtatctctattaccttgtttatgcggtttgtagactaatagcaagctatatagcagtaactattcgagtggacagttgtgttcatctggagtgatatataatggctatggttctgggtgttctttccttncaaaaaaaaaaaaaaaaaataattatttaatttaatttaatttataat

SEQ ID NO: 15210 - DNA, 438 bp, Oryza sativa
  Clone ID: uC-osflcyp009c11b1
ttcacaactgtgcccacctacaagtcagaggtgttatcaaccgctgctgatggccagactagcgtggagatcaatgtcctccaaggagagagagagtttgtcagggacaacaaatctcttgatagctttcggcttgatggaattcctcctgccccacggggtgttccacagatcgaagttaagtttgacatcgatgccaatggcatcctttctgtcagcgccgtagacaagggtactggaaagaagcaggacattacgataactggtgccagcacattgtctaaggatgaggtggagaagatggttgaagaagcagagaagtttgccaaggaggacaaagagaagagggacgcaatcgacaccaagaaccaggcagagtgtgtcatgtaccagactgagaaacatttgaaggagctcggtgacaaggtcccaggcgat

SEQ ID NO: 15211 - DNA, 506 bp, Oryza sativa
  Clone ID: uC-osflcyp009c12b1
tctcctctcgaaccttccaaagtccaaaccctagtggtgacctcgcctcggcctcgaaaccctagccgcagatctggcctctccttgccccgcgccatggacgacgacttcgagatgccgccgcccggcgccgacgacgacttgatgatgggggaggacgggatgggcgacttcggcggcgccgacgggccgccgctgaaggtcggagaggagaaggagatcgggaagcagggtctcaggaagaagctgctcaaggagggcgaggggtgggagacccccgaggtcggcgacgaggtcgaagtacactacactggcacactgcttgatggaaagaagtttgattcaagccgtgaccgtgggacacccttcaagtttaagttgggacaaggtcaagtgataaaaggttgggatctaggtatcaagaccatgaagaaaggcgaaaatgctgttttcaccattcctcctgattgggcctatggtgaatctggttcacctccactattcca

SEQ ID NO: 15212 - DNA, 508 bp, Oryza sativa
  Clone ID: uC-osflcyp009d02b1
tataagctcacagttcagttctaccacgtacaacagcagaagtgagagagggagaagaagacaagggaagaggaggagcttagctagccagccatggcgaggcgctctccttgcctcgccgtcgccatgctcctgcttggggcgttggcggtggcgagcgccttcattgatgaagcggcggctgctggccgggggctcggccatggcgcccgcttcatgagcaagcagggtcgtgtgacatacgagaagctgccggagccggagccgaagccaaagccaaagcctcatcctaaacccacgccaaaacctgagcccaagccagagccggagccaaaaccagtacctgagcctgagcctaaaccggaaccaaagccagaaccaaaacctgagcctaagcctgaacctaaaccatacccagagccaaaaccggagccgaagccagagccaaaacctgagccggagcctaaacctgagcctaagccagaaccaataccagaaccaaagccgt

SEQ ID NO: 15213 - DNA, 213 bp, Oryza sativa
  Clone ID: uC-osflcyp009d05b1
actaatctgtggggctggctcgcaccgcatgtacctagccgggacttacttggtggacccacgcgtgcttatatggctagcgagtcaccatccacagctgatttgggggtagcctgaccactactccatagatgggtgcactacatacttatgttccatgcattattgaagcagaagcagacgcaccaaaagagacgaacactactactagta

SEQ ID NO: 15214 - DNA, 497 bp, Oryza sativa
  Clone ID: uC-osflcyp009d06b1
gcggcggcgcggcagccagctgatgaggggccccgtcaacgacgtcaagtgcatgcggtacctcctctgcgagcgcttcggcttccccaacgactgcgtcctcatcctcaccgacgaggagaaggacccgtgcaggttggcgacgaaggagaacatcaggatggcgatgaactggctggtgcaggggtgcagctccggtgactcgctggtgttccacttctccgggatcggggtgcaggtgccggacgacgacgcgacgaggtggacgtgtacgacgaggcgatctgccccatggactcgttcagccagggccccatcctggacgacgagatcaacgaggccatcgtgcgcctgctcgtgcacggggccaagctcacgctcgtcgtcgacgccgagcacagctccaccgttctcgacctcccctttctttgctgcctctcgtccaggttcggctgggtggcagtgggaggacccaccgcccgccaccggcgcctaca

SEQ ID NO: 15215 - DNA, 548 bp, Oryza sativa
  Clone ID: uC-osflcyp009d07b1
tcggacgcgtgggggcaggctcttgagctaccaagtatgtcagcttcaaatgagaagtggattgatgggctccagttctcatcactgttctggcccccaccacaggattcacaacaaaaacaggcacaaattctggcctatgttgagtactttggccagtttacagctgacagtgagcaattccctgaagatatagctcagctaattcaaagttgctatccatcaaaagaaaagcgccttgtagatgaagtattagcaacttttgttcttcatcatcctgagcatggccatgcagttgtgcatccgattctgtcacgcatcatagatgggacactcagttatgatagaaatggtttcccgttcatgtccttcatctctttatttagccatacttctgagaaagagtactcggagcagtgggccttggcctgtggagaaattcttagagttctaactcactacaacaggccaatcttcatagttgatcaccaacatagtggaagcgaatgtatcatcacatctgatcaggccccatcatgtgagtctat

SEQ ID NO: 15216 - DNA, 564 bp, Oryza sativa
  unsure (1)..(564): unsure at all n locations
  Clone ID: uC-osflcyp009d11b1
tgaattaaggaacttatggcagcatgtttggagaaaacaactgtccagcggtgttcttgatgtgcagcatactcaacaagaagataatcttacagaaaggcatgagcagaagaccggagtgacgaaagctgaacatgtgactgaaaatgttgtccacaagaacatggaatgcagtgaacaagaaagtgatgctcaaagttcatgtacaaggtcagaactggaggctgacagtaggcaaaccaacaatttactggaatataagcagccaatgggaaggcatttctccaagcctgaccacaagaacaccgagaaaaatggagggactaaaattcatgcatctaatgatggcaacttgattccacggagggaagaggatgcatcactgaggaggatgacatgttcaaatgatattaattgtgagaaagcttccagggatatggagctggttcatattattgacaatcagcagaagaataacacacatatggagatggatgttgcgagagcaaattcccgtggaaatgatgacangtgcttgttcattccagcacaccagttagaact

SEQ ID NO: 15217 - DNA, 458 bp, Oryza sativa
  Clone ID: uC-osflcyp009e03b1
ttcctccgactactgggccggctcaccaaccgccgcgtagaggagttcatccacgcatggacactatctgcatcacaccttcgcgatcccgatatttcagctatgctggcgacacaactgagggaatcccacatccttgacatgcctggcccgaaatatggactcatttgggaccgactgcaaaactggttaaaaactgcaaggaacctgtgctcatgtgatgaatccaggaaattccggctgtgctgcctgccaaacgagatagctgcattgcagaaagaattctcaggggattaccacgggattgcattttgccacaacgatcttcagtatggcaacatcatgactgatgaagacaccaacatgtagactatcatcgattatgaatatgccagcctaatccagttgccaatgacatcgataatcatttctgcgagatggcaccagactatcattca

SEQ ID NO: 15218 - DNA, 550 bp, Oryza sativa
  unsure (1)..(550): unsure at all n locations
  Clone ID: uC-osflcyp009e04b1
ttactccccagcagcagcagcagcagcagctgagcttgaagcagcagagcgaggtagacatggccgccgccaccatggccctctcgtccccggcgctggccggcaaggccgccgcgaaggtgttcggcgaggggcgcatcaccatgcgcaagtcggcggcgaagcccaagcccgccgcgtcggggagcccgtggtacggcgccgaccgcgtgctctacctcggcccgctctccggcgagccgccgagctacctgaccggcgagttccccggcgactacgggtgggacaccgcggggctctgcgccgacccggagacgttcgccaagaaccgggagctggaggtgatccactccaggtgggcgatgctcggcgcgctgggctgcgtgttcccggagctcctcgcccgcaacggcgtcaagttcggcgaggcggtgtggttcatggcggtgtcgcagatcttcagcgagggcgggctcgactacctcggcaacccgagcctgattcacgcgcagagcatnctcgccatctgtgcggtccaggtggtgcttat

SEQ ID NO: 15219 - DNA, 491 bp, Oryza sativa
  Clone ID: uC-osflcyp009e07b1
tcaatctctcgccgccgccgccgtgatgtctcgccggtacgacagccgcacgacgatcttctcgccggaggggcgtctctaccaggtggagtacgcgatggaggcgatcgggaacgccgggtcggccctcggcgtcctggcggccgacggcgtggtcctcgtcggcgagaagaaggtcacctccaagctcctccagacctcgcgctccgccgagaagatgtacaagatcgactcccacctcgcctgcgccgtcgccgggatcatgtccgacgccaacatcctcctcaacacggcgcgcctccacgcccagcgctacgccctctcctaccaggagcccatccccgtcgagcagctcgtccaatccctctgcgacaccaagcaggggtacacccagttcggcggcctccgccccttcggcgtctccttcctcttcgccggctgggacaagcaccatggcttccagctctacatgagcgatcccttcggcacta

SEQ ID NO: 15220 - DNA, 286 bp, Oryza sativa
  Clone ID: uC-osflcyp009e08b1
ttcttctaaattccccggactatctttctgtagagcgccgcatacagcaggcctcctaggtagaaatttgctcgccttcccgtaacaatactcggccctactcttatcgcgccggatttcgacctctgagttctccgtataggtgtcggatcccctccgtgccttctacgaactccgactacaacgcatcgccgagccttctcttcgcgctcgagccgggctccgcccttcgcctactccgcatcgtagatatatggcgggcggagccgcgcgcgatcgacgcgcc

SEQ ID NO: 15221 - DNA, 342 bp, Oryza sativa
  Clone ID: uC-osflcyp009e09b1
gaaactaaaagaaggaacctttctattgcatagtagcatatgaacttttgataacatagctcggtacaggtattggcataaaaccggacaactgaaatcagtcattcaatcttattttacaagcatgggctcttcagcaagatcaaaaatgaaagatggccatgtagccaactattttttatgatagcaattgagtagattctattctaaatatctaatctttttcaggcttagtgttttttgtagtctgcctcttcacagaccggagctgcaccgagttgttgaagctgtgctcgaatccgaagtgcggaaaacgctcataccaggtgttctgtggaacgt

SEQ ID NO: 15222 - DNA, 544 bp, Oryza sativa
  Clone ID: uC-osflcyp009e12b1
tcgtcctgctcctcgcgctgccgaacgacccgtccaccggcgtcgcgcacgccgccgtgttcttcttcatggggttcgccatctcctggaacgcgtgatccacaaacaacccaatcttcgcggagattgtaccggagaaggcgagaacaacggtctacgctctcgacaaatgctttgaagcggtgttcgcttcattcgcgccaccgatcgtcggtgttctagcagagcaagtgttcggctacaagccggtctcctctgacgcaagcgtcgaaacggacagagaaaatgcggctgcattggccaaggcagtgtacacggagatcgccgtgcccatggccatctgttgcctgacatacaccttcctgtactgcacgtatcctcgggacagagatcgtgctcgaaggaacattctgatggcatcggatgaccagctctgccaagaagcaggtgagagtgactcaagtgagatttgtacccaggaggatgaagaatctgctgttggttccataaaccagaggttaatacatgcaagagagtagcatca

SEQ ID NO: 15223 - DNA, 529 bp, Oryza sativa
  Clone ID: uC-osflcyp009f03b1
cgtacgcgtgggttcagaccttcctccactcgagtgatgctgaatcatgcagtgattctttcaagggggagtgtgatgcttcattctgtgagcaaactggaaaggcaaaacttgcctttgtcatctttaaagagggtaaacttgtctgggctgaggttttccatgaggtaccttgcaagagtgttgtggaggcagaggctttggcagtcatagctctcctcttcaagcttattgaccttaacttgttaagagggactgtttggaccgacaacaaggtctgttataatgtgctgaatggtgaatatgagataaaggttgatgatcccaacaggtcgctgtttctgtttctgaggagtttgagaggtcgctttgagtccttgaccccggtctggaaacccagagaactactgctgatcccagatcgtctggttagtatggtcgatgaccccctgatatcaaggaatagattggtactcagtatactggaaaaaacagttcccattcttagacagcccaatttatgatatca

SEQ ID NO: 15224 - DNA, 528 bp, Oryza sativa
  Clone ID: uC-osflcyp009f04b1
tctccgatcgaccaaaccagcgaaaccaccatccgccggcaatggcagccttgctccaccagacaccactccagccacctcaaaccaccacgagaccgcacccgtggacgcacacctgcacaaccaacctctcgccgcctcacgtggcactcccccagcgacggcgagccccactccggcggctacaagccgccggcagcggcggcgccatcggctcctccgccgtcacggacaccgagagcaccaccacagccaaatcgccttccaagaagaagagccgcaaggagaagcagcggatgcggcggcaggagaaggagcaggagcagcggcagatggtgctggaagcgctggacgtcaagagcggcggcgaggtggacgaggacgacgacgagctgccgcagccggtgttcgaccgcatcctccgccggatcatgttcatggatcgcgtcccgatggcgtccggcgtcgggctgctcaacctgtacggcgcgctggagcgcggtcgggcgtcaccgtgccgtcgtggct

SEQ ID NO: 15225 - DNA, 549 bp, Oryza sativa
  Clone ID: uC-osflcyp009f08b1
tggaaggactacctcaagttctacaagatgggcacctactggccctacaccccatccatccagctcctctacggcctccgcaccgccctcgacctcatcttcgaggaaggcctcgagaacgtcatcaagaggcacaaccgcctcggcaccgccaccaggctggccgtggaggcgtgggggctcaagaactgcacgcagaaggaggagtggttcagcgacaccgtcaccgccgtcgtcgtgccgccgtacatcgacagcgccgagatcgtgaagcacgcctggaagcggtacaacctcagcctcggcctcggcctcaacaaggtcgccggcaaggtgttcaggatcggccacctcggccacctcaacgagctgcaattgatgggtgccctgagtggagtggagatggtgctcaaggacatcggctacccggtgaagctcggctccggcgtggcggcggcggcggcgtacctgtcgaattcgacgccgctcatgccgtccaggatctgaagcacaacgaacgaaggaaggaagcaattctcaacagcgatg

SEQ ID NO: 15226 - DNA, 292 bp, Oryza sativa
  Clone ID: uC-osflcyp009g10b1
tatcaaaccctagctagctagctagctaagctagcacgcacccatggcgtcgtcttccacctcgagctcgctcgccgtggcagcgatggtggccgtcgtcctcctcctcctgggtgccaccgccacgtccacccaggcggcgcgcctcctcgacgaagaactccccaccgccgccatcccggcgatccccggcgtccccggagtgccggcggtcggccccgggatcccggtgatccccggcgtgcccggagtgccagtggttggccccgggatccctttcgtgccagtttag

SEQ ID NO: 15227 - DNA, 509 bp, Oryza sativa
  Clone ID: uC-osflcyp009g12b1
tttcttagatgtccagacggtctgagcttcggtgacgatgatcagatcgagccattgcacctgaacaacaagggacatagacctactgcctctgaacccggactgtgtgaaccattcgcccacagcggcaggagctgagctgacccacagcttcttgagcaacgagaactccctcaccttcggtacccagaacactatggagccgattaccgtcgagaaggcccggttcaacaattccgggaaggccagcgcgctggtccagcacgagaggaggccatagtttgtgaggaccatctgagcataagttgagaccaaggtcattgacatgagcttaaaggtcctgattgcggtggacctcaagacttgactttttctagggggtacttacattcaaaggatgaatctggatgagtcgaaaatcatcttggcgcatgctcattttttgtttgtagttgctattagatttcaagaactgccatgtttaatgtgaggatattttttttctggta

SEQ ID NO: 15228 - DNA, 517 bp, Oryza sativa
  Clone ID: uC-osflcyp009h04b1
aggcgttctgctgtcacaatgcacacgagtagactgtgggatggccacgctctctacctgcagccgcctgagcaccggcggcggcgccgtccagcgccgtccccggcggccggcaagcgctgcgaccatcacctgccaccggagctccttctcctcctcgtcggccagggtagaccgcacaggcgccgccgaggcgcctgccgcggccacggcgcccgccgtgccgcagaccaacgagtgctcgcttccgacatgggcggagttcgagctgggcaaggcgccggtctactggaagaccatgaacggtcttcctccatcggctggagagggcctgatccttttctacaacccggcagcgaccaagatgacccccaacgctcagtttggcatcgcgtttaatggcggccttaaccagccgatcatgagcggaggtgagccgaggcagatgacgctgcacgagaggcgatcagctgatcctccatatacaccatcaggatacgggtgccgagcatgccat

SEQ ID NO: 15229 - DNA, 138 bp, Oryza sativa
  Clone ID: uC-osflcyp013f12b1
tttacatcctatcgcgatggggaacgaccagggtgattgccgatcttgaacgagcaatgccaacacagggctgtgcaggggcaaatttatgctaagcccctggacacgtgctgcattgtctaccctgctgaatgctga

SEQ ID NO: 15230 - DNA, 453 bp, Oryza sativa
  Clone ID: uC-osflcyp013g01b1
tatgttaggtgaggagattccaagagaagagatgagatcccacgagatgaacaactcttcttctcgttatgcgtcagaggaggagcgcggcagcaacagcttcctcatcgagagcgaggaggaggaggaggacgaggaagcccacccccactcctccatcctcctcaaggatgccgactccgactccgactccgacgactcctcctgcgctaccccgcgcccaagctcctacgccacccaccaatggccgcaaagctacaggcaatcaatcgacatttatagtagcgtgcagtctcccaacctgagctttttgggaactccaactctaagcaggctctccaactcattcctcaccaactcttttcgtggcaaaacccctgaaattctctctaatcttgtcaagccacttctacgcccattaatttcaagcgacgaccagcagcagcagcagca

SEQ ID NO: 15231 - DNA, 506 bp, Oryza sativa
  unsure (1)..(506): unsure at all n locations
  Clone ID: uC-osflcyp013g04b1
taccttgtcaagaccatcaagacaaacgttatcggaaccctgaacatgcttggacttgccaagagagttggagctaggattttgttgacttcgacctctgaagtttacggtgatccgcttgagcaccctcaaacagaggcctactggggaaatgttaacccaattggagtcaggagttgctatgacgagggtaagcgtgtcgcagaaacactgatgtttgactatcacaggcagcatggcattgagatccgaattgccaggattttcaacacctatggacctaggatgaacattgatgatgggcgtgttgttagtaacttcattgctcaggccgtacgtggcgagcccctgactgttcagaagccaggaacacaaactaggagcttctgctatgttgctgacatggttaatggtcttattaagctgatgaacggngacaacactggaccaattaatttgggaaacccaggtgaattcaccatgctggaactcgctgagaatgtgaa

SEQ ID NO: 15232 - DNA, 378 bp, Oryza sativa
  Clone ID: uC-osflcyp013g06b1
ttcaagccagctccagccacacgagcctagttcaggtagatacaatggcgtccaccgcctctttcatgctcgccgtcttgctggcggtggccgtcgcggcggcgccggcgagggcggtgcgatgcccgccgagcgacaagcaggcgctgatgagagtgaagcagtcgctgggaaacccggcgacgctgtcgacgtggtccctggcgtcggcggactgctgcgagtgggaccacgtccggtgcgacgaggccgggcgcgtgaacaacgtcttcatcgacggcgccaacgacgtccgcggccagatcccgtccgccgtggcggggctgacggcgctcagttcgctgtcgctgttccgcctcccgggcctctccggcccca

SEQ ID NO: 15233 - DNA, 487 bp, Oryza sativa
  Clone ID: uC-osflcyp013g07b1
tttggatagcaagctaggctcgggggaatctcgccgtcgcatcaccgccgccgccgccgcccgccggttcgatctgagaagccgccacctcgccgcccggatcccgatggcgcggcttcactggctggaggcgatgctgccgctgggaatcatcggcggcatgctctgcatcatggggaacgcgcagtactacatccacagggccgcgcatggcaggccgaagcacatcgggaacgacaattgggacatggccatggcccgccgggacaaggtgctcctccatcaggcctcctccgagaacaactaggatattgatcaacaatatctagcctggatgttgatgaagttatttcaaatgcccagaattcctcctgttagttttcgtgtataatgggaagctgggcttaggttctggttacaacttttgaatattggaatgataatgtgtatctggaatctgtttattacacaaaggggtggcggttgg

SEQ ID NO: 15234 - DNA, 287 bp, Oryza sativa
  Clone ID: uC-osflcyp013g10b1
ttctttagtgcgccggttacacaagcctcccgaaacctcccgtgcgtgcatgctgtccactacagctaggtcggacaatgtatctagagctgacacacgactgaaatgcgctacactgatggcacgtccgggctagggtccatgctcatggcccacaatcccgccaacgtcgtacatcgaccaaagtattccacctcctgttgggcacacaccgcatcagaccggatgcggagagactcacgctgcctaaacacctgctccctctggaacaggatctcctccacctg

SEQ ID NO: 15235 - DNA, 226 bp, Oryza sativa
  Clone ID: uC-osflcyp013h03b1
tgttttcccgtctccaccgatcggcacgcaagtcgtcgtcgccgtcgccgcaccgaggtagtaggcgccgtcgccgtaccgaggtaggtgcgccagtggggaaggggaagtagtactggagggagaagggagatgtagtatggccatgggtgggataaaaaaacaagatggaagacggtttggtgaggttgacatatgagagcgatttgctatggacttgcaatgg

SEQ ID NO: 15236 - DNA, 481 bp, Oryza sativa
  Clone ID: uC-osflcyp013h06b1
taagccaccagaaaggcagcaaaacacaccgcctcctccgcccccgcctccgcctccgcctccgcccgcagcgatcgactccccgccctcctcgccccgctccgtagcgagacccctcctccctctcctcctccgctctcgcgcgctaagttgaggacctcccaaccagtaagcatttcgaggctcctgcctatgcttgatgtcaactatcaaagatgttgtttagcgctgtggaggtcaagtagcattggatcataaattcaaccaaaacaagacaggcatggaccgtgcagacacctcaggctttgtcagtggtggttgcttcagtactacactcctgctgatattcttccattttgtctattctgcgatctgcgtttgaaagatcatcagttccctgttcttcagctattcagtgattcagttgtcatttgctctcaccccgctgtcatattgtcaagctgtgatggataacagcttt

SEQ ID NO: 15237 - DNA, 357 bp, Oryza sativa
  Clone ID: uC-osflcyp013h08b1
tgttaatatttgtatcacagcttgtgtatggccttcctcacattcagctgcaacgggtatgctatgccattgatactctgcgcattgagatgtcgctgactaccgtgcataacatctatcttgggattgccggaagatctaaaccaaaacagaggagctagtgcggaaacaatcaatgccttgggaacatgcaagctcaagtcaaagaaaactcgtgatggagatggaaacgacgctggagtcggcgttgcggctgctggaacacacaaggagcgagtcatgtctgcagaagaagctgcgaggatgtattccagaatcttggatactggacagctaacagctagttatctgctcttg

SEQ ID NO: 15238 - DNA, 339 bp, Oryza sativa
  Clone ID: uC-osflcyp085a03b1
tatattatcgcgacggccgccctttataccctggggggctaaggaacaacgctgcgctatatcatgactatctccatagcttccaatcatactaaacaaactttccccagagggatccatgatagctacacgagcttaaacgtcagaaaacacaatggaagaacagactaaccactactatcatacatcccatcacgaggggtcaagaaacacggcttaggtgtcgcacccgtaaaaatcaacaccttaccaagagctgggccaaaagaaccagtcactggagatcctgctgctccatgctctggcccaaagaaacaccctagccaaccatagcttgca

SEQ ID NO: 15239 - DNA, 508 bp, Oryza sativa
  Clone ID: uC-osflcyp085a07b1
ttcctctatgtctctctctatgtgtcacacgagcgcgacacacactcttactgactgtgggtgctgcattagacactcgcagagagccacagctgcctgcaaagaagatctttctgggtgaattgcctagagcacgtactactacacatagacctactaatagagccctagagaagaggagaggaggaagaaccagacggcgtacatgctcaacggggaggagcactactagagctcgcagctggtgttgatgttctacgatgatggggcaatcgccgagctaatagaaggaggggctcaagataggggacatggacgccggaggaggaccagaagctgctggcctacatcaagcatagcggtcacaagctgcaggcgctcgctaccctacaagggcgtgccgaagaagcgcagctaagatgctgacggctcctgtggacaaaccaccctccgacggacatcaagaaggcaacgttatacttgcggatgagcagttcttgatacagct

SEQ ID NO: 15240 - DNA, 521 bp, Oryza sativa
  Clone ID: uC-osflcyp085a08b1
tttcagagatagagtgagtgatcagttgagtgtggttgcataaacatggctgcctctgtcatggcttctctggctctgaaaccatctgcatctccattactagaacgttcgaagcttcgagggaaagggacaatggcaaggccatctttgatcatagtggccaagaaagcaaagaagattcagacatcccagccctatgggcctgctggaggagtggtgttcaaggaaggtgttgatgcatctggaagggtagccaagggaaagggtctttaccagttttccaacaagtatggagcaaatgttgatgggtacagcccaatatataccccagaagaatggtcttcaactggtgatgtctatgttggaggaaaggcaggtttacttctctgggcaatcactcttgctggaattctagttggcggcgctattcttgtctacaacactagtgcactggcttagctaagtgcagcagaccaagctgtgcctgcttccatgtatataatcttcactaggaatgtaac

SEQ ID NO: 15241 - DNA, 174 bp, Oryza sativa
  Clone ID: uC-osflcyp085a10b1
tcggttatatatcattcgacacccatggcaaggcgggcttgtagatctgccgcgtgtgagacgctcatccactcactatacttgcattaatcaccatactacactgactgctacagcggacataaccatcctctcaacaacactacagacatgcatataaactacaatttacac

SEQ ID NO: 15242 - DNA, 509 bp, Oryza sativa
  Clone ID: uC-osflcyp085b01b1
gttgtttccgctccttgcgccatctcgcggcgccgatctccttctggcgagccgagcagagcagaccagggcaggggagcggaggggatcctaggtgttgcagtttcttttctcgtggacggtctaaaggtggtgaagaggctgtacagatcacgatcccgcaagtgaggtttgaggatgatgaactaaagggcttgtccgagctactgcggcaggagatctgataaaaccagtcaagaggcgagtctcagaggtgctaggacgagatggatgaagttgctgagattgctgatgctatgggtacggttggcattgataatggggcaagccggaagttgttgtcgaacgagagtttagaggagcgaggagaagagcatgatgtgcaggctgatggggcgcactcgggtgagagtgaggtgatcaaccccgcttaggaggtgggtggagaagccacctcacaggcagaagacgtaaagccgcgtgtttcaagggaagcaaagtcattcccc

SEQ ID NO: 15243 - DNA, 464 bp, Oryza sativa
  Clone ID: uC-osflcyp085b03b1
tagtagttgttggtctgtacgaggatgtgaaggggcgtgttgaatacttcctagaccagcctggcgatgacggcgacagggacgtccaacaacttgttggcgacaaggaggggaggtggacttggcgctgcaacgaatttacatatcttactcctagatacattcggcggaagtggttatgaatgaaggctaacacatggttcagggcgcttaataaattaacgcaggctggccgttaggatgtctggaaaaatcatctatattagtaagcactatgtttacatgagggcattggccgggtttgagtaaactatttttgagtcgcttaggaaatcgaattgcttattatcgtgattgactatgagcttgcgcactggcattgttatccctgaaatgggagaagtgccataaggggtaaatgttcggatgctatttacccagcctgctaagtatgtattggcctt

SEQ ID NO: 15244 - DNA, 542 bp, Oryza sativa
  unsure (1)..(542): unsure at all n locations
  Clone ID: uC-osflcyp085b05b1
tttaatctctcctcctcccagcaaagaggaggtggtggagatctcccaatccgcgggaatcactcgctgttcaccccgattcggcctccgctcgagctctgaatctcgggagctcctgatctggaggatgccaaatgtatgaaccaaagcccttctcaagcattgtactagctcacaacgatccagtttcccacaatcaacaaattgaacgtattaacaacaatgtagtatctaatagtggtgggaacagctcaaacagcaactttgccgccagacagcgcttacggtggactgatgacctccatgatcgttttgaggatgctgtaacacagctcggtggacccgacagggcaactccgaagggaattcttagaataatgggtgttcaagggttgaccatctatcatgtcaaaagccatctgcaaaaatatcggcttgctaaatacattccagatcccacagctgatggtgccaagtctgacagaaagatctcggagatttgcttgctgacattgaaagctcctncggaatggacatagggg

SEQ ID NO: 15245 - DNA, 301 bp, Oryza sativa
  Clone ID: uC-osflcyp085b07b1
gtctcacaagataccctatgcttgatcgagcccatcaaatagtgacggaggtggtggaatatgctcgacaaattacaggcaacgttttagaaatactatctcaacaactcaaatgactttacaaataagaagaatatcctaacaccatataacactgacatgggcgaaataagagtattgccaccaaataaaccagatcctgacccgtacgactaatattagactaaagcgtttagaacagctcttgcaatagaccttatactctgtggacgaccaaaacactgacaaaaacttcatcaag

SEQ ID NO: 15246 - DNA, 373 bp, Oryza sativa
  Clone ID: uC-osflcyp085b10b1
ttggttccttcctctgttcctccatgtgagcgggtggcatataggcgatgcgcgggaggtgacccactccctacaccgtcggtagccggttcggcgccctcgggtggcgcctctgccgaccaagaggaagccgaaaccatagcgagtgggaatgcgcggaacacctcctccaccgtcagacgaatccactttcccattcactgcctacttactacactgaccccgccgtcgcttctaataccaggcgcgtcggctcaaccggggttctgcagatctaccacagtggcgagcaacggtcggttcgacgaccttgggctccacctccttcaccgctttgtggcttcaccgtctccatcctgcatggatttggcaa

SEQ ID NO: 15247 - DNA, 511 bp, Oryza sativa
  Clone ID: uC-osflcyp085c01b1
gtgcgttcatgagtgctcggagcttgttgaagagtgagagcataagcgcttccaagtgtattggtgaaaaaccaaagcaagacagagatgaggattcccttacagagaacatggacgaaacagctgatgaggtctcggaaaaggttgctcaactgaaaacctgatgattcccgtcaaggtcacagaatcgatcggagttagtacaacagcatgtgtatagatgcccttccccagaagacgagaatcccagatcaggacggtcttaaccatgataaagagtctacaactaataataccacaagttgttttggtaacctctgttgtactgtaaatttttcccccttcagttttgtgttttgacagcaaacaactgtctaactgactggttagttcctcgtcttttcctcgatgggacaatcaccgatcctgtaaaatttactttcttttgatgacagaatcatacacttgtttctatgaaaaattaccatttttcatacttataatacttatc

SEQ ID NO: 15248 - DNA, 476 bp, Oryza sativa
  Clone ID: uC-osflcyp085c02b1
ttttactcgtgggcggacgcgtgggcggacgcgtgggcggacgcgtgggcccgagtgaccagtgtagcgtccttctttgtcagccgagttgacacacttattgacaaaatgctcgagaagatcggaacacctgaggcacttgccctcagaggaaaggctgctgtagcacaggcaaagctagccaaccagctttaccagaagaaattctctggcccgaggtgggaggctttggtcaagaaaggtgccaagaagcagaggttgttgtgggcatctaccagtgtgaagaaccctgcatacccagacactctttacgtggatcctctcatcggacctgacaccgtttctaccatgcccgaccaagctctgctggcattcatcgaccacggcacagtttcgaggacaatcgacgcaaacgtttcggatgctgaaggtgtatacagtgccctggagaagctgggtatagattgggatgaggt

SEQ ID NO: 15249 - DNA, 454 bp, Oryza sativa
  Clone ID: uC-osflcyp085c05b1
tttctcattatgaagcttgctcttagtgattatggatgcattttacttgttgccattctttccgttgttgatgacacaaagcttgttaccaagatcgtaattcaagagctcgccaaacatttgaagcaacttatttttgacaagaatggaagacgtccattgctgcaactacttcaccctaattgttcacgctatctgcctccagctgatctggcttgtctgaactatcgtgtgccttctcttatttcaaaggatgaagcttccgagagtgctgcagaagatatcccagagaataaggtggatgttgcaactaataaggagcaagatggttcagaaagcatgcagagtgcgtctgacagcaaaaaggacccatttcaacggcgacatgaattgttgatcaaaagtgaacttgccgaggtgctcatccagactctcattgagaatgtcggggagt

SEQ ID NO: 15250 - DNA, 311 bp, Oryza sativa
  Clone ID: uC-osflcyp085c08b1
tcgtttatatcaaaaacgctattttctattcggggggaattttaaacatctagatgtgtatcaatcctcaacaatatatcaaaaccttcttagactgactactactataactaagacatactaaacaatcttaagaaaatcccactcaatactaaacttctctggactaaagtagagctaggtcaccatgtgaaacatattatacagtatgaacatactataaactagtgctatgagaagcgtgcttacactgatctaacaaacttatttatgaacactaaggtttcaatatactagtcaacaaaatcttt

SEQ ID NO: 15251 - DNA, 533 bp, Oryza sativa
  Clone ID: uC-osflcyp085d03b1
gtgctgcccatcgcgtccagctagcgcctggcgcggctgcagatgcagctgctgagctgcaggtgcatgcacctttcccacccccacctccctctctccccttcgtcttcctctatagcccgcgccgcgcctccctgtccccgagtccgaagcccgaatccgaagcgaagtgaccgcaagagctcacccccgagtccccccctcgccggatcgcgcgggccgcctacctcctcccgtcgcaccagctaccgcgggaatgcgaagatcttgcgatggaagctagtcaaatctgatttcgtttaagtacaagtaacaacaatggcaccaaacaaaatttcctcaatggatgctggagcagcttttgatgacgaagatgctagttccagcaattcactgcaggagttgtggccagttggcgagatagatcctaagagagcaagatttccttgttgcattggttggactcctctttctattgtctcgtggcttgctccttacatagggcatgctggaatctgtcgagaggatgggac

SEQ ID NO: 15252 - DNA, 239 bp, Oryza sativa
  Clone ID: uC-osflcyp085d07b1
tcgtttagatcaaaaaggtcagtgaataaatgggggaaatcatgatgatggaagagtgattagaaaatccacaggctataagatcaatctgctacagactcttcgaaaagatgaggcaaactatgctatctgccgaagcacatacaacgtattcaactacaatggagtaaactagagactggtcacaacgagatagatatggtagagcgtaaaccgactagtcgagggtgcacctaaaa

SEQ ID NO: 15253 - DNA, 230 bp, Oryza sativa
  Clone ID: uC-osflcyp085d09b1
tcgtttatatcttaagagtcattttgggtaacgggggaatgcagcataggggagaggttgaaggtcctctacaagctacaatatcagcctgcacttgattgagctgataactactacgatctttacaaggtgtctatgaccttatagcatatgtaaaaactgtgtacttatagtagagtctggttagtactacctcgagatgctaggtggtgatcccaattttcaaaagg

SEQ ID NO: 15254 - DNA, 500 bp, Oryza sativa
  Clone ID: uC-osflcyp085e02b1
gcgttggtttgctgcgtatggtttgctacctctgagttcatcagcagttgatttgcctgaaattgttgtagctgctccacttcagccacctactttgtcatggagcctatacttgccattgttgaaagtatttgagtatttacctcgtgggagtccatctgaagcatgccttatgagaatttttgtggcaacagttgaagctatactgagaagaacttttccatcagaaacctctgaacaatccaggaaaccaagaagtcaatctaagaaccttgctgttgctgaactccgaacaatgatacattcactctttgtggagtcctgtgcttcaatggaccttgcgtccagattactatttgtagtattaactgtttgcgtcagtcatcaagctttgcctgggggaagtaaaaggccaactggtagtgataatcattcctctgaggaggtcacaaatgattcgagattaaccaatggaagaaacagatgtaagaagagacaag

SEQ ID NO: 15255 - DNA, 439 bp, Oryza sativa
  Clone ID: uC-osflcyp085e03b1
cgatactacgacaacaccctcatcaaggagaagtttggttgggcacccacattgaagctcacggacgggctgaggttcacctacttgtggatcaaggagcagatagagaaggagaagacccatggcgttgacatcgcgggttacagctaatccaaggtggtgttcacccaggccccggttcagctgggctacctccgtgctgcctatggcacggatgtatttgaaagctgctacaccatgaagatcattcagctgctgtcagcttgatcggggtcataccttacttcgctacagatagctcacagaaatgaattcttcttggaaatcttgcaacctttcaaaacaacaacagtcgttcttcctggggtataactcatatgcaggacacccgcttcttgcgattaaaaagccatacttgagaaggtgcctatttttattt

SEQ ID NO: 15256 - DNA, 88 bp, Oryza sativa
  Clone ID: uC-osflcyp085e06b1
ccacgggtcagcttgtcctactcgggggggctgtttattgtactacgggggtgataccaagaggataccataactggctggcaaggtg

SEQ ID NO: 15257 - DNA, 298 bp, Oryza sativa
  Clone ID: uC-osflcyp085e08b1
tcgtttagatactgtgagacatctattactgggggttcatgttgaccatggaggtgtggataaaacctctacacgctacagaatccgtctgcggcagactgcccgaccatatcacacagacttgactatgtgaagaagaacccacagcagattattttgatgtggactatggcagagcatggtgacaataaggtaaagatggttaaagatacaacctactatacgcaagtgccgcgagatcacgtgattggcaatagaccttgcatattactgtaggacctatagtgtttcaataact

SEQ ID NO: 15258 - DNA, 57 bp, Oryza sativa
  Clone ID: uC-osflcyp085e10b1
tgtttatatccaacgcgtcatctgcaacactgggggccttcttactacagaatcgcg

SEQ ID NO: 15259 - DNA, 483 bp, Oryza sativa
  Clone ID: uC-osflcyp085e11b1
gttgtgtgcctcttgctagctaagcaaggagatagccggagccatggcgaccatcgtcgctgccgccgccgcccgcaccgacgtcgttggccggccgtcaggggtggctcagctgagagcgaggaggggtgagagggtgaggagcggctactcctccagggacggcaaggaggcgacgcccgccgccgccgtgaaaggcgcgacgtcgatgctcgcggcggcggtgacggcgtagtcgtcgtcggcgccggctgcgatggcgctggtggacgagcggatgtcgacggaggggaccgggctgagcctggggctgagcaacaacctgctggggcggatcctcctcggcgtgttcggactcatatgggcgctctacaccgtctacacctgcacgctcgacgaccaccacgagaccggcggcctctgcctctgacgccttgttcggttaatccgagaaagagattgacgaggggatcgagagaatat

SEQ ID NO: 15260 - DNA, 400 bp, Oryza sativa
  Clone ID: uC-osflcyp085f02b1
gtttattaaagcctcccatcaacttcttgcacacaccctccctttggctttcatctgcatctattcagttgcagattgagagccaaagacattatcttgattctatcaggagggttgtgctagcgaattcttgttagcaacaaattgacatattgctcggcacatccccaccgagaataccaagatgacgttctctggtacacaggacaagtgcaatgcttgtgacaagaccgtgcatttcattgatctccttaccgcggacagtattccctaccacaagtcttgcttcagatgcagccacttgaaaggcacactttcgatgtgcagctattccgccatggatggggttctttactgcaagacccattttgagcagctattcaaggaaacaagcaccttc

SEQ ID NO: 15261 - DNA, 154 bp, Oryza sativa
  Clone ID: uC-osflcyp085f06b1
tttttatccaaagtgtcatcttggataccacgggcaggatgattatcgaagagtggggataacctcaagaggctaccagaactgtctttggctgaattcccgcagaactcacgcagcctatactatctgctgatgaacccacagcatattctac

SEQ ID NO: 15262 - DNA, 207 bp, Oryza sativa
  Clone ID: uC-osflcyp085f10b1
tttatatcataagggtcatctggtgcatcacgggaatgttgaggatggacgtgcggttacatcctccagaaaccataagatgagcttttgtcagctggtgctatcaactcagataaactaaactagttgctgattcacctacagcatattcaataaccgtggagtaatctagagctatgtcactattagctcgaaatgctataagat

SEQ ID NO: 15263 - DNA, 293 bp, Oryza sativa
  Clone ID: uC-osflcyp085f12b1
tgttcgacccaatagtgtcataagaaacaaaacttcatggaataaatggttgacacatgaggcaatgaggtggaaaaaaaaaaaaaaaaaaaaaaaaaatcaccaaaaacattatataaaataaagaaaatgaaaaaaatctataaacagataaaaaagtagttaggctttcatagtcttccaaacttcctctccgttacttccaaagaaaaaattcatctttagatcttacatcttctaattaaatggccgcctttttacaacgtgctgactgacaaaaccatttctatacc

SEQ ID NO: 15264 - DNA, 169 bp, Oryza sativa
  Clone ID: uC-osflcyp085g05b1
gcaaagggtcatccggtgtacctgggtggggttgtctatctaagtatggtggcgaccaccagaggcaacaagatcgggctttaactgaggtccataatagatggcagaatgtgtgatatgtgctgaggaactaagagaacattctacggcaggggatgaagctagagta

SEQ ID NO: 15265 - DNA, 137 bp, Oryza sativa
  Clone ID: uC-osflcyp085g10b1
tttttgatgcaaatggacatcttctgctacaggggcatcatgaatatcgaaaagcggttctaacctcaagaagacacatgatgtgccttgggcagtcagtcctcctagataacacaaactaaaaaagctgaagaata

SEQ ID NO: 15266 - DNA, 434 bp, Oryza sativa
  Clone ID: uC-osflcyp085h02b1
gttcttgccccagatctccctatgcttcgaccaagtgaagttcgaaagaggccatctactgtttacagacaagctgctggtcctattccagtccccttggaggatgttacatttgcaaagcctctacagatgaggaggcctgtagagaaatccttcactaagcacacggtcccttccgttccaagacctcacatgggttctggggttgttgcagcagtacctatctcagtttcacccagtaatgctgaatcaaggattttctccgagcagggtactgaacatgtgaatccacaaccgttatctgctgtggtacctattaaatcaggtcaacctgtattggcatcatgcaaggaagtcgctggagggaaaacttgcaatgagattcaaacagtctctgaatcttcaaagcacactggagagtcatcagatcacaa

SEQ ID NO: 15267 - DNA, 449 bp, Oryza sativa
  Clone ID: uC-osflcyp085h03b1
gttcttcgcttcggccgcgccgacgacgccgcctgcctccacctcgacgacatcctcgctaaatcttcttgggacatatcaaggtttgcgacggtagcattggtcgatatggattctgaggagatgcaagtctacattgactatttcgatatcactttggttccagctaccatttttttcttcaatgcccaacacatgaagatggactcagggacacctgatcacacaaaatggattggctctttcagcagcaagcaagatttcattgatgtagttgaggcaatatttaggggtgcgatgaaaggtaaactgattgtttcttgcccacttccaccagagaggatacccaaattccagctccttttcaaggatgtttgagcaaggaaagtgctcatcacatgcgcatgctaaaagagtgtcttggtcatgatgacagaactatatgaagc

SEQ ID NO: 15268 - DNA, 516 bp, Oryza sativa
  Clone ID: uC-osflcyp085h05b1
gttcttcctccacccgctcttcgactcctcccgatgtctccgggttttctctcgatttccgccgaatttcgctccgctccagcaatgggcgaattgggtgctctccagtccatcgtctaccaccgcggatcgctccgcctgcttgatcagaggaagctcccactcgaggtggactacatcgacgtcaagtgctccggcgatggatggaacgcaatcagagacatggttgtccgtggcgctcctgcgattgccatagcagcggctttggctctggctgtagaggtttctgggttggaggatttcaccggtacgcctgcagaggcagcagcttttgtttccgagaaattggagtaccttgtatcgagccgcccaactgcagtgaacctatctgatgctgcaaccaagcttcggagtttagtttcaaggacagcagaaactgagaaagatgccaaagcaatctttcaggcctacattgatgcagcagagaccatgctagttgacgatgtgtcagataac

SEQ ID NO: 15269 - DNA, 532 bp, Oryza sativa
  unsure (1)..(532): unsure at all n locations
  Clone ID: uC-osflcyp085h06b1
cttatatcggggcgccggctgagaccgagcggcggctgctcgttgcgatcggggcaggaccccgcttctcccgtccaatccggcggtggctcggtgacgagagtaggggcggcgagagctcggctcctccctcgcctcttctcccctccaatcccggtggcagcggcggcggcggctccgcgacaaggaagggcggcgggagcttggttcctccctcccctcttctccccttcaatcccggcggcggctcggcgacaagtgcgggacaagggcggcggctcggcaacggcggctcagcggcgacgacgacgacagcgacatgggaggggccttggcgactttgacgacgaccgtgacgacggagggcctcgtcgacatcgacggcgcgcggtggacggcgacgagcggatccggcaccacctnctccatccaccgtgccacctncatctncgnccccagccacctcgtcgcccttccccgcctcgctcccccagccagggaagggacggtggcccgcggatctgccgcctcc

SEQ ID NO: 15270 - DNA, 311 bp, Oryza sativa
  Clone ID: uC-osflcyp085h10b1
tcgttgtgatgagtcaggtacttgaacgtgagggggacaaatttgactctaaggagtgctgcaaaaatgaaccgaactccatccaatccataggccgatcaacacgccgaatgagtggatgaataaattactatggttcttgctcccataatatgcgtgctcctcgaactggaatcgctagagatatcatgctggagttgacccagacattaaacactattgcctgagaagttgagagcatctctcgactctttggacctgacgtgtcattgccaaacggttggacatacaaatttggtaggaagttgcct

SEQ ID NO: 15271 - DNA, 459 bp, Oryza sativa
  Clone ID: uC-osflcyp085h12b1
gttctcggccccggctacccgcacctcgagcgcatctgcctcaagcgcatgaccgcctacaacgacgacctcgcgctcatcgccaagtcattcccgctgttcaaggagctgtcgctggtgtgctgcgatgggttcagcacgctaggcctcgccgccatcgccgagcggtgccggcatctccgtgcgctggatctgattgaagactatatcgaccaggaggaggatgagctagtggattggatctccaagcttccggagtccaacacgtcgctggagtcacttgtgtttgattgtgttagcgtcccattcaactctgaggacctgcaggcgctagttgcacgctcaccagctatgcgccggttgcgactgaatcaccgtgtgacagtagagcaagtgcgccgtctaatggcacgggctccacagctcacacaccttggtactggggcatttcgttctgag

SEQ ID NO: 15272 - DNA, 463 bp, Oryza sativa
  Clone ID: uC-osflcyp086a03b1
gaaggaacaatgctactatatattatgattatctccatagcttccaatcatactaaacaaactttccctagagggatacatgaaagctccaagagctcaaacgtcagaaaacagaaggcaagaacagactaactactactattatacatttcatcatgaggggtcatgaaacaaggcttaggtgttgcaaccgtcaaaattaacaccttaccaagagctgggtcaaaagaaccagccactggagatcttgctgcttcatgctctggtccaaagaaacaccttgccaccagagcttgcacaagcaagatggccaactttatatgggtgtgcagagaaccggcctggaatggccgtcatgtgttcgctctcgagacgtgcgttgttcatagctaaaaggctactgccattcagatcaaccaaaatgatatctattgcccgcgccatgtttccaataaacaggtca

SEQ ID NO: 15273 - DNA, 207 bp, Oryza sativa
  unsure (1)..(207): unsure at all n locations
  Clone ID: uC-osflcyp086b01b1
cgatcttaatttctctcttcatcttctcgctctcgatctcctacagaagctatagtagccagcaaatcaatcgatcgatccgtacaatggcggccatgaagatgaacaagattgccgtggcggcgctgttcctcgtcgccgtggtggtggcgggcattacnctncgctagtgattacgtcggtggtggtgttggagttgacgccctc

SEQ ID NO: 15274 - DNA, 535 bp, Oryza sativa
  Clone ID: uC-osflcyp086b02b1
cttgtttaatctcttacaggtaaatcttgaaagctaccacttcttgtctaccattccaccattgggccatctgcctttgctaaagctcctcaccctaagaaagcttccctcagtgaagcatgccaacggcacatcattcggtggtttcccatctcttgaggagttcgagcttcattcaatggagaaatgggaggagtggacagaaccagatgcagcagctcatgcttatgggttgtcgcttttccttggacacctcaggaagctccatcttgcatactgtccatcactgagacgtttcccgcatcttccatgctttatctgcattgaaagagctgaagatctccaagcctggaagctggatcctggcattaccagcatgttctcaagtcttgtcatccctaataaccttggcagtcgagtactgcaaccacaacgttgtaatgtccgcgcaacagttcaagtccctaaaaaatattgagcttatcaaaagtgaagggctacgtttggctgatggattccaatactttagcaaact

SEQ ID NO: 15275 - DNA, 528 bp, Oryza sativa
  unsure (1)..(528): unsure at all n locations
  Clone ID: uC-osflcyp086b03b1
ctttcttctattgatgtgtggtctgctggctgtgttcttgctgaactacttctagggcagcctgtttttcctggtgacagtggcgtcgaccaacttgttgaaattatcaaggtactgggtactccaacaagggaagaaatcaaacatatgaatccgaactacactgagtttaagttcccccaaatcaaagctcacccatggcacaagatctttcataaaagaatgccatctgaagctgtagatcttgtgtctcggcttctgcagtactcaccacacctccggtgcagtgcattggaggtgttaattcatccattcttcgatgaactacgagatccaaatgctcgcttaccaaatggccgtactcttcccccactattcaatttcaagcctcgtgagctgaaaggagcatcaatggaatttcttgtgaagttggttccacagcatgctaagaagcaatgtgccttcttaggattatgagcagacagttcatacactaatncggtattacgttggtctacttggttccgt

SEQ ID NO: 15276 - DNA, 489 bp, Oryza sativa
  unsure (1)..(489): unsure at all n locations
  Clone ID: uC-osflcyp086b06b1
tttagtgtgggcagtctgcacgtgcatgctggaacaaccacaggatgcaacggatcacctcagcttctgcttggctactggcatttcttaccgtcatcctcaagaccttaggcttctccgagactgtgttcgaggtcacccgcaaagacaagagcacatcagatggtgattccaacaccgatgagcctgagccagggaggttcaccttcgacgaatcgacggtgttcattcccgtgacagcacttgcaatgttaagtgtcattgcaatcgctgtaggagcatggagggtggttttggtgacaacggaaggcttgcccggtggccctggtatcagtgaattcatctcctgtgggtggctggtgctgtgcttcatgccattgctgagaggtctagtgggaagtggtcgatatggcattccttggagtatcaagaanaaggcctgcttgcttgctgctatattcttgctcttctgcaaaagaaattaattgc

SEQ ID NO: 15277 - DNA, 413 bp, Oryza sativa
  Clone ID: uC-osflcyp086b10b1
tactagttctagatcggcacgcggccgcccttttggagtattatagaattcatctgaatctatggatgctattgatgaacttgcgtattgttagatgcgtattgagtatattgatgcgactcctaccatggcaagctgctatattagactatggataccagactgatgggccaggtattgattatgtaggattcgcaatatacacacaatactaacatgctgtatgtacagtcataaggcacatgaaacttattagtttttcgtctctaacatgatgatacttatgatgaatctggataaatacttctctacgcacatttggtggacttgatgcggacatgtctgtcttgtatgctatttacagtgtctgcagccaatggagactcactagataagccctctaggcaccacac

SEQ ID NO: 15278 - DNA, 361 bp, Oryza sativa
  Clone ID: uC-osflcyp086b12b1
tgatagagagcatgtagcgagggagagaaaggaagagactagaggagagagatggccactgcttatgctcccatggcgagccagctgatgaagagcagctttggttgctccaagccgagggggctggccggtgctacgctgacaaggaggccccgcttcacagtcaaagccattcaatctgagaagccaacgtaccaggtggtgcagcccatcaatggctacccctttattggcagactggagacgccggtgacctccagcccgctggtcgactggtactcttccaacctactggtttaccggaccgtcgtcagcccgattgctccgcgtgcattcgaggtcgctctcgcccactgctacc

SEQ ID NO: 15279 - DNA, 504 bp, Oryza sativa
  Clone ID: uC-osflcyp086c01b1
ggtcgacccaccgcgcatttttaattcacaaggcttacaagagaagatctttaattcttgcccggcggcaagcgaaagaaaggcggaggaaatccataatggcgggaagcggatggaggaggatcacggcggctatggaggccgctcatgtcgcgcccggcctcggtctgcctctggatcgtgctcgtcgacgccaccctggcgctcgcccaggcgaagaaatcgaaggcggatttgactgaggtcacccacaaggtctacttcgacgtcgagattgatggcaagcccgcaggacgggttgtcatgggacttttcgggaagactgttcctaaaacggcagagaacttccgagcactttgcacaggagagaaaggaactggaaagagtggcaaagcactccacttcaagggaagtgcattccacagaattatacccagctttatgatccaaggaggtgacttcacacttggtgatggaaggggtggtgaatctatctatgggacg

SEQ ID NO: 15280 - DNA, 509 bp, Oryza sativa
  Clone ID: uC-osflcyp086c02b1
ctacggcgacgaccccacaccggcggcggagatgaacgcgttccggctagccggggacatgacccacctcctcagcgtggtggtgctcctcctcaagatccacaccatcaagtcctgcgcaggcatatctctaaagacccaggagctatatgcacttgtgtttgctgctcgttacttggacctgttcattcattttatatctctgtataacactgtcatgaagttggtctttctggcaagttctttctcaatagtttggtacatgaggcggcataagattgtccgaagaacctatgacaaggatcatgacacctttcgtcatcacttcttagtgttgccatgtttggctctggccctccttattaatgagaggtttacttttagagaggttatgtgggcattctccatatatttagaagctgtagcaattctacctcaacttgtgttgctacagcgcacgaggaatattgacaacctgactggccaatatgtcttcttttaggtgcata

SEQ ID NO: 15281 - DNA, 554 bp, Oryza sativa
  Clone ID: uC-osflcyp086c05b1
gtagaggagaggagatcagggggaggaagggtggccggcgcagcagatcggggcgggcggatttaggggaggagcgcgctagccgggagcggcggcgatggatgaggagtacgacgtgatcgtgctggggacggggctcaaggagtgcatcatcagcggcctcctctccgtcgatggcctcaaggtccttcacatggacaggaacgattactatggaggagaatctacatcccttaatctcactaagctctggaagagattcaaaggcaacgagaccgctcctgaacatctgggtgtcagcaaggagtacaatgttgacatggttcccaagttcatgatggccaacggtgcactggtccgtgtactcatccacacgagtgtgacaaagtatctgaatttcaaggctgtcgacggcagcttcgtgtacaacaatggcaagatccacatagttcctgcaactgatgtcgaggccttgaaatctaatctaatgggcctttttgaaaagcgccgtgctaggaaattcttcatatacgtgcaggattacgaagaggatg

SEQ ID NO: 15282 - DNA, 523 bp, Oryza sativa
  Clone ID: uC-osflcyp086c06b1
ctggggcgcctactacgccgtcacgtttagcgcggcgcgcacctgcgcccaggcggagcagctcaacgtgtcggtgagccccgagtggggggtgctccccatgcagaccatctacggcagcaacgggtgggactcgtacgcgtgggcgttcaaggcgaagatggacgaggtggcgctcgtcatccacaacccgggcgtggaggaggacccggcgtgtggcccgctcatcgacggcgtcgccatcagggcgctgtacccgccgacgctggccaaggggaacatgctcaagaacggcgggttcgaggagggcccctacttcctccccaacgcgtcgtggggggtgctcgtcccgcccaacatcgaggacgaccacttgccgcttccggcgtggatgattatgtcggccaaggccgtcaagtacgtcgacgccgcgcacttcgccgtgccgcaaggcgcccgccccggggagctggtggggggcaaggagtcggcgctggtgcaggatgtgcgcaccgtgcccggg

SEQ ID NO: 15283 - DNA, 530 bp, Oryza sativa
  Clone ID: uC-osflcyp086c09b1
ttttatgtgctggtttagcagagtggtaacctgacttgtgtatcaaaattttggcttcgatctgtattatgtgattgcccagtagtagatctagagttcgacacaattagtggctagggatttggttattggcccttgaccagaagtttaatgattgccagtggaatgtcagtagatctagattgggttcttgtgtcaaaccctggctcgcttcatttatcaggtagcaaaccatccatccgttactattgttgccaattactattttttctcagagctctgattcccagacattaagctagacaagttgattcccatattagtctacattgtgtgatttggtccataagagtaatttaatttctataatagagatttaattttcttggattagtcctagcttataatatttattttacatctaaatgatttgtttcttgtttcagccttctaagacaattatgtcaggaccaactaattttcctccctctggccattttgtgaagacctaatgttggggcaccacagca

SEQ ID NO: 15284 - DNA, 225 bp, Oryza sativa
  Clone ID: uC-osflcyp086c11b1
tatcgcttcactgcccacttggatcctcgtggctgctgctgctgtagcggaagacgacgagccgcccaagaatccagcacccacccatccactgctgctgctgctcctgctgctgcaccccccgcattgtttcgaatttctcaaatcggccctcgggctgcggcggcgcggtcaccggcggcgaggtgagttcgtcggtgaagaggaagggggggggggggggct

SEQ ID NO: 15285 - DNA, 486 bp, Oryza sativa
  Clone ID: uC-osflcyp086e01b1
ccggcggttcccgcggggacccacgcgtccggtgtgtctgaagtggcgcatagtacagcgcttgtaaacaaatccccccatttgcttcttttgcactgaagaatccctgaagaatccagcaggatggagaataaggcgtccattctcatgaacgcggatgagctcggccgcatgctcgggcaaggcaccttcaccaaggtgtaccatgcacggaaccttgcatccaaccagagcgtcgccatcaaggtcattgacaaggaaaagggattgcgtgtcggcatgattgaccagatcaagcgagagatctccatcatgcgccttgttcgccaccccaacatcgtccagatgcacgaggtcattgccagcatgagcaagataatactttgcaatggagtatgtccggggtggtgagctcttcagcagggtagccagggggcgactcaaggaggatgctgcgaggaaagacttccagcagttgataggggc

SEQ ID NO: 15286 - DNA, 468 bp, Oryza sativa
  Clone ID: uC-osflcyp086e02b1
ctactgctgcttcgcggacgcccacgcgtacctcgccaccaagatcgatccccgtgccctgggccggttccgcctcagcggcgtcgggggcgggggcgagcgcggccgatggaattcgctgtccatggtgccggctactcgatgtccgacgtcttcgagggcgtggagttcaggtggacttccgtccccgcggaaggcggtgggaggttgcgcgaatcgtggtcgctggagctcagcttcgacgcggagcacacggacatggcgctgggcaggcgcggcggcgggagcgcgagctcaagatctacatgaacgagagctggtcgtggcgcggcatcgtccaccaccaccccgccacgttcgacacggtcggcatggacccggggctgaagcgaaccatcggcggcgacctcgacccggggcagggcgtggaagcgagggtaccttctctacggcccgcccgggacaggc

SEQ ID NO: 15287 - DNA, 531 bp, Oryza sativa
  unsure (1)..(531): unsure at all n locations
  Clone ID: uC-osflcyp086e05b1
gttgaaacaaacccctctcactcccactaccatggatccttgcaagttccggccgtcgagctcgttcgacacgaagacgacgacgacgaacgcgggagctccggtgtggaacgacaacgaggcgctgacagtggggcccagggggccgatcctcctcgaggactaccacctgatcgagaaggtggcgcacttcgcccgggagcgcatcccggagcgcgtggtccacgcccgcggcgcctccgccaagggcttcttcgagtgcacccacgacgtcaccgacatcacctgcgccgacttcctccggtccccgggcgcccagacccccgtcatcgtccgcttctccaccgtcatccacgagcgcggcagcccggagacgatccgcgacccgcgcgggttcgccgtcaagttctacacccgcgagggcaactgggacctnctcggcaacaacttccccgtcttcttcatccgcgacggcatcaagttccccgacgtcatccacgccttcaagcccaacccgcgctcccatgttca

SEQ ID NO: 15288 - DNA, 545 bp, Oryza sativa
  Clone ID: uC-osflcyp086e09b1
tgtcaatttgttgagtatgttgtgaacttgaagttcgacgaagagccaaactatgcaaagtgcattgctctttttgatggcattgttggtccaaatccagatggaagaccattaaacaccgatggtgcccagaagcttgtatatcaggttggtcagaagagaggccgcctcacagcggctgaagatgaggagcaacctaagaaaaagattagaatgggaatgccagcgacccagtggattagtgtgtacaatgcccgtcggccaatgaaacagagataccactacaatgtagcagatgatagattagcaccacatattcaaaaaggaaatgaagatggtttgtttataagttcagtttcatcctgttcagatctgtgggctttaattatggatgctggcactggttttaccgcccaagtacatgaactctcccattactttcttcacaaggaatggataatggagcagtgggagagaaattactatattacttctttggctgttcaaataatggaagctcggtggtgatcatgtcaacaggaacg

SEQ ID NO: 15289 - DNA, 541 bp, Oryza sativa
  unsure (1)..(541): unsure at all n locations
  Clone ID: uC-osflcyp086e11b1
tcttttgtgagttgttgtaaagttgcgagagagagagagagagatcagttagtttgttgagtggaagcagatcaggaagatgctggagaagctgtgggacgacgtggtggccggtcctcgaccggagaccggcctcgagaagctccgcaaggccgctacaacccgcccccttgtcatcaacaaagatggcgacggcgaggcgagcggagtggcgtacaagcggacgcagtcgatgccgacgaccccgacgacgccggtgacgccgtcgtcttcgtccccgacgacggcgacgacgacgacgccgcggggcagcaacgtgtggaggagcgtgttccacccggggagcaacctcgccaccaagagcctcggcgccaacctcttcgaccgcccccagcccaactcccccaccgtctacgactggctgtacagcgacgagaccaggagcagccatcgctgaactgaataatcccattgatcggaggctggtcgatctctctgtcacgccatgtntgctggtccttgtggttttctaatacgtaat

SEQ ID NO: 15290 - DNA, 539 bp, Oryza sativa
  unsure (1)..(539): unsure at all n locations
  Clone ID: uC-osflcyp086f04b1
gtttcatgatggagtgattagagaaaaacctagcaccccagaagaggcacgaaagttcatcaaaggatactccgaaagccatgcagcgacaattggatctgttcttgttactaatgtgaaaagtggagccagaaaggaaggatgggacaaagctgaagtttatttccataagatacccgatgaagttgttgagagtttgattgaggagggcgatgtcttctatgttgccggtggcctgctggtagagcacccgctgacttcacctcttgtggaagctattgttggcaccatcgacagtgtaatgggactcccgaaatccctcacggagaagctgatcaaggagtcccttgaggagccatagctattttttttaccgggacaactgactgcccatgctgaagttcatatgctagaatttttcactcatctgctgcacaaccaactcgtcatacactctgcttggattggaggatggagatgcatcttaccgatgttgtcagcttgactatgctaagctacttgccgngattggcattatt

SEQ ID NO: 15291 - DNA, 381 bp, Oryza sativa
  Clone ID: uC-osflcyp086f06b1
attattgatcaggtagaacagagcgagtggggtgcagataacttatgagctgaaactgaggatcgcaacatccatgagcacctcgccgctggtggcgccggcccggaccaagggccttgcgtccatctgccgccggggatcctacttagccatccgctgcagaggtgccaagaacatcaagaccgacacgccctacctgattggaggagacatgccagtccatattgatgcatctggcacgatgcgcacggagcacggtgcagcccaagatcccgacaagtacgtgccaaaccggcaccgctacagcccaatctagctcccgggggaagggtctctacaccggagacacctaccttggaggaaccaccgggcttgtgatct

SEQ ID NO: 15292 - DNA, 422 bp, Oryza sativa
  Clone ID: uC-osflcyp086f07b1
tctccttttctccgttcatctcgagcagaggagaggaatggattcctcctccacctccgggaggaagggaggaggactcctcctctcgccgccgccggcggcggtagttgtggcggtggcggtgctcctgtcggcggcagaggcggcgacggaggagccgtgctacccgcggctgttcagctttggggactcgctgacggacacgggcaacttcgccttcatctacggcaacgactcccgcgagccggcgctccgcccgccctacggcgagaccttcttccaccgcgccaccggaagattctccgacggccgcctcgtcgtcgatttcatcgcggacgcgctggggctgccgatcgtgcggccgtacttgagcgggcggaccgcgggggacttcgcatgcggggccaactttcgcggtgggc

SEQ ID NO: 15293 - DNA, 466 bp, Oryza sativa
  Clone ID: uC-osflcyp086g01b1
cttattactgtatatacaggggaatagttgaaggtggttcccatgtccttcctggattgcaaagcaataaccaaagtaatgatgtcaatttcgtagataaacaggaagacagtactgaaacacggattgattttgaaatgactaacaatcagaatggaaattgtagcaccagtgatacttcccatcatgattcctggtccaggagattacgtagggttagaagtagtgcatcggggcaacgaaggcggaagagatggagaggacgggtagatgatctggattatggttgtgagaccccattggatgcaaataaacatgctattttatgttctgctcttgacatggatgaagatgatatgatagttaaaccagacttgatggcagatactggtttgcctgattctagatgtaatcaaagatcagaaatatgaagttattttagagatgagggatcttacacgcaaag

SEQ ID NO: 15294 - DNA, 467 bp, Oryza sativa
  Clone ID: uC-osflcyp086g03b1
aatataagaaaaaaaaaaggaaaatcgtgtctcgtctcgtctcgtcttcgtctcccccgattcccgagcagcttctcgaaaccctcgcggcctcgattccggcgatggcggagcccaacccgcaagtggagagggaggtggaggtggaggaggtgaggtattctgcagccgtattcctccttcaaagaacaatttgcgggcaagggtcacagttgagcaagggctacagcaaacccgtgtagcatcaagaggttttatgagccccaacatgggcaaacctgttggggatcttgaaatgggcaggaagccggtgccttgggatgaaccgaggacagcagctgatattagggacttggaagcaggtctcgggggctttttggatgaaaaagaaggtagacttaacgcatgcatccccagatctggagcaggacgaccttccaactgatcctatgaaaggacgagctggc

SEQ ID NO: 15295 - DNA, 463 bp, Oryza sativa
  Clone ID: uC-osflcyp086g06b1
cgtcttcgagatcctcgcgtctcagaacttggaagattggcctctgatagctcctctgccatcctacggaagaggaagggacgaaccaggcccaagatacagcaatttcattgctggatccaatctcacagatgtcatcatcactggtaggaatggaacgatcaacggccagggccaagtctggtgggacaagttccacgccaaggaactcacctacactcgcggttacctgctcgagctcctctactctaacaatatcatcatctctaatgtcaccttcgtcgactcgccgtcatggaatctccatcccacctactgcaccaatgtgaccatcagcggcatcaccattctagcacctctcaactcgcccaacaccgatggaatcgacccagatttcttctcccatgtaaagatccgggacagctacattgtgtccggcgacgactgcatcggcctgaagagc

SEQ ID NO: 15296 - DNA, 531 bp, Oryza sativa
  Clone ID: uC-osflcyp086g08b1
ttctactgcttcctttgtgtatggtttgttggtggtctttctgtcttccattgctatttgatgagcaccaaccagacaacttatgagaacttcaggtatcgctacgatagacgggctaacccgtataacagaggcgttctgaacaactttctagagatattctgcagccgtattcctccttcaaagaacaatttccgggcaagggtcacagttgagcaagggctacagcaaacccgtgtagcatcaagaggttttatgagccccaacatgggcaaacctgttggggatcttgaaaggggcaggaagcctgagccttgggatgaaccgaggacagcagctgatatcagggacttggaagcaggtctcgggggctttttggatgagaaagagggtagactaacgcatgcatccccagatctgagcagggacgaccttacagctgatctcatgaaaggacgagctggcacacattcaaggcggacaagttgggttaatagaactggaacttagaatcagagtgaccctggcatt

SEQ ID NO: 15297 - DNA, 393 bp, Oryza sativa
  Clone ID: uC-osflcyp086g10b1
tatgctgtcattgcctttagacggccaaggcctgaatggttatcacaacagccatttgtcattcagcacacaatgacaccggaaatagcggtgcatggctttccggctgacaacttcacacgatcagggagcagagggataaatcttagtcgattgtcgcttggtgttgagcttaatgaaccatcaacatcaaactggacatccggaaccagtgttaaattcgagcatatccggcctgttaataacgagggacgctccatagccagggaccatgatggctttcctctaacatgcagtggtaacctccatgataacatgattatcttgaagcaagagtctggttatgcagatgttaatgataatagctttaaaagttaacctccaatggaacaa

SEQ ID NO: 15298 - DNA, 540 bp, Oryza sativa
  Clone ID: uC-osflcyp086g11b1
tattgctgaggaaatctgtcaacatgcccaagactgccatggcattcaccatagcagcctccattgttggtcagacaatcgggtcgagggcggagcgcattcgtctgaaggcactggctgcaaagagcgacgctgattccaccaccgtggctgacatgtatccaaacaagactggaaattgcagtgacaccgagggcaaggcatgggatccgctcgcgatgaagatgatggcgggacgggcttctggtggtgctgctgctccaacaccaagcatgtgtttctgattgctcactgattggaaaatttgtatctaccagtatccctggagagtggagagttgatattgagtctattttatcttgtgatgtaattgcctctgcttgtccctcagaagtattcgtttgtttgtggggtgagacaagtggaataagagtgctactatatacacgatcattttgttgttaagtttgccaagtctgcagttcatgtatctgaaatttgatgatgctggatttctactatttatcaaatcgtcaatag

SEQ ID NO: 15299 - DNA, 255 bp, Oryza sativa
  Clone ID: uC-osflcyp086h04b1
gctggccgccctttttttttttttttaagcttctgtcaccttttagtggatagctccattaaacaacacgagaagaagaagatgccattagcccttatggaagaaaaagtggcagcatatgaagtattgcgatatactactatatataatactactctatatatatataaataatttagtggtgcgcctaattatactagagaatatagtactaaaaaaaaaaaattaaataaaaaaaaaaaataaaattataaa

SEQ ID NO: 15300 - DNA, 483 bp, Oryza sativa
  Clone ID: uC-osflcyp086h05b1
ggtgctgaaccggaggaaggcggcggcggcgagcctggcggcgctgaagagcgccggcgtggaggggatcatggtggacgtgtggcggggcatcgaggagagcgagggccccggccggtacaacttcgacggctacatggagctcatggagatggcccgcaagaccggcctcaaggtccaggccgtcatgttcttccaccagtgcggcggcaacgtcggcgactccgtcaacatcccgctcccgaggtgggtggtggaggagattgaataaggacaacgacctcgtcttacactcgaccaatggggacgccgcaactttcagtacatctaccttgggtgtgacgccctgcccgtctttaatggtccgaccactccttgggtgttcaccgaattaaagcgcgccttatgcgaccacttgcctttctaatccatccaattgtaattcgaattccagcagcaatcgggaaggagagaaacagaacc

SEQ ID NO: 15301 - DNA, 448 bp, Oryza sativa
  Clone ID: uC-osflcyp086h07b1
tgatagaaccatcgactataaccccaaaagaaccagatttcgtaaacaacatagaggaagaatgaagggaaaatcctaccgaggcaattgtatttgttttggtagatatgctcttcaagcacttgaacccacttggattacggcgaggcagatagaagcaggacgaagagcaatgacacgatatgcacgtcgtggtggaaaaatctgggtacgtatatttcccgacaaaccggttacaataagaccgaccgaaacacgtatgggttcgggaaagggatcccccgaatattgggtagccgttgttaaaccaggtcgaatactttatgaaatgggcggagtatccgaaactgtagctagagcagctatttccatagctgccagcaaaatgcccatacgaagtcaatttcttcggttagaaatataacccccccaaaaaagtagtattgaa

SEQ ID NO: 15302 - DNA, 300 bp, Oryza sativa
  Clone ID: uC-osflcyp106a03b1
gagaataaataatctcccctcgaagcgaatcgtcgaatgggcgtctcaagatgcagatctttgtgagagaccctcaccggcaagaccatcaccctcgaggttgagtcctcggacaccattgacaatgtcaaggccaagatccaggacacggagggcatccccccggaccagcagcgtctcatctttgctggcaagcagcttgaggatggccgtaccctggccgactacaacatccagaaggagtccaccctccaccttgtgctcaggctcaggggaggcatgctgatcttcttaagacct

SEQ ID NO: 15303 - DNA, 197 bp, Oryza sativa
  Clone ID: uC-osflcyp106a04b1
gtggatcgtttacttacccacaagttaggtgcatgccatgggaccattcatggcgtgcgcctggccaccggtactcacgctggccctgctcgcgtcgtgcggtgcccttctcgccacctgcatgctcccggcgcgtgcgacggcgggcagctgcttggacgtcggcgacatggcgacgatggacaggttccgggctt

SEQ ID NO: 15304 - DNA, 430 bp, Oryza sativa
  Clone ID: uC-osflcyp106b01b1
gacaaatgtttgattacaccaacaaacaaactagctagccaatggcctccttgccatctttaccggctcgccgtgacggaggcggcactattggctgttggctcatgtgccactgagctcaccttcaaggtcgctaagggctctagcgccaaaagcatagagcttgtcactaatgttgccatctctaaggtggagggcaaggagaagggcggctaggaccgggcggcgctcaaggaatcgtcatgtaacacctggacgctcacatgtgagtcaccgttcaaggagcccttagttgatcgcttacttgtcaagaataggggctaccgggtggccgacaatattatccctgaaagctttacagctggctctgagtacaagaagggaatccaactctaagtaacagacatgggtactcttgttgggtcacatg

SEQ ID NO: 15305 - DNA, 180 bp, Oryza sativa
  Clone ID: uC-osflcyp106b03b1
gcgtttcttttcacaaaaatcaaacaacaagaaattggatggcctagtgtgtgaacttcctaaaccctagcgcggaggggagcttgaacaccatgaagccgttcgacctgaccgtctgcggatctcacagcggggcgggtcgcgatggagctgtactcgaaggaccttgcgcggactttc

SEQ ID NO: 15306 - DNA, 410 bp, Oryza sativa
  Clone ID: uC-osflcyp106b05b1
ctcttttctcctcttcctcctccccccacccgccttgtcgcggatccgatccgcctctgcctgcgcctcgcggcccggcctgcctgcctcgccgccggtggtcccgatccgaggctgctcttgctgggcatcaaacatgggtctggtgaaggatggcgccgccgatttggaggaggggaccctggagaccggcatggagtacaggactgtttctggtgtggcaggacctctggttatcttggataaagtaaagggcccaaagtaccaggaaattgtaaacatccgactgggagatggcaccactcgccgtggccaagttctggaagctgacggcgaataggctgctgtgcaggtctttgaaggcactccaggaatagaccacaaattcaccactgtgcagtccacaggat

SEQ ID NO: 15307 - DNA, 492 bp, Oryza sativa
  Clone ID: uC-osflcyp106b08b1
ctttgttttctttggtgtgctgagagatggcaggagatctgcggtgaagaagctcgactccagcaaacagcctgatcaagaattccttgcgcaggtttcagccgtttcacgactgatgcatgagaatattatccaacttatcggatattgcgctggagggagcatccgtgtccttgcttatgagtatgcaccgaggggctccttgcatgacattctccatggtataaagggtgtgaagggagctcagccaggaccagctctatcatggatgcagcgagtgaagattgccttgagtgctgcacaggggcttgagttcctgcacgagaaggctgtgcctcgtgttcgtcaccgtgacattaaattcagcaacattatgctctttgacaacgatggtgctaacgcaggagacttcgacgtatccaatcagtccccgtacatggtggctcgcgctcactgcactcgggtctcggcacccttgggtattatgcttcc

SEQ ID NO: 15308 - DNA, 437 bp, Oryza sativa
  Clone ID: uC-osflcyp106b11b1
tgtgctttttctgatcaagacaatggccgatgggcggggagccttgatagtgctgaccttgcaagatgaggagaagagatatgttcagggtgttaagaaaacttttgacagcgaaaacatatctgagtacttccaacaggccttcctccagcaaggcctacttgataatatccggctgcttttcatagatgatatagaggagaaattcaatatgcctgatgacgaagaggaacctaagggttacatttcggaggattacaacaggttgatggcgcaggccttacaagatttggagtacaaattcaaccaacagactgcatggattctcaagcgttatgacctacccgagcacatcatgctggatctccaggagcaactctacaacaactacaaggtgcctgacaatctccggatcaaggtcattaattgctggtttc

SEQ ID NO: 15309 - DNA, 484 bp, Oryza sativa
  Clone ID: uC-osflcyp106b12b1
gagatcagaggtgaacaaaattttggagagggctcgaacaggaaagctgaggggctctagcttagaggcaaaagtttatctccacgcggaaaatgctaacacagtgtccaaactaaaggagctggtttcggcaaccaatgacgctgatgctctgcaccgcctgtttatcacatctgaggtggagatccttccttccgtaagctccgaaactacatcctggtgtatcctacactggaacttttagcagtgagcgcaccggcaacatctggattggtgtgactcgcgccgatggcgaaaaatgtgagaggtgctggaattatacccgagacgttggattcttccttgaccatcctactcttttgtgcccggtgccacggtggcattggtctgccaccagttcctgctgccgcggctgtcagctgaggctgctcgagagtggcaagggccactatcagcttcatttgaggatattaggtggaattaa

SEQ ID NO: 15310 - DNA, 174 bp, Oryza sativa
  Clone ID: uC-osflcyp106c03b1
gcaattcattaggatgattcagaaatagttgcaatgataaaagagttgctggagactcgcattcgaccagctgttcaagatgatggtggtgacattgaatatcgaggatttgatccagaaacagggatcgctcagctaaaaatctatggcgcctgcagcggatgtccatgttcg

SEQ ID NO: 15311 - DNA, 328 bp, Oryza sativa
  Clone ID: uC-osflcyp106c05b1
caaaatacctacccaaccgccgccgcatcgccctcgttagagcgatggccgcgtcggcgctgcaccagaccaccagcttcctcggcaccgcccctcgccgggatgagctcgtccgccgcgtcggcgactccggtggccgcatcaccatgcgccgcaccgccaagagcgcgccccagagcatctggtatggacctgaccgtcccaagtacctgggcccgttctcggagcagacgccatcgtacctgaccggagagttcccgggagactactggtgggacacggcggggctatcggccgacccggagacgttcgcgaggatcagggtgct

SEQ ID NO: 15312 - DNA, 467 bp, Oryza sativa
  Clone ID: uC-osflcyp106c10b1
gtcgcgtcgcggctgaacaggggagggccgggcggcgatctccatctggcgagcagcggaggggagggatcctgatcctggattttgggcaaaggtgggggtgaatttgcacgagggttttggttgatggcgaacattcgggctcttctcatcgggttggtacgtgccaggggttccttggtggacattgggcgatgcgtttcttcttcaaggccttcatatctagcgtcactgggcagacattacaaggttcccatggaaattcgttggttatcctcaacagggtttcctcctcatctggtggttgggatgcctgcattatcccctactatgaatcaaggtaacattgcaaaatggagaaaacaagaaggcgaaaagatagaaagtggtgatgtgatctgagagatagaaactgaccaagctacccttgagtttgagagccttgaaaaggggtttttggccaagat

SEQ ID NO: 15313 - DNA, 382 bp, Oryza sativa
  Clone ID: uC-osflcyp106c12b1
gccgctacgagggaggaagaagcatctggaggcgcacggacctcaccctccctcctcccatggcgccgcccttggccgccgccgccgccgccgccgcgggcgtatcctcctcctcccctctcttttgctcctcttcgtcccgccccctcccccgccgccatctgcccccgagctccgtctccctccggccgcggcgccgctcgatcgccgcggcctccgctgctgtcgagtccgccgggaggccgcttctagaggcgcgcgatctcgtcgactgcgtgaaggagaacgggcaggagatccttatcggcgtcaacctcaccatttgggagggcgagattcatgcgctcatgggtcaaaatggctcccgcaagagcactctcat

SEQ ID NO: 15314 - DNA, 238 bp, Oryza sativa
  unsure (1)..(238): unsure at all n locations
  Clone ID: uC-osflcyp106d03b1
cccncttcccattaaatttgctcaaataattaaatatgacaggcatgggttcttccatcggccgtgccaccattttctactgcgttgctctatccataattgccggcgccgcagcgacacaggtgccccccaccgaagcagagtccgtagaagagcctgcgtcctctgccttcaaggccgacacgttgccctcagcctcccgtatgctgatggccgttagtgacgtgccgttagcgcc

SEQ ID NO: 15315 - DNA, 164 bp, Oryza sativa
  Clone ID: uC-osflcyp106d05b1
catcgtcttttctctcagctctcacagctcactgcatcaatggccgcggccaccatggcgctgtgctccccggtgatggcccgcgcggcgccgtcgacctcctccgcgctcttcggctaggccctgatccgcctggggctgaccgtcctgtatgcccatgccgc

SEQ ID NO: 15316 - DNA, 433 bp, Oryza sativa
  Clone ID: uC-osflcyp106d08b1
cattcatccaatccaagattccaaaagtggttggattaatcgagtcatcgagatgagctcgccgggcggcgtgaacgagtgggaggactcaccgggggagatggagtcggaggccgcctccgccgtgggcatggcatgatggaggtcgacgccgacgaccgtcacccgccctcctactcccttcccatcgatgccgacttcttcaatttcttccccgacgacttcgacgaccaagaccttgcctgacctcctctcctctcctctcctctcccctcccctcccctcccctacccatcgcaggtgcctgttgtacccaacatcaaatccaagatccatcatgtcatcacatttcgtagccaaggtaatgcttcttctccacctctagtattgttaccattattggatccccatctagacccacatatattctatt

SEQ ID NO: 15317 - DNA, 211 bp, Oryza sativa
  Clone ID: uC-osflcyp106e01b1
cacactctttcctctgtcgcatctggactgtctgcgacaaccttaagctgcccagcagatgtaatcaaaactaggatgatgaaccagggcatggatgcaaaagttctatacaggaattcttatgattgtttggtcaacgactgtcaaacatgaggggttgacagcattgtggaagggattcttacctacatgggccaggcttgttccatgg

SEQ ID NO: 15318 - DNA, 226 bp, Oryza sativa
  Clone ID: uC-osflcyp106e04b1
caaaatttcttgtgattttggtgatactgaatatgggcactgatataaaggcatgatacactataccatcgtggcaatcaagctgtctagttcccaaagcttatttcaacaagaggtaacctggtccacttgtgatgcttggtgttagctgactccactcgcaatgtgagactactgcacaatgcccgtagtcggtaatggagacatccaactattatcacaatca

SEQ ID NO: 15319 - DNA, 490 bp, Oryza sativa
  Clone ID: uC-osflcyp106e05b1
ctcactgatacaattaattcaggcaattattctccattcaacctgatgatggcaaagctgtgaataccttgaggttgctctccatcctagcactacatttgtctctggagctatatatagacttctgagatgacctatccctcgatcttgatgattcccatttctctccttgccttcatctgagatgttgcttctcctattttccacctcctatcactgcccttgccccttcaattccttccctccttctttctgtctccacactatctccccctattattctccacccctttttccttttctctcttatccctacccctctttcttaactcttttctctacttctacttatactccctcttctttttttcttctctcccttcatccatccccattttttcctccccttcatctttttcattttatttttctcacccccctctctcccctccccccctttccatttcttcctctctctatctcccctttt

SEQ ID NO: 15320 - DNA, 179 bp, Oryza sativa
  Clone ID: uC-osflcyp106e07b1
cttgatagataaggttattgcctttgaacgtggagatttggtttttgtttttaattgtcatcccaacaaaacttacaagggctacaaagtttgatgtgacttgcccggttagatcaaaatatcaactaacttccaactcctctattatccttcattatctactttcatttttttcccaa

SEQ ID NO: 15321 - DNA, 514 bp, Oryza sativa
  Clone ID: uC-osflcyp106e08b1
ctcatttgagcatcggatttatgatattgacatggggtttgcccgatctggtagttcacggaatcaaatgccaaaatatcaatcactgaagaatcaggatatgtcaagcttaaatgtccaaaaagagcatgaaaattaactggcccagaaaacacatgccatccgagctgttgaagctccaaaacagtctacgtggcagggcttgctcaaacaagaaattagctgcaaaacaaattaacaataatcacaaagaacatctatcttttgtaagggatccagaacagatgccatataatcaggttaactcaaacaaagagtttgagactgttggcaaatccagccaattattgccacgtgtacagctctctcttcatacgacagaagccttacagcatctacttgtcagtccttattccctgtgacaaaaggatctactcaatttaacgacttggagatgccttcactagaaaaattgaggttcggactttggggtcttttttattgacacttgggt

SEQ ID NO: 15322 - DNA, 468 bp, Oryza sativa
  Clone ID: uC-osflcyp106e10b1
tttgattatccctcgagggattaaaatagtttcccttacatatgatgcatgccactcttctgatcacctcggcttgcgtgtgttccgagacaccgaatatcaccgatcgaattgcatgaattctgggtacaggaaggttaggctccagcgtgagccagaagggagacatcctgatcaatggccggagacagaagctggcgttcggcacgtcggtgagtcgatcggcgacgaatgatctcgttttttctttgataaagattcgagcaatgatgcaagcatggtgagatctcgtgtcgtggaacgcatgaatggatcgcgccacaggcgtacgtgacgcaggacgacgtgctgatgaacacgctgacggtgcgggaggcggtgcggtactcggcgcagctgcagctgccgagcgggatgagcgcggcggcgaaactggagcgggcggaagagacgctgcgggagatgggg

SEQ ID NO: 15323 - DNA, 109 bp, Oryza sativa
  Clone ID: uC-osflcyp106f04b1
tcgcggatttctttcgccgccctcgtggtagaggcctgaagtcccagggggagagataggctagcacgccagccatggtaatcacttgatctgcccaggtcaagcatgg

SEQ ID NO: 15324 - DNA, 171 bp, Oryza sativa
  Clone ID: uC-osflcyp106f06b1
gatcttctatagaaactagactggccaaaacgatataatatgtgccttgtaacagcaaaaggcttgtgctatctccatgaagaatcaacattgaaaatcatccatagagatattaaaccatcaaatattcttcttgatgaaagactgcaaccgaaaatatttgattttggt

SEQ ID NO: 15325 - DNA, 350 bp, Oryza sativa
  Clone ID: uC-osflcyp106f07b1
attggttccccaagcaacagaggcagaaatatccggggggaacagaagccgaacagggggacctaaagagaacacggatgaaggatatttccgccgactcttcagaggacagggggccctgaacataaaaggctctggccctccatcccacaaagaaatatggtcagcaggagacgacgggttgacaaaccatagcctccagctgagcctgaaccaactactgatgatcatccagcagcggagactctcagggaagaccgcatcagacctgccatcgagcgggtttagaggcccgggggtaagggcgaagagcccgggaacaagccaccagagactccctaggagaaaga

SEQ ID NO: 15326 - DNA, 117 bp, Oryza sativa
  Clone ID: uC-osflcyp106g02b1
aaatcatctctatcgatcgacaaagctatagctagcccaggcatggctgactctcccgcaatggcgacactcctcctcctccttctacatgctgtactcgtcgtggtagccgatgcc

SEQ ID NO: 15327 - DNA, 522 bp, Oryza sativa
  Clone ID: uC-osflcyp106g05b1
cgtcttcgttctcgcctctctccgcgccctcctccgccgccgctcgccgccgttcgtctccgccgccaccgccgccgccatgagggagtgcatctcgatccacatcgggcaggccggtatccaggtcgggaacgcgtgctgggagctctattgcctcgagcatggcatccagcctgatggacagatgcccggtgacaagaccgttgggggaggtgatgatgcttttaacaccttcttcagtgagactggtgctgggaagcatgtcccccgtgctgtcttcgtcgatcttgagcctaccgtgattgatgaggtgaggactggtgactaccgccagctcttccaccctgagcagctcatcagtggcaaggaggatgcagccaacatctttgcccgtggtcactacaccattggcaaggagattgttgatctgtgccttgaccgcattaggaagcttgccgacaactgcactggtctccagggcttccttgtgttcaacgcctgtggaggaggaacgggctccgt

SEQ ID NO: 15328 - DNA, 87 bp, Oryza sativa
  Clone ID: uC-osflcyp106g10b1
cgccagactcaattaaggatattatcgagagggtcatttctctctgtatggtgaagatatcagagtatcgaggataatcaccgcggg

SEQ ID NO: 15329 - DNA, 326 bp, Oryza sativa
  Clone ID: uC-osflcyp106g11b1
ttggcttgcccggatgcagagatcgagtacagaagaggggggattttgagagacgccaacggattcccgccatggcgcaccaccctggcaaggctactaccgcaacgaatatacactaggctggacaccatgtagtaaggaccttgaaatccagagtacccctggccaggcctagcgtgtgtgcatcgttgtcagttcaagcgagagtctctaggcgaagagtaggccatgctggtgatctttcctggggattcctactgccagatagatgatgctccccctgtattcctactatttaaattccaagcacctcctctgtatactat

SEQ ID NO: 15330 - DNA, 308 bp, Oryza sativa
  Clone ID: uC-osflcyp106h04b1
gctggtcgctgtttgcaattgcaaatggtggattcctcggaggggctccgacggctcgccgcgttgctgttcaagtgctgcagccttgacagctccaatcgtcccaacggcctgcaggatcctgaacggctggcgagggaaacagtttttaacgtaaatgaaatagaggcgctgtatgagctgttcaagaagattagcagcgctgcggttgatgatggcttgatcaatacggaagaattccaactggcactgtttaagaccagcagaaaagacagcatgtttgctgatcgggtttttgatctgtttga

SEQ ID NO: 15331 - DNA, 540 bp, Oryza sativa
  Clone ID: uC-osflcyp106h05b1
agagtttgttgccggcactcgttcgaaatgatagccgaggcgtgaataccccttcaggaaaagcagggtccaagtttccttgattgtgaagacgctgaagtttcgatattcatccctgggagtacctatgtgcgtagtcgacattagtccatagaagcgtgaagccggagcaaacctcggaatggcgaaaattctcccgccgcaaatcatcgacgaagcttctctacaacagggacgtgtcgattgtaagaacgctccgatagtcagacccatcgtctacggaaacgaggcacggtattttcggtaaaaaacgggaaggggatggacatacacacgagtggaaagtatatttgaagccttttaacaatgaggacatgagcacctggatcaagaaagtccattttaaactgcatgacagctattagaacccgaatcggatcgtcatgaaccccccgtacgaggtggccgagacaggctggggagaattcgacatcgttatcaagggctatttccttgacccaaacgagagaccggtgaccc

SEQ ID NO: 15332 - DNA, 119 bp, Oryza sativa
  unsure (1)..(119): unsure at all n locations
  Clone ID: uC-osflcyp106h06b1
gcgagtcttctctttatttttttccatattanaaagaaaggggggttttgcccatatatgggtgtggaaggaactctgagaacttaacagtgacacgagccttagtgaatatacatact

SEQ ID NO: 15333 - DNA, 381 bp, Oryza sativa
  Clone ID: uC-osflcyp131a02a1
aatcataacttcttttcctgtactcagcagtgtagcaatgctagtcaataaagctaatttcacctttgaacgggaatggggaagcaatggagtagagaattacaggagaaggtggcagctgaggagagaatcaggagctgtcacaaagctatatacaagttgggaagctgaacgagaagagagcatatgcttccctcctacaggaagcattatgacttgttggtgctgttttacaaatctgggtgattatcggaagatcgtcatgcggtagcagctgcagctttttttgggacttgggatccctgttgcagagtgcagatgaggttgcgatccccgtacacattgtccacgcgacatgttggtggccagaacttggcgccc

SEQ ID NO: 15334 - DNA, 403 bp, Oryza sativa
  Clone ID: uC-osflcyp131a03a1
ggcacccctatttagcaacaaattgaagcttactcaaatcttacaaaagaagaattggcaacaacccaaactaactttaccaaaattttagcaattgccaaaccttgccataccaaaaaaaaaaaattgttaaggcaggggctagaataaaacaggccctgagcctttcaggcctttttgggcaccagccacgggacaacactaatccaccaagggccaaggttgtaagggacaggccctttgcaaccggcagctgcaaagggctagattgcccaaatttccctcaaaactagcaactgtttaaaggaatgcctttgggctagaaacaactgggcctcaagttttggttaatgcagcccatcgcatggacattagcccctcatttaacccggaagagagcccc

SEQ ID NO: 15335 - DNA, 383 bp, Oryza sativa
  Clone ID: uC-osflcyp131a04a1
gtagtaaggaacatcaaattaatatatgttcggtaagaaatgcataaaacaagtcaatacataatcgcctgctaaaattcattactagtagtagatagcacactacaccatgttcttttcatcaaccgcacacataaatgtgaaatatattaattcatcagctatatgcaaaaacaataacataagacaagataacttacaatacagaactggctacatactaaaccaatgcttttccaagccacaagagtcgacctttacgcattgcaaggtttagttgacttcaatgaaattccagtgacaaactcatgagaaaaatgaactcttttatcaccactgcagaaaatcttacaagatgtaatgccatcagaatcattttgaca

SEQ ID NO: 15336 - DNA, 387 bp, Oryza sativa
  Clone ID: uC-osflcyp131a06a1
gggttgcacattgtagcatgtttagattgaataatactttactttgaaactgctacatatgaaaccttactatgtattttgtgataatagaaatagtatcacaagtcatttccctagagtacattattattccaaaaatgatcttttactagtagtcaaaacgatacatctgacagaatttgatgcactaattatatgctatgcacactgtttaagcatcattatttgcttgcatcttggggatcttgattctctgggacatcatttttcttcatcatccctttctctgtttcttctgccttcaccacctgctccacatttttagctttgccttccttgccaacatctttctttcttttgaggaactgaataaggccttcaagggca

SEQ ID NO: 15337 - DNA, 57 bp, Oryza sativa
  Clone ID: uC-osflcyp131a07a1
gtttgttttttttttttttggtgattctttgctacctttatttccgatagtaataga

SEQ ID NO: 15338 - DNA, 434 bp, Oryza sativa
  Clone ID: uC-osflcyp131a08a1
cacgcacgcataaatagcaccatgcttcattattttacggagtagcacgctgtactacacggtacgaacataaccataatacacacaacatcagggaacagtccccatgattctagttaccagttatttgtccccacgactctagttaccaagcaaacatgaaacagcttctccatgagcttagctctacttctgcctcttgtagatcttgtgcaggaaggatttcaatacattctgaactgctttgttcggatgtgcttcgatgtcggcaatcagcttattgtaactctcccttctcgtatttcatgaaatacggcctccagattaagttctttatacagatccttcacttttgcaacacattcaggatctggcttcccataattttcaaatagaatgtgcttttggttctcgtcagcacgctcgagagcttg

SEQ ID NO: 15339 - DNA, 320 bp, Oryza sativa
  Clone ID: uC-osflcyp131a11a1
gtttgtttacagcgtactgtatactagtattatatatctcggaaatacaatcactagtataattggctgctactgctataatgctacagattatactactatatatttgtacactggtgctcatactactataatatttgcaggttacacattgcatgaagctgtatatatgtaatggggaacaagagaaaagacagtgatgcacttcttccttcatcctaaaatataagcacttttaattgtttaaaattatagacaagttattatattttaggaggcataattttaaaatatgggaaagattagccagtcagctggcg

SEQ ID NO: 15340 - DNA, 261 bp, Oryza sativa
  Clone ID: uC-osflcyp131a12a1
ttggttttttttttttttggggtggcccattgtagcaggtttagatggaataatacttaacttggaaacggctccaatggaaaccttccatggaatttgggggaaaaaaagaaaatggttcacaggtactttccctatagtgacattattattttccaaaaatgatacttttactatgttgtcaaaaatatttcactctgacagtaatttggatgccactaattataatgccttatgcacaacttgttttaaagcattcat

SEQ ID NO: 15341 - DNA, 387 bp, Oryza sativa
  Clone ID: uC-osflcyp131b01a1
attctgggcagaaatcattaataccaaggcagaatgcccagcccaaaaccaatacaagagggccaataataattaaacaaactcaacatctagtacttgactatagcaaactgaagcccgtaccccacacgaaacacaaacttggatcactgatcgggcttcgctgaccaggccttgaccaatcttgacacgaacttaacaaagctgcagtgcagaaaaagcaccaaactaacacacgccaaacacttccaaattccaaccatggcctggtcttacacacgccccaattaagcgctgctcttgtgctcgccggtggcggcggcggcggtcttgacttcctagccggagcccttgtggtaaccgggcagtttctccatgatcttgccc

SEQ ID NO: 15342 - DNA, 362 bp, Oryza sativa
  Clone ID: uC-osflcyp131b02a1
gctggaaaatttgatgatttatttcccacttatatcatcatatacaaatactaacacatgcgaaaattatcaagcagaaaagttccatacaaattcatccagacaaacaagtgtaaaaaaccttttttttcccatttcccccttgaactatccgtaaataccaccattccaccaaactcccctctgtcttctacgacaaataatcttttcaacccagtaacttataattaattacagagagattagcaaacatataatggtaagaatcagttgtcgtaggtgcggcactcgtcggtcttcgggttgtccttgcagtaggccttgagcgggtcggaggtctccttgagcttgtcgcgcgcgtg

SEQ ID NO: 15343 - DNA, 375 bp, Oryza sativa
  Clone ID: uC-osflcyp131b03a1
gtggcaaccacgaaccggaaggggaatggaaacaaaaaaaagggtgggtggtcaaccaaggccacgggatacctggggacaactgtttgaaaagacaaaaaaggccttggggcgccttttttgggggggtaaaaaacccttttaacgggggggaaaaaccaggggggcggggtcttaacgaccaccaaacggggggagatcagggttttcaagaccgggtccctacaggggggaaaatccgagccccggaaacaacaagttttgtgggggaaaaaaaaagccttgtgttagcaaaaagggggaatggggttcctaactaaaagggccaaaagggggcaggacacctttttttgaacaaaaacggaatggggaaaa

SEQ ID NO: 15344 - DNA, 467 bp, Oryza sativa
  Clone ID: uC-osflcyp131b04a1
actggacaagagcatgtttgacgcctcgcattatcgcatatagcggatgaaaaaacgtcaggccagcctgcgcgacaacgtctagttacagataagagcagaactgcaagtcaaatacactcttttctctccatagtagagtttgagcagcgagcgggcaaacataaattattcaattattaaatgatatgatcactcttgatcatctcaacactataggaacaaaacttcgctaccgcgattttactattttagttgtccacaacttcaatgagggttggttcgtagtcagcaggagcctcgaaaccatggaagttcattacggttgcagcaacattggcgagcccaggggtctgaatgtcagaccggaatttcacaccagggtgaagaccgggacctccaatagcaaccgggacccgctgaagagtatgtgaggtaagaatctggataccaccgttcttgtcgag

SEQ ID NO: 15345 - DNA, 328 bp, Oryza sativa
  Clone ID: uC-osflcyp131b06a1
ttttttggtttttttttttttatttttttaatattttttttttatatattttattaatattaaaaattttatattaataaaaaaaaaaataaaaaaaaaaaaaaaaaaaaaaaaaaaaaaaaaaaaaaaaaaaaaaaaaaaaaaaaaaaaaaaaaaaaaaaaaaaaaaaaaaaaaaaaaaaaaaaaatagaaaaaaaaaaaaaaaaaaaaaaaaaaaaaaaaaaaaaaagaaaaaaaaaaaacaaaaggaaaaaaaaaacaaaaaaaaaagaaaaaaaaaaaaaaaaaaaaaaaaaaagaaaaaaaaaaaaaaaaaacaagcataccc

SEQ ID NO: 15346 - DNA, 329 bp, Oryza sativa
  Clone ID: uC-osflcyp131b07a1
cggggcggggaatcccccatatatataaaccccctaaaaaataaagaaggccccccccattttgggcccccaccctttttttaaaattttttttccaaaggggggaaaacccccccccctttggggaccgggggaccgacctaacccatatgcaggcgggcgaccccccaaaacgcggggccccaggcatgggctgggggaaatttaaagggggaccaaccattcaaatggaggggggaccagggggcaaattaaagctggggctggggggcaatggcaggggccccgggacccacccggttgccgttgttctggggggcctcgacccc

SEQ ID NO: 15347 - DNA, 449 bp, Oryza sativa
  Clone ID: uC-osflcyp131b08a1
ccggtaagtttttgcttctacctcataaaacctgcataagaacatgtatttctttctggattatttccgtgaaaaggttaaagcaacaattctttattttctaaggacgttgcccaacgatttatactctacaacttatgaattgttttcatgtcgatggcctcctccagagtcccttgctcaacatgatcccaccatcccatgaggaagttgtcaaacaaccagcctaaaccaaggggacagcttaatgccgccttcaccagcatctgccttcttgagcaactccttcagctcatcacgattcacgtacttgacgtcggccacttcttcaggattcgggctgagctccacatcacgaaccatgaataggaggtagtccagtttcatgttcgccccatttttccatcagatggagccttgtaaagcatcctcccaagaggaatgaattg

SEQ ID NO: 15348 - DNA, 385 bp, Oryza sativa
  Clone ID: uC-osflcyp131b09a1
tttgttttttggttacagaattgaattggctttttgttttagataaacaacttgagcattttacaaatggttacattcaatttcaacgtaaataaactattgcatgttacattcaatttcaaagtaaataaactatgacatgccacaaagcgtaatgctccatttggcggtacattacacacttccacaggttcaccggcgacggaatttaggacgaacagagaacacaccaggccgcagctcatcaaatcggtacccattttcaatgaggaagcccctgactgcaacaggtagtgaggcctgccctttgctgtgcttgccaatccctgtgatcacctttaagatagcctggttgggacgaacaaacaccacctttcctgggccg

SEQ ID NO: 15349 - DNA, 433 bp, Oryza sativa
  Clone ID: uC-osflcyp131b10a1
ggcgcataaaacaatctcatggcgtttattaaattataaaaagcaacatagatagaagacagctatgaaaatttgatgatgtcatacaaataaagcacaagcaaaaaatatggaacatccagcatttctagatacggtaattctaatggatgatcacctcaaattaaatcactccatatagttaaataactaccctaatgttgtgcattttttatacacttcagaaaatcttgtgcgccgttaggaatattgctttcacactcattttgttggtacatcagtagatttagcaaaaaaaagtttccttagctcgtcactatcattaatagccgacaaatgtggttctttatttttccatgtacacatgaagagatgaacaacaaaacccgataaactcctgtcgaaaaccggattattgacaaatacttgcctt

SEQ ID NO: 15350 - DNA, 356 bp, Oryza sativa
  Clone ID: uC-osflcyp131b11a1
caacaagagggtcaatcaattctttgtagttcatctcaacaaaaaaaaatcgttgtacttaattttctaacacagcacaatactggataagtcatccaaatcgttgaacatatctattctttatttctattttctgaaccccacaagacaaacgggatgcccccatttctgaaatctgaacaactacagtagtactcctcggtaatgctaatttgcgtgccgagcagtgtggcaccgtatcactctcgtgcgatggcgacgagctgttttccgacattgcggccggtgaagagcttaatgagtgctgccggtgccgcatcgagcccctcgacgacgtcctccacgtatgccacctt

SEQ ID NO: 15351 - DNA, 432 bp, Oryza sativa
  Clone ID: uC-osflcyp131c02a1
agagctgaagacaattctgataaacagagacatgcatttgatttctgcaaaatgtgagttaagtagaaaacctttacagagatgaaacctcatgaaaccttatacactgatgaaattcaaggcaaaaggatctacaggggtccttgcttcccatcatctatcctaaatctttgcactaatttcttccatgctttgcctttcttccttctttttatcttactcgaagaggggaaaaacgtacaaatatacagcttctttcttaagaacaagcacactctctcctttttatttccagaggccctcctttatttacattaaaggctttcaaagcttagcttttccgatttaacccaacaagactacaggtaaggcttgcctcgctatttgtctgtacaggtgttattttgtcaaactaaccattgcaatctcacg

SEQ ID NO: 15352 - DNA, 361 bp, Oryza sativa
  Clone ID: uC-osflcyp131c03a1
gtgcactgaaccatttttatccaacgtctaaaattgcaagttggatatacgtagacaaacttttattcatatatatgcatatgcatattattctcgtgccactgggtcccgtatctatatagagaaaccaaagtactctggaacaattaatgacctggctaacaatatattcgtacgttccgactatttgatcaggacaggcacggtcttgacaggcacggaaagcacattggcagacttgaacttttcggacacgtccacgttcctccgccgtcatgccgccggggagctttcactcgaacctgtgcagtatttaccccaggatgaacggtacgacacgcttagacagcggtagcccggg

SEQ ID NO: 15353 - DNA, 305 bp, Oryza sativa
  Clone ID: uC-osflcyp131c04a1
aaggggaaacgttgaacagattaactttcaggccccctaaattagagattggcgcattacactggtacttggaaagataatgacaaaggtacaggcggatagcccccatacagggcagcacccaggtcacaaatggggcatgtaaactactgcaaagggacaggacatgcctaaaacctacacctaaaagggttctgcaggttgcaatctaggggacatacagacaattactcagaccaaacaggtgcagagcaacctacaaagccaacaaattttagaaattcagtggcttttaccttagggga

SEQ ID NO: 15354 - DNA, 399 bp, Oryza sativa
  Clone ID: uC-osflcyp131c05a1
atcactgaatagttattttctgggaataatagggcctgatttatcaagggagttgcaccctgaaaaatcagccaataccacaccacagtttacagggcccgatcatcactcattatcaatttgtatctcacagcactagcaagtcctccgttacattttacaacagaccaggtctagtcttttggccaacaacaacaggcattttttggttctgaagacgagagagaatcagcggtcctttttttcgggacacaagcagggcacctacaatttatccacattctacgagcccacagataatttttagcagccttgcacgtctctccacttgaggtataccagtccagaatgataggggggggatgctccagcaacaacttacacatgaaaaagctgggg

SEQ ID NO: 15355 - DNA, 341 bp, Oryza sativa
  Clone ID: uC-osflcyp131c07a1
ccaggaaggggttatttccaagggggccattaatccaaaacaactttttggaaaaaaaatgaacccattttgttaaaaaaaaggggttatgtccccggaccacagggggaacccggaggggaaaaccgaaccttaaagcctgccaggggctttgatgggaaaaagtttaaagggggaaaaaaaaaaaaggggcccgggaaataggcttggggtgaaaaaacaaaaatttttcttttaaaacacgcttaaccggcttttgaaaaaaaaaatgggggggaccccgggtttaaaatttggggggttggaaaaaacctttcttgggctttttttcgggtttaaaa

SEQ ID NO: 15356 - DNA, 480 bp, Oryza sativa
  Clone ID: uC-osflcyp131c08a1
atcacaatatcacgtccagtttgcgcgatgtatcgcaagcaaaaggagccaatgcaaccaagtcatgcattacaacccaactagacaggcctacgagcttaggtgtgttttcgtatgacaaaacttattacaacgcgcaaggtcctagtatcccggtctcttccaaaaaactactagctgctatctctaaaagcagggcaactgttagcacatgcggtttcacttcttgacctcctcgtactcagcctctggagcctgctcgcctccgccctgagatcctcctgtctctgaaccgcctgcgccaccaccaccaccagacatatgctgcccaatctttgaaacagccttgttggccgcttcgatattggccttgatcttctcgatgtcatctgaggtcatcacagagcggagatcggcgattgctgtctcaatctcagtggcaacctctgcaggaatcttgtccctgtactctcccagact

SEQ ID NO: 15357 - DNA, 349 bp, Oryza sativa
  Clone ID: uC-osflcyp131c10a1
cattccgatagatagcaacaagcagttcaaacaccataaccaaagcgaactcaattcatggtaacatcacggacgaagaacacctaacactggatggatggatagagggcttctcgactcgagagagccactggacacgataacgactcgactcgatgataagatgattctgacacggatagctaaggataactggccacgatgggccccaccaatcagttcctccagttcccgccggagtcgccgccgtagccgccgccacggctgccaccgtagccgccgccgccgtcgacacggccgccgccgtagccgccgccgccaccggagccgccctcacggagcccgtagc

SEQ ID NO: 15358 - DNA, 271 bp, Oryza sativa
  Clone ID: uC-osflcyp131c11a1
ggaaaaactctaaaatcacccctctaattaaggttcttttattggggttcaattttttcccggggaaccgcaggggtaaatttaaaaataaatggccctttttatttttggccccaacgggggccacgaatgggccaaaaaaaaaaggggggggggggctgaaaaacccaacccaaaaggccctaagctaaaaccccccccttaggggggcaacgccaaccccgggggaaccgggggggggggggtaccccccctggtgagcccggacggg

SEQ ID NO: 15359 - DNA, 314 bp, Oryza sativa
  Clone ID: uC-osflcyp131c12a1
ggacaagcaagaagtatatatattcatccatttctcaaactactacaagaggtcgagaggaacacataatcaggagggattgcgacaatttacagcaacaggagtctggagatcgaggcaagaacaagacaggcagcagcagagctaccctcttcatttccactgaatttttacacatttggaatccatggaaaccgagccttccctcccgtcgtcgtggtgtcaccggagtccgatgagaaaaatggtcatggcgtgctcataatccggatcgctcgccggcgtcggtgaaggaggcggggcgattgttcggg

SEQ ID NO: 15360 - DNA, 90 bp, Oryza sativa
  Clone ID: uC-osflcyp131d01a1
ttgggggtttattttatgtcggagcttttttctcttgatttttttttttcatttcttatcctttttctctttttttaggacaaaaagggg

SEQ ID NO: 15361 - DNA, 313 bp, Oryza sativa
  Clone ID: uC-osflcyp131d02a1
atctaaagcggaaggtgttgactgtacatcacatcatcacacctcatttctccttttatgtataagtggtggtgcacacaaaatcacatggaataggagcttcaggtacaagggaacacctaatgaacttatcatcaaaacagtggtcattcgatacatggaatgcactcagctgagattactttgtcgtcatattttaatacaggtgggtcctttgtatagaaaaaaaggggtagtcttacactaagactaaatgaaaacagagacatctaagctacctaaagactttctcagctgcgaacttctctacttt

SEQ ID NO: 15362 - DNA, 414 bp, Oryza sativa
  Clone ID: uC-osflcyp131d03a1
acggcgggggaattccccgaatataaaaaacccctaaaaaataaaaagggccaacaacatttttgccccccagccttttttaaaaatagttttcaaacaagggcaaaatacccccccctttttgggacctggagatcgatctcacccataggcaggcgggggaacacacataacgcgcgggccctagaaagagccaggggtaaatttagggctgaccaacctttcatttgcatgggagaaccgcggggaaacaaaagctagggctgggcggaaatggcaaggggaccccaaaccccccggccgacgatgctacagggggccctaagcccaaggttgggatccagaccccgcttttaataagcgtgcccaaaaacgcgggggaagggggaccccccaggcattttggcgaaaagg

SEQ ID NO: 15363 - DNA, 409 bp, Oryza sativa
  Clone ID: uC-osflcyp131d04a1
ggttaaatcttcacttgtatcaaaaaactttgtttaatgtaactatataggattacacatcaaaagctactagtacaacttgactaaactgtagatcccctgaagcatccggggataagagagcagcctaattaccaatttatcatgacctgattaacaaattaactcttatacatgctagtagtatctcgagcaagcacgttaatgacactgcattcatgcaagtgcaagtgtaattaagctctagtcgatcttgacggaggagtagatgagcctggtgaaccagaagcaggcgtagaagccgattgtgccggtgaggaccaagaaggcggcggaggcgatgagcatgtagccgaagtagagcacgccggagacgaccttggtgatgtcgagcttggtgaaaaagtaa

SEQ ID NO: 15364 - DNA, 414 bp, Oryza sativa
  Clone ID: uC-osflcyp131d06a1
agatgcaacaggaataggtattaattttaatttaaagtacactcaaggtccacatccacataataactataagcatactacattgcagaccgaagttataagatcacaatgtgttcctagtaacaaccacaacgcaaaatttcaggctagttctttaggtcatcctctgggcagcttccttggctagaagcttttccctggctttggtcttggcttgggactttgagcccatgataccaccaccccactttttcctgacctcatcgaacttgtcgttgaagtttgacttaatggcctccaagattttgctgaactccaacttgtcttcattcttcacagtcgtcagacaaaggacagatgctgtcttcttgtgcacaattgatccaagacgagccttttcctttacaatgcaat

SEQ ID NO: 15365 - DNA, 301 bp, Oryza sativa
  Clone ID: uC-osflcyp131d07a1
gggccgagggggaaagggattaaaatggaggaaaaaattaaataatgggaaaaaattttgggggggtaaaaaagggggccttataaaaaaggggaattgccccattccaggggggaaaaaaaaaaaatttggggccacagggaaaaaagggggggggccaaagggggaggggtaaaaaaaaaccccaattttccaagggggggaaggggaaaagggggccttgaaaaaatttccccccaaaatgtgaaaccccctttggggaaaaaacggggggggcttccccaaggaaaggggacccctg

SEQ ID NO: 15366 - DNA, 364 bp, Oryza sativa
  Clone ID: uC-osflcyp131d08a1
gattctaccgaggcatttttatttaatttgttcaaaaccacttttttaccgactaccacttttgcatgggtaaaattaaccaggcaccacggggggaaagaacagaatttctaaaagggacacaaacaggccgaaacatcaacggatttccccctcactctaactacaataaatctcaccgactttcaaaacctaggcaaaatcttggcgtaaggagctgtcaaacatggtagccgaaagggcccaactcctccatgtctacacccacaagcatccatgccctctgcgactaaattggatagagctcaaccttgacaaggcccggatggagccgacaatgccttccccttagccagaccggggg

SEQ ID NO: 15367 - DNA, 422 bp, Oryza sativa
  Clone ID: uC-osflcyp131d09a1
accaaaatgtgatatggatatgattaagcaggtgcagcaaaacgtacattaattaaacaacaacaattaaccctcgggcacgcctgtgttttgttatctcgctcaacatatacgtacgtaatactttgcttgcatagcatagggacgacgacattatattcttaattgataaactcaagaacgcatggagatggatcgagagatttataaatatggagcttgcttgattgattagatgaggtcgtcctccttgtgggtctcgatgacgacgtcggacttggggtaggcgtggcaggtgaggacccagccggcggcaacctggtcgtcgtcgaggaagctttggtcggactggtcgatcttgccggagaccaccttgccggcgcaagaagagcaggagcccgcgcggcaggagtaaggcaggt

SEQ ID NO: 15368 - DNA, 342 bp, Oryza sativa
  Clone ID: uC-osflcyp131d11a1
aaccacaagtctatacctaacataatgccaaaaagggttaacataaaccaacacctgaagcacaacctgcttgaattctgaatcccagataggcaagctacaaaatttgggcctagttactcagcacagagttttatgatcattacggaaacaactagttgcaaacttctgttctcattcctcatcttcctcctaaccgtaaccgccaccgccacttgccttcttctggttcttccttttcaccctaccaggggggcctccaccgaatgggcttgtcagtgagaagtcaatgtgctttttagactcaaccctcaccatgaacgacgggatgttgacaatttg

SEQ ID NO: 15369 - DNA, 335 bp, Oryza sativa
  Clone ID: uC-osflcyp131e02a1
aaaaaacaggcaaagaaaaaactggacgcccctttttaaacaaaaacaaaaaaggggggaacaacacccgatcgaccattttggggaaggggaaggtctaaaaaccaaagggcccccttaaaatggggggggaacaaatttttttgggggcttttatttgggccaaaaaaaaaggggaaaacccaaaagggaaagaacgcaacttttttaaacttttccatgggggaggaaatggggaaagggggggaaaatgtaaaaaataccaacccttcgggggaaaaaaatccccggaatattgacccccaaaaaccacattttttttttgggggggaaaa

SEQ ID NO: 15370 - DNA, 94 bp, Oryza sativa
  Clone ID: uC-osflcyp131e03a1
tttttttttttttttttttattttttttttttttttttttttttttttttttttttttttttaaaaaaaaataatttaaaaaattttattaatt

SEQ ID NO: 15371 - DNA, 347 bp, Oryza sativa
  Clone ID: uC-osflcyp131e04a1
ttttttgttttgttttttttttttttttattttttttttttttttttatttttttttttttttttttttttttgataaaaaaaaaaaaagcaaaaaaaaaaaggggaaggagtaagagaaattgggaaaaataaaaaaagagaagagggcgaaaaaaaaaaaggaacaagggggaaaaaaagaaaaagcaggaaaaaaaacgaaagaagaaggaatgaagaaataacgagggggaaaaaaaaaagaaggggaaaaaaataaggagtaaaaaaaagggacagagaaaagaaaaaaaaaaaggcaaaaaaaaaaaggaaatcaaacaaaaaacaataaagggggtatgg

SEQ ID NO: 15372 - DNA, 329 bp, Oryza sativa
  Clone ID: uC-osflcyp131e05a1
ggagggggaaattaaaaacctaaaaaggaaaagaccctgggagggggtataacaaaacgaaaaaagggggtttaaaaccccggaccattaattagggcacaaaaagggggggacaaaaagggttcctttaaataaatggaataaaaaaatttgggtagccaggcaaaaaaaaacgggggaaaataagggcctaggaattaaaaaaaggggggcaaaaaaaaaagggccaaaacccaactgaaggggggggcaaaaaaaatgggggggacaataagggggggggccccccaaaaaaggacaggaggggggcgcattttggggcctaaaat

SEQ ID NO: 15373 - DNA, 366 bp, Oryza sativa
  Clone ID: uC-osflcyp131e06a1
aagcttaaaccctttttactaattttgccttagcacaaggttaataggtacagagagacggtcaatgcccgcataagtgagacgagtatggatatcgcggcaatgcgaaggagacgaaaacgagtgagtcaacccacacgggaagataacattgatattgcatttgccaaagttcacactagccgacgtggttctttcctctggagtagatcagatcagcggatgccccattttttgagcaacctagccagggccctcgtgaaccttttcaacttcgactttgaattgcgcagccgcgacattttgtcgctgcctggctcgctgcttttcttcttgttgctgctgctgctgctgctcgtgctgcgc

SEQ ID NO: 15374 - DNA, 405 bp, Oryza sativa
  Clone ID: uC-osflcyp131e07a1
gagggcaatggcatggatgattcatctgcacacccgtgcggtacatgcgagacgtgcaaaactatttgcaccaatggttttaaaacaacaacaataataaatacaggtacagatggaacttgaaacaaaatgatagcttacaattacatgcagtggatgctatgtttagctaatctggacgtcgccacaaatgctgtgccgtatgcagtatatcaagatgattaatcaacggattatttgctgatcgatatgcttaatccttcgccaatttggatgtccaggggtcaaacaggtgtccgcaagagaagggtggcaaccagagattacaatgctcttgagcgattggggaagcttgggcagtgtcatcatgttgggacactcctggacgatcaattccctgagtgt

SEQ ID NO: 15375 - DNA, 484 bp, Oryza sativa
  Clone ID: uC-osflcyp131e08a1
acaataagaagatttatacagtatgacagtaccaggaatctcaatacaagagaaacaaaaaagtggaagtctgaacatcaatgtgcataatacattccaaaacctcgctagaaataaccgcttgtgccaaattgagggtaaaaataatatacacatggatggacaagaaccagaacaaagctcggaacaatgtagtgacgcccttggtgctgcatagagcagaccatgtacaaataaagaataccctgtaaacttgggataacggcagagtaagccaccggccaatcgtcttcgaaacatgaccaagattgctggcaaacatggcctctcacgtaccatgtcaccaatcaagcaaaactagtaaacatgcagcctttgtagtgggaaagagattcatgcttcagaaaagatcatgctttcttttctgtagttctttgttccaccctggctgctggtagaactcttctttgttataccaaataca

SEQ ID NO: 15376 - DNA, 398 bp, Oryza sativa
  Clone ID: uC-osflcyp131e10a1
cctgtgaaaacacattttttaaaaaagataggtactcgagttctttttttggcaaggaatggaaacgcgaaatccaaacatgctcagcccacttgggcaggttaaacaagagcggttttactggcctttaggaagcctggtgtatgataccttccaatacctcctcaagtcctgactccaatacttactcaagtactggctaaaaaggaactctgggcaaatacttctacaccattacaacaaatgcaagggccacagttagacttacaggaaaatgcagataagtacaggtgaccatggccgactatcatcaatggcagaaaaaggccaaaacagtattttataaaaagaatgagcaaattcaaatcaatgttgagagaatacctgaacatggggtt

SEQ ID NO: 15377 - DNA, 341 bp, Oryza sativa
  Clone ID: uC-osflcyp131e11a1
attatcatcgccatcgccaggaagcacagcactctttcttggagggcccatgcaaaacaccaccagtggcatacatatatagtacggcaataagcaactcgatgatgcatcatcataacagggccaacagaggactactacaggagactattctcaacaattggcggataattaattaattaaagatgacactactcaacctccggatctccaaatacataaacaaaaacccatcaaccatgattccacttattgcttggataaaaagaattggttttaccacataccgttctcctacaccaaaaaagggtttcactccaccactggcaccagctaaaact

SEQ ID NO: 15378 - DNA, 390 bp, Oryza sativa
  Clone ID: uC-osflcyp131e12a1
gacacaccttctatcaaatgtagatttatagatgaggtcactattacaaccattcagaaatttgggctcactaaactgatattttctacatagaggccaactcaagttcacatgggcaatgaccattttaacaacaaacagcccattgctacacaaaggttaatttggtttggcctatgggggtcctaacttctcccctcaagtacttttcctaggactaggtaagcagacacttcaatagatgtgctgccagctgactgacataggaaactactgaattggttttcctctagcaccggatttcagcgaggagtccgaacctccaatggtaacattggagatgtagcgctagtgcttgtgccgctcagttgatctgatgctgctgacttt

SEQ ID NO: 15379 - DNA, 367 bp, Oryza sativa
  Clone ID: uC-osflcyp131f01a1
actgacagacagaattgcaggcttgcagctatacgaaagaggagctgaacaaaaaagaaggaaaaaaaagaaacccctatgctgattttacaacacaactatgaaatctacaagactacaagcagcattagccgacgcacaaaagatctcagcattcacataaagaaaactgcgttatgagccaatcaatcgctcgtatctccaaagattctgctatagacagttttagagataaattaattgcattctccaagctgtcaggcaacgcaaagtatgagcttgtaagaactaaactgaccgccccttaacgcagcaaggggcccgctcaagagagcctccattcctgaagtgttagttccacaattgt

SEQ ID NO: 15380 - DNA, 129 bp, Oryza sativa
  Clone ID: uC-osflcyp131f02a1
tttgtttgtttttttttttttttttttttttttttttttttttttttttttttttttttttttttttttttttttttttatttttttaatattataatttattatatcttttttttattttttataaac

SEQ ID NO: 15381 - DNA, 492 bp, Oryza sativa
  Clone ID: uC-osflcyp131f04a1
tttgtttttttttttttttttttttttttttttttttttttttttttttttttttttttttttttttttttttttttttttttttttttttttttttttttttttttttaaaaaaaaaaaaaaaggggaaaaaaaaaaaaaaaaaaaggcaatataaaggggggggtgtaaaaataaaaaaaaaaaataaaaaaatgggttggggggaaaaaataaaaaatccaggggggaaaaaacaaattttaaaaaaaaaaaaggggggataaaaatttaaagggcggtgtaatttttgggccaaaaaaagggggggaaaaataaaaaaggtgggaaaacctttttttggtaaaaaaaaaaaaagggggtataaaggttttaaaataaaaaccttaaaaaaaaataattgggggggaggtaaatttttgaaaaaaaaaaagggggaaattgaggtaaaaaaaatttttttttttaaagaaaaacccagggtttaatttt

SEQ ID NO: 15382 - DNA, 334 bp, Oryza sativa
  Clone ID: uC-osflcyp131f06a1
ggacattgattttgagaaatttaaagggagtttttttttaaacatgggcttttaaggaaaaaaacatttttataaaagtttcacctaaaaatttatttatatttccggaaaaggcgttttggcttattagaaaaaaagccaaacgattgggacctcggggtttcggacccttggtgacggggaggggccgtttgggcccttttaaccgggggggaactggggaggatcataaaaaacgggcaaaaggtccttcattatccaccacacacggggggaccaggcatgagttgaaggggtaaaacaagtaaaaatttggggtttggccattgggggg

SEQ ID NO: 15383 - DNA, 81 bp, Oryza sativa
  Clone ID: uC-osflcyp131f07a1
accaaaaggcttttagctttttttaggtaagaaaacggtggcaattgaaattttttcataagaccttggcaacaggcgggg

SEQ ID NO: 15384 - DNA, 406 bp, Oryza sativa
  Clone ID: uC-osflcyp131f10a1
actatcagggagaaaaatgatagtattaattttattgtagccgcgtacacagcctgatagtctatagcatttatgtgtgtaattcagcatctatttacagcgtacctagctatatatactaacaaataaaaaaaagtagctactgtttctccttgtgaatatcaagttgcttgtaaggttggatcatctggctcccttcacaatcctaaattggtcctggactgccgacgtattcgagtttacaaactgaaccaacatatcagttttcgtcgcatgtaccctggcatatccaaactctgaaatccttgataagctccagctatgcagaccaatcttagggaagccatccaagttgaacccccctgcttcaacaacggtatgaacaggtgcggcgttattgctgtta

SEQ ID NO: 15385 - DNA, 448 bp, Oryza sativa
  Clone ID: uC-osflcyp131f11a1
acacaatcaggtccattgtacttctttcatcaaccaaccagataacattgttttacacaatctgaacgaacgaagcaaatattcgggtacgcggaaagaggagaacgtcgcgcgtctcaccgcagcctgcatgaaagcaatggacctcaccgccgttgctcgccggagatccacactcacttgccggggacgaagttggtggcgtaggcccatgcgttgttgttgacggggtcggcgaggtggtcggccaggttctccagtggccccttgccggtgacgatggcctggacgaagaacccgaacatggagaacatggcgaggcggccgttcttgatctccttcaccttgagctcggcgaacgcctcggggtcgtcggcgaggccgagcgggtcgaagctgccgccggggtagagcgggtcgacgacctcgcccagcgggcccgccgcga

SEQ ID NO: 15386 - DNA, 416 bp, Oryza sativa
  Clone ID: uC-osflcyp131g02a1
gacgttccaaaattctagtattacacgggaccaaatcaacgagataggtttgatcaaatcgtccccagtataaaacaagcttgatcttctcaagctagtgtggtggtgtaaaattacaatcatgatcaagagagtagtacagtaattaatttaattacggttgctgcatgcagctgagctgcgtagtgatgaatctgtatatgtctaggtgaccttgacgccgttgtatctgaggatctcgccgatgagctcccccctgccggagccgacgtagcggccgacgatgtcgccgtccctgatgaagaggaaggtgggcaccttgacgacgtccatgtcgcggaggaactccatgcaactgtcgttctcgtcgccgttcatgcgggcgaagacggtggtgtcggccatggtgcgcgaca

SEQ ID NO: 15387 - DNA, 355 bp, Oryza sativa
  Clone ID: uC-osflcyp131g04a1
tttgtttttttttttttttttttttttttttttttttttttttttttttttttttttttttttttttttttttttttttttttttttttttttttttttttttaaaaaaaaaaaaatttttctccaaaaaaaaaataaaattaaaaaagagggaaaaataaaaaaaaaaaggggtggtttattaaatattcaaaaattgtaaaaaaaaatattttttatttggttaaaaaaatttttaaataggggaggaaaattttgaaatagaaaatattttcaaaaggggaaaaaaaaaaaaggtttaaaaaggggggtgttaaaggagaggttttttttattaaaattataaataaggggg

SEQ ID NO: 15388 - DNA, 274 bp, Oryza sativa
  Clone ID: uC-osflcyp131g05a1
aacaaaaaggggggattcaaaaccaaaaaaaaaaaaaaaaaggaaaaaaaataaattaacaaaaaaaaaaaaaaaaaaaaattgagcctttttaaaggaatggaaaaagaaaaaaaatcttaaaagaaagggaaaaagtaggagaaaaacaccttgggattaaaaagggaaagaaaaaaaaaaaatgggttgtaaaaaaaaaaagggtgtaagaaatttgaacggtaacaaaaaggaggtggaaataaaaaaaaattgtaaaggttttttttaa

SEQ ID NO: 15389 - DNA, 376 bp, Oryza sativa
  Clone ID: uC-osflcyp131g06a1
aacaagttccagggcatgccaacatatatgaccaaaagaaccgaacttccagttcacaagttccagggcatgccaacagggcaacatatatgaccaaagggcaacaggcagccaacctaaggcaacagacacagggaacatttactagagttccatggggcctaaagttcaggtaaacctacataattaacaaaagactacttagggggacaaccacaaccaacagttatccaagttcatggccatgaccatccaggtaagtttagttacaaaatatatccatagttttaggaatgtacaactagtccgctgtcatgctaaaagttgacaatggccccagatgcagcaccaaccccaacatggttggggcctgagt

SEQ ID NO: 15390 - DNA, 462 bp, Oryza sativa
  Clone ID: uC-osflcyp131g07a1
ggttagctaggttgctatgagcctctgatgatcatgccaccatctgctcctgctccggccactgcgcgaatatgtcgccggcggcgtggccgtccttgacaagagagttcacccatgacacgtccggctccgccgccgcggcgtgcgtcgccaccggcatggcggattggccgcggaacgcgaacgacgccgacttgcggagcttgtgcagctcgtcgccctggacgccccagtccagcttgccgtccggcgagccccagtccgagagaatggacggcgcgccggtcgtcgccggcgacatgagcgaacgcgccgccggggcgcggcctccgcggtcgatgaagctctggctgcgcttggcgaacgccgaggcgcgggagctcatgatcgccttcgccatggagtggtccagcccgaacgcggtgttcgcgccgcccaccattggcgaggtcggcatgtgca

SEQ ID NO: 15391 - DNA, 393 bp, Oryza sativa
  Clone ID: uC-osflcyp131g08a1
ggttcaaatatggattgcaatttgaaaatctcaacaagaatcatcatcgcccgacaacttgggaagtaacgtttctcatcagtgcaccactagaacaaagattagccagcacacaaaatctaagatatgtcgtgagtgtcctgtccttaggcagcagtaacaggttccgatccttgcttcgattcagctccagatccagctttgccgtcttcggctggctgcttggtcatcttggcgaacatattgctgtagaatttggcatccttcttgttgtactccttgaccttttccttgaggttcttgtatgtcaacttcacattcctgttatcaggatcaatttcaagtgccttcttaatatccacctctgctaactctaggtcaacaagttgcatg

SEQ ID NO: 15392 - DNA, 376 bp, Oryza sativa
  Clone ID: uC-osflcyp131g11a1
aaaatcgcgcacgttttatctgtccgtgcgaaacatggaagctggatatcaactgttcgaaatggtaacagagtgacgcaacctttggcttcggcagtgccagtgacactgaaactaaatcaacaaagcagttccacgggcagagacctctcacttcctagtttactgtctggtttgtctctatgatacaacaccggagcaggcaatacaaccgatcaacataaggccgttgaaacaacataacagcgggacaaattaatgaaatacttgcgaacacatgcaaccaaggtgaaacaatgatctgagaaattttgaacgggaacagaatggagatttcaagcggacctaaaatttggctgccacttctagttgcttt

SEQ ID NO: 15393 - DNA, 378 bp, Oryza sativa
  Clone ID: uC-osflcyp131g12a1
ggggtaccttatggagccttatttttttcaagggaaagcaggccttacaatatgcaaaggaatttttaatgggcaaagatcaacaaatcccgggaaagaacaacatttagtttgggaaccattcaaagcacaaaagttgttgttcagggtgggaaaaaacagagtttacgggcctagcaaaaggaaacattctccatttggggaatcggcacaaccaatacacaccttatttggaaatactaggaatgggcaactaaaaatcccaggggggggacataaattttgccaagctggtggaccagatagaccccactcaacttttgtgggttccggggaccttggtctcccaccaggagatgaaccttagggtggccccct

SEQ ID NO: 15394 - DNA, 303 bp, Oryza sativa
  Clone ID: uC-osflcyp131h01a1
cacagaaaatccacggatcccaaatgttctcattgattgatagcgatatcatagaagcagcgacacgaattaagatttaaaaccaaccccaagaaggatcgcagatccaactccaccgaatcgatccaagaactccgcctaatccaaccaaaccatgggcgatcttattttaccaacacgacacgaacttataaaaagactaacaccaccaccaccttcttcttatttagggactttgacgactcaagacgactgatactggcgaaaggcgaaggggaaccagacaaatctaggagaggtggc

SEQ ID NO: 15395 - DNA, 452 bp, Oryza sativa
  Clone ID: uC-osflcyp131h02a1
gacacatcaatagtagcaccagtagtgtaacaaattgggaatacactgtgggagtaggacagggacaatgacacaggaaggcagaagaggacgcatgatgaacacatcaacaagagagtaaaattcaggacgaaatgtcgacaagatattggaatcttggccacgcacgcaccaattcttgggtgacgcggccggaattgaacggcacacccgacccaacccaacccaacccaacccagcgaactaaacggagtcaatcatctgatgacctaaaaaaaagggaaacaaattctgccaaattttattggtttttctttcccgtttgctttctcttttattctgcttgtctctcttttcataaattaaaggcgtgtgcacgttttgtacaccggcgcgccggtcacctgcgcgaatgcgccgggtagggcgcgaaccgcgttcttcgtgtgccg

SEQ ID NO: 15396 - DNA, 421 bp, Oryza sativa
  unsure (1)..(421): unsure at all n locations
  Clone ID: uC-osflcyp131h03a1
acaagatattggctagttcaattttatactagccagtgtcatacatataatggaggtagtatatagtacttcaaatacacacaacacaaagacaagattacatatgggttaaatgctatttatttccttttttttctcacctttacaaacctgcaaactcatttctgcaaagaaaaaaaaatgaaaatatgttgcagagtattcctaattgcctactatgatacaagaaaaaagaaaacacacactgaatttcagtttcaggctttcacactgaatttgaggccttaactgaatttcaggcggtttcggaggaggcgatctcaagcttngnncaccacaggggcttttccctcggcgccgcctgctccggcgacaaannggngatgccccttaccagcctcgccaccttgcccatgcttat

SEQ ID NO: 15397 - DNA, 271 bp, Oryza sativa
  Clone ID: uC-osflcyp131h04a1
ggggggaaaaaaaaaaaaaattttttaatttttaagaaaaaaaaaaaaggggcaattaaatatatataaaaatttgggaaaaaaaaaaaaaggcggtttaaaaaattgtttttttttaaaaaaaaaacaaaattatgggataaaaaaaacaaaaaaaaattggggggggaaaaagaaatataaaccccccaaaaatctccctgtattttttaaaaaaaatttaaaaaggggaaagggggaaaaaaacaaaaatcccaactctttttttttt

SEQ ID NO: 15398 - DNA, 380 bp, Oryza sativa
  Clone ID: uC-osflcyp131h06a1
acgcgcgcagcatgcattttatttaggcacgggccacaattcatacatgtataggggatacgtctcggtggcagacactcacggtatagtagggtagttgggtgtacagggatatagtcatatttgggcgttttttaatgccgttcgttgacttcgttcacagggtcagggtcgggtaggcgatatcgagggggacgccacacaggccggggccaccgacgtcggggagaatccggatgtagccgggctcgccccatgactggccccatgagttcttgatgggccaatacttggcgccggaagacgcgttggtgccgtacccgacaacggtgacggcgtgcgctaggcgcgtgccgaacgggcccgtgtaaacgccaccc

SEQ ID NO: 15399 - DNA, 109 bp, Oryza sativa
  Clone ID: uC-osflcyp131h07a1
cgaagtcgtcgttgtcctccaactcctcctccggctcacatacctcgccgtcgaaggctcccagtcccagcaagtctcccgagaagtccggcaaggctcccgcggcttt

SEQ ID NO: 15400 - DNA, 356 bp, Oryza sativa
  Clone ID: uC-osflcyp131h08a1
gatgcgaccgaggcagctttattcaacttgtccagaaccacttttttaccgactaccacttttgcatgggtaaaattaaccaggtaccacgggttgattgtacagtatttcttaatgggacacagacatgccgaaacatcaactatttccccctcactttcactactctccatataaccgtttttcaaaaccttggcaaaatctggcgttggagctgtcaaacatgttagccgtcaggtcccgtctcctccatgtttacagccacaagcatccatgccctttcctactaacttgtttagagctcatccttgagaggctcggttggcgccgactctgccttttccttcgcctgaccg

SEQ ID NO: 15401 - DNA, 267 bp, Oryza sativa
  Clone ID: uC-osflcyp131h09a1
agaataaccaaaacataggaggtttcatttcttcttctcaaagtagtgtagcatctttccttctttcaccattacataagcttaagcaataacagataacaaatcctcctcctcctctaggtaaaatattcaaacacaatacccttataagtacttattattaggaaagtagcgtgcatgggcataaatggcagcggggggcaggttaagaatcacaatgctgagcagcgaggaaacaaaacaccataatgggacagagcaaaagcc

SEQ ID NO: 15402 - DNA, 445 bp, Oryza sativa
  Clone ID: uC-osflcyp131h10a1
agagggatgaataggtatttccaaaaatttcttaaacttacaaacagcttagaactaactggatagtccggtaccactgcagacaatctgactatagagcagtcggatagtccgactgcatcagaacaatccaatcagagcatcgccagagaaaaactataagtgacctggaaaatagaaatagaaatgaaaaaataatggtggtggtggcaggatgtagcgtgggttgatcgtttagaagcacgaaagctccttgaggcagccggtggcagtgcccttggcattcttgcagacggccatggtcttgttgtttttgccagagtactcgaccttgatgtcattcaaggtgacgccggtgcacggcagcttgtcggagcagaggaggctaacagccttgggcgtggaggaggtgcccgttttgttcttgaaagtgatgtccttgatg

SEQ ID NO: 15403 - DNA, 470 bp, Oryza sativa
  Clone ID: uC-osflcyp131h12a1
aaaaaaattaaaagctaggaatttccatatttatatggttaagatgaaagtaccacacagatattcactagctaagcataaaacttttaacttaattagtacatatcacatggttcaaaatacatataaaatagataaacatgcaaatagctgcttattctgcggcagcgctgcagacagctgagaaggcacaaaatcctgtttgtgctggctttgctgctgaaggctaaagccccaactgaacagggcgatgatcggctattaataagtgatccgaacgagactttcgatgaacggcatggcactgaacaattccgacttccgtgccccctccccctggtacctcgtgcgatccaatctacatagtatcttgagcttagaagtcgccagatcatagcgacatatattattacctcgcaacaagatgatttcatcgctgaaaggaggaagagccatcacagagcaaagac

SEQ ID NO: 15404 - DNA, 406 bp, Oryza sativa
  unsure (1)..(406): unsure at all n locations
  Clone ID: uC-osflcyp137a02a1
aggtcaagaattttgcacagcactgtaatatatttacttcgatgaatcagagacccgtcgtacacattttgggccagaaacacggcagatgtcagttaatactagatggcatatatacagttgacattggagggcagaagaataangtgtacggtacacanaaatntgcctctggtggttttttattggcaagacttttggagggggaaaggtnnnatggtttggttcactttttagcctcttccgccaatcaccttgatataaacacgtttttttagcgggcgaatcccaccaacgcttcgaagcagttttgagcctctttcattcaccaattcaactggggcaaaaatcatttgaagaaggcggaatcctttcagcttggtttataggtaggaatagttgcaat

SEQ ID NO: 15405 - DNA, 93 bp, Oryza sativa
  Clone ID: uC-osflcyp137a03a1
cgcttacacatagatagcaagcagtctagtaggggaccaatccggccttttgcacgcatacagtcacttacacgcttactacgctttttttta

SEQ ID NO: 15406 - DNA, 374 bp, Oryza sativa
  unsure (1)..(374): unsure at all n locations
  Clone ID: uC-osflcyp137a04a1
ggatagccatagattaattaagatggtctccgcaaaacaaattaattaatactcatacatatataccggcaaaaaaggaaagaaagcagagatggaatcagttcacattgggagtaggtactgaaagtcgtagtcgtatggaatgacgtcgacgaggtgatggatgttgagacggtgttccggaccactctgaggcaattcaaccatgngatnnttcctgagagaccaggacgtggngcagctggttcgcaaatccagcgaacaangcgagtccaggtcctttgcgaagtcgggcatgttggagtgtatgaggcttgggatcatcagccttctccttggcgatgtcaccaccagcgatgcctgcagatactcca

SEQ ID NO: 15407 - DNA, 314 bp, Oryza sativa
  Clone ID: uC-osflcyp137a05a1
cgagtaacagatgtttccattaaaaaactttagaatacacatatgcagggtgttgaggccgatgatcaagcaatgaccatgcggcagattaatgcagaccgtaaccacaatctcaggtacttaaataacgtcatacccggtaggcgggtttacaaaacgttttttcgtaaacgttttttagcccgaaattttcgctcaaagaaacaattgtgtcttgctttagttttgacaggaattcaaaacaagaataatggaacgattatctcaaaatccaccgcttggcacaagccttctgcattccaccaggggaacac

SEQ ID NO: 15408 - DNA, 158 bp, Oryza sativa
  Clone ID: uC-osflcyp137a06a1
tttttttttttttttttttttttttttttttttttttttttttttttttttttttttttttttttttttttttttaggggaaccgggaaaagggattctgaaaaggcggaaaaaaaaagggggctaaaaatggaaattaaatttggttttttgggttt

SEQ ID NO: 15409 - DNA, 252 bp, Oryza sativa
  Clone ID: uC-osflcyp137a08a1
ggttaccatggcaggaggatgtttattcatgaaatagcaccagacagtgtaccttcaccaacaacagaaactgtttcacttcccagtcatccacatcaaaaagcctgagtacatggagttattaatatttaccactaccaggcctgtccagaggggaaatccccaaaagcaattgtgaggctgaacaggtaacacgaccaaggtccaaaaattttaagcttccacaagcggtgttgtgatgagagaacttac

SEQ ID NO: 15410 - DNA, 108 bp, Oryza sativa
  Clone ID: uC-osflcyp137a10a1
tgagttttgccgaccttattttttttcgggagggctgaatttttgcttgtatatgcatataagacgcaatctactggcacttcgaggcagtaggtagagtgattgaca

SEQ ID NO: 15411 - DNA, 196 bp, Oryza sativa
  Clone ID: uC-osflcyp137b02a1
ttggactgcctttcctttttttttttaaaaaggtaaactctgcataataatattattaagacattatagctgatgtcttttgatcacactgcgatcaaattatgcatcataggcagcacaactgcgcgtaaggaaaaagtcgaggagatatatttcttgttattacttaatacagccattcacatataatcgaacc

SEQ ID NO: 15412 - DNA, 70 bp, Oryza sativa
  Clone ID: uC-osflcyp137b04a1
cattgggctttatttatgagaacccgaaagaaagacccgaaccacaacgtggcatcaacagattacaaaa

SEQ ID NO: 15413 - DNA, 69 bp, Oryza sativa
  Clone ID: uC-osflcyp137b05a1
cccctgggtttttatttaatttcattccgaaggatagcaacaggcaggttcaaaccccataaccaaagg

SEQ ID NO: 15414 - DNA, 384 bp, Oryza sativa
  Clone ID: uC-osflcyp137b06a1
attcaaatatccatccgttcagcagtttttttcataattttttttgaacgaatcgatgagaccgccaatttaattgaatagaggagttttttctccacaattttactcggatcatctgcaaggctgatgttccttcacgaaggaaaatcgaccaacaactaacattacatgtagttctttttaaaaaaaaaactagcattacatgtgtgtatccgacgttcgtgccatatcaattttaggaggtagctcttgcagataaggttatggcatgaagccaatcatcggcgatgtagtggtaagctgcctcggttaagtggacgccgtcccagtacaagctcttggatggatccacacaggtggtcgcaccttcatcgccgcagatta

SEQ ID NO: 15415 - DNA, 384 bp, Oryza sativa
  unsure (1)..(384): unsure at all n locations
  Clone ID: uC-osflcyp137b07a1
agctgaaactagtccgcttattcatattaagattgggtttagttcaacaaatattggaccccccgaaatgaaccaatagcattattatacatcgcatttggagattcattattatacccaaggaagatttttcaggccggcggaccttggtgccgcattctagaatatggttgatcgctttgccacccacttatgtaaagaacctgagctagttcctatattgatcactggcgtgacactaatgcacacccacagacccacttatnttggatagagttataggggatacccacagccctggctgcatcagggaattttttcagggccattgccacgtcaactagaactattttaactctgggaccacggatgccatagcaatag

SEQ ID NO: 15416 - DNA, 125 bp, Oryza sativa
  Clone ID: uC-osflcyp137b08a1
aaaccaaactgttgtttatcatagtaaatcttcccggcgaatcagatgctcagaatccatagtgttcttcagcatcttacaacttacaagatggcgcagatttacaagtcgcaacctatcttaaa

SEQ ID NO: 15417 - DNA, 66 bp, Oryza sativa
  Clone ID: uC-osflcyp137b09a1
ggcaggaacagcataactttattccatgcattcattgattaactgaaaacccaatagcaatacagg

SEQ ID NO: 15418 - DNA, 345 bp, Oryza sativa
  unsure (1)..(345): unsure at all n locations
  Clone ID: uC-osflcyp137b10a1
aacaatacgctatgcccaagacaagtcaatactacaacatctgtggcgagtacagaggtacaaaagtcaggcaccgtaagcctttcgattaaaaaccaaactgaaacacgcacgattttttaacanccccacgaaaaacaantctnngatacctagctccttttggtggtggaaccttaaagagcttnntatcttcccaaaanncatccacatcatnnntatctgtcatgactattatnagtttcgatnaccgttaaaaagggcagcgtttcacttcaggggattnatccgccnnatgtcttccttttcaatttnnaagcccggccaagaatgctttcaanngcc

SEQ ID NO: 15419 - DNA, 123 bp, Oryza sativa
  Clone ID: uC-osflcyp137b12a1
cctcagattggtttcctttcttattttaataggcagggttgcattcgatcgagcaaacatggtcttcgtaaaacaaattaattaatactcatacatatataccggcaaaaaaggaaagaaagc

SEQ ID NO: 15420 - DNA, 57 bp, Oryza sativa
  Clone ID: uC-osflcyp137c01a1
gaagggagaacgcttggaagggtaaacgtttcttatttagcagaaaacagggttggg

SEQ ID NO: 15421 - DNA, 189 bp, Oryza sativa
  Clone ID: uC-osflcyp137c03a1
gggggggggggaaaaaaatcctttttgaggaaaaatcaagcgatttgcttttttattgatcttacatatgggggctcaaggtgggtcaacacagatagttaagcaaacaattctgggccattacacgaaaaagcggagggtaacctaagccatattttctggggacttggcaagaaagtacctcaattt

SEQ ID NO: 15422 - DNA, 406 bp, Oryza sativa
  unsure (1)..(406): unsure at all n locations
  Clone ID: uC-osflcyp137c04a1
atgagtacagagtactctacttcatatctgcgccaaaacagaacaaattagagttagagtgactctccgtgtagcaaaatttcactgctgcactacagcaacatacatactnttccacgcgccacaaatcgcatacttttccatgangccatacanaacctctcnnattttgatgagaatanncctatacaccttccaggggtttggtttcaaacttcgccgcgacgaaaaattncagctcggttattgtttgggtgtctcctcccttcttcttttaggggtggctatgttnnctcaccttttnnacatcatcannaactaatgaacgattatttacgttggaagtattgggccaggtcccatcacttncctcttatttgaagctatcgcctttgcttgcttcgca

SEQ ID NO: 15423 - DNA, 325 bp, Oryza sativa
  Clone ID: uC-osflcyp137c06a1
ggaaaaggaaaaaaaaaaactccccttttttttaaaaaaaaaaggttttttaaaaatttttccaaaattttaatattaaaaataaaaaataataaaaagagggtttataacgtaaatgtgaaacaatttataaaaaaaaatatgggagaaagaaaagaaccaccacaaaaaggagggggccttgttggggaaagaggaaaaaaccccccggggggtggcggttttaataagaacccgtgggtcccggaaaaaccgctccccggcccggggttaagggaaaacacttgaaaaaaggtgggttttaaaaaagcccttgggggggggg

SEQ ID NO: 15424 - DNA, 126 bp, Oryza sativa
  Clone ID: uC-osflcyp137c09a1
gacccaaaaatgccgttttcatgtctttttacaattacatcgggttaaccacatttcctttttgtacacattgcacacactccttttttccagggtccacatatatacattgcactttataccttg

SEQ ID NO: 15425 - DNA, 155 bp, Oryza sativa
  Clone ID: uC-osflcyp137d01a1
tttggtttttgtcaggatcagattttgaaggccttttcgacgctgtcgcggcgcgcgccgacggtcttgtagatgcgcatgaactcgcggaacgtgacggtgcgatactgcggctggtccgccgtacttcgacgaggctcctttcgccggttccg

SEQ ID NO: 15426 - DNA, 142 bp, Oryza sativa
  Clone ID: uC-osflcyp137d04a1
ttttttttttttttttttttttttttttttttttttttttttttttttttttttttttttttttttttttttttttttttttttttttttttttataaattaaattttttttattttttttttttttatattttgggggaag

SEQ ID NO: 15427 - DNA, 429 bp, Oryza sativa
  unsure (1)..(429): unsure at all n locations
  Clone ID: uC-osflcyp137d05a1
ctatgaatcaccagccttttattgcatcttccccttcgtacaacatgtgacaaccgaatggctgcaacaatgaaattatagaaccctctctgtaacgaccaaataatcggagagaaaaaaaaaaggcntcctcatttctactacctacttgacttgatgtacagtgtacaggagcgcaatcgcagtgcccnatcgtcgccacccaccaagttttgaggaccaaccagcaagaaaagccctagctttccattttaccaactctacaaaccaagtgcccactatcaannacaatcgggcaggttcacaaggcngtcgttctgggtgtttttggctctttgtcggctttgctgtgcagttgccggtgccagtgcagttgcagttgcagtggctatttcttgtttgggcccttgtcaaggatcagattttggt

SEQ ID NO: 15428 - DNA, 279 bp, Oryza sativa
  Clone ID: uC-osflcyp137d07a1
aaaggcaagaatattattcataaatgacgcatgatttttatcaaaacgcttgcaaatgatatcagataagtagagtcaacaagacaaaactgtatctgccaaagcacacctccccaactccacccaattacggccattatttcctgggccaaaagcataacggctttcccatttccttcccctttcacccagtctccaaactcattaaacccccacaaacaaaatccttcctaaagtggaccggcaatattaaagatgattgaaaaacaaaagcaagga

SEQ ID NO: 15429 - DNA, 381 bp, Oryza sativa
  Clone ID: uC-osflcyp137d09a1
gaaacgaatactggttttgctggatttcactggatgttgttgaatatcacaagcttagagcacaacaacgttgcatcaaataaacagaagaaacagaaaacagctaggtacatctatgacctttggaggtcaatttcttattgttgttcgaggcgaatgtgtatattacatggggagaacaaaggagcgcaactgcgaggacgagtatgcatgcaagtcgtcttctgaacccaaccgtcaaagtccacagccacttggggactaaagacaaactagggttgcttgagtttgatggggatggaaacggaaagcaaatgggccagtcaatcttcaaacccaagttcctgtgatcatctgattcatccagggtgatgtgtaacc

SEQ ID NO: 15430 - DNA, 380 bp, Oryza sativa
  Clone ID: uC-osflcyp137d10a1
aaccttcggactgactagcaattcagtcacaaaacacagtgcacatgttatcagaagttcacttatcagtacgagaattcgaacagagactggtccgagatattcttgccaagctaaaatagacgggcgccatctcaggccttggaaaacataaacatgttatgtagcatgcatatatacacacatcgccggataaatacgctagttaaaagctacggtcttcttctctcggcgtatgcgtccacctcgtcattaggaacgtgacaacaacacgtttaggccgacttcgcgaagccaaccctcatcttgccgtagtcgaacacggtatggtaggcacccatgaaaacgtcacccaggatccagagaggaccacggggagg

SEQ ID NO: 15431 - DNA, 88 bp, Oryza sativa
  Clone ID: uC-osflcyp137d12a1
ttggcttttcctctctttttttttttacgaaagttatggagtacagagtacctctactttcaatatctggcgccaaaactagaaccaa

SEQ ID NO: 15432 - DNA, 226 bp, Oryza sativa
  Clone ID: uC-osflcyp137e01a1
caacatgcagaaaccatatatgttccgttgaactgcaagctcaattcgagtcagaaaaccaaagaaaagcaggctaattataccgtgtgcgcgtgtgagtcactcgggagtcaggacaccctgaggcactgctgcttgaacattcttgctggttctgctgccccgctggcccgagtccttccacggttgaggccccttgcgcgcccgaagccagaatgttgatcag

SEQ ID NO: 15433 - DNA, 337 bp, Oryza sativa
  unsure (1)..(337): unsure at all n locations
  Clone ID: uC-osflcyp137e02a1
aaaaaaattcacccaaaaaatttttgtttacgagggggataaaaaaggggggccccccctttatttaaggcatataacaggaaaaaaaataagttttaaaaatagggttaaagaggacaaaaggggaagaaaaacaaaaagcccctaaagacatccgcggtaaagagaggggcaccttaaaacaggaaaacatttataaagggacaacaaaaaaantttacccccacccttttcaaagaaaaacctttggaactctgggcggggttaaaacttttgaatatcacggggcagaacaaaaaacccccaaattaaaattgtggggggggaaattttgccc

SEQ ID NO: 15434 - DNA, 414 bp, Oryza sativa
  unsure (1)..(414): unsure at all n locations
  Clone ID: uC-osflcyp137e03a1
caggcacgatcgctagctaaatcaaagagacacgcagaaacaaaaccaaaagaagggctcaatttgcagtgctgttcaacagattgctcaaataaggcgtctaatacaaatgtaaaccacttaggacaaagcttctacataacatangttacttgtaaacacttgccgcgtccagctttggataattctttaatcatgcaaaaagaaagctcaggganntaaaatcagtaaacatttggttaaacttggacgaattctctttcacttctccgggttgccagaaaccccccttgctttcagctttttcccttcttcaagcttcttctttggaagactgggcttctttcttccgaggagggaagcgtctttctgagcatacatgttagagcgcattagtttccaacaaagaaaaga

SEQ ID NO: 15435 - DNA, 126 bp, Oryza sativa
  Clone ID: uC-osflcyp137e06a1
attcatgttatacaatacagagaaccggattacatgcacatttacatgtttgacgctaaaattacacaaaggtttcaaaagggatagaatgcacacaaaacatacacgataaggcatatcattcac

SEQ ID NO: 15436 - DNA, 291 bp, Oryza sativa
  Clone ID: uC-osflcyp137e08a1
acaaaaaaaaactttttggttgggaaaaaaaactttagatttttttgggaaacaacccccttaaaaaggggacaaaagggagtcagaaaaaaacaccaagaaaaagaaaaaaggtttattatggggtaaccgggcccaaaaaaacaggggaggcaaaaaaattcttgcatggggatggagcaaaaaccttaattgggtaaatttttattccaaaaaacaaaattgaaactccttggcctggaaaaaaaaatggggtccaaaaattggaccagggagaaatttaaaaggggg

SEQ ID NO: 15437 - DNA, 413 bp, Oryza sativa
  unsure (1)..(413): unsure at all n locations
  Clone ID: uC-osflcyp137e10a1
cagaaatgctctgttcttttcattgataatcatctcgtgacaactggaaatattgggacatgtattgcctcttaagtcttaacgcccagtgatagtttgttacaaggaactaacatcattcaggtgtcatgggtaantcanntttatccgtgtcagtatacacctctgccaacgggaggctttttgcaaatggctgaaccagtaacccatcactagaagaaaaaagaaacccccagnannatcctattttataccagccacacaaacattatggagtatcttgttggggtgaaactcttggcctnnactgctcccctcttggatggaggattggccattgacaaccctcctctggtttgatggcattcgagtccatcactctcaggngattgtcttgtccacttgcttccagc

SEQ ID NO: 15438 - DNA, 421 bp, Oryza sativa
  unsure (1)..(421): unsure at all n locations
  Clone ID: uC-osflcyp137e12a1
aaagtaatgacggcttcagatcagcttatcaataaacacggcgttgtcctaacacaggcagagggaattaagaaagctagaccatagcaattactcacccaagaaaattagtccactacaanttcaaataaaccctaacttgataantttaantcaccctaaangtcgnttaccagtgcttttccacccaagggtnngttccttcggggccagggattaccnaggagnannatcgattggagttccctggagtacacccatcagangtaccttttgggggcatgtcnccagttagtgnnaagcatgatggaaaaattttgtcgcggtataatacccaggttaaactccaacttcactgggaaggggttcaaaatcaaagggtgagacccttcactggtagggtctgcaccaaccggagaaa

SEQ ID NO: 15439 - DNA, 251 bp, Oryza sativa
  unsure (1)..(251): unsure at all n locations
  Clone ID: uC-osflcyp137f01a1
taagagttatgacgatgcctgcacacgcacgcgtgctagaacccgtatacctttggattgcccgcccttttttttttttttttatactaacaaaaaaattattttccaaacaatctttttacatggctgattatcaactgaagataaaagtcctcgagggcaaaaagaaaataataacttatacagcaccttacagcgccttaccaagctgcaacagagcgatcttatttacctaancctggcaaatatta

SEQ ID NO: 15440 - DNA, 352 bp, Oryza sativa
  unsure (1)..(352): unsure at all n locations
  Clone ID: uC-osflcyp137f02a1
ggggaaccaatttgggtaattatgatgggaaaaaaaaaaagatgaccgctctgcatgtattcaacggtcatttgtaaaggaatgccggatcaacaatagtatgccaactggtaaactttaataacgacagaggggattttcagagttgggacaatcaggtctgtgtaaaggatcaccgttaaacaacagcaaagggggttttaagggacttctagnataaggtctaaaaccgggcttttttaaaaacacacaacggggaaatttaaaagaacaggggaaagggtttgccctccgggctgttacctttgggtttggcgcaattaccggcaaaatacattcctggcaggcttta

SEQ ID NO: 15441 - DNA, 93 bp, Oryza sativa
  Clone ID: uC-osflcyp137f05a1
aaagggaaaaggggcgtatttgaatataaattaaggggtgaatgcaaatttatttaaaggcaataacaggctgggcaaacaaaagagagccat

SEQ ID NO: 15442 - DNA, 333 bp, Oryza sativa
  Clone ID: uC-osflcyp137f07a1
ataagatagagatttaagttaatagggttaaaatctcctacaactactttacaatcttaccgaactaggactacacgtcatttccttgatacacaagtaaacataatacccaagtcttaattctttacatattctatatacataatactatcccttataactagttcggatagtgtagaccgagtaggtacatggtaaccataatcttcacaggtggtactgagggcttcttcagcttgagagatgcgctattgatacagtctcttttccctgtaggacgtggcccatgatcaaacacgtgcccctagatgagcgttacagacagcacacagc

SEQ ID NO: 15443 - DNA, 261 bp, Oryza sativa
  Clone ID: uC-osflcyp137f08a1
aaaaaaaaataaataaagccaaaaaaaaaaaaaacaaaaaaaaaaggactttgttgggtagaaccaaaaaaaaagggggaaaagaggggggaaaaaaaaaaaaaaaaaaaaagggcgaaaaggggtcaaaaaaaaacaacaaaaagcgaaaggaaaaaaaaaggaaaaggaaaaagggaaaaaaaaaagggacacggtaggaggaaaaacccggaactggacccaaacgaaaaaaaaagccgcccaaaaaagagaggtttg

SEQ ID NO: 15444 - DNA, 374 bp, Oryza sativa
  Clone ID: uC-osflcyp137f09a1
agacgataaacggtttaacctgaacactttattattcactcatgcaccgatacgtacactaattcgtgggagacagtggctagccggagagctagcaaatgcaacaccccgatactgcgaccgtgtgcgacgacgactgacggcgaggacgctatagtggactctaacacataagccacgcacccgcacgggggcgctcgatctggctgtctggctagttcttgaggaggtagtcgtcgaggtcgtggaaggtcttggcggcggtctccttgatgacgtccgggtcgggcacctcctcgctggccttgtcgaagtccatggtccagcttaccaccgggcccgtggcgccggggccggcggccccgcccttgggg

SEQ ID NO: 15445 - DNA, 329 bp, Oryza sativa
  Clone ID: uC-osflcyp137f10a1
gggtaaaaaaaaacattatttaataaaatccgaatgggaacaaaactttttaaaaaaaggccactgggaaacaaatggaaccaaagcattggggaaaaaaaatgcccggttgggggggacccaaaccggggaaaaaggagtccagttcttcaggggaactaaaaaatttaacttggaaagaaaaaaacccccagcaaatttaaattatcacattggattaagggaagttggaaaactttgcaaaacgggccgaattttaaaacccaggggactcaaaaggcctttgaaactccttggccaacttccatccaagaaaaatggccaacgga

SEQ ID NO: 15446 - DNA, 384 bp, Oryza sativa
  unsure (1)..(384): unsure at all n locations
  Clone ID: uC-osflcyp137f12a1
aaaaacaaacataattacgtaataccatccattttttttattggcgacgaatttatcagatatgctctagatacatatcttgggggtatatagcccgggagctttgtgtttcacatattcctcaacccaacggataattggaggtacttttaacaatanaacccgggtcggaggaggggaggggaaggagattattacatatgggttaaggagcagagggccatgtgagagtggtacaataaccacaattggtaaaaataaaaattatatgagcaatattatattatggagtatattcatcaacatatgcccaaaacaaaggctgcatactattattataggcagcaatccaccagcgcgatgcttgatcttagcttagttgcc

SEQ ID NO: 15447 - DNA, 58 bp, Oryza sativa
  Clone ID: uC-osflcyp137g02a1
cagtcggactgcccgtccttttttttttttttttggttttttagttgacttatttttt

SEQ ID NO: 15448 - DNA, 207 bp, Oryza sativa
  Clone ID: uC-osflcyp137g03a1
ctgcacgcgcacgcaacctaggaccctatactttggattgccctccctttttttttttttatcaaaacaacagttgactcatatgtgctctccatcacatacactacaccacatatatctggtgtcaattgcaacatcctattaacatccagccataatcttgcgacctggcatgtaaacaaaatggcataaaccaaagaacctaat

SEQ ID NO: 15449 - DNA, 390 bp, Oryza sativa
  Clone ID: uC-osflcyp137g04a1
caggtacaacccaggataagatcataaaataatatagcaaatgttcccaattatgtttctgaattgtccttccaataaaaatttcaagtgttgcagtccttcccaaatcaaataagtttacaagaaccccaatcaggagacgtattttcatatacacctcagtcagtgtttgccacaaaattattttccaccccattgtaactaaacgaggggcatattgagcagaatcattcgagcaccttcttcttacagagcgagcaacctcaatctatttatttgccaagaacaagagccaagtctcataaatccacatccagggtttatcctccagatattcatccgaacattgtgggtgtaaacaattagtgatcctccagataatcatcgaac

SEQ ID NO: 15450 - DNA, 338 bp, Oryza sativa
  unsure (1)..(338): unsure at all n locations
  Clone ID: uC-osflcyp137g05a1
cttcttacaattacatcgtgttaaccacatttcctctttgtacacattgcacacactcctcttctccagggtacacatatatacatgcatttatacttgtaaatgcattttgtacctctttctttcatgggaagtaccgtgagattgtgagaaaaaaagaggaatggcatgtgctaagtgatcactnnggctgctgcacccttgtctcgttgtcatgggatgttgccccgcccgtgtgttgtcaccgataacctttaaatatccctttcaaaattgggggtcnnggcggccggtgaattgcattaagggagtgaactttaagatccgnngcggtagaa

SEQ ID NO: 15451 - DNA, 349 bp, Oryza sativa
  Clone ID: uC-osflcyp137g08a1
aaaacaacagttgactcatatttgtactccatcacatagcttcaccacatatatatggtgtcaattaaactcctatttacatcatccataatttggtcctggcagtaaacaaaattcaaaacaaaaaccaatacgagattatacgaagatcacccattgcatcgatctgtgtcatctagaaatcgaagccaccgccgtcgtcgaaccctgcgtcgtagccggcgtcatacgccgacgcgtcggagatggcgtctccgatgaggaggccgccgagcgcgccgccgagcagcccggctccgagtcccatcccgaagttgttcttcttcgccggcttcacggcctgctgctg

SEQ ID NO: 15452 - DNA, 126 bp, Oryza sativa
  Clone ID: uC-osflcyp137g09a1
gtataaaaaaggcaatgctttaataaagaacaagaatgggataaaaaatgggcgtaagaacccaaaaacaaatccaacaccgacagggccaaagaggggggcaggggaagcagacaggaattccca

SEQ ID NO: 15453 - DNA, 409 bp, Oryza sativa
  unsure (1)..(409): unsure at all n locations
  Clone ID: uC-osflcyp137g10a1
aaaaagacaatgggaaaaaatctactgatatgagcccagccccttgcacaggctaattacatcattgctgttagttcctttaactaactagagggcatcgccactggaaaagcatctgaantcagaccgcccacctacanngttcagttcattgcatttnncaggccagattaaggggacggcgaacaanganncatcattcctnggtggcgccatcaccactnntggcatccatncnnaggacttcgatcactttanaactgtatacaatatnnatcctcctggttcctttttcccagcttttcctgaacataanntacagttgaattcacgaattcaaaagaaaattcagatgggagcaaagaagggggtgctgattgcatcgtgaaaacaacactttatcaataga

SEQ ID NO: 15454 - DNA, 368 bp, Oryza sativa
  Clone ID: uC-osflcyp137g11a1
ggggaaaatggttcttttttcctttcaattcaagggcaaaacctgcatacatatttggaggcacaacaaaatttgcaaaaaagtttggggggtggattttttaaggggctgggcctaacgtggggacctgaccacaaacttttccagacctcgattgggttggacatatatgggagattcttatcagggcaaatttcaaaggttaaacacaatattcaccagatttccctcttttggactgaatatcccagttttgaaatagacccaaaatggccccttacctacacctggttttccaaacatggtggggaatttttcaagaagacaaagccaaaaggggaacatttttttgatcatgccaccagggg

SEQ ID NO: 15455 - DNA, 413 bp, Oryza sativa
  unsure (1)..(413): unsure at all n locations
  Clone ID: uC-osflcyp137g12a1
gaaattgaaaaaataacagataaatttatatattgttaattacatagttaggtgtgtaatattacatccaacatattcttttatgggattttcatgtgcaacatgacgtggagcttgttttccagtgccatgctantctcaaaaagngacggtaacantccttttgacgtttaagaaattctagagtacaccattnnaacctgaacattttctgtgcatttagaaatcccnttgcagaggggtaatgtttatgttcatttcgaagaaagtcagatgaatttcccaaacagccatttccatggnttccagtaagctgttatggttctccaaaacccctcgccccttgaatgcttangacagatcacctagggcaatggtggacatctcttacacccaaatcaaagaggaaaatc

SEQ ID NO: 15456 - DNA, 69 bp, Oryza sativa
  Clone ID: uC-osflcyp137h04a1
ctccataacatcatccagtaccatagtaaggctgctgctagttgcatagcccgataagtagtctcacac

SEQ ID NO: 15457 - DNA, 375 bp, Oryza sativa
  Clone ID: uC-osflcyp137h06a1
agctccaagcaagagcagctgcaggctgcatctccattattcatataacatattgtactagcaaaggttccattacagtatatgcactctcttagttgaacataaggccaaaccgacccacggttttcgacttaagcccagccaggagaattagttctatagaaaaaaggtgccacaccttgtcaacaaaccatattcaagggtacctcaaacggaatgaggcctaccattaatttccaaccccaaatcattgccaccccaagctaccacacagaagtagttagttaggtgccccacccatctggaccatggaacccgaatcagaataaaaccagcatggttgttccaagccaggcaaccagtaagcattaaggg

SEQ ID NO: 15458 - DNA, 405 bp, Oryza sativa
  unsure (1)..(405): unsure at all n locations
  Clone ID: uC-osflcyp137h08a1
ttttctttgttttctttcttttttctgtcctttttcgggggaaagcaatttgcttaccgttttgctaaaatcaatcgtgagggacaaacatgggccccttttgggtcaattttacaaccaacgccaccacgaattgaaagcccccaaaatcatgttctagtatgtatatgtatctatgtataggtttcttctgtaagtttttacaaagttccttgatgttgggctttatgcacttcaggcgggactagtatgtacccctcccttcaggaactgnaaaatcatgtcctttttcttggcccggaacatgaaaagctgacctctgtatggagcagcatctttgtagcgttcctcaacagcagcgaccagcatattgcggaccaaatcaaacttttgggcctcaaagca

SEQ ID NO: 15459 - DNA, 418 bp, Oryza sativa
  unsure (1)..(418): unsure at all n locations
  Clone ID: uC-osflcyp137h09a1
accaatgtaaaggaaacatgaataaaaagcatctatacgagtctacaatcacatttgcggtagcagtagcgtaaagttaatgagaaacatcagctgatctcaaaagagatctctcaacatcgacgagagaaacatgtccaaacaagtttcatagacaagggctgcttctacagtntcacanngccctggataccccatgcgccagaattggggcagaggggaggttttaaagcagccttggggcaatcggcccattttcctgctcgacaggggagtggcctcaaaccgggttagtaactttgtagttgcagcttccccaacatcaatcttccagaaaagctttcgtccaggccgtttcgggcccaacatggttaaaacgcttaacacaaccaccactttgccccaatcacggaaatgt

SEQ ID NO: 15460 - DNA, 163 bp, Oryza sativa
  Clone ID: uC-osflcyp137h10a1
acttatctagaaccaaatggatcatttagtgttagtaatgtagtgcatccagtgttgtaaaggcgccctatttttggttggtaattgtaatcaatatatacttctgttgtcttgacattttcaaaaaaaaaaaaaaaaaaaaaaaaaaaaaaatctagatcgc

SEQ ID NO: 15461 - DNA, 103 bp, Oryza sativa
  Clone ID: uC-osflcyp137h11a1
atctagattcattaacatataaatgaacgggggcaatgctagaaaggtttacattataaaacgggggaaggagaactcatacgcgcacacggtgtttgaaaaa

SEQ ID NO: 15462 - DNA, 337 bp, Oryza sativa
  Clone ID: uC-osflcyp137h12a1
acggggaacatccaaagataagggctttccacgaaacaagggccttacaggcaaggcagccaaatatgaactgggcttaattaatacacccaccctttggatacattgacaggagggcattggaaacgtgcccaatacgaaggggaaaccccattttaatttgaaaaggggggaacatcttctaccaagggctagaaagtgcaaggattagggccccccctaaaaaggggggcaaaggggaggtcattgggctggcaactgggaggcatcatgggtgcaaacaaatggtgacatggctaaacccgattttgaagggcaaaaccagaaatcatgggtg

SEQ ID NO: 15463 - DNA, 302 bp, Oryza sativa
  Clone ID: uC-osflcyp138a02a1
ggtgggaaacgaataaaatcattattgcaaaaacatcatcttcttcttcatcttcttagtgtacacaacaccaactcgatcatcatctcgtcgcactaaacccatcttccccaacccaaagacaacgaactcgctggccacaaatccatccaaccacaattaaccactgctaagctacggtcccccacttcacttgccggggacgaagttggtggcgtacgcccaggcgttgttgttgacggggtctgcgaggtggtcggcgaggttctcgagggggcccttgccggtgacgatggcctgga

SEQ ID NO: 15464 - DNA, 306 bp, Oryza sativa
  Clone ID: uC-osflcyp138a03a1
gtgctgagatgatatttttttgttacgggttttgagaaaaacaaattacaggactttgtgactacaacttgtacagcatggttaatccaaataatacaattttcagtagagacattgtgacaacaaattgaacaatgtggttcttttgtgtaaacgaccaaatcgaacagcacactaataacttcgtgaaactgaaagctgaaggaatcacatacacgcaggagcaggcatggaacgaattcagttatctgcaattggaaatgctgacccaattttgctgtttcccattcggtagcacttgatgtt

SEQ ID NO: 15465 - DNA, 209 bp, Oryza sativa
  Clone ID: uC-osflcyp138a04a1
gggggttcgaactgtttacattctgccagacatcaatataaaaccattccgagggaaggaaacaggcagaccaaacaccatacccaaagggaactcaattcatggaaacggcactgacgacgaacacctggggctggatggatggtccgagggcctccacgacttcgagagagacactggccacgagccctaccttgacaagaagataa

SEQ ID NO: 15466 - DNA, 305 bp, Oryza sativa
  Clone ID: uC-osflcyp138a05a1
aacagtatgactaaaatgcttccaatttccaatagtcgagaggacagaggaaaagcagacaactttttcaatggagatcccaaacaaaaagatgggaaaaagaacgggaaaaaagggactttttttttttccaaatggcaccacatcaagggaggaaccaaataatatcccttttcttatgaatgacacaaatattctttggtttagattattgttcttccctttttttttccttctcctttctttttgttgggcgttttttggtccgagagaccgttcttgcgtcactgcgccgcgacggtgcg

SEQ ID NO: 15467 - DNA, 324 bp, Oryza sativa
  Clone ID: uC-osflcyp138a06a1
cgacggaactcaatgtaatagctgtttaattcagaaacatgttaaggctcaaagtacagtaaaccatttaactgtgaaatcataaccaaagctcaataactattgagctccggaattacaccttacatattgggatagcaaccacagccctaaatacccatcgatccatccaaagctcccctagcttatgcaaatcttgttaaaatttaggccttgctggcaatgttgctggacagccagtccaggccctcgtacaatccctcacctgttgtagcacaagtgctctggatataccagtgtcgctggcgaagggagtgcagtcca

SEQ ID NO: 15468 - DNA, 87 bp, Oryza sativa
  Clone ID: uC-osflcyp138a07a1
aattacaatattgaaaaaaatattttcaaatattgataacaatgttacaaatgcagcatgcatgcgatatccatgcgcatcacgcac

SEQ ID NO: 15469 - DNA, 246 bp, Oryza sativa
  Clone ID: uC-osflcyp138a08a1
tttttttttgttttttttttttttttttttttttttttttatatttttttttttttttataaaaatttttttaattttttttttttttaaaaaaaaaaaataaaaatttaaaaaaaaaaaaaaaaaaaattttaaaatggattaaaatttaaaaataaaaaaaaatataggggagaaaaaacaaagaggggcattaaaaaagaggagacaaaaaaaagggccaggagaccaaaaattgggggatgg

SEQ ID NO: 15470 - DNA, 298 bp, Oryza sativa
  Clone ID: uC-osflcyp138a10a1
aaaaaaaaacgatgttggggtttccaacttaaccagaagtacaaaaatttgatcacaagctaacagagacacctaaccatttaggtgcccaaatttgatcataatctcataagcattaacatctcaaaaagaaggggaactctatgacagtaaagatggctcggaacaaaaaaactggagaaatttcctgacaactgttctgctggtattagattggtgatggaaggagcttcctcagggtaattgaagttcttatttgctggtcaagctccctgccaccccattgttgagcacctgg

SEQ ID NO: 15471 - DNA, 276 bp, Oryza sativa
  Clone ID: uC-osflcyp138a11a1
gggagaagatcagtcctactttattcatgccatgaccatgcatacatatgggctttaacagatccatgaaaaatttccttgcccgaaaccgaaacatacatatttggcaaactcactcactttggctgcaaagcgaccgtgcaaagtgcgtcctcacacccaattttattaaatcgatcggggccggcacgggggggcacacttttattttgccgaaaaccccgacatgatgcccccgtaaaacggggcctggccgaaacaatccagggtgggccc

SEQ ID NO: 15472 - DNA, 198 bp, Oryza sativa
  Clone ID: uC-osflcyp138b01a1
gttggtgatgataggctcatatatgtttcgaacaatgtcctctccgcttgtcgaaatgcaaataacatcatcgggggatatgatcatgtacatacgagaaccgaggaagaaacgaatgcttaaaattaaaacccatcaacagcccaatataccatgcacgagtcgattccctcaattgggaattcctttcacctgtgg

SEQ ID NO: 15473 - DNA, 296 bp, Oryza sativa
  Clone ID: uC-osflcyp138b02a1
caacaaacaatatatgctgtgttgattagaatacttgtttacatcctttacatgctgttctttttccaatgcttggttagggagaattccatgtgaacaattatagtgatttggaaggtggcgtaccaagtgtaacatcatcatgtacttagacagtcaaggcccacctccaaaacgagcaagtaatcacaatagaacgcagctgcctgtcaccattgttcatatcttggtatctcccacaaacacaatttacaaacagcacgaagtttcagcactaagcacttcttaccacatga

SEQ ID NO: 15474 - DNA, 297 bp, Oryza sativa
  Clone ID: uC-osflcyp138b03a1
caacaaacaatatttgctgtgttgattagaatacttgtttacatcctttacatgctgttctttttccaatgcttggttagggagaattccatgtgaacaattatagtgatttggaaggtggggtaccaagggtaacatcatcatgtacttagacagtcaaggcccacctccaaaacgagcaagtaatcacaatagaacgcagctgcctgtcaccattgttcatatctgggtatctcccacaaacacaattcacaaacagcacgaagttttagcactaagcactttttaccacatgaa

SEQ ID NO: 15475 - DNA, 318 bp, Oryza sativa
  Clone ID: uC-osflcyp138b04a1
aataacaagttaaatttgccattttgataaaccaatacgattaaatgtggcccgtacagaagcgtatcggtatttggtaacatcaatcaaccttttttgctttcacgtttcgacatgatataaaacttctgtaaggagcgaaattgttacaaagaagcatcaataggaaaaaaaaaagaacagatggaaactaggtatccaaaagttagaccagcttcattgaagctatctgggtagcaacctccatagcttcctttagttgagaggcctcagttccctggccctgggcaattccattcttgccaccaccttcctttc

SEQ ID NO: 15476 - DNA, 250 bp, Oryza sativa
  Clone ID: uC-osflcyp138b06a1
gttcttgttctttttttttttctttttttttccttgtttctcgcaccaaaaaaggcggcccccaccgccaggccataaggggcccggggggatcaaacggggcccttccagcctcccccaaaaaaatcaagccgggggtcccttggcccccccgaaagacgggggggaaaaaaaaaggttccccccccccccctgggccgggttggtttttttcttagggggaaccccctcaacccccggtttggccccc

SEQ ID NO: 15477 - DNA, 301 bp, Oryza sativa
  Clone ID: uC-osflcyp138b07a1
acacgtctcacagtgtcacacactacatgccatagcattatttatgttacagaggggtgctgataattgtgttctccaatggtccatggcacgcacactcactcacacacacactgacagagaggaaagaatcatcaaactaggagcaaccgaggtaattaaaacggaaattaccaccctaatggtgctggtaattaatcatcaacggccctctgataggcgggcccacccaacgccgactagccgaggcgtcggctcacggcgagccgagccggacctccgactcgcgccgcgcggcgcg

SEQ ID NO: 15478 - DNA, 289 bp, Oryza sativa
  Clone ID: uC-osflcyp138b08a1
ggtatagactgaactgaaacttgattatacagtttgccacgactcctaactcaagcccctatgacgtggatacatatgtacaaaagttttgacacctgagaaaatgatctagtttccctacatggatagctagctagtagctatctcatgtcatggagtgttgccaagaaggcgtccaacttgacattgtcacctcgagacaagaacttgatgcagatgggcgccctggcacccatgagtgtcagcatggacagcaagatcgagccgacgccgtcgccgcagatgagcc

SEQ ID NO: 15479 - DNA, 296 bp, Oryza sativa
  Clone ID: uC-osflcyp138b09a1
aagaaaaggaacatgcaactatatattattaaccagaagaacagaagcaggttaacccggtcttgagaaatttattatcctaacaaggcacggagaaatcccataattacactgctccacgtcccagtcgtttcccgggtctagcattcggggtattgactacacgctgaatttagtgagcaggtcatcccgtcaagagagccttgcggatgacaaatagcaaaagaacatagattatttcatccataatggtgccccagcagacatcatagctgattcagtgatagagcttgccc

SEQ ID NO: 15480 - DNA, 245 bp, Oryza sativa
  Clone ID: uC-osflcyp138b10a1
ggggaacggagtgatgctgtgttacttgcttttgaaactatatactaatttggtttccggtcttaactgctataaaaccatacataattcaccacaccaaaaccaaagctaaaagagtcgctgttgattggggtaagccgcaaaaccctggactgtgcagggcacgaggaggagggctcgcctagatagagcgtgtgcatgtgacggatcaggtcgatcacacgggtgctgtatccccattcgtt

SEQ ID NO: 15481 - DNA, 212 bp, Oryza sativa
  Clone ID: uC-osflcyp138b11a1
atattaaatttttaattattttcaacgatgtaaagtaaatttaaaagttggattatataaaaaaaaaaaaaataataataaaaggggaaaaaaaaaaaaccgggagaatgtaaccaaaaataaaaagggaggcaaaagaaaaaaaaaaaaaaggcagggggccaaaaaaaaaataggggggggggggaagaacaaaaaaaaaaacggggggg

SEQ ID NO: 15482 - DNA, 305 bp, Oryza sativa
  Clone ID: uC-osflcyp138b12a1
gaaagcagaggtagattatattaagaagcctggcacgcatgaggagatggagcaggagtacatgatgagatcaccatgatgatagatgatccatccaagctagctagggatccatccaacattgatcgacacacgcacacactgacaacgacgacgacggttttatttaggcgtcagagcaaaaggcaaggcctgcctacatataagctgggtactaatgcaagcaaattaaggcctcgatcaaagctctgatcgacagtagcagcatccatacgataaatcctcatgcagccgggcgacgacga

SEQ ID NO: 15483 - DNA, 228 bp, Oryza sativa
  Clone ID: uC-osflcyp138c02a1
ccttattgtttttgggggccataaccaaacaactggacagtgagggcaccaaaatccgtcaccagatgggaggacaggcttgtccttccacctgctcaaggacatgccgggttccatgtgaaaaaacatcgagcgcgcgctgggggacgcgcacacacagcaggagatctcggacaggaacaacatcttctgggtggaacaccccagaggtccacctatcctggacca

SEQ ID NO: 15484 - DNA, 220 bp, Oryza sativa
  Clone ID: uC-osflcyp138c03a1
aggattatccaacatctaaatatccatacaattttattttgattttttataaaaaacaaaaaaagccccagaaaaaaaaaaaaggaggaaaacacaaaaaaaacccgggggggcccaaataaacacccacaaaaaaaagggggggcaaactatttactaccccaaagggaaaaaaaaggaacaaaaaaaaaaaccacccctcgcggctgggaaacaaaaa

SEQ ID NO: 15485 - DNA, 297 bp, Oryza sativa
  Clone ID: uC-osflcyp138c04a1
agcttaaggtcttaacaaatgcaagcagtatacaatttaatcgtagtaaattcaaccacaacgattgaggatgatccaacaagtaaagctgatgactgttttttggagttacatgaaatggcccactgaatgttttttggctgaacatgaaataaaatgacactgctgaaagactagagtgcagggtgaagcagaaacatgttcaacttgattgtagctcagtcgcgctcacttatggctgataggggctgatcgatctcctctgacgagagtgctttgaaaacacgatcatctttt

SEQ ID NO: 15486 - DNA, 314 bp, Oryza sativa
  Clone ID: uC-osflcyp138c05a1
aaccaaaacataggaggtttcatttcttcttctcaaagtagtgtagcatctttccttctttcaccattacataagcttaagcaataacagataacaaatcctcctcctcctctaggtaaaatattcaaacacaatacccttataagtacttattattaggaaagtagcgtgcatgggcataaatggcagcggggggcaggttaagaatcacaatgctgagcagcgaggaaacaaaacaccataatgggacagagcaaaagcctccgaaagggagcttttaggcagaaggcttctcccacttgaggggcttcacc

SEQ ID NO: 15487 - DNA, 224 bp, Oryza sativa
  Clone ID: uC-osflcyp138c06a1
acattattacaaggtaccactcattgtttaagagcaaagacaaatacaaaactgatgcatccaacgtaccaaaaagaaagcgaacagcagcccccacagtgctaaaaaaaaagaactaggagagggagaactaccagggacagaagggcatgcatgggcccatgacgaaaaaaccaccccctccatcgggggcgggcgagaaaacaccccaacctcgaccagtg

SEQ ID NO: 15488 - DNA, 238 bp, Oryza sativa
  Clone ID: uC-osflcyp138c07a1
gggataagtatgaataagaagctggcatatacttcggctagtagcattgcaacgcaaacagtatgacaaggcaccacgcattgtttaagagctaagacaaagacaaaactgatgcatccaacgtaccaaaaagaaagcgaacagcagcagtcagatagctatgaaaagagaactaggagagggataactagaagggacagaatggcatccatgggtccatgacggttagacgacctcc

SEQ ID NO: 15489 - DNA, 174 bp, Oryza sativa
  Clone ID: uC-osflcyp138c08a1
gggggtattagggtgtacgtacgcgtctaccagatgggcggtgtgcaggtacagaatgcggatggccgcgcgcgaacaaaggcgattggtatcaacagacaaatcgtgaaggaccggaacacagttctcaccacctggaacgctgatacagagaacggagacatacagaaggcg

SEQ ID NO: 15490 - DNA, 310 bp, Oryza sativa
  Clone ID: uC-osflcyp138c10a1
gaaacggagtgatgcagtgtaacggggaagtgaaacagattacaaatcggagcaccaaacatagcaacgattcaacgaatgtaccaccaccacaccaaaaccaaagctaaaagagtcgatgatgatttgggtatgcagtaaaaatctgaactgtaaagcgacgagccggtgatgatgagcgtgagatttggcattggtttctttataggaaagcgtccatctcgagcaccttgaggacctcatcctggttgttcagcttggccacctcgatgggggtcttcccgtccagattctggggcgtgacagcagc

SEQ ID NO: 15491 - DNA, 162 bp, Oryza sativa
  Clone ID: uC-osflcyp138c11a1
ctataacttaccatttgtagattacgaaataaaccagagtcgacgtgccaaccaagtaaagacggaccgaaagggaaaacaaaaaaaaaaaaaaaaaaacacggaataacgagcacactcaagcaacaacaacatatgaagagtagggaaaacgcgacccgt

SEQ ID NO: 15492 - DNA, 308 bp, Oryza sativa
  Clone ID: uC-osflcyp138d01a1
ggcggaaagtaaatattttaacttaataacatccagagtacataacccattctcatgtcatcatgctaaagttgtttaatcataaaaaaacagctatgcgtctgcaaacataacataggagctctcagggaacaaaaaagggtagttctttcagtgtagaaccagcaacaaagaaagacttgctctaagctgaggcacccttgcccttcttcctctggagcttcttcatgtagaattccagctccttgccctcaaggatatagccatctgctcggccacactgcccagggcgggaagaaatgcaggcc

SEQ ID NO: 15493 - DNA, 299 bp, Oryza sativa
  Clone ID: uC-osflcyp138d02a1
gcaaaacaaactcaagatattttaattgaaaatgttactggctggccagatagcatgacgaatgccctctgtcagagcaatttggacataagatgtcttcataaagctaacaaaacaatcacacattacctaggactaggtgcaatttcctgtctgaaactctgaaccaagtagataacaccagcagtataaaagatttcgttcatttactcacattatggtcagcaatacctcttttatttccagaatctagaatccagaggctgctactgtccgtattggaatcgccattgccttgt

SEQ ID NO: 15494 - DNA, 157 bp, Oryza sativa
  Clone ID: uC-osflcyp138d03a1
ggaactgaaatccagatccacacaatgctgaagtaactgaactgccgtttaacaaagataaagacagacttccccacaggttcaagttccaaaacacaccaagtacatactacatcacttgcagtctcagaatataaaatgccaacccaagttaaaa

SEQ ID NO: 15495 - DNA, 307 bp, Oryza sativa
  Clone ID: uC-osflcyp138d04a1
actgaattcactttaatagcacttctcatcatgaactagtacaacaacataactgtccagtggaaatgtgaaatgcatacaccaagtaatggtccataacatgaactatatggatacaacaacgttcttatttcgctcatatatacatgaaataagtcttgcacgtcttggttacttaataggtgcgataatcgccgtaggcttttagaagaagaaaaaaaagtgagcctgcaaagttcctggggacagttgaagatcatcgggcactcattgctgcaacaacttcagggtggtagtggagcatctc

SEQ ID NO: 15496 - DNA, 234 bp, Oryza sativa
  Clone ID: uC-osflcyp138d06a1
cccggaaagacccaaacccaaggcttggactaaaaaaacgttccttggggggacaaaaacaaaattaaggtggaaaagccggggttccccgcgcgatttaggggagggttacctggcccgtacaaaggggcctcagggggggcatccccatagggggatcggctcggggggctaggttaaggaattggtctaccccgggggcgggcccgggacccccttttttttggggcccgg

SEQ ID NO: 15497 - DNA, 299 bp, Oryza sativa
  Clone ID: uC-osflcyp138d07a1
aagtatgaataagaagctggcatatacttcggctagtagcattgcaacgcaaacagtatgacaaggtaccacgcattgtttaagagctaagacaaagacaaaactgatgcatccaacgtaccaaaaagaaagcgaacagcagcagtcagatagctatgagaagagaactaggagagggataactagaagggacagaatggcatccatgggtccatgacgtttagtcgacctcctccatcttgctctcgccggcgtcgtcctccagcggcggcatgtcggcgtcagcctcggcggactcg

SEQ ID NO: 15498 - DNA, 299 bp, Oryza sativa
  Clone ID: uC-osflcyp138d08a1
aacatacgcaacatagatcttattaatccatcaagttccagtcacagcagtagataagaggcatagagcagctaagcccatagtaattacacgcagtttacctggcaaggtaaccgctttttaagaggcgcgcacgcgcacttaacacatatctccgcgacaaatataccagtcgcacaacaccacacacagttcataagcaagcaggccctgagactgtagcagcagccccggcggccggcgctagccttacacctcgtcacattatttacgcatatacacacatagttaggttatag

SEQ ID NO: 15499 - DNA, 300 bp, Oryza sativa
  Clone ID: uC-osflcyp138d09a1
agcaatgtaaatactcgcattccacaacagccgaagggcaataatcaggctcagaacaagtttaaaccgaacagaaaatagagagttttaaacgacacagtgcacacagcgggcatatgataataacggtcaatgcaacgagtgccatggccgtgcacaaaacttaacgaattagtaaaagctagatatcttaaatgcagacacgcaaaccaccacttgaacgaggatcatttcttcttggcggcagccttggtcaccttggcaccggttgggtccttcttctccacgttcttgatgacg

SEQ ID NO: 15500 - DNA, 304 bp, Oryza sativa
  Clone ID: uC-osflcyp138d10a1
gcggtactagaaaagttcaagaatctcaaatcaatttatgaaatcaaactacacacataatgttcttgactccccacgtacttacggaataattatattggcatacacaaaaaccggagctaatcagagtagatacacccatagacaagccatcagacccaacaatttttttgtccatgaaacagccagctaatgctaatagacaaggggttctcatgaaagatacagctaggccacatctagaagcacttcctgtggacgatagctgggccagattcttcatactcagcccttgagatccaca

SEQ ID NO: 15501 - DNA, 297 bp, Oryza sativa
  Clone ID: uC-osflcyp138d11a1
gtccattctcattacaacctcaagcagcatatgcggacaggattacactagcagaccatttgcagcgcacgagattaaccagtgttgacgtcccaaccatgtagagttgctttgctagctcgatcatacttattcatcagcagtgcagggtatagctagcacacttaagcaacagtattataggagtagtatgctgtaagcgatctgtaggtagcttttagtggcgccagagcctaaacaaggccgtcgtacgtcgtcatcagccctgcaggctgggcagcgtgtaagcgccgcact

SEQ ID NO: 15502 - DNA, 288 bp, Oryza sativa
  Clone ID: uC-osflcyp138d12a1
catgaacatctttcaggtagtcatctacttctcgggatgctactgtaaggttcacaagattaatccccgcttgataaaacagacaaaaaaataggatgggtgacacacgagtataacgctctcggggaaaaaccggagcagagtagtagtagtaatacagcagccgtgattttatttagaagactaagtttatcaattaagagggtagttaaccttaaaccccgaaagaaacccgggccaccctaacttggccttgccgttgacggcggtctccttgccgttggccgt

SEQ ID NO: 15503 - DNA, 309 bp, Oryza sativa
  Clone ID: uC-osflcyp138e02a1
aatgtctggaggatgcatggtttacaatttcaccaagccaagagcagagcatctcaagagttttatactaatacaagatttcaagcagatatacatgtctgacatactttgtacaccaggacacattttatactagtatactatactaagactgattctttcacacaagctccaaaaaaaataaaaagaactgaaaaaatatagtataaaattgacatgcatccatgcatcgatcctgagcaaaaaaatcaactccatgcctacttattaacttaacttcctagtttgaaataaatttatacagtttga

SEQ ID NO: 15504 - DNA, 304 bp, Oryza sativa
  Clone ID: uC-osflcyp138e03a1
aattaaagctgagttcacatgtacttgtactcacatcccaacccacatatacagaagtagaacacactgataaattcagttattgactaccaaagagaagggggtaaataagcacgtggataaatcccactgcaaggtacaatagacttaaaaatgccactgaaagtctcattggaagtcgatggcattttcataactaccatcagaccaccaattacagtggcattttactgatttacctagataaatactgacgtggtcagatcggcgaacaagtaaaatggtacaacatgaattaggcttg

SEQ ID NO: 15505 - DNA, 266 bp, Oryza sativa
  Clone ID: uC-osflcyp138e04a1
acaaccaagaaacccgaagcaacgttaacctttagcacagaaacgggttcgttctttttacaagacgtgatgggttttaagaccataaaaaggtccggggcctcactaataaaggggtggagaaaggggctgcaaaaagaagggatccaatccaacatgggggggattcagattcagattccacttaagagcttttttttgggctgagagggggactcattttgccgggtggcctgccattgcttggcgaaaaacgtggtttaatc

SEQ ID NO: 15506 - DNA, 299 bp, Oryza sativa
  Clone ID: uC-osflcyp138e05a1
caagcaaagcatctactacttgagaattcagataatacatcaagcaaaatcacacaccagccatcagtgcttccatctttagcatcacagcctgaaagctcattccaccatcctccacatgcccatccatttgacatagttgcagagggcttaaaaggacgcgaaaacacgacgcagcgatgaactgcgggcttggctgcagactgcagcaagctccatcgcagcccagagcaaacatatgtacatatatgacacagcagacgacaaccttactacacaaaccatacacgactcaacat

SEQ ID NO: 15507 - DNA, 298 bp, Oryza sativa
  Clone ID: uC-osflcyp138e06a1
aagactagtatcaaaggcctattgtatctacatctttacattaatccgtaaacaaatatgtacaaaatttagttttacgaaaaatgcatttgtttcatatgaatggatagttgggactataccctgaagcgaatgtaatcagggccataaaaaaggtgaaatacaataggtatatcacacactatcttcttcaggcttgtctgaaggcctgataagaggagctaccctttcagaaatgatagccttaccattctcatctcgtttgacagggtacagcacatagtgttggattatgaat

SEQ ID NO: 15508 - DNA, 292 bp, Oryza sativa
  Clone ID: uC-osflcyp138e07a1
gcaaccaagaagaaatatctcaagctggtattggtattatcacatcaaaggtaattaaacgctgaaagtagggaaacacacggcagtatttacacatggaagatgtttacacacaaacacacttttttgggttgtcgctagcccttgataggagccagcaggctagctgacacgtaccggtctctggtagtactaacagagacagcaagctactaggaacagagtaacaagataagatagcaacatactagataattaattacgtattagataaccacaaggaccagcaaac

SEQ ID NO: 15509 - DNA, 254 bp, Oryza sativa
  Clone ID: uC-osflcyp138e08a1
caatcaacacaaaacctttcctggtttaagctttgaaattgttggcccaaaatgtaaaatttttatctgataccatttctaagctggcccaacttaaataacaaatagtagagttctaagtatctctcaaacttaaattgactggtaatctaattggaagctaaataatgggcccagggattagggaaccccggcttaatgggagtcgagcaattaactggttcaacctgaaaaaaggggaggaatgtcttcac

SEQ ID NO: 15510 - DNA, 300 bp, Oryza sativa
  Clone ID: uC-osflcyp138e10a1
ttcatttggagcgagattgcaataataataatggtactccattcgtttatattaaaaaaaaaaaaaaaaaaaaaaaaaaaaaaaaaaaaaaaaaaaaaaaaaaaaaaaaaaaaaaaaaaaaaaaaaaaaaaaaaaaaaaaaaaaaaaaaaaaaaaaaaaaaaaaaaaaaagggggggggcccccttttttttttttaaaaaaaaaaaaaggggggggtttttaaaaaaggtagttttaattgatccaaaaagggaaaattttttttttttttcccctccctatttataccttttggggga

SEQ ID NO: 15511 - DNA, 251 bp, Oryza sativa
  Clone ID: uC-osflcyp138e11a1
aaaggaagcggcccaaatttgcatatatttatttttcaaaacccgcattggacaacatgtatatttcatcgcagtttattggtccatctttattcattcacaaaagtttataccgcccgggccttggagagttgggggttcgagcattttggcctacaatgcttttgctaacaattttggggaatgaaaaccaaaaagagctcaagggggaaagttaaaagatacctggcccaatattacagaagttgccg

SEQ ID NO: 15512 - DNA, 235 bp, Oryza sativa
  Clone ID: uC-osflcyp138e12a1
aaagcaaccaaatttatttgggggggtgggaacaaaaaaaaggtcatggccccccctacctggatatcaacaattaatttatcgcccccccaatattcaaaaaaccggggaacatttcatcaagtaatacccctgaaaatgcattacccccccaaaaaaaaaagggtaaccccccacaaaaaaaatttggcctgacaaacaaaaaaatagcttccaaacgggaagcccccccaaa

SEQ ID NO: 15513 - DNA, 107 bp, Oryza sativa
  Clone ID: uC-osflcyp138f01a1
acatacaatattttgttcgattcaaaatgaggatttgaaaagcccggaaaatttcagacaggtccattccatggcgatgcaagggatccctagtgtagattaaacca

SEQ ID NO: 15514 - DNA, 305 bp, Oryza sativa
  Clone ID: uC-osflcyp138f02a1
gtgcaagctcaaagctgaaaattgcagcattaatttcattatgttgaaagtaagttcaggtacaacacgattattttgccgatcacatgtagtactgttttcacactgtgctggacatatgaatggatgatcctaatcatctggactgggagaggcttcccatccggagtcaaaacaaagagaaatcgttgcgacaacattagcaagtggaaaagatgccaagtcactcctttttcttgccggtgacgcctgcaacaacatcattcagcgcaggtggaggaacttgttttgctgtctcccaagaa

SEQ ID NO: 15515 - DNA, 263 bp, Oryza sativa
  Clone ID: uC-osflcyp138f04a1
tttttttttttttttttttttttttttttttttttttttttttttttttaattatttttttttttttttaaaaaaaaaaaaaaaaatttttaataaaaaataaaatgttaaaaaaaaaaaaaaaaaaaaaaaataaaaaaaaaactttaaattttaaaaaaaaaaaaaaaaaaaccaaaaaaaaaatgggaaagggaaaaaaaaccccaaaaagcaacgaagaaaaaggaaaaacaaccaaaaaaaaaaaaaagccgggaccc

SEQ ID NO: 15516 - DNA, 284 bp, Oryza sativa
  Clone ID: uC-osflcyp138f06a1
gtacgcttgtttttatttgggaatttttgtaccgtttcctgcaggcggcccgggattccccaaaaagagcggaacgaaacctgggggaaaccaaggctaaaccaaaaatgcggggagaaaaagttaggcgaaacaatggcacacaagataccagggggaaacataaagggccaaaccgggggagcccaaagagggagcctgcaaaaaaaagaggagccgcggggacggcccgagatccagccagccaacaggactggccaagcgcaaaaaggacggggccaagg

SEQ ID NO: 15517 - DNA, 197 bp, Oryza sativa
  Clone ID: uC-osflcyp138f07a1
aaaacaaaaaaaaaaaaggcttgtaaaaaaaaaaaacccccaaaaattttagaagaaaaaaaaaaacccatgaaaggggggggcccgggaaaaaaaaaaaaaaccggggggtttttaaaaaaaaaaaaacggctggggggggaaaaaaacactttttcaaaaaaaaagaagacccctacaaaaaaaaacccggggcc

SEQ ID NO: 15518 - DNA, 306 bp, Oryza sativa
  Clone ID: uC-osflcyp138f08a1
acgaaacaaatgccaaattgaatatctgtgtgtcaagtggtattcagtactaccagttttctgtattgagtaatgactggcaaagataaaaggttgcctcagatcattacatgtctttgcttgacggaaagacaagcaaaagctaattcaaagcatcacctcttctgtttaagaaaggcagtcacgtcttatgcaagtcattcattcaagcaaatactaatgaatttgttacaccacgctttggggtgttgtacaaagtcgtcacggcagaatatgcagacaaaactgaacattgatacgaactgc

SEQ ID NO: 15519 - DNA, 227 bp, Oryza sativa
  Clone ID: uC-osflcyp138f09a1
aaaaatgaaaaaactaaaaaaaaaggggggcaggggccaacaggaagggggaaaaaaccccaaaaaaaaaaaaaaacaacaaaccccccaaagggggggggggccaaaagagaaaaaaaacccaaaaaaaaagggggagccaaaaggggcaaaaaaaaaaacccgggcaaccaaagagcccctagggaacacccggcccccaaaaaatttgggaaaccccaaggggc

SEQ ID NO: 15520 - DNA, 220 bp, Oryza sativa
  Clone ID: uC-osflcyp138f10a1
aaaaaaaaaacccaacccccccttgggggggcagggaaaaaggacctttttccaaaaaagggccccccccaaaaaaaggttttttccgggaattgggccccaaaaaaaagggggggccgtttttaaaccaaaccaaaaatttgggccccaggggggcccggggacaaacctaagggggggccccccccccccgggggggggggaaaaacccggggcccca

SEQ ID NO: 15521 - DNA, 307 bp, Oryza sativa
  Clone ID: uC-osflcyp138f11a1
ggaggaaccctttaaaatcgggttgtttcacttatatttgtaaaatgtttgatcaaccgcattttgaacaaattacaataaaacaaaaccgtatcaaaattgaaaaactccctgggcagattgaacatcggtgtgtcagaatagaacttctcaacccggcaaatccaagtctgagtaacgtgaaaattttatggatgctaccccagtagcccagatgccaccattaacttttcatttttgccgattggtggacaggcttgaggggcttccgcaagctaaacgattttatggtatcttcaagatgctc

SEQ ID NO: 15522 - DNA, 305 bp, Oryza sativa
  Clone ID: uC-osflcyp138f12a1
ggtggtaccctcatcaggcatctgattaaatttgaataaaccgaacatatgtgtccaaaatcacaagtgagaaccacaggtagcaataggtattacagtctttgaatagaagaaaatgataacagataggccggttgaaaactttgtccacgctaatgaagaaacagcaacaaaaagagagaaacaagcaggaggacggcgataacagctcctcttggcttagcattcttgggtccgaagaattagaagcatttcctgtgcacaatggatgggccagactcatcgtacttagccttggcaatcca

SEQ ID NO: 15523 - DNA, 264 bp, Oryza sativa
  Clone ID: uC-osflcyp138g02a1
ggaaaataaaagttgccggcaaatttttttaccctccaattcaaacccgagataccctactatgcagtttacacatgggttttcaaaaaaaaaaaaaaaaaaaaaccggtttccccattttgttcgaaaaaatgtacggagggctactggctagtggctacaaatcaaatgcaaggcaagaatcccattcgatcagcaaagggcacacgggtgggggttctcctccatgctcagggccctcgggtagtaaaactggggcggccc

SEQ ID NO: 15524 - DNA, 219 bp, Oryza sativa
  Clone ID: uC-osflcyp138g03a1
gggaagaaaaacttatttttttttccaaaaaaggggccccggccccaaaacctgggccgggccacactaattttttggcaaaaataggggcccaatgccccttgggaaaagaaaaaaaaaaactttcccccccccctttaagggccccagctttaagcccaagaaaaggccccccccccgggaaaaggggcgggggggctttaaggggggggacaaaaa

SEQ ID NO: 15525 - DNA, 306 bp, Oryza sativa
  Clone ID: uC-osflcyp138g04a1
gaaaaacaaattagccatatcatgtacagcatagacggtttgaagcatcagagttgttattattggtcgtgaagatgatacatatggattaaaagaaaaataatgaaagaacaatatacagttctactaacctgtaattctgatacatacaacaaatgcatccagattgcctcttgttctgtttatcttaatttagaccccccacccccaccctatgcgaggggtgtaatcagtttaatttatttttctttttatacactcgaattaaagagcaaaactttatcctatcttcctttctcttgtatg

SEQ ID NO: 15526 - DNA, 303 bp, Oryza sativa
  Clone ID: uC-osflcyp138g05a1
ttttttttgtttttttttttttttttttttttttttttttttttttttttttttttttttttttttttttttttttaaaaaaagccggtatgtggggttttattccattcgagtggattcaattgggttatttaaacagggccattggccaagttaactccttaccggaaaactttttttggaagggggaaacccccttggggttccttttgggggcccctaaggcccttgcatacaaaaaaagaaaccgccttttttaaaggggggcggtgccttggtaaaagggggccccaatgccggttt

SEQ ID NO: 15527 - DNA, 308 bp, Oryza sativa
  Clone ID: uC-osflcyp138g06a1
gatacggatgtacatagaaggacttctacggtacaatttattagcgggcattgcttaattaccacacaacggcaaatcaattattcactgaagcatatatatagagaagctaccaccatgctacattatacatattgggtccgattctcaggtctccactctctccgccagcttgatacccgatgactccaagatctccaacgctggaatgtaaatttcaggttccagaggcctgatcactcctttcttttggatcttgttctggagcaacagcagagctcctattgctgctggtattccgaccgtga

SEQ ID NO: 15528 - DNA, 292 bp, Oryza sativa
  Clone ID: uC-osflcyp138g07a1
tttttttgtggtttttttttttttttttttttttttttttttattttttttttttttttttttttttttttttttttttttttttttttttttttttttttttttatttttttttttttttttttcaaaaagagaaaaaaaagggggttttttttacaacaactggtgttttggaaaaaaaatttaaaacggggggggaaaaaaaaaaaacccaacatttttgggatttgggggggggaaaaaaatacatacgcgccaatttttgttggggggaaaaaaatcgaccccctag

SEQ ID NO: 15529 - DNA, 243 bp, Oryza sativa
  Clone ID: uC-osflcyp138g08a1
agaaaacacataaattttattaagctagaacaattatagggaaaaaaccccattacatatccaagcaaaagagccatccttaaaaaaggggaggtaattgaactaccaaaggaaccttcctgaaaaaacccaaccttaaaacagaaaaaggaccaggtcaacaggtatctggggtgaacccgtgacaactgttaccctgggcctaaaaaaaggtgtgatccggttgacaaaccgtttaacccc

SEQ ID NO: 15530 - DNA, 232 bp, Oryza sativa
  Clone ID: uC-osflcyp138g10a1
acgaaaaaccccccattttttttatggggggcaaatttaaaaaaaatgccctaaaaacaaaattggggggaaaaaagccggggctttgttttaaaaaatccccccccaaagaaaatggggggcccttaacaaaaaaaccgggcggggggggggggaaaaaattattccctttgggtaaaaagcaggggcccttgggaggggcccaaacccaatgggaaaaaaaaaatttttt

SEQ ID NO: 15531 - DNA, 304 bp, Oryza sativa
  Clone ID: uC-osflcyp138g11a1
caagaacccctcaaaatcgggtagtttcacttatatttgtaaaatgtttgatcaaccgcatttcgaacaaattacaataaaacaaaaccgtatcaaaattgaaaaactccctgggcagcttgaacatcggtgtgtcagaatagaacttctcaacccggcaaatccaagtctgagtaacgtgaaaattttatggatgctaccccagtagcccagatgccaccattaacttttcatttttgccgattggtggacaggcttgaggggcttccgcaagcttaacgattttatggtatcttcaagatgc

SEQ ID NO: 15532 - DNA, 305 bp, Oryza sativa
  Clone ID: uC-osflcyp138g12a1
cagaactcgttaaaattggttgattttttttccctgaaatatcatcataagatccacatgaacatttcaggcaggcatgttgttacagttatacaagcaaagctttctgctactgagatgctcatgcgccgtgtttcgtcgacatctttcacttcgtaagtcggcacgccctctccaggcctccacatggaccatatctgcttatgtcaacactggatcaaaaagaatgtcaattaaacgggcagcagagatcaatgcttcttcaagtatagctcggtatattcctcccaacctagttcctcgag

SEQ ID NO: 15533 - DNA, 263 bp, Oryza sativa
  Clone ID: uC-osflcyp138h02a1
caccacaaacaaaaatgcacaaatgggcaacgaattccccaaaaaatttattgggccagtttgatctttttacgggatccatcagccattcaataaaaaatgggctactaatggaacaccctacaagcagcttgtaatattctagcattactttggttgacaaagggggacccagccacaaaatgattctctgccaattcttttaaaaatatctttgcaggggggggtgtttgtcccaaaccatagtggccggaaaagtccgt

SEQ ID NO: 15534 - DNA, 318 bp, Oryza sativa
  Clone ID: uC-osflcyp138h03a1
cgctaataaaaaataagtcttaaaattaaggaaaggattccaaatttctaatttgagtctcatttgcgaatcatttcggatttccatgaaacaagcatggcaatcatatgaaggagatccgctaccataataagcaaaatgagcaaccaacagcatgacgggaatcaaatcattacctatagcaaccagaaaagacacatgctaaaccagccacacaaggagtacctgctaagaaagaaatgtataacccgaacactgtctcaagtgggagtggcctatagcagcacaaggccaagctctgatggcttgattccattg

SEQ ID NO: 15535 - DNA, 269 bp, Oryza sativa
  Clone ID: uC-osflcyp138h04a1
gcatgcccaaaagcggcagagcaaaatgaaccataaactgaagggatgggcttctagatgggctgaattgtttaccactgcaacagctgcagggcgaatatttgccaactttgcatgcggcaagaaaaactttaggcaaagttaggatcgcattacacacacacacacacttagcaggtaatagccctccatacgggaaaaactactggcgtaacttcacgggcatgagtcacaccaccttttcactttgtcttgaccagctttttgat

SEQ ID NO: 15536 - DNA, 269 bp, Oryza sativa
  Clone ID: uC-osflcyp138h06a1
acaactaatcgattaataattagccaatatataataataatgcatcacacacatatatatatatatatatatatataatcgacccatccatgcattcaccgaccgaataaatggattggaccaattgggaattggggaatttggatggacaatgatgtgatcaccatcatcatcatcgtcagttcatgttgcgggagcagcgggtaatggcggagcacccgcgggggtagggattcgccgcctgctgcgacgcgcagttttggtagtag

SEQ ID NO: 15537 - DNA, 317 bp, Oryza sativa
  Clone ID: uC-osflcyp138h07a1
gtggatacgcaatatgagcacaactatataacttaataagcacattacagcacacacatggccaaggcagttatttgaatcagtctccaacatacttcaaatcatagaccacaccatacagcaaacatagtataaacattgtcatagagagtacagctgatagcagcttgtaatattctagcattactttggtagcatccctctacaaaacatagcagacatcaccagctcttcatcttggccatacacattcaacatggtttgctagtgacagaccacactgaccagaacatttcgtctcctcagtaggcaccagc

SEQ ID NO: 15538 - DNA, 281 bp, Oryza sativa
  Clone ID: uC-osflcyp138h08a1
attggtaaagcagttcatttccatttttaaaaggcattttcagatacccaaacattgatgttcgacatgtcgccacatatttgatgctctgcaattaaaaggaaaaaaaaaaggccctaatctttgaatcaggtacctggtttcattacagcgacgcattatttcgacatttcaaggggttagccaatacagatttccgaagagtcacagcatagcccagttctgtccagaaaatagtacagcaactttttttctgaattcatattgaccaataagaacaa

SEQ ID NO: 15539 - DNA, 312 bp, Oryza sativa
  Clone ID: uC-osflcyp138h09a1
ggtaaatgtacacagcaggtcagattatttatgcttttcagtgcaagattcaagatccatgagaagccttattcatctcagactgagctggttctctgaatacatccttgtttgcaattattacagacatggaagcctcaaggtcaacagattacacaaacgtcagtatgttgaactggcactaatcgttcttcgctttgatgaacttcttgatgatgcccatcatctcacttccagggaaacgtccaaggcagccccttgcagcggcaatctcgttgaattcaaagacagaatcgccactgaaagctttgc

SEQ ID NO: 15540 - DNA, 282 bp, Oryza sativa
  Clone ID: uC-osflcyp138h10a1
aggcaacagatttctgagttttgttacacataagagaactagatttagcagtcaccacgagcatgaacatatgatagaaacttaaacttaaaaaggggcgatatccacagcagctacctagaactatgaagtaaagaataaacctcaacacacacattaagaaggcaagcaatcccgagtgcatattatgtacacggacatgacataagttttcctatcctggcaatagcagattcacacttcacaggggttcatttcaacgtggaaattcatcagaaattc

SEQ ID NO: 15541 - DNA, 321 bp, Oryza sativa
  Clone ID: uC-osflcyp138h11a1
agcactgctgctcgccgcgccgcagctgctgcaccgcccagtgcttctggatgaacgccgactcccagctccgctccctctcgccgccggtcaccgccgacgacgactcgccgccgcggcaaggcctgccggccgcggcggcggcggacatgatctcgccggcaatgcggcgcctcaggccgtggtacattgccgacacggcgcggtgcgcgaacggcgcgcagatgctgctgctgctcatcccggcggcgcgcgccgtggcgtgcgtcagggtgttgaacctcgccgtcgtgctctggatctcgtcgaggcattggttgt

SEQ ID NO: 15542 - DNA, 524 bp, Oryza sativa
  Clone ID: uC-osflcyp141a01b1
cataactgcagaaactgtgcttgtgatttttgagaaagcatgaacccatcttcaggagagtcttagacgcgtggagggcatagtcacagatgaaattggctgtaagattgtagagattattgctgagttggaagaagtggtatttacattggatcaatcagagaaggaatctggtgacgaggtgatcaatttgctccagagaaacaggaaaatgaatagttccagtgatagtggggagcttgaggtttttcatatggctgcactaaaggtgggaattacgtcttccagggcagcactcactgagagaagggccctgaagaagctaattgagaaggctcgttctgatgaagataagcggaaagagtatgttgtgtcatacctgtacaatctaatgaggaaatactcaaaatttttcagaagtgaggctggtgatgatactgattctaaggatcgtcttcatgctcgccgacagtattaggcatggaggacatgtatggaccctatgggtatggccgagcattcag

SEQ ID NO: 15543 - DNA, 399 bp, Oryza sativa
  Clone ID: uC-osflcyp141a02b1
tatagcctatagcgtctctgggggggttctttgacaccactcctctcttttctccggctcctctcctcgctgcattgcgatcccaagagcctgtgagcctttaatgagctttgttcatcacgacctgaaaatcatggagtccgaagaccgctgccacaaggtccaggagcccaaattcgactgcctgctgtttgacctcgatgacactctgtacccactgagctcggggatcgcgtcccatgtcaagaagaacattggagattacatggttgagaagctgggtattgaggagagcaagattgagaaccttggcaatctgctgtacaagaactacggcacgacgatggccggactcagggcaataggctacagcttcgattacgatgagtaccacagttt

SEQ ID NO: 15544 - DNA, 412 bp, Oryza sativa
  Clone ID: uC-osflcyp141a04b1
acgcccgacggaagcgagggcctttttttgtctctctcaccggcgaccgcaccgacggcggcgggggcggggatggcgggctggctgaaggcgctgtgctacggcgcggggggcatggcggtggtggggctcgcggcgctcgtggcgctgcaggagcgcctcgtctacgtgcccgtgctcccggggatcgcgcgggcgtaccccatcacccccgaccgcctccgcctcatctacgaggacgtctggctccgcgccgtcgacggagtccgcctacactgctggttcatccgccactcccccacctgccgaggtccaactattctgttcttccaagaaaatgctggcaatattgcacatcgtctggactttgctcgactaatgatgcaacgactacagtgcaacgcatgtatgc

SEQ ID NO: 15545 - DNA, 277 bp, Oryza sativa
  Clone ID: uC-osflcyp141a06b1
tcaggggccaggtaagcgaagaggttcacttcgaggaagaagacccttattgagaagggcctcgagccctccgagttcgaggactccgtcgcgcaggctttctttgacctcgagaatggcaaccaggagctcaagagcgagctcaaggacctgtacatcaacaatgcagtccagatggatattgccgggaacaggaaggctgtggtgatccacgtgccgtaccgtctgcgcaaggcattcaaaaaaatccatgtcaggcttgtcagggagctccaga

SEQ ID NO: 15546 - DNA, 378 bp, Oryza sativa
  unsure (1)..(378): unsure at all n locations
  Clone ID: uC-osflcyp141b01b1
cgacaccgattagctatgatgggccgaagaggcagagactaaaccaccacaggagcgcggagagtcaccacacgtccaatggagtgacactaccggatgctctggctgttgatggtcccgttctgcaacaaggtaaaccagaacaaacctctgtggttgcctggaaactttctgatgcacagtccctgatggagcctgaaaagattttgctaacaaaatgggttcggataaggggctttgtgaaggaaatggtccaagtccctctgcggatctacgttctaactacctaatgaatactagcattgctgggcttgagaaagctgatgtcctncttttggttggtacacagccaagaagtgaagctgctatggttaatgc

SEQ ID NO: 15547 - DNA, 534 bp, Oryza sativa
  Clone ID: uC-osflcyp141b03b1
gtgatcggatccccacagctgtgcgtttgtttctcctctcgatctccattcttccctgagttcctcgtttgctccgcctctctttcactcatgggcaagattaagatcggaatcaatgggttcggccgcatcggcaggctggtggccagggtggcgctgcagagcgaggatgtcgagctcgttgccgtcaacgatcccttcatcaccaccgagtacatgacatacatgttcaagtatgacaccgtccacggccagcggaagcatcatgaggtcaaggtcaaggactccaagaccctcatctttggcacgaaagaggttgcggtgttcggctgcaggaaccctgaggagatcccatgggctgcggctggtgctgaatacgttgttgagtctactggtgttttcaccgacaaggacaaggcagcagctcacttgaagggtggagccaagaaggtcgtcatttctgctcccagcaaagacgcccacatgttcgtttgtggtgtctacgagaaggagtacaagtctgacgctaacatt

SEQ ID NO: 15548 - DNA, 532 bp, Oryza sativa
  Clone ID: uC-osflcyp141b09b1
tggcatccaacatttcgggggggggccttttcaaatctttagccgatttttcccaagccttcagagcatactcctttggagaaatcatctccctaaaaggatctttttgcacgcgcttcgccgccaatatgttccgagtggttccctaagcactcatctctggcatttgggcacctgcttaggctccttgagagaggccctctggattatcagagagtggtgcttctgatgcttaaatcactgttgcagcaaaccccagtggatccatctcagatacctcaagtgtacaatgttgcgtcacagctcgtggagagcgcactatgtgcagaggcattgaatgtgttggaggcgctcctacggagctgcagcggtgtaactggtggtcaaggcgatgatattggattcggcgagaatggtcacgggatgggggagaaggttcaccaaagcatgcttcttcctcaatcatcattcaaggctaggagtggacctcttaatatgctgctgccggtcagggtttgggactctatggggc

SEQ ID NO: 15549 - DNA, 397 bp, Oryza sativa
  Clone ID: uC-osflcyp141b10b1
gacccaggtcaccgttgagtacctgaacgacttccggcgccatggtccccgtccgcgtccacaccgtcctcatctccacccagcacgacgagaccgtcaccaacgacgagatcgccgccgacctcaaggagcacgtcatcaagccggtcatccccgacaagtacctcgacgagaagaccatcttccacctcaacccctcgggccgcttcgtcatcggcgggccccacggcgacgccggcctcaccggccgcaagatcatcatcgacacctacggcggatggggcgcgccggccggcggcgccttctccggcaaggacccgaccaaggtcgaccggagcggcgcctacatcgccaggcaggccgccaagagcatcgtcgccagcggcctcgcccgccg

SEQ ID NO: 15550 - DNA, 521 bp, Oryza sativa
  unsure (1)..(521): unsure at all n locations
  Clone ID: uC-osflcyp141c07b1
caaaaagaggcaattgagtcagaatgtagaaggtcctggtggatagaagccaaccaaggtggctccttcgtggatagccagagtgtttgaagcattctccatgtggaaagcacatgcagccagcggagctggccagtgtaaccatgatattgccataggggcacggtcggccaaggttgtaaatttacaaacggcgcagatgggagttcttcaaagtgacttgagcttccgaccagaatattcgagtatttgacccctcaaggctcaagctcacatcactcagacgaggggtgacatggcagaattcatccactgatttagctactagatgctaatctgtgagatatgctttgtacaattgttagtttagttctgtaaaagaaaacaagcaattgccattagtggatgattaaagagacgcgaggaaagtcttgttaggctgacatctgtagctgacagtttcccagtagctaaccagtacatgagtgaataangcacatgtaggttcaaatgtgctatga

SEQ ID NO: 15551 - DNA, 526 bp, Oryza sativa
  unsure (1)..(526): unsure at all n locations
  Clone ID: uC-osflcyp141c11b1
ccttcctatggtatattgctcacctttttgtcttgacattatgttgctttaatacacgcagtagatgcaccattggcatcaaatggctcagtgtactttgctcttctattcaaggagctagccaaaggtatatgtttttatatgaagatttccacagccatctctctgctcatcgtttggaaattttggcttctaatggatgaatttccagataggaattgagatacttaatgctctatgcctatatatatataagtttagatatattcgcttgacatatgttacacaccttgtgtgaatattaactggctaacatttgtattattaaatatgttttttttctattcttcctagctaattgtgctttgggctagtgcttgttttgattcagaggaggcatactgagcaagtaaaagtcacacttcctgctggcctttcgagtatgaatgctgttataccagaatgtgacgaggaaacatgaaagatcatcngtgatatgaacaatgcagcacttagaattggcaat

SEQ ID NO: 15552 - DNA, 514 bp, Oryza sativa
  Clone ID: uC-osflcyp141d03b1
taagaagttatatgctgacaagcatgatgtgctggtccctgatatattttgggactacacaagtgcaaaggttctgacaatggagtggattgagggtgtaaagctaaaccagcaagcagctattgaaaaacaaggttcgaaggttctggatttggtgaacattggtattcagtgcagcttaaggcaactattggagtacggttactttcatgctgatcctcatcctggtaacatattggcaacacccgaagggaagcttgcctttcttgattttggtatgacgagtgagaccccagaggatgcaagagtagccatcataggccatgttgttcacatggtcaatagggactatgaagcgatggctcgtgattattatgctctcgattttttggaacctgatgtagatgtttccccaattgtccctgctcttaagagtttctttgatgatgctctgaactcgacagtaagtgagctaaacttcaaaccatagctgatggcttagcgctgttctcta

SEQ ID NO: 15553 - DNA, 339 bp, Oryza sativa
  Clone ID: uC-osflcyp141d05b1
gaggaggaaagcgaagccaagcgagagaggtttccgccgtcgccttcccctccgccttccgatcggtcgcgaggtttcaagatggcgacgtgcacacttgcaacttcatgtgtgtccttgagcaatgctagaactcaggcctccaaggtggcggcggtcaagagcccggcatctctaagcttcttcagccaaggcatgcagtttccaagcctgaaggcctcctccaagaagcttgacgtctcggcaatggctacctacaaggctaagctcatcacaccagaagggcatgagcacgagctcgaggctccggatgacacctacatccttgatgccgcccag

SEQ ID NO: 15554 - DNA, 430 bp, Oryza sativa
  Clone ID: uC-osflcyp141d08b1
gcctccaaaccctagacgcggcggccatggttcttcgatccgtccctctcctcctgcgcctcctctcccccactgcctccccctccccctccccgccccattctctcgccgccgccgccgtctcccgccgcaccgtcacctacatgccgcggccgggggacggcgccccgcgcgccgtcacgctcatcccgggcgacggcatcgggcccctcgtcaccggcgccgtgcggcaggtgatggaggccatgcacgcgccggtctacttcgagtcctacgaggtccgcggcgacatgccgacggttccccccgaggtcatcgactccatccgccgcaacaaggtctgcctcatgggcggcctcgccaccccagtcggcggagggtgtctccttcctcaacgtgcagctccgcatggagcttgacctttacggcc

SEQ ID NO: 15555 - DNA, 441 bp, Oryza sativa
  Clone ID: uC-osflcyp141e03b1
atccactagagtacgagagacgcgcgctggttcgagctgaggttgctgcttcagcgcaggcaaagaggggcaagctagcgcaagcgacgctaagcccgcgcgcgcctgcgtgcgtgcgtcgtcggagagcgcgggcgccaaacggcgccgcggcggagtacgtcgagcgtcgcgtggacgttggcagcggcaaggtttcctctggttcttgagtttgagttgggcaaggaggttgtgaacgtagcctgaacctgacctgagattgtgaacgtaattttggggggataggttgttctgtactgtctcttcaatctgtgagttcgagacaggttcttgcaaaaaccaaaacatcatcagtgaaaaattgttcgtagcattttagctctagtatagattcgatcaatcgatcgttcggtcgttcgatcgttcgaggacgagaga

SEQ ID NO: 15556 - DNA, 135 bp, Oryza sativa
  Clone ID: uC-osflcyp141e07b1
acccaaaactgtcaaaacacgctgtatgttgtactagagaaaaacattgtacattttctaccccattttcaccttctccttgtgctgtatgtaacattcaatgcctgtaactggtaaaagtttcatgtgctcgtc

SEQ ID NO: 15557 - DNA, 451 bp, Oryza sativa
  Clone ID: uC-osflcyp141f03b1
tctcactcctactcctcggctgcccggattcttttatggatatttttctttttcatcttctttgagttggagggcttgattttaggggggactgctcgatcggcagggttaattccgatctctttatccttcccggacagagccgggatcagtattaggctttttgctagaagcacaaaacaaaaggaatgccggaagatgtgcttctatgatagagagctaccttgtgtgggaattggcaaggtagctcaaaatatttatgctttgtgtgctcttgatgatagtgaagtacgggtttatgcacagcaagtgctccttgtgcatttgcacgatggggctagatgtggcagttcaaccatcatgttagattaccatcttgctggggacgggtgaaattatttttcatttattgcctctctcatctgatactccctcatcaatcatcatcact

SEQ ID NO: 15558 - DNA, 416 bp, Oryza sativa
  Clone ID: uC-osflcyp141f05b1
ggtatcactccaccaagagtggtgaggagttgaccagcctcttggactacttatacccggatgaaggagggccagagtgagatctattacatcactggtgagagcaagaaggctgttgagatctcccccttcctcgagaagctgaagaagaagggctatgaggtcctgtacatggttgatgccattgatgagtacgctgttggtcagcttaaggagtttgaaggcaagaagctcgtctctgccaccaaggaaggtctgaagcttgatgagagtgaggacgagaagaagcggcaggaggaactcaaggagaagttcgagggtctgtgcaaggtgatcaaggaggtgctcggtgacaaggtggagaaggtctgttgtctctgaccgtgtggtggacttctcctgctgtctagtcactg

SEQ ID NO: 15559 - DNA, 484 bp, Oryza sativa
  unsure (1)..(484): unsure at all n locations
  Clone ID: uC-osflcyp141f10b1
tccccgccgccgccgccgttgggtgggtttgtagaaatcctttggctctttttaccccngagagtcttgtttcgtgatattcgtgaagagggggggagcttatgggggattcgtaagatcagaattggatcacgcgggggcgcgctcgggatcgggggttccaaacacagcttcttcgttgaatttaagtggatgtactaatggagtcaaagggtggcaaaaagaagtctagcagtagtcgctccttgatgtatgaagctccccttggctacagcattgaggacgttcgacctgccggaggcgtgaagaagttccagtctgctgcttactccaactgcgcgaagaagccatcctgatagccctttcggcttttccatcctagtagtttaggatttcttgcaattccattttggcacttttcttctgacctatttctctggctgctgcttcctgattatcgaccagttctctagtcttgcttcct

SEQ ID NO: 15560 - DNA, 486 bp, Oryza sativa
  Clone ID: uC-osflcyp141f11b1
ccgccgccgcatcgccctcgttagaacgatggcctcgtcggcgctgcaccagaccaccagcttcctcggcaccgcccctcgccgggatgagctcgtccgccgcgtcggcgactccggtggccgcatcaccatgcgccgcaccgtcaagagcgcgccccagagcatctggtatggacctgaccgtcccaagtacctgggcccgttctcggagcagacgccatcgtacctgaccggagagttcccgggagactacgggtgggacacggcggggctatcggccgacccggagacgttcgcgaggaacagggagctggaggtgatccactcgcggtgggcgatgctgggggcgctgggctgcgtcttccggagatcctgtccagaacggggtgaagttcggggagggcttgtggttcaaggccggcgcgcagatcttctccgaggggggggtcgactacgtggggaactccaacctagtgcacgcgcaga

SEQ ID NO: 15561 - DNA, 83 bp, Oryza sativa
  unsure (1)..(83): unsure at all n locations
  Clone ID: uC-osflcyp141g01b1
ccggcccgcaacgaacgggccgacccacgcaaaaaagaacttcctcaccaaaccngaaaaagaaccagcaaggggggggaagg

SEQ ID NO: 15562 - DNA, 434 bp, Oryza sativa
  Clone ID: uC-osflcyp141g02b1
atcgaggggtccggcgtttgttgtgctttattgagggggaattttttttcttaccttccgagctcgtttccgccgcgggcggcgtcgcagagtgtttgagaaataatacgagtcaatgaaattccgcaaagggacaaaggtggaggtgttgcacaaggggggtgcgccattgggttcctggaggcctgctgagattgtttctggcaatggacacacctatcttgtaagctatggctcatgtccaactcagggtagtgtggctgcggaaagggtgccaaggaaggcaatgagacctttgcgcccacccttggatggtattgtatgctgggtcaaaggtgagattgcagaagtctttgacagctacacatggaaggttgcggaagtggtgagattgcttggttttagttactatctcgtcaggctccttggatcct

SEQ ID NO: 15563 - DNA, 224 bp, Oryza sativa
  Clone ID: uC-osflcyp141g03b1
cccaacggatgagaaacctagcgaaaatctcgtccttgcggcagtacctctcccctcctctgatccctgctggtcttgatcttgtgatccaattccccaccaacatcacggctaccgattaaggactgcaaagagtacgtcctacggcacggagaaggggcataccctgaaggaggccgcccagcacatcttctgggaccatgtgctggccacatcatgggcag

SEQ ID NO: 15564 - DNA, 497 bp, Oryza sativa
  Clone ID: uC-osflcyp141g09b1
tcggggttttagcgagcgcgtgggaggcctgatgcgacgactactaccgcgccgccgtcggagaagaaggccgcggaagcaccagtaccagcacccgtatatgtcttctagccccttctccgatctggtggtagtcgtgctcctcgtctgcgccgtcgtcgccgcagccgtcctcctccccctcgtctgcgcccgccgatctatgcaccagaggctccacggctggaacaagtccacgtcgatgctcagggacgggttcggggtcaagtattccgggttcctccacataaggccgtgtggtttctgtcgaggagattgacggattcgatcgattcgtgttcgtctccgtcaaatttttgcacaagagaaaaaaaaaagtttcccccttttagaagttttttcccttcagttttgtcagttttggggagggactttagagttctttttccgcaagaggtagaagaagagagaaatggccccttccagcagcagcagca

SEQ ID NO: 15565 - DNA, 431 bp, Oryza sativa
  Clone ID: uC-osflcyp141g10b1
ctcgtcgaggagagagaaggagggggtttttgaggaggaggtggggatgcccccccgacgccgattcgggcgtgggggggggcgcgcgaccaggggaaccgccgcctcggctggacgcagccttggaagccgcacgtcggtagaacccccttgccagtggccggccatggcaccgaccggcggctgttcgggggcgccggatctggcgatgcaccgcgccgggcccggggatcggacagtaccagacgtggccagccgccgaccggaacgagctcgtgcgcgaacatccggtcgacgaccacatggtgctcatcggcgactggcgaccgaaggaccacggagccatggccaagatgctcgacgccggcaagagcttcggccgcccgacggggtccggcataaacgacaagtccggcaaggccgacgccgac

SEQ ID NO: 15566 - DNA, 529 bp, Oryza sativa
  Clone ID: uC-osflcyp141g11b1
gttaccagggtgataccaagagtttccttgtttgcaagatgaaaatggctacttctccggagatgctaagctgtttctgtccacctccattcaaacaagtttcttgaagttgtcacaaatatgaaatttgatgaagagccaaattacgccaaactgatttctctctttgatagtttgattgaggtacctgcctcaagacctatcagaattgatggcgctcttaaggttgggcagaaacgtggaagaaaccatgaagaagatgagcaacccaagaagaaagttagattaggtagcccagcagctcaatggatttctgtttataacgccaggcgggccatgaagcaaaggtaccactataacgtggctgacaacaggcttcagcagcatatagagaagggtaatgaagatggtctatcattagttgtgtggcgtcttcagcaaatctttgggccctcataatggatgcaggaactggtttcctttctcaagttcatgagctctcaccagtttttctgcataaggactggat

SEQ ID NO: 15567 - DNA, 217 bp, Oryza sativa
  Clone ID: uC-osflcyp141g12b1
tctctgtacctgttgcgccgacgggcggggcgttggaaggagaaagctcgccatctgcccccgcctacgtctcagaagggacatcgttgacagatggttgaggatgagctggctaatcaaccgcactgtacttaaacagcatcggtggcagatccaccttgactacagctatttctgaaagtgatgccgactagcatcaatggtgaccacaatgagt

SEQ ID NO: 15568 - DNA, 463 bp, Oryza sativa
  Clone ID: uC-osflcyp141h01b1
gggccgggccggaacgggtcgacttacttgaccggccctccttgccgcctcccaaactccgcctcctccgggtgggttgcattcccgcatacaccctatcgcaccgacttcgcgatctccgcgccgcagccatgaagggcaaggcccgacgcctccaagaagggcgagggcaggctcaaggccgccggcggcgccgggaagcggaagaaggccgccgctagcggcaagccgaagcgcccgccgtctgctttcttcgtcttcatgtctgagttcaggcaggagtaccaggcagcgcatcctgacaacaagagtgtcgccgccgtgagcaaggctgcaggggagaagtggcgagctatgtctgagcaagagaaggcaccttatgtggacaaggctggccaaaagaagcaggactacgagaagaccaaggccaacttcgataagaaggagagcacaagctcaaaga

SEQ ID NO: 15569 - DNA, 520 bp, Oryza sativa
  Clone ID: uC-osflcyp141h08b1
actgctccacatcccaaagtaaatccaacaatacaggatccgattcagagaaggatggatctgaaacacaggctgagccaggtagcttagcttctaacactgttttacgccttctgttgaaggttttcacactaatatgcaaggtgttgcaatgccagaaacagagacagcggtttcatcccatactgaaatttctgctgagcagacaaagtcagggcaagaggaaaacagtgatcgggcaatggcctctgctgagtggaaccgccagaaggaagctgagcttaatcagatgttaatgaaaatgatgcaagtcatgcctggaaagttttcgagtgctaatgtcaccactactggcatcacttccacaaatgagaagaaaggtggactgcaaggtcagcataaagagaagcgagactcgaaagctcgaaccgattaaggtggaaggcggccagcaaaggaggcaagcactaggccctttgaggaaacagctgggcagaagaggcagcattacccccaaact

SEQ ID NO: 15570 - DNA, 529 bp, Oryza sativa
  unsure (1)..(529): unsure at all n locations
  Clone ID: uC-osflcyp141h09b1
ggtgacctcgtcggggcggcggaaccctccagcctccgggctcgccgccgccgccaagctcgcatcccgcgccggccgccgagctcgccgcccaaccccaaccccaaatcaatcagatcaattcaactatccaagcctaagttgttggatctagaatccatggcgatcgtttacgcggtggtggcgcgtggcaccgtggttctcgccgagttctctgccgtctccgggaacgccggcgccgtcgcccgccgcatcctcgagaagcttccgcccgacgccgagtcgcgcctctgcttcgcgcaggaccgctacatcttccacgtcctccgctcccctccccccgccgccgccgatggcctcaccttcctctgcatggccaacgacaccttcggaagacgaattccctttctttacctcgaggacatccaaatgaggttcatcaagaactatggcagaatccgccataatgcgctcgcctatgccatgaacgatgagttctctagggtcctncatcaagcaatggagtact

SEQ ID NO: 15571 - DNA, 399 bp, Oryza sativa
  Clone ID: uC-osflcyp150h08a1
aatagtaaaaatacaagttcgtgaatggcgataatacttaaagctacctccaaatagcgtgtagcattgcgtagcaaaccaagcatataacttaggacaaacattcagttgcagcttcacatcatcgctgcttatcataactgcaataacagccgcagatggagcataaactaagtatattttcgtagttctagcttatatataatatcagaatcaccaactgtgaaccatccacaggatggtcgggggactactgatcagaatctactcctttgaggtgtggatggcagacacggtggagaccatagaatccacgccacatttgttgcggacgttggagcccctgcagatcttgtagtacccatgctttccccaggtctcgcccaagagttcttgatg

SEQ ID NO: 15572 - DNA, 164 bp, Oryza sativa
  Clone ID: uC-osflcyp150h09a1
gagaatataaaccaaggttagttaatgcactgggacatcaaagttacactttaataagatggaacagtgttattaccctcaaatacaagtctataggaagcagataagcgcgtatggtatataatggccagggcttttcatgtatgaagattggctgctgtaaa

SEQ ID NO: 15573 - DNA, 108 bp, Oryza sativa
  Clone ID: uC-osflcyp151a01a1
tttttggggtttttttttttttttggttttttaatttttttttttttttttttttttttttttttttttctttttttttcttttttttccattaaaagaaagggcaaa

SEQ ID NO: 15574 - DNA, 346 bp, Oryza sativa
  Clone ID: uC-osflcyp168a01b1
aatctcgaggccatcaccaagctgctcaacgcgggcgttacgccgtgcctgccgctccgtggcaccatcaccgcgtccggtgacctggttcccctgtcctacattgccggcctcatcaccggccgccccaactcgcaggccatctcgcccgacggcaggaaggtggacgccgccgaggcgttcaagctcgccggcatcgagggtggcttcttcacgctgaaccccaaggaaggtctcgccatcgtcaatggcacgtccgtggggtcggcgctcgcggccaccgtgatgttcgacgccaacatcctcgtcgtcctgtgcgaggtgctctcggcggtgttctgcgagg

SEQ ID NO: 15575 - DNA, 482 bp, Oryza sativa
  Clone ID: uC-osflcyp168a03b1
ttcggacatggcagcatcgctccaagccgcgggcaccctgatgcagccggccaagctcggcggccgggcctcctccgccgcgctgccatcgcgcccgtcttcgcacgtcgccagggcgttcggcgtcgacaccggtgccgccggcaggatcacgtgctccctgcagtccgacatccgggaggtcgccaacaagtgcgccgatgccgccaagctcgccggcttcgccctcgccacctcagctctgctcgtctcgggcgccagcgcggagggcgtgccgaggaggcttaccttcgacgagattcagagtaagacgtacatggaggtgaagggaaccggcacggcgaaccagtgcccgacggtggagggcggcgtcgactccttcgccttcaaggccggcaagtacaacatgaagaagttctgcctggagccgacctccttcaccggtaaggcggagggcgtggccaagaacgcgccacccgagt

SEQ ID NO: 15576 - DNA, 371 bp, Oryza sativa
  unsure (1)..(371): unsure at all n locations
  Clone ID: uC-osflcyp168a05b1
tgaaaaaaaaagagaggccacgaagagagctgagctgctgcctctagcttacttggtgataaggaggaggaggaggaggagggcaccnacatggcctgagtcacggcctacaccgtggcgctcctcggcgccaccggcgcgcgcgttcccgccgttccacgctccttcctgcttttgccgccccgtggttgagctcttcaaccgttgcgtctccagtaatctttcgcgtcttgaccctgttcctcggcaggtgcggtttttcttggtgaacattccatttcccacccggttattctctttttacccccccttggttcttttttttctcaccaaggttttcccccctgcccctttttttcctttttcttttt

SEQ ID NO: 15577 - DNA, 462 bp, Oryza sativa
  unsure (1)..(462): unsure at all n locations
  Clone ID: uC-osflcyp168b01b1
tttccctatcgtacctgccaccactcaccgtggaggatcttttgaagcacatcgagtacctgcttcgatccaagtgggtgccttgtctcgagttcagcaaggttgggttcgtctaccgtgagaaccacaggtctcccggatactacgatggcaggtattggaccatgtggaagctgcccatgttcggctgcaccgatgccacccaggtgctcaaggagctcgaggaggccaagaaggcctaccccgatgcctttgtccgtatcatcggcttcgacaacgtcaggcaggtgcagttgattagcttcatcgcctacaagcccccaggttgcgaggagtctggtggcaactaagctaagatcaagcatcgcgctggtggattgctgcctataataatagtatgcagctttgttttgggctatgntgatgatatatcaatataataagctatatatttttattttt

SEQ ID NO: 15578 - DNA, 384 bp, Oryza sativa
  Clone ID: uC-osflcyp168b11b1
tccaccaccaccacccatggcggccaccacccacgccgcctccctctccttccccctctctcacccccaccccacctcccccaaccctaaccctaacctccccctccgccgcgccccccaccgcgtccgctgcgccaccgacgccgccgccaccaggcaccggcgcgcggccgacgagaacatccgggaggaggcggcgaggcaccgcgccccgaaccacaacttctccgcgtggtacgcgcccttcccgcccgcccccaacggcgaccccgacgagcgctactccctggacgagatcgtctaccgctccagctcgggcggccctcttgacgtgcgccacgacatggacgcgctcgcccgctttccgggctcctactggcgcga

SEQ ID NO: 15579 - DNA, 443 bp, Oryza sativa
  Clone ID: uC-osflcyp168c01b1
ttaagatatccaaggaagatattgataagatgcagaagaaggtcagcactatctggaatgatgaattccaaaacagcaaagaatatattcccaataagagagactggctctcagcttactggactggattcaagtcaccagaacagatttcacgaatccgaaatactggtgtcaagccagagattctaaaacgtgttggagaagccatgactactctgcctgaaaatttcaagccccacagggctgtcaaaaagatttttgagctgcgtcgtcagatgattgagacgggcgaaggcattgattgggctgttggtgaagcacttgcttttgcaactcttataattgagggaaaccatgttaggttaagtggtcaggatgttgagaggggtacattcaaccaccgccatgctgttatccatgaccaggaaactggagagcaatac

SEQ ID NO: 15580 - DNA, 780 bp, Oryza sativa
  Clone ID: uC-osflcyp168c02b1
ttctttcgcttcgcgagattggttgattcatctcgcgattgatcgagctcgagcggcggtgaggtgaggtggaggaggaggaggaggaggatatttattgttttgtcgggaagatttaaaaatattattatgctatctatgttgtatattatgtgacccaatcatttacttataattgattattgatgattgtctttttgttttttaagtttattttttcttatatttttccttattattttttttcattctgtatattctttttccattttttactatttgttaaatttatgtctttaaacttttttaatttttactcattaattttatttttttattatttcttatatattttttttttatggtcatttctcttatttatttatttttattactattcttttttataatgtttttacatttttattctccttattgaaattttttctatttttttcctttgtttttttttttttttttgtttttaattcatctttttttttttcactattttttcttttatataatactttgtttttttttttggtttattatttatatttttttatactttatttttcattattatttgtttcttttatttttttttattttctttttttttttctttttcctttatattttattaatcttattttttaatttctatgtttttaacttttttccttcttttttttttttttctttttttatttttctaaaaattcccctccttttctttttatttttttttatcctatgtattttttattttttttt

SEQ ID NO: 15581 - DNA, 136 bp, Oryza sativa
  Clone ID: uC-osflcyp168c03b1
tcactatagttaaagctggtaccgctggcgggaccgcggcccggatttccggggttggcccaccccgtccttttggaaaaaaagggtggtttcagaaccaaacgggaaaatgggtttggcaggaccactttggaaa

SEQ ID NO: 15582 - DNA, 122 bp, Oryza sativa
  Clone ID: uC-osflcyp168c04b1
ttcatgtggaaccaaagagggagctctttggaaccaaggttgggggcttaagagaccaaaaaaaaattggttaggcgccccgggaatctttaaaaacttttttagtggtggggaccaaaaac

SEQ ID NO: 15583 - DNA, 223 bp, Oryza sativa
  Clone ID: uC-osflcyp168c05b1
tttagaaggttcgagtgcctatgacatcgccgttcttcaatctcagattcgaaatttagcacaagaagttagagatttgactatatcaaggcctattaccatattgagtggcaactccgactctggaggcagtttatcctcctacatactgcctgcagctgcagttggagcaatgggttactgctatatgtgggtgaaagggattgtccttatcgggatgtca

SEQ ID NO: 15584 - DNA, 387 bp, Oryza sativa
  Clone ID: uC-osflcyp168d01b1
ttcgcatgtcgtcggcgtcgtcgtcgcgcgggggcggttccgcgtcgtccgccgccgtggtgcggctccgcgaggcatgcgaggacgccgccgacggctccgtccacctcgtcatggagctctgcgagggcggcgagctgttcgaccgcatcgtggcgcgcggacactactccgagcgcgccgccgccaacatcttccgcaccatcgtcgacgtcgtccagctgtgccactcgaacggggtgatacaccgcgatctgaagccggagaacttcctgttcgcgaacaaatcggaggactcgccgctcaaggtcatcgacttcggcctctcggtgttcttcaagccaggcgaccggttcacgggaggtgtggggaggcgcgtactacatg

SEQ ID NO: 15585 - DNA, 153 bp, Oryza sativa
  Clone ID: uC-osflcyp168d06b1
tttgagttcatcagctaccctatctccctatggactgagaagacaactgagaaggagatttctgatgatgaagacgaggaagagaagaaggatgctgaggagggaaaggttgaggatgttgatgaggagaaggaagagaatgagacgaaaacg

SEQ ID NO: 15586 - DNA, 375 bp, Oryza sativa
  Clone ID: uC-osflcyp168d09b1
tccggatcgagggcggcaagatcattcgcgtggaggcttaccccatccccgagcacccgaggcctaagagggtggcggggagggtgacgctggtgggggacgcggcggggtacgtgacaaagtgctccggcgaggggatctacttcgcggcgaagagcgggcggatgtgcgcggaggcgatcgtggccgggtcggcgaacgggacgcggatggtggaggagagcgacctgcgcaggtacctggccgagttcgaccgcctctactggccgacgtacaaggtgctcgacgtgctccagaaggtgttctaccgctccaacgcctgccgcgaggcgttcgtcgagatgtgcgccgacgactactgtcagaggatgacct

SEQ ID NO: 15587 - DNA, 440 bp, Oryza sativa
  Clone ID: uC-osflcyp168e02b1
ttagtacataattttttttatgttatgttagcgttgaatattgacctggcctcaagttgctatgatagctctgaattttgatagataaacactgctaaggcacaagtgcggtattacagacatttcacagactgatatttataggattagatgttcaattaagtttcaggattttgctttgtttttaatgaagcatgatctgattttttttaccaattcatataattagatggctgagatttgttgtttcatgtaatgcatgcaaaatgtttgacttagaatttttcttgtagacaactcagggacagatggagtagtagctggagggccaatattatagcctaggacacgaacaaatgcagaaaatggaggtgttgattgctaatgatcctcggaatatgcccttagctggtgaagaaaatgttccaggtgttaataat

SEQ ID NO: 15588 - DNA, 134 bp, Oryza sativa
  Clone ID: uC-osflcyp168e05b1
tactccctcctctagtcctcttcttcttctagcttgtacgcgccactcactgttcgagctcgacggcggcggcggcggtggaggtcgtcgagtggtggtcggtgagatggttcaagatgaggtggaggtaggtg

SEQ ID NO: 15589 - DNA, 426 bp, Oryza sativa
  Clone ID: uC-osflcyp168e06b1
ttaaaaaatcataatatcggggctatgtctttatgtacgcatctacataactacaataagaaattagttttgaactgttttctgttaatttcaggcattatattcattgtggactcgaacagattttcaagccaggtgtgacaacgagctggtgaacagtttagggaacttcatcaattgagtactaagctttatcgggaaatcatagggaactgagatatggttctgatgtgcctcattgtggtgatgtggagagagatgctctgactcagacattggttgagactagagggaaatagattgatcaggacatggatgtgatggacagggtcaaattaaaacaagggctgaagaacgcaatggtcatttctagcgaaggaaatgggtacctacaagagagtcagtttttgaagctttacaacaaga

SEQ ID NO: 15590 - DNA, 276 bp, Oryza sativa
  Clone ID: uC-osflcyp168e09b1
taattgctggtattgttactgagagagattacctcaggaaaatcatagtgcagggacgatcttccaagtcaactaaagttggagacatcatgactgaagagaaccagctgatcacggtgaagcctgataccagagtcctgcaagcaatgcagctgatgacagagaagcgcatcaggcacatcccggagatcgacggcacgggcatggttgggatggtctccattggagacattgtccgcgccgtggtcagcgagcaccgggaagagctgtaccggc

SEQ ID NO: 15591 - DNA, 458 bp, Oryza sativa
  Clone ID: uC-osflcyp168e12b1
ttaccatttgaggaacagttgaaagctttccagagagcttattgatgaaggaaaggttcgctatattggtgtttccaatgaaacttcatatggagtgttggagtttgtacatgctgcaaaggttcaaggacttccaaagattgtgagcatccagaacagttatagtctaattgtgagatgtcactttgaaggttaaactgataacatttatccgttcactttattcattgcaagacttcttcatgctcttggttctgagcttaagtatgatatatctttgccatatcttttgttcataaacattggttaccttgcctgttatttccaacaaacatgagatgcagataaacattcattgttagataacttaatttattgcttttcttgattttaagattaacctattaagccctaacaaaagcaaaaatgatttataccagtgtcctggattattcaca

SEQ ID NO: 15592 - DNA, 460 bp, Oryza sativa
  Clone ID: uC-osflcyp168f01b1
tttcagcaaaaaaaaatcaaacaaaaagaaaaaatattccccatctgtgaaattcgcaaaaccctagcgcggcggcgatgtcgaacacgagggtgttcttcgacatgaccgtcggcggagctccggcggggcggatcgtgatggagctgtacgcgaaggacgtgccgcggacggcggagaacttccgcgcgctctgcaccggcgagaagggcgtgggcaagagcggcaagccgctgcactacaaggggagcaccttccaccgcgtgatcccggagttcatgtgccagggcggcgacttcacccgcggcaacggcacgggaggggaggtcgatctacggcgagaagttcgccgacgaggtgttcaagttcaagcacgacagccccggcattctggccatggcgaacgccgggcccaacacttacgggtcccagttcttcatctgcaccgtgccctgcagct

SEQ ID NO: 15593 - DNA, 367 bp, Oryza sativa
  Clone ID: uC-osflcyp168f02b1
tgcttctcctccccctcccggttcggttcgggtcggttcgggtccggttcgatttcggtttttccttcggttcgggggttggtgggaaagcatggcggcgccggatgttgagtaccgctgcttcgtcggcggcctcgcctgggccaccgacgaccgctccctcgaagccgccttctccacctacggcgagatcctcgagtccaagatcatcaacgatcgggagacggggaggtcgcgcgggttcgggttcgtgacgttctcgagcgagcaggccatgcgcgacgccatcgaggggatgaacggcaaggagctcgacggccgcaacatcaccgtcaacgaggcccagtcgcgccgctccggaggcgga

SEQ ID NO: 15594 - DNA, 193 bp, Oryza sativa
  Clone ID: uC-osflcyp168f06b1
atggaggcttagtttattctgacgaggattgggcttattgtaattacgctgacgggggctcttactgcctgctaaacaacagcgaattttatgtttggcatgcaggtgcatctgaaggcttatcccaggtgggtttactttagagaccacccgtatgcatgccacttattgatatgtacccaaaaaagtgggc

SEQ ID NO: 15595 - DNA, 372 bp, Oryza sativa
  Clone ID: uC-osflcyp168f07b1
tagaaaatgccggtgagccggatcgcggtgggcgcccccggcgagctgtcccacccggacacggccaaggccgccgtcgccgagttcatctctatgctcatcttcgtcttcgccggatcgggatccggcatggccttcagcaagctgacggacggcggcggcacgacgccgtcggggctgatcgccgcctccctggcgcacgcgctggccctgttcgtggcggtggcggtgggagccaacatctccggcgggcacgtgaacccggcggtgacattcggcgcgttcgtgggggggaacatcagcctggtgaaggcggtggtgtactgggtggcgcagctgctggggtcggtggtggcgtgcctgctgcttaag

SEQ ID NO: 15596 - DNA, 405 bp, Oryza sativa
  Clone ID: uC-osflcyp168f08b1
tttgttgttggtgttggcttcgctttgctgcgaagctatctggaggaaggaggaggaggaggaggaggcgggatggggcgcgggaagatcgagatcaagaggatcgagacctacaccaaccgtcaggtgaccttatccaagcgcaggagcgggatcctcaagacggcccgcgagatcagcgtcctgtgcgacgccgaggtcggagtcgatatcttctccagcgccggcacgctctacaactactggttccacaagaccttgctatcaagaattttggagaagtgccagaccaattcctgaaagatactgtgtgatgagaagcacaagagcctttaacgcgtagattgctcgacccaagaatgagaacgataatttgcctattgaggttaagcttttgtaaggtga

SEQ ID NO: 15597 - DNA, 218 bp, Oryza sativa
  Clone ID: uC-osflcyp168f11b1
tgtacgcccaagctcagcgcaacctctctcgaggtgctaatggcggcggcggcgggggacttcgcggcgagcaagcggaccatggcctacgcgctctgcaagcacctaagcctggatccgaatacaatatccattacaggtattgaagagagtgatatcgccaccctggtcttcactattgtgaaatcgagtgaagatgaggcactgaaatgggttga

SEQ ID NO: 15598 - DNA, 200 bp, Oryza sativa
  Clone ID: uC-osflcyp168g04b1
tacatgcctagactgtgcctgatgcctgaggggtgctctaacggccatgcccggtcgctgaactctggatatagcttagatcgaggtctaaaaagttgtagctgcaacccgcgcaaattgatagcagactaggccttgtaccggtgttacatttctgctgatgagaacgttcgcttgccttgcgtaggcaactgccagag

SEQ ID NO: 15599 - DNA, 373 bp, Oryza sativa
  Clone ID: uC-osflcyp168g05b1
ttctgacggccgccaaggaggaggcggcagcggcggcttcggcgccggcaatgggcggcgaggaggcggcggcgcgggcggcgcagaagcggtacgaggggctcctcacggtgcgggccaaggcggtcaagggcaagggcgcctggtactgggcgcacctggagccggtgctcatccccgccgccgacaccgggatgccgcccaaggccgtcaagctgcgctgcggcctctgctccgccgtcttctccgcctccaacccatcgcgcacggcttcggagcacctcaagcggggcacctgccccaacttctccgcgccaccgccgggcgccgccgcggcattcggttcgtccggttcgcagcatcagtagtagac

SEQ ID NO: 15600 - DNA, 402 bp, Oryza sativa
  Clone ID: uC-osflcyp168h01b1
ttggcacatcctgaaaggtctggatttgaaggcgcatggactcaggagcctctgaagtttgacaattcgtactttcttgagctactgaagggggaatctgaggggcttctgaagctcccaactgacaaggcattgttggaagatccttcatttagacgctatgtggatctttatgccagggatgaagacaccttcttcaaggactacgctgaatcgcacaagaagctttctgaacttggcttcactccacggagcagcggccctgcatctacgaaatctgatcttttaactggtgctgtactcgcacagagtgctgtcggggtaagctgttgctgcagctgtagttatcgtgagctacctatacgaggcttctaagaagagcaagtaagattgctatgttct

SEQ ID NO: 15601 - DNA, 451 bp, Oryza sativa
  Clone ID: uC-osflcyp168h05b1
tccagcgcgcgaatgtacgtgcggacgcaggacccaattcagggactacaccgatccgcgccggcggaacacgagagcgtatagatatagattgtgccggtacaagcacccgctgcggaagggggaaacatggtaatccgtacgagctgatgtcgtcgtgcttacagagctcatacgctgcactttgattattctgccagaagacagtcttaaggccctgcgctacccagtcgcccggcgatgccgctcctgctacgtggatctggcggcgggatttgcaacggggacggcgtcgggccctgctcgtgctggcacagaagttggggagaatagggagaaaagggttacttggctttggtgagcatttaacgggaggcaagtctgccctggtgcaaaagggaaagggatcgcttagggaagtctaatattgaggttgtttgccgcggggttt

SEQ ID NO: 15602 - DNA, 86 bp, Oryza sativa
  Clone ID: uC-osflcyp168h06b1
ttttcggtcaaagcttcgatcagagcatattggaagcgttgacaggttctaacgtattcgaacctacaactttttcacaagggctt

SEQ ID NO: 15603 - DNA, 365 bp, Oryza sativa
  Clone ID: uC-osflcyp168h08b1
ttgcctttgaatggaagtatagccaagctggtggatttacaaaattgattgcttgcagaacaaatgacaatgacctgattgggagaagtaggtaaatctgagctggctttgacatgtagtagtgtggcttttgcttcatcaaacaagtgcatcatcataatatggatgtcctgagaggactgctggacaggcaatgctgctgtggtggtgaaagtattatgcataacattccttatttttgctttcaaaatgttaatcaggtacatcacgatgttttttcctgtacatttccgatatgtgctctgattactgccggtaaatgtttttttccttaatgttcaaaatcatgtaggcttactgggatg

SEQ ID NO: 15604 - DNA, 430 bp, Oryza sativa
  Clone ID: uC-osflcyp168h10b1
ttaagcgagcgaaaccacacgcggcgcgtcggtcccaataccaccaacgcaacccctacccatggcggcggcgggcggcggcggcgcgggggcggccggaggcgggaaggtgtcgttcaagatcatcctcacctccgaccccaagctccccttcaaagtgtttagcgtgcccgaggcggcgccgttcaccgcggtgctcaagttcgccgccgaggagttcaaggtcccgccccagaccagcgccatcatcaccaacgatggagttggcatcaacccacagcaaagcgcaggcaatgtgtttctaaagcatggctcagagttgcgcctcattccccgcgatagagttggagcattggctgcgcctttctagaaactatagttataattgagaaacttaacagaattaaagttcgatgttgggggcttgctt

SEQ ID NO: 15605 - DNA, 434 bp, Oryza sativa
  Clone ID: uC-osflcyp169a03b1
ggtcgttgacaagttttggttgggcatgaggatgagggagagcaacgaggaggagaagaagagcgtgtgcgtgatggacgcgtccggcccgctcggtcacgccctcgtcgcccgtctactacgacgaggctacaccgaccacgccggcacctacccccaccaccaccaccatccagaagaagagtaccagcagcacccccgcctgaagctgttccgcgccgaccccttggactaccacgccatcgccgacgccgtccatggctgctccggcctcttcgccatcttcaacaccccttcctcctcgcaatcgcagtcgcactcctgcttcctagatgaggaggagggatgcgtggagcttcaaggtgccccgcggctcacatcattctggaggcgtgcgcgcagacggacaccatggagaggggtggtcttcaact

SEQ ID NO: 15606 - DNA, 373 bp, Oryza sativa
  Clone ID: uC-osflcyp169a07b1
gcgcaagcccagccgcctcgtcgtgttcgcgttcgtcgcgcggctccgacctccaaagccgccgctacccttcccgtcttcgtcgtcgccgcgcacgcagatcgcgaaccagcccgcgcgccgcgcagcagcgccgcggagaggaaaggagagctccggcgcgcaccccccgacaccatcttgtagggagagagggggattacgaccacgaagcgggccagacgcctatgcgagaagaaagagatgcggagtcttatgaacgggctcgatgcagacggtaagaccaccagtctatacaagctcaagctcggcgagatcgtcacgaccatacccaccatcggatctaatgctgacaccgtggaatacaagaaca

SEQ ID NO: 15607 - DNA, 498 bp, Oryza sativa
  unsure (1)..(498): unsure at all n locations
  Clone ID: uC-osflcyp169b08b1
gagcgatccaatcgcgtcgctaaaaccctagcggctggctgatttgggggattgctcgtcggagagatgaagatccagtgcaacgcgtgcggcgcggcggaggcgcgggtgctgtgctgcgccgacgaggcagcgctctgcacggcgtgcgacgaggaggtgcacgccgccaacaagctcgccgggaagcaccagcgggtgccgctgctctcgacgaccngcggcgccgcgcccgccgccgccgccccggccgtgcccaagtgcgacatctgccaggaggcttctggatacttcttctgcctggaggaccgtgcacttctttgcagagattgtgatgtttctatacacacagtaaactcctttgtttcagtacaccaaagattcctacaacaggtgttcaagttggccttgatcctgctgatccagttccacctgttgctgacaggcatgtaaagagtgctgggggttcagtgggattagcaactaaacatttgcaag

SEQ ID NO: 15608 - DNA, 349 bp, Oryza sativa
  Clone ID: uC-osflcyp169b11b1
gctagtttggtcgctctcgatttcgatttcccccaaatccaccgcaagagaaagccatgtcgccgccgagaagcgaagaggagatggcccgtacgaagcagaccgcccgcaagtccaccggcggcaaggccccgaggaagcagctcgccaccaaggcggcgaggaagtctgctccgaccaccggcggcgtgaagaagccccaccgttacaggccggggacggtggcgcttcgcgagatccgcaagtaccagaagagtacggagcttctgatccgcaagcttccctttcagcgccttgtacgcgagatcgcgcaggacttcaagaccgaccttcgctttcagagccatgc

SEQ ID NO: 15609 - DNA, 410 bp, Oryza sativa
  Clone ID: uC-osflcyp169c06b1
gttgagaagggtgggtacatcgtctctgacaactcaactggcaacaagcctgacttcattgtgatgagcactggctctgaactagagattgtcgccaaggctgctgatgagttgaggaaggaggggaagactgtccgtgtcgtgtcatttgtttgctgggagcttttcgatgaacagtcggctgagtacaaggagagtgttcttcctgaggctgttactgcaagagtcagccttgaagcagggtctactcttggatggcagaagtactgtttgaagcaaaggcaaggctaatggcatgcacaaatacggtgcatgtgctcctgctggaaagatctaccaggagtatggcatgaccgcatggaacgatgatcgaacaaggaagagcctgtaagattcacacgcgcgtttga

SEQ ID NO: 15610 - DNA, 441 bp, Oryza sativa
  Clone ID: uC-osflcyp169c12b1
tgtgtgatgaaaaatttatgatcatgatatgtcatgcaaccaaatgctgttttgaaggataaaaataatcaaatgttgataggcaagactaaagttgtgagaatctaatcagtgtttgttgtttatgtataaattttcattgtaaatgtgtcttgacatcagatagatctgcaggagaaatagctcttattgcggatggtatgaacatgataacggaaacagctgttggaggacatgctgttggtgctgttcgaagtcaaagttttcttggaactagcacaaaccagatgtcgcgccacagtactttctattggcacctgtcagatcattagttgatcttcttggaagcatcctgagagtatgtcggaattaggagctgggcgaaacagctacttccctgtcttcacaagtttatattgtggaacaagacagacgagtgag

SEQ ID NO: 15611 - DNA, 505 bp, Oryza sativa
  unsure (1)..(505): unsure at all n locations
  Clone ID: uC-osflcyp169e03b1
attaacttgtgtgggaagtactggatggtggtctgaagagcaagattgagatacagtggtctgacatctgtgccatgaaggtggtttctccagaaaatgaacctgggatcttggagatcgcattgtcccggcagccacttttctttcgagaaactaatccacagccaaggaaacacactttatggcaggcaacatctgatttcactggtggacaagcaagcattcacaggaggcattttcttcagtgcccgccaggaatgatgaataagcatgttgagaagcttgttcattgtgacccacgtctatattcactaagccagcagaacgacatcaatttggataatccgtactttgaatcaaagtcttctatatttgaagatgcagagggcataaaaggccaagattttgagcataaagatgatggcgatcagttagctccccaaagatttacagaactgttaccgnctcattctgcatcaggtaggatagatactgaagccagaca

SEQ ID NO: 15612 - DNA, 460 bp, Oryza sativa
  unsure (1)..(460): unsure at all n locations
  Clone ID: uC-osflcyp169e08b1
ctttctctgaagactttctacattctgaagattatattgggaataacattttaacatgaaggccgatcggttaatgttgtccaatctcgaccatgatttgggatacctacacaagtttccctcagattttccaatgtctcatgatcttgggttgagcttgtttacgcatgccggtacaatggtgggaagttctttgcgacagcacaggcagatctgttcttcaggaaatttgattgttcaggaagcatttgatcgcctcaacaagtttgccagagctttctgctactggctttctagagtgtctaatcccaagaatttacgtaggctaatgagtatggaaggccctagctctggagcttgccagtcacatatcaatcatttgagctcccgtatgcaaaatttggctgtattgagtttggttatctagtangagaagagcatgctgtacaactgcttttag

SEQ ID NO: 15613 - DNA, 389 bp, Oryza sativa
  Clone ID: uC-osflcyp169e09b1
atcgcacttgtagctctcgacccccgcatctcatccctcctctcgcttagttcagatcgaaatcgcaaatggcgaagattaagatcgggatcaatgggttcgggaggatcgggaggctcgtggccagggtggccctgcagagcgacgacgtcgagctcgtcgccgtcaacgaccccttcatcaccaccgactacatgacatacatgttcaagtatgacactgtgcacggccagtggaagcatcatgaggttaaggtgaaggactccaagacccttctcttcggtgagaagggaggtcaccttgttcggctgcaggaaccctgaggagatcccatggggtgagactgacgctgagttagatgtggagtccactggtggttttactgacaa

SEQ ID NO: 15614 - DNA, 458 bp, Oryza sativa
  unsure (1)..(458): unsure at all n locations
  Clone ID: uC-osflcyp169f07b1
tcggaaaaggcctgtgtcaaggagagggtagtagcaccttgctctcctttgccttcagagaaaccggaagcaatggcgtctgctactctcctcaagtcatctttccttcccaagaagtctgaatggggtgccacccgccaggctgccgtccccaagccggtgactgtctccatggttgtccgcgctggtgcctacgacgatgagcttgtcaagaccgcgaaaaccattgcatcaccaggaaggggtatccttgccatggatgagtcgaacgcgacctgcggtaagaggcttgcgtcaattggccttgagaacaccgaggccaaccgccaggcttaccggaccctccttgtcaccgcaccgggcttgggacagtacatctnncgtgctatcctcttcgaggagactctgtaccagtcaactgtagatggcaagaaagatgtcgacattcttactgagca

SEQ ID NO: 15615 - DNA, 444 bp, Oryza sativa
  unsure (1)..(444): unsure at all n locations
  Clone ID: uC-osflcyp169g01b1
ctcaccgttaccgccaccgacgagctccggtcgccgccggcgagaggcgccgtgcgatcccgggagatgccgccgctcacggggcccaagtccggggacgccctcttcggcagcgtcgagcgcgtcaacgcggagctgttcacgctcacgtacggggccatcgtcaggcagctgctcacggatctggaggaggtcgaggaggtcaacaagcagcttgatcagatgggctacaacattggaactcggttggttgacgagttcttggccaaatcaaatgtatcaagggtgtgttgacttcaaggagactgccgatgtcatcgcaaagcttggattaaaatgttttgggtgtgactgcaactgtcaccaattgggatgctgagggtacaagctgcagctttgtattggagggacaatctcttgtagactntgttggactttctgata

SEQ ID NO: 15616 - DNA, 581 bp, Oryza sativa
  Clone ID: uC-osflcyp169g03b1
cccgactcgaccgaccgtctcaccctgacgagcgagctagactagctgaggcgatggcctccagagcggcggcggtcgccgtactcctcctcgccgtggcggcggcgccgctcttcgccgcggcgagcgcgcatggccgaggctaccttggtgccaagtcctggcctcctgacggcagcctgagctcatcaagctccggcgaggctgcagcggcggacgtcgacgacggccacacggactggaagtgctactcctcctgcatgagcaagtgctgtcaccgccacgacgacgacgacgacgacaaggccaatgccaaggccaacgccaccgccggcgcctacgccgtcggcttcgacgatgactacaagtgcaagaagcagtgcctcggcaactgcttcaaggacgtgccggcccgttgctaccacaagtgcggcgacgactggtgcgcgaagctgacaccatatagcttcgcgaaggggcagtgctacaagaagtgcggcgaaaaatgcttacaccacggtccgaagcctgggcccaagcccaagcccaagccgagcccaccaaaacccatgcctggaccg

SEQ ID NO: 15617 - DNA, 364 bp, Oryza sativa
  Clone ID: uC-osflcyp169g09b1
gccacacaaggttctgaccacctaaggcaggtcttttctgcgcagatgggtttgagtgacaaggacatagttgctctttctggtggtcacaccctgggaagatgccacaaggagagatctggctttgagggagcctggacgtccaaccctttgatctttgacaactcttacttcaccgagcttgtgagtggcgagaaggaaggccttcttcagctgccaagtgacaaagccctcatggctgacccagccttccgtccactggtggagaaatatgctgcggatgaggacgccttctttgcggattacgccgaggcccacctcaagctctctgaaccgggatttgctgaggaataagaagccttta

SEQ ID NO: 15618 - DNA, 428 bp, Oryza sativa
  Clone ID: uC-osflcyp169h02b1
gtccgatcatattcgattcttattcttattcgaaataatccgtatttgtttccgtattcgttttcgtatccggtaaaaaatatgaaaacgaatatggtatgaacattatccatccgtatccgctctgttttcatccatacttcgaagtcgatggtaacctcaatctttttccaaaacaacctgcatttcgtcattaattccaagagaaattattgtcagcttttgtctaagatttttggtacggattattcgctctatgcttcttagattattttttaaaaaaaacttctgctgtcatattcacctggtctaaactattgtgaagtttatttctcaaaatattgtttattgtgttaaataagtataaaaatctgcctcaataattacgcaaaatcgatttcaatggggtgacacacattttagataaa

SEQ ID NO: 15619 - DNA, 376 bp, Oryza sativa
  unsure (1)..(376): unsure at all n locations
  Clone ID: uC-osflcyp169h07b1
ccaaaccttttagcttctcagccttttgcctctctttctactctctttcttggccgtctctcttatatccctcaatttaaccatcgagggcggccaaaaaaaagagagaaaggaagagcaaaataacacattacaccatggcgcgattcgtcatcatctccgtcgtcgtcgtcgccgccttcgccgctgccgctgtcgttgaggcccgggttggacctatcgacgtcgctccgaccaacctgatcaccaacccactcggtgccatcatcgacaatggccgcaagatcaccggcgtcgtcgtcgacgagtgcgcctggactgcgatcatgtcgcggncggtaacaagaagatgtgcaacacgctgaggaagctgcgg

SEQ ID NO: 15620 - DNA, 451 bp, Oryza sativa
  unsure (1)..(451): unsure at all n locations
  Clone ID: uC-osflcyp171a11b1
gctggtcggcgcctacgccgacgccgagaaggccaaggactccgtcggcatccgccccggcaagggtaagatgcgcaaccgccgctacatcaaccgcaagggccccctcatcgtctacggcaccgagggatccaagatcgtcaaggccttccgcaacctccccggcgtggatgtcgccaacgtcgagcgcctcaacctgctcgacctcgcacccggtggtcacctcgggcgcttcgtgatctggaccgagagcgccttcaagaagcttgggaggtgtatggcaccttcgaggcgccgtcgctgaagaagaaggggttcatcctgccgaggcccaagatggccaatgctgatcttggcaggatcatcaactctgatgaggtgcagtctgtgntgaagccgctcaacaggaggtcaagcgcagggagaagaagagaacccgctcaagaatgtc

SEQ ID NO: 15621 - DNA, 527 bp, Oryza sativa
  Clone ID: uC-osflcyp171b02b1
ggaattcacggctacgaatcataatgggagtagcctactgcctggagcacatgagccagctagatcctcctcctcttctcccaacaaatttgagctcatcatccatctacctcaccgaggacaacgcagccaagatcgccgacatcgaattctggaaggatgacatcaacaagcaggacgaccaagaaagcgtggtgtacaagttcgggatactggttctggaggtgatctccgggcggcggccattctccgaggacgaccggctcctggtgctgtgggcgtccagctacctggacggcaagaggccactcagcgccatggctgaccggacgctggtgaggtcgtcgtctgccgcgccggagaaagatgtggcggcgctgtgcgacgtggtgcggcagtgcgtgaggaggccggagggggggaagagagcgataagcatgggcgaggtggcgaggctggtgaggggcatcgccgggttgtcgccggagcaggcggcgccgagggagaagcccctgtggtgggcggag

SEQ ID NO: 15622 - DNA, 539 bp, Oryza sativa
  Clone ID: uC-osflcyp171b05b1
gagaatggtggcaaaaacttcatgattgatttcctcatgggtggagtgtcagccgcagtttcaaagactgctgctgctccgattgagcgtgtgaagctgcttatccagaaccaggatgaaatgatcaaggctggtaggctctcagagccatacaagggtattggggactgcttcggacgcactatcaaggatgagggttttgcttcattgtggagaggaaacactgccaatgtgatccgttacttccccacccaggctttgaactttgctttcaaggattacttcaagaggctgttcaacttcaagaaagacaaggatggttactggaagtggtttggtggcaaccttgcctctggtggtgctgctggtgcttcatctctgttttttgtgtactcccttgactatgctaggacaaggttggccaatgatgcgaaggctgccaagggaggaggtgaaaggcagttcaatggccttgtggatgtttaccgcaagactctcaagtcagatggcattgctgggttgtaccgtggatttaacat

SEQ ID NO: 15623 - DNA, 541 bp, Oryza sativa
  Clone ID: uC-osflcyp171b06b1
ctgctttcttgctttgtttggcaggaaaagcttcaggatgccccaaagccaagggaggagctcgacttgctgttcttccagttgcaggagacagctagaagggttgctaaccttcagcttgactgcaagatccaaattgacgtggagagttttgtgaactctttccggcctgatataatggaagcggtgtattcatgggccaaaggatccaaattctatcaaatcatggagatgacccaagtatttgagggcagcttgatcagggccatcagaaggcttgaggaggtcctgcaacagctaattctggcatcgaaatccatcggtgaaacccaattggaagcaaaacttgaggaggctgtcagtaagatcaagagggatatagtgtttgcagcatctttatacctgtaaaatagcttgatggtctcctgagcatgtgaaggctatcaaagtcactctttctgttgagctgcctgattactggtgaaggggagcaggtccttggcagaaaaatttgttgttactaccccagtaggcgctaact

SEQ ID NO: 15624 - DNA, 493 bp, Oryza sativa
  Clone ID: uC-osflcyp171b11b1
gtttttgaccaccattggttcctgaaattgagtcatggctgccaagctagctcgcctccacagtctccgcgaacgcctcggtgccaccttctcgtctcatcccaatgagttgattgcactcttctctaggtatgttaaccagggaaagggaatgctccagcgtcaccagctgcttgcggagttcgatgccttgatcgaagctgacaaagagaaatatgctccctttgaagacattctccgggctgctcaggaagccattgtgctgccgccctgggttgcactggccatcaggccaaggcctggtgtctgggactacattcgggtgaatgtaagtgagttggcagtggaagagctgagtgtttctgagtacttggcattcaaggaacagcttgttgatggacacaccaacagcaactttgttcttgagcttgattttgagcccttcaatgcctacttcccgcgcccgtccatgtccaagtccatcggaaatggg

SEQ ID NO: 15625 - DNA, 457 bp, Oryza sativa
  Clone ID: uC-osflcyp171c09b1
tgagatgctccaagctgaggactgcttctttgttgacagaatggtggtggtcatgttccgaagggagctgacctttgagcagaccctctgtctatgggaggttatgtgggccgatcaggcagcaaaccgtgctggaattgcaaaatcatcgttggggaaactgcggttaggagcccctccaactgatgacttgctactatatgcaattgcggccagcgtgctgcagaagaggaaactgataatagagagctatagcagcatggatgagatcataagggagtgtaacagcatggctgggcagctggacatttggaagctcctggacgatgcgcacgatctagtaacgacccttcacggtaggattgagtagtgatatactgatacactctacttattttgtacacggtttgatgaattactttacacatttttcattcttacgtcatatttcatctct

SEQ ID NO: 15626 - DNA, 483 bp, Oryza sativa
  unsure (1)..(483): unsure at all n locations
  Clone ID: uC-osflcyp171d01b1
cggtatgcggcgagctgaagctgctgggcgtttggagcagcccgtacgcgatcagggtccgcgtcgtcctcaacctcaagtcgctgccgtacgagtacgtggaggagaacctgggcgacaagagcgacctcctcctcgcctccaacccggtgcacaagagcgtccccgtcctgctccacgccggccggccggtgaacgagtcgcaggtcatcgtgcagtacatcgacgaggtctggccgggcggcgccgggggacgcccgtccgtgatgccctctgacccctacgagcgcgcggtggcgcgcttctgggccgcctacgtcgacgacaaggtccggccggcgtggctggccatcctgttcgggagcaagacggaggaggagagggcggcggcggtggcgcaggccgtggcggcgctggagacgctagagggcgcgttcggngagtgctccaaggggaagccgttcttcggcggcgacggcgtcg

SEQ ID NO: 15627 - DNA, 525 bp, Oryza sativa
  Clone ID: uC-osflcyp171d09b1
cccttttctccctgtcgagcaccgcttggccgccgtgcggcgaaaccctagcgattgtagcggccggaatcagaggcggcggaagccatggcggacgacgactacaacgacatggacatggggtatgaggatgagccaccagaacctgagattgaggaaggggctgaagaggaacctgagaataacgaggatggccctgatgaggttgtaggggcagaggctgaagataaggaacaagaaaaaactcagcgcccacgcaaaacgtcaaagtatatgacaaagtatgagcgtgcccgcatcctgggtacacgtgcattacagataagcatgaatgctccagttatggttgagcttgagggagaaactgatcctcttgagattgccatgaaagagctgagagcacgcaagatcccattcacaattaggcggtacttacctgacggaagctatgaggactggggcgttgacgagcttattgggaggactcctggaaacgccaggttggaggcggcttagctgtgactg

SEQ ID NO: 15628 - DNA, 486 bp, Oryza sativa
  Clone ID: uC-osflcyp171e02b1
cctttctctcgccgccgccgtcgccatgaagttcaacatcgccaacccgaccaccgggtgccagaagaagctcgagatcgatgacgaccagaagctccgggcattttatgacaagaggatctcccaggaagtcagtggtgatgctcttggcgaagaattcaagggctatgtattcaagatcatgggaggctgtgacaagcaaggtttccccatgaagcagggtgtgcttacttctggacgtgtccgccttctcctccacaggggtaccccctgcttccgtggatatggcaggcgtgatggtgagcgcagaaggaagtcagtccgtggttgcattgtcagccaagatctctctgttatcaacttggtgattgtaaagaagggtgataatgaccttcctggcttgactgacactgagaagcccaggatgaggggacccaagagggcatctaagatcaggaagctgtttaaccttgcccaggatgatga

SEQ ID NO: 15629 - DNA, 529 bp, Oryza sativa
  Clone ID: uC-osflcyp171e04b1
cgctgttcgatcttttttcgggagggcgttgcttgctcggatcggcggccatggctgagcccgctggggaggcggccccgcaggcggacggcgtctcggaggaggtggcggcgaggccgagggggtttaggcttcttggggaggacaagtccgtgcaccaggctctcggcggtggtaaagctgctgatgtacttttgtggaaagacaagaagatctctgctgcagtgataggtggcgcaactgtgttgtgggttctctttgaagttgttgattaccatttcctcactctgatatctcatgtcctgatcggtgtactggccatcttgttcttatggtccaaggcaaccatcttcatcaagaagagtccacctaatattccagaagtgaagatatctgaagatcttgctgtgaatgttgcactagcactgcgcactgacatcaaccaagcactttacttgctttgggagatttctctagggcatgacctgatgaagtttttaggcgtgatcgttgctctttggattctttt

SEQ ID NO: 15630 - DNA, 525 bp, Oryza sativa
  Clone ID: uC-osflcyp171e11b1
gttttatgttacttctcttctctgacaaagatcacatcgcagtcgctaaagcggctaagaatcattaaatgttttactggttcccgccctcatgtgcatgccacaaatctcatttcactgcatctggataccataacaaggactcctgtgcttgagagattgccatcattagtgaaagcagacatcaaacttaatagtcagtgtcgcgatttcagtagttttgatgacttttctgggggttgcaatcatgaattctgcggcggttgtcgtggcgtacaagctgagaactgcgtgcttctgcgaggtttatcagaagctaagaatctggcattggtagctgaaactaaaatgtttgttttcagaagagacttgaagtggtgccctatctttaggaatttgaagactttgttactcaatgaatgctggtgtgtgctttccgatttgagtgcgctagcatgcattcttcagcattcacctgttttagaaaagctcactcttcaacttttttcgatgggacctaaacat

SEQ ID NO: 15631 - DNA, 455 bp, Oryza sativa
  Clone ID: uC-osflcyp171f02b1
ggagtttttaaaccacctgatcgagcccgtatctttgcagccgcaggagaggaggacgagtcgttcgttgtgcagcaggaggcggcggcgaagatgtcgtggcagacgtacgtcgacgatcacctgatgtgcgagatcgagggccaccacctcacctccgccgtcatcgtcggccacgacggcaccgtctgggcacagagcgccgccttcccgcagttcaaaccggaggagatgaccaacatcatgaaggacttcgacgagccggggttcctcgccccgaccggactgtttcttggaccaaccaagtacatggtcatccaaggtgaacctggcgctgtcattcgtggcaagaagggatcaggaggcatcacggtgaagaagaccgggcaggcgctggtggtcggcatctacgatgagccgatgaccccagggcagtgcaacatggtggtcgagag

SEQ ID NO: 15632 - DNA, 528 bp, Oryza sativa
  Clone ID: uC-osflcyp171f07b1
ctctatacggcctccggatcaagtcgtacgaggactccaagtcgcagctgagggcgaccaagttcctgtacgacggcatcaccatggacaacgtgagctacccgatcatcatcgaccagaagtactgccccaacaacatctgctccgcgtccggcacgtccaaggtcgccgtcaccgacatcgtcttcaagaacatcgtcggcacgtcggcgacgcccgaggccgtcacgctcaactgcgccaacaacctgccgtgccagggcatccagctgcacaacgtcgacctcaagtacgccggccaagggaacaccaccctctccgtctgcaagaacgtcgccggcaagtccagcaacgtcgccaaggagctcgcctgcgtctgattttcatcttattatactactcttccgtttcatattacaaagtcatttgtttttttttaaagccaatttttttcaaagtttgaccaaagtttttttaaaaatatagtagtattttcaatatgaaaagaacatattatcagaatatatt

SEQ ID NO: 15633 - DNA, 533 bp, Oryza sativa
  Clone ID: uC-osflcyp171g01b1
ggaatgttgaagtcgacaaggagttgcaggccatgcgacagctctctgtcaaaaaggctaatgaggaagtgtttatcaagctgggctctgacaaggacttgaaaaagaaagaaaaggatgaaaaggatgaacgtaccaagaagtccctgagcatcaatgaattcttgaagccggctgaaggagagaggtactacaaccctggccgtggtcgtggccgtggcaggggtcgtggtgatcgtgggggtttctatggtggttacaatggcaacggtggtcgcagacaggctgccgctccggtgatcgaagatcaggcccagttcccctcgctaggtgggaaatgaaacgaacgctcggatctagcggctcggttgtcttgttggttcacctgaaaactgtgtcgtcgtcgagttgagtactgtgttgttatgtcgcccctcccagataggagtgttgtgtttatcgcctgtctgtatccccgtgcatatccgaggtgcacccatccatcaccattgctgtgtttgtcagacatagta

SEQ ID NO: 15634 - DNA, 461 bp, Oryza sativa
  Clone ID: uC-osflcyp171g05b1
gtagtatgtcactctggtattctcccatggcgactgcgaccgaggaggttgccgctgcggctgctgccgccggcgaggcgccgccgtcgccgccgccagcggtggtagaggaggtgaaggaggcggtggaggcaccgaagccggaggaggcgccgaaggctgaggagggggaggagaagatggcggtgggtgagaaggagaaggagatggcgaatagggagatggaacagcgtaagagcctggctcttacgttagagatattagagacctcagtgttaccattaagaagggtggtgaataagacgttgaactcgcttctttcaagtttattctcatcgaatagaacaaaggttaaaaccacttttgaaggcataaactaactcttgcgtttgtttagtgtctacaaatgctataaagagtaagaaaactgctgggaaaatcaaatgacgggaacaattaaa

SEQ ID NO: 15635 - DNA, 531 bp, Oryza sativa
  Clone ID: uC-osflcyp171h05b1
gcatcttgttgtagcagattgagagagagttgggaagaatgacacaagaaatttagagaaatagtactagctagctagcaagaatatagatatataatgtcgatcaagcactgcgagcaacacaaggattgcgagcggcagcgcctgtaccggcgttgctgcgcggccatcttcggcatccttctcctcctcctcctcatcgtcctcatcgtctggctcatcctccgccccaccaagcctcgcttctacctcaacgacctcaccgtcgtctgcctcaacgtcaccaccggtggttcctacgccggcgccaccgcctcctccggctacttctccttcctcaccgtcaccatgcagaccaccctcgccgcccgcaacggcaacgagcgcgtgggcatctactacgaccgcgccgacgtgtacgccgagtacaagggcctccgcatcaccgtgccgacgtcgctgccgccggtgtaccagggccacccggacctcaccgtctgttcccctttcctctccggcaacaacgtccag

SEQ ID NO: 15636 - DNA, 531 bp, Oryza sativa
  Clone ID: uC-osflcyp171h10b1
ctcatctcgcacgcacaccaacctcaagccatcgggcggtctccccccgcacttctcccaccgccaccgaggcacggctctcgaaccttcccactgcttcctccctcccctcccctccccgcgacgagacgagacgagaccggcggcggcggccggagtcaagagccttccctatgcagcggcggcggggcctcgccgcgctcgccgtcctcctcgccctcgcggcgcgcggcgcggacgcgtccgtccacgagtactcgggcggggggttcgcgccgcgggccaactccttcttcttccacggcggcagcgaggggctgtacgcctccgaccccacctccaactcctccgcctccttcatcaggtttgactctgtcacatttcgacggacccaggagtcagcaggtaggcatgaggctatgcagcaaaagacagggttagttgaggctattattgttgagatccaggacagaagcaagattggtggttcttacttgcattctgatgcaatatgctgcactcctgagctcg

SEQ ID NO: 15637 - DNA, 376 bp, Oryza sativa
  Clone ID: uC-osflcyp172a01b1
ccttcatcgccaacatccctctcctcctcaatccatcgggccgcccccagccacctcttggcctttccccgtgtcgctcccccggccagggaaggacggtggcgagcggattcgccgcctcccgtcctcgggagtgacggcggcgcatgaatccagtggcctccgtactcgggagcggcctggcgtgagcgggagcaccggcaacacacggatccacccacctccgccctccggagcggcggcggcgggcttaggtaggcgggagcgagcggctacggcggcggcggctgcggcgacgacagctacagtggctgcaacgacggcgacgacagcggcgacgctagctgcgacgatgaccatgacgatgaccagtggc

SEQ ID NO: 15638 - DNA, 493 bp, Oryza sativa
  Clone ID: uC-osflcyp172a03b1
cttagataggctgttgtaggagtgcgaacatgtgaaattgatgattgttcctagatttgaaccatttgatttccactggcactggtcttgttatttcattcctttctctgtctctttgttacttgtgattacatatttgtttttacagcttaacatcttttgctacagctgaaagagaagctgtgagtgcagcagaaaaggcagagagaaaggtgcagcttagagataaaaaacgtagggaagagatggagagggttgagaaggagaagcaggctgaaatcaggagctacaagaacctgatggtccaagagaagatgacttccaacaagcaggttgcatctggtagcaagaccttggaagaactagaggatgacttcatgtgagaagacaaaataacaaattcatactgccagggttctctaaactgtgtttttgtcaaagacaggacaagcattcgcgggttgcaagcttggacaagatgatttctgggcag

SEQ ID NO: 15639 - DNA, 534 bp, Oryza sativa
  Clone ID: uC-osflcyp172a04b1
cctacgcgtccggtgatatgatccagagcggcgtaattgaagcaaaattgaatggttcctcgtctccttatggcgataagaggttgcacggcataagcaatgggaactcaatcaagacttcaagagagcattatttgaagaaagatggcaaaactgaagctcctaaagcctctgaaaacaatggcctggcttccacacagaaagcttctgcacctcaaattgatggtgctaccttatctgctcaatctaagcaaattacttcaactggtcacagagaggtatcttcatcagatcgatctgcatctcttacacatgtgattgtgaaccaagcagtggccatggttccgtcgcaggaattgcaaccaaaggttgatggcttaaccgatacctcttccctgggcaatggcaatgcgatattgtctgagcgaaataacaaacatcccagcatcaaaatccattttctatgccagcttcccatggaaaggacacaggggcagggcttgctgcacaaactttcccaactaggatgctatt

SEQ ID NO: 15640 - DNA, 427 bp, Oryza sativa
  Clone ID: uC-osflcyp172a09b1
ctgtatacttgatgccggcgaatccgacgccgacaagcccaacgacggcctccgctccggcgagcacgtctcggtgatctgcgaacgggctgctacaaaattgtggctggcgcgtcgtctgtagaagaaattcgagtgcgcaacgcatcgacgcccaccccgaatcgttgaggtcgagatcgtgtcggctgctcggcggccatggattccgcgacgggggctatgggcaacctgctgctgaagctaggcgagcttgccatggacgagtacaagctgcagaagggcgtcaagaggaacgtcgaggctctccggagagagctggagagcatgcaggccgccctccgcaaggtcggcgacgtgccctccgaccagttcgacgagcaggtcgagctttgggcgcgcgacgtcagggaggttttctacgacg

SEQ ID NO: 15641 - DNA, 459 bp, Oryza sativa
  Clone ID: uC-osflcyp172b02b1
tataaataataaaaaaaaaaaaaaaaaaaaaaaggaaggggataattgaaaaaaaaggggggtattaaaagaaaaaagggaaagaggttctaggggttccagctttgtctcccaggtcaaaaaaaaataggggggggcccttttggggggtccatgttttggtgggggccctggccaggactgggttttttgttgggggcccctattttcattccctgggccgggtttttccccgggggggcgggggaaaccccgggggttccccaattttttggctttgggccccttcccctttttcccgggggttttataagcaggggggcccccccggttccccttcccaaactggtgcccctcctgatgggcaagggggcccccccttttggggcccctttacggggggggggggggggggtccccccctgggggccctttccctttggttggccccttagcccc

SEQ ID NO: 15642 - DNA, 429 bp, Oryza sativa
  unsure (1)..(429): unsure at all n locations
  Clone ID: uC-osflcyp172b10b1
tcggtgcaagatagtgaagacgggtgacagagctttagccaactacattgatgagtctggctacaaagcgattgctactgcgtagcatggagccatggagaaagatcaaatacttgaatgacttgttgggttagttcccagcctctagcctacttatcatgacagatttcagatttgtcactcggttccatacatttttagtatgcatgatgagagcagtgcatactaaattcagtagatgttgagttagtggcttagtgccccatttagctaaacgtgttaactctgaaagtggagcattgagttctccattgagtataggtcactttccctactttntgaaattttggattacagtattaagacatgaagaaaagtatcttgtgtatacacgattgacaaattttcatggttttatctacaatttag

SEQ ID NO: 15643 - DNA, 556 bp, Oryza sativa
  unsure (1)..(556): unsure at all n locations
  Clone ID: uC-osflcyp172b11b1
tcgctttccttctccgttcaaagcaagcccacctcgggcctcctcctttacaccttcctcttttccatcatctgcacgcgttcgtccaaactccgaaacaagaaagctcaaactcgatttcgaaattttcgaagccccaattctctcctcccacacgcggaatcgatcagcgcagcgcagggtaggctaggcgtcggcgtgctgtgatggcgccggtggtgtcggcgctggccaagtacaagctggtgttcctcggcgaccaggcggtggggaagacggccatcatcacccgcttcatgtacgacaagttcgacgccacctaccaggcgacgatcgggatcgatttcctctccaagacgatgtacctcgaggaccgaaccgtacggctgcagctttggtatctgagattctgaaaactctctctctttgtttttcccctatcatcatactctgcttatcaagcttgtcctgcttacgagaattcagttggtgcagcttagctgctgttacttgtccgatcaccgattntactctgcacaacctgttttattaccat

SEQ ID NO: 15644 - DNA, 406 bp, Oryza sativa
  Clone ID: uC-osflcyp172c01b1
cttctatgcccaccaccatcccagtacccccctggcctccctaatgccgcgcttgaacccaccattgaccaccaccatgggctccgacgcctccgaccccttgtaccgtgctgcaccttgtctgcgcacctgattgtgtttggcttgcgagctccgccgctgcgggggctacgcgtgctggcgacactccttactttatttgggctgcggacttcaagtgctcaggctcccattcgctataattgataagagttcaaagtgaaaatggatcaaggcgaatggttagctgatttgattaggaggaaaacttaattctggactccagtttgaactagcctgcccacatctggcttttcttgtaccacttccggtttcagaccaatgatgcccccatagttgggcagct

SEQ ID NO: 15645 - DNA, 506 bp, Oryza sativa
  unsure (1)..(506): unsure at all n locations
  Clone ID: uC-osflcyp172c04b1
agctgagcttgaagcagcagagcgaggtagacatggccgccgccaccatggccctctcgtccccggcgctggccggcaaggccgccgcgaaggtgttcggcgaggggcgcatcaccatgcgcaagtcggcggcgaagcccaagcccgccgcgtcggggagcccgtggtacggcgccgaccgcgtgctctacctcggcccgctctccggcgagccgccgagctacctgaccggcgagttccccggcgactacgggtgggacaccgcggggctctccgccgacccggagacgttcgccaagaaccgggagctggaggtgatccactccaggtgggcgatgctcggcgcgctgggctgcgtgttcccggagctcctcgcccgcaacggcgtcaagttcggcgaggcagtgtggttcaaggcggngtcgcagatcttcagcgagggcgggctcgactacctgggcaacccgagcctgatccacgcgcagagcatgctcgccatctgggcg

SEQ ID NO: 15646 - DNA, 311 bp, Oryza sativa
  Clone ID: uC-osflcyp172c07b1
tcgaatctatctgccacgatgttgaacaagttctcatgcattgccttggctggagtagcaacagagtatcttttgtatggatatgctgaaggaggactagctgacattgggcaactagatggattgctcaaaggtctaggtttcacccagaagaaagctgattcacaggtgagatgggctgtgctgaatactgtacctgcactgcgtcgccataaaaaggccagatcacagctcgcggaggcaatgtcctctgggaagtcagatggatcttgcatcggcgtcatataatagtttttttattttgaggatat

SEQ ID NO: 15647 - DNA, 445 bp, Oryza sativa
  Clone ID: uC-osflcyp172c09b1
tcggttaatacatggttgaacaatgactaaacgatcagggcatgtcagatggactctgttaagatgcgacatcagcctgaccaagatcagacatactaatgaaccttacagcacttgaaaaactggaaactatgctcctggaaatattggatagctttgagaagacagatttctggtacatagatcagagaaagcagtccttcagtgacagcatgaagtttcagcgcagcgaggacaagtggtggctccctgaaccatgtgtcccagagtcaggcctgtctgatcggatgcaccgtgagctgcaacaaaagagggaccaagcaagccaaatccacaagatggccatggagatcaacagcggcatcctctctgaaatgcaggttccactgtcatacatagaaacactgccaaagagtgggaagggttggcgtgggtgatgccatat

SEQ ID NO: 15648 - DNA, 521 bp, Oryza sativa
  Clone ID: uC-osflcyp172d02b1
gttgattgctgccgaattacgcggtgattgagcagaggtacttcgattgcgagatgttccctgcaaacgatgaccacccctcgcacgacgtagcgagggggcagaggttcgtcaaggaggtgtatgagacgctgcgagcgagtccgcagtggaacgagactgctctgatcatcacctatgatgagcatggtggattctatgaccatgtgcctacgccggttgtcggggttccacagcctgatggaattgttggccctgatccttactacttcaagtttgatcggcttggagtgcgcgtgccttctttccttatctcaccatggatcgagaagcgcactgtgatccatgaaccaaatgggccgcaggactcctcacaatatgagcactcatccatccctgcaacagtaaagaagctatttaatttacattctaacttcctgacaaagagggatgcatgggctgggacctttggaactacttcaaaaatccggaaacacccagaactgatggtccagagaaac

SEQ ID NO: 15649 - DNA, 477 bp, Oryza sativa
  Clone ID: uC-osflcyp172d04b1
gctgctgccatcaaagttcagaaaaaccatcgtatgcatcaggctaggaggtcctataaacacctaaatgcttcggttcttgtagtgcaaacggcattgcgagcgatggcagcaagaaatacgttcagatacaagaagcagtctaaggcagcagttaaaattcaggcccgttataggtgccatacagctcatgtgtaccataagaagttgaaacgcgcagccattgttgcgcaatgtagatggagaggaaagattgcaaggaaggaactcagaaaacttaaaatggaagctagagaaacaggtgctctcaaggaagcaaaggataaactcgaaaagaaagtggaagaacttacatggcgtgtgcagttagagaagagaatgaggacagacttggaagaagcgaaagcacagaagttgtcaaaactgcagagctctatggaagctctgcaggctaaattggacgagacaagtgcaaag

SEQ ID NO: 15650 - DNA, 165 bp, Oryza sativa
  Clone ID: uC-osflcyp172e12b1
cttctcttcctcctcctcctctctcgctctctcgctctctcttccccttccggcttccgcctccgcgcctcgacgaccagggtagctcggccggcgactccgcgagcggcggggagggagctggagcatcatcgcacgtgactggagagggaggacccccccccc

SEQ ID NO: 15651 - DNA, 496 bp, Oryza sativa
  Clone ID: uC-osflcyp172f01b1
ctttaatatagagaagcttcagtctcctattcaaagttacgcactaaagtttctgaaggacaactgtaatatatctgagtgtctgtcgttagctgaagcaccagctactcctgacaggctgaatgattttggcattttgaaagtgccagaccagctttcagaagcaaacctattttatggcgtagcccctggtgcgatgcaggcatacagagagtttgtggagggtccttttgtggctaataagaaaaccaataactctcgacagaagaatgattatgagccatctacaacaggctctgttgcagatgcacataggggacatgcatatgaagatgatgatgtcgaggcatccacttatgtattgcatggtacatatgatgatggtttgccatcaaaatcgagtcacaaaaagaaacaccttatgcagcaaaggatgaatggcacaaggcattacagtactggtgttgacatgccttatgatccatatgtggagagc

SEQ ID NO: 15652 - DNA, 502 bp, Oryza sativa
  Clone ID: uC-osflcyp172f04b1
atttaaatcatccatcgccgcttgcgactccgagcggcgccaccgccgccactgccgctgtctgccaccgccaccgccgccgtctgccaccgcgccgccgccgccgccctctgctgccgccgctctactccccggatctacacacaccatcctgcttcgctcccgttccatgcccaaaacttgcatatcacttgcgcctcaaacaagctagggtagtcgtcggggggaggggggcgcttgctgctccctccgccggcaccatctccagtcccggtgtcgtctctcgctgttggatccggagtcgcgcctccactttcttcatcctagtcgagccgagccactttgggatctaccgttgctgcctttatactgtaatattaattgaatttaccatggataaggattggatgaaaacatctagatctagtgctgaatataatatcggggttgataaatttatagaattcgccttatccaattcagcccacaacaatagaatcat

SEQ ID NO: 15653 - DNA, 583 bp, Oryza sativa
  Clone ID: uC-osflcyp172f05b1
ggccgcccgcctgaccggcccgaattcccggctccggacccacgcgacgcgttctcttgtacctgtcccacagttagccccgatccgaggggttcctagacctgattcgagggaaaaaaggggaggagaagatgagggagatcttgcacatccagggcgggcagtgcgggaaccagatcgggtccaagttctgggaggtggtgtgcgacgagcatggcatcgacccgacggggaggtacgccggcacgtcggacctgcagctggagcgcgtgaacgtctactacaacgaggcgtcgtgcggccggttcgtgccgcgcgccgtgctcatgcgcccacgttcctggggaccatggactccgtccgcacggggccctacggccagatcttccgtcccgacaactcgcggttatccgccagtaccggcgctcggcaacaacctgggccaagggccactacaccgagggcgccgggctcatcgactccgtcctcgacgtcgtccgcaaggaggccgagaattgcgactgccttcaggttttcaggtgtgccactcgctgggcggcggcacgggctccggcatgggcac

SEQ ID NO: 15654 - DNA, 347 bp, Oryza sativa
  unsure (1)..(347): unsure at all n locations
  Clone ID: uC-osflcyp172f07b1
tcgaataaaccctagacctccgtctccggcgaccctgccctcacctcctcgccgcggctccccccgcctgacctccgcgcgccccccgtcgactcccccccgcgaatccggatcccgcgcgcgcgaggaaggagggggggaggaggagcgggagatggggtcgnngnnganggtggngcggncggnggnggggctggattngntngccaacgacggcaccatggacgcgctgcgcatgaagatcatcgaccagctcaaggccaacgaggatatgaagaaaaatactatgatgatggcggagcaaagcagagttctaaacactcctggagctgagaagaagaccaaga

SEQ ID NO: 15655 - DNA, 527 bp, Oryza sativa
  unsure (1)..(527): unsure at all n locations
  Clone ID: uC-osflcyp172f10b1
tcgtctcactcccactaccatggatccttgcaagttgcggccgtcgagctcgttcgacacgaagacgacgacgacgaacgcgggagctccggtgtggaacgacaacgaggcgctgacagtggggcccagggggccgatcctcctcgaggactaccacctgatcgagaaggtggcgcacttcgcccgggagcgcatcccggagcgcgtggtccacgcccgcggcgcctccgccaagggcttcttcgagtgcacccacgacgtcaccgacatcacctgcgccgacttcctccggtccccgggcgcccagacccccgtcatcgtccgcttctccaccgtcatccacgagcgcggcagcccggagacgatccgcgacccgcgcgggttcgccgtcaagttctacacccgcgagggcaactgggacctcctcggcaacaacttccccgtcttcttcatccgcgacggcatcaagtttcccgacgtcatccacgccttcaagcccaacccgcgctcccatgtncaggagtact

SEQ ID NO: 15656 - DNA, 350 bp, Oryza sativa
  unsure (1)..(350): unsure at all n locations
  Clone ID: uC-osflcyp172g01b1
cttgctttcgtttcttctcacctcggcgagttcgcaacgtcctccctccaggctccacttcccagacgaatcggcggcggcggcggcggcggcggtgatggagtgcgttatcggggtcgtcggccgcgacttcgcggtggtggccgccgacacatcggcggtgcagagcatcctggtccacaagaccgacgaggacaaggtgatggtgctcgacagccacaagctgatgggcgcgtccggagagcccggcgaccgggtgcagttcaccgagttcatccagaagaatctccacctgtatcagttccgcaacaacatcccgctcagcaccgccgccaccgncaatttcaccc

SEQ ID NO: 15657 - DNA, 447 bp, Oryza sativa
  Clone ID: uC-osflcyp172g03b1
gtatatgggcaagatgggtgctcacatggcaatgcgaagcaatgagcaaagagcggtcctcaggtttaggccgctctgatgccattaggccaccatgtccatttccctcgcattcggaggactgcccttattcttacactcgccagtgcaaccacgatggacccatctttgtgattatgcttgaacatgataagatgtctgtccaagagcttcctgcgaactcaactgtagtcgatctgatggagagagtgggggccaatagtccaagatgcagcccttacagcttcccactgaaagaggaattgcgcccgagggttaaccacaagcccataagtgaccctaaccggaaactgtgcatgggagatgtggtggaaagctgacgcctgcgctcccacacaagtcgctaactgagtatcgggaagagatccagcgcatgtatgaacgagg

SEQ ID NO: 15658 - DNA, 466 bp, Oryza sativa
  unsure (1)..(466): unsure at all n locations
  Clone ID: uC-osflcyp172g07b1
tcgattgaagtctgtgagacaaactatgcttttcagtgcaaccttcccaccagagattcagagactggcttcggactttttgtcgaactacatatttatcactgttgggagggtgggttcaagtactgacctaattatgcagaaagttgaactcctctctgacggggagaaacgaggctacctgcttgatcttttacagaggcaatctgtcggtgtggctaacagtaagctgcagcaacctctgacattggtgtttgtggagacaaaacgagaggctgactctctgaggtactggctatacagcaaaggtttccctgcaacagcgatccatggtgacagaacacagcaggaaagggagagcgcactgagatcctttaagactggcctcactcctataatggttgccactgatgtagcctcacggggcctggatgtccaaaatgtngctcatgtgatcaactacgat

SEQ ID NO: 15659 - DNA, 483 bp, Oryza sativa
  Clone ID: uC-osflcyp172g08b1
cttctgttacgagaggaggaagaagaggcgggcagcgaggagggaggagatcggcggcgagcggctagaggggaggagaaggtaggttgcgatggcgtttctttttggtgtatctacgggaacaaggggcggtgcttcaacttctggctggactccagtgggtgcaatctttgtgattatccttgaaccgactgaggtcttttcctggaagctttctgcgaactcacctgttattctattgtgtttcagtgtaggtactgattttacaaggttgcgcctctttctgctttcttctttttattcgtattttcttcttttgttttttttttttaacctcatattgtttgccttttcttgtttctttttcttcttttatttttttcgattataatctcttttgttttttccccttatgttgtttattgttttctttttttcttattccttcttccttttttaatcaatttcattttttttcttttt

SEQ ID NO: 15660 - DNA, 414 bp, Oryza sativa
  Clone ID: uC-osflcyp172g09b1
tcgcgcaaactggcaaacatgaaagcaggctgcacgcacaaaactgcttcaccttttgcagatatgttggctttccgcaaggtcaaagcaaggcttggtggtcgtcttcgcctattaatctcgggtggggctccattaagtaatgagatcgaagagttcttgagagtaaccagctgcgcatactttatccaaggctatggtttaacagaaacactgggacctagcacggtctgttaccctgatgacatgtccctggttggaactgttggcgtggctgctacctatacggaattgcgattggaagaagtgcctgagatgggttacaatccacttggtactccttcccgtggtgaaatatgcgtccgaggaaccttcttaaccgaatactataaaaatcctgagctcacgaatgag

SEQ ID NO: 15661 - DNA, 352 bp, Oryza sativa
  unsure (1)..(352): unsure at all n locations
  Clone ID: uC-osflcyp172h01b1
gtttccactctcactggctcgcagtcgcacacactcccacgcctccgcgctcccgaccaccgtcgccatcatcatgccaccacccttgctcctcctcctcctcctcgccgccgccgccgccgccgtcgcgcccgcgcggtccaagtcgacgctggagtcctgctcctcttccaccgcctgcccagcgctgctctcctacacgctctacgccgacctcaagctcgccgagctggccgcgctcttctccgccgacccgctcgccatcctcgccgccaactccatcgacttcgccgtcccggaccccgccgaccgcatnctcccgcggggcttccgctccgcgtgcccggcccct

SEQ ID NO: 15662 - DNA, 291 bp, Oryza sativa
  Clone ID: uC-osflcyp172h03b1
acccgctttcctggctcgacccacgcctcccattcattatcacgtagttttaggccatctgagggccgttgaatggcactcggcctcctggatttatcatagcattggagtaatggctgcaaatccatcatcgcatcttcatatctgaagaaacgaaggtgaccactcagctcaagcccatggcctcctcgacgacgtccacgtcgccgtcgcggctgccgcggagcgcgagccgcaaagcgcccacctcgccgccgtccagcttcaacgcctagctccgtcaccaccagc

SEQ ID NO: 15663 - DNA, 439 bp, Oryza sativa
  unsure (1)..(439): unsure at all n locations
  Clone ID: uC-osflcyp172h07b1
tcgtatgaattaaaaaatcgatcctccaagaaaccacaggatgctgaccaacccatgggaaaaagggcctccagtccccagacaggatctgagaaagacacaaaagacaaatcagcgaaagacaaagacaaagacaaatcaggccagcaagacaaagacgcaaaagaggggtcctctgtgcaggttgctggttcttctggtgaaattactgcaggttaccttttgaagaaaagtgcaaaaacaaatggatggagaagggtgngtntttgtcctcaatgagaaaagcggaaagcttggctacacgaagaaacaagaggagagacatctctgcggtgtcatcactcttgaggagtgtaaccttgaaaaagtagaggaggaagaacctcctaaagtttgaaggaattaaaaaaggcaaatgggccagagaaaggcccaagtc

SEQ ID NO: 15664 - DNA, 505 bp, Oryza sativa
  Clone ID: uC-osflcyp172h10b1
tttcatcagtacaaaaggttaacttgaccaaatctgtcttcgatccaccttctcatccaaagaaggcagataaaggtgacactgatccaagttcaaagaaagttgtttcaggacagaagaatgtgggcaaatcggatgcaaatgttgattccaagaaagctgcaccagagaataaagctcctgagaataaggcaaatcctactccagcaaaaaataacaaaccttctggggataaaaagaaagcccaggagaaatctgcaggaaaaccaaatgagggagttgcggataaagctccacagaaaactgcagaaaaggactcagaatgcaatgtcagtatcctgaatatacaggttggccttattcgcaaagcatggaagcacccatctgctgacagcctcttggttgaggagatagatttgggagatggcaatgtgcatcaagttgttagtgggcttgccagttcttagcccagagaacttgtaatcggcatgtgtattatcacgat

SEQ ID NO: 15665 - DNA, 470 bp, Oryza sativa
  Clone ID: uC-osflcyp173a01b1
caggaaacaggaaccatttttactcatcatcagaaaacagttattttggatgctgatgctggcaatcataagaggaaaataattgcttttgttggtggcctcgatttatgcggtgggcgatatgatacacctagccatcctctatttaggtctcttcagactgtgcacaaggaggattattacaatccaaattttgctacagttgatgctcgtggcccaagggaaccatggcacgacttgcattccaagattgatggtccagcggcatatgatgttttgcaaaattttcaggagcgttggttaaaggcatccaaacgccatgggattaaaaagttaggaaaatcatatgatgatgccctcctcagtattgaaagaatacctgattttataagcattaatgacgcaatatattttagtgacaatgatccagagacgtggcatgttcaagtgtttcgttctattgattcaaa

SEQ ID NO: 15666 - DNA, 498 bp, Oryza sativa
  Clone ID: uC-osflcyp173a09b1
tttctctgctgtcatgtgaactacaatattgtctgttattttttttattatcatggtaagctggggtctttatgtgcattgtaatttgttgttttgagaaagtaatagaaaaaatgcctcttggttaactatagtgcaatgtgatcagtgatcatgacatgcattatctagagattatgaaaaaacttcgagagcaggtggtctttattatgaaaaaacttaaaacatattgtttttgttaattatatatttgaagctattggttctgaggcaattctgttgttttacctttgcaggccattagtttcacttgcttatccattatatgcctttctgagagcaatagaaacaaaatctcctgttgatgatcagcaatggctcacttactgggtgctgtactcgtttatcactttgtttgagcttacttttgctccagtaattgaatggcttcctttttggtcctatgcaaagttgttcttcaactgctggttggtctta

SEQ ID NO: 15667 - DNA, 519 bp, Oryza sativa
  Clone ID: uC-osflcyp173b01b1
cccaagacgagtcgcggctgaacagaagagggggagtaggcggcgatctccatctggcgactcgcgagcagagcaggggaggggatcctgatctggaagaagctctcctcttaatttcagcgccttaaccttaatacaagtaccagtttgagtttgtttgttcccaagttggatccggccctgggtaatttctttcttgctgaaggtggagagactgagctgagctatggacaacttgtggcatctcggggatgagttccgtgggcagtcgaaggtagtggaggaccgtcagtggtctctcatgacatcgaagttggctgagatcaacaagtccaaggcggagaggacgaatgagcttgactatgcgcggatgaacaccatccctgatgtcaagcaatgggataaggtatcctaccaccaagatgagagcaagatggaccacctcaatcttggccttatgaatctagatcttaagatgaacgacatcaggatgaatgacgcagctatgaagaatccttt

SEQ ID NO: 15668 - DNA, 443 bp, Oryza sativa
  Clone ID: uC-osflcyp173c06b1
cccggagagtttgcggtggaacgtgcaggcggagctggtgcactgccggtgggcgatgctgggcgcggcgggcatcttcatcccggagttcctgaccaagatcggcatcctcaacacgccgtcgtggtacaccgccggcgagcagcaatacttcaccgacaccaccaccctcttcatcatcgagctcatcctcatcggctgggccgagggccgccggtgggctgacatcatcaagcccggctgcgtcaacaccgaccccatcttccccaacaacaagctcaccggcaccgacgtcgggtaccctggtggtctgtggtttgacccgctcggctggggcaccggctcgccggagaagatcaaggagctgcgcaccaaggagatcaagacgggcggataggcatgctcgccgacatgggagcttggttccaggcagagtacaccgg

SEQ ID NO: 15669 - DNA, 402 bp, Oryza sativa
  Clone ID: uC-osflcyp173c11b1
ccccctcccaccgctggccgcctcccccgcccgacgccgcctctccccctccctcccaccgccgccggctctcccctctaccttccagcggtgccgcttcccctcccctcccctctcccatccggaggcgccgctccctctcccccaatccctcccgtctcgccggcacggcgcggagaaggcgggcgcggcggagacggcggcgacagccgtcccttcccctctccctctacctatcgacctcgacggccgtccatccctctcggcgatggcgccctctccaccctcaagatccggcggcgccgtcccaacggcggcgtcgacagcgatgacggtgtcggtggcatccgcgggtggatccgtcggccgtggtggcaaccgcgggcggatctggcagcgggg

SEQ ID NO: 15670 - DNA, 528 bp, Oryza sativa
  Clone ID: uC-osflcyp173c12b1
ttcggcacccaccaccaccaccttccttccttcttctctctttctcagtctcagatcagaattatcagatcccgagggagggaggaagggaggccatggccaccgcctttgactccccgaccgcctcgcccgccgcctctcccttcgacgacgactccttcctccgcttcgacgccgccgcgcccgctcccgcgccagcggacgccttcccgccatcaccggagccctacgccttccgccccgacgcgccctcccccttcggtatgcccgaggccaacggctccctccacgacgaccccttcgccgcccccgacaacgacaacggacccgtgctccctccgcccaaccagatgggcgctgacgagggcttcctgctgcgcgagtggcgccgtcaaaatgcattccttctggaggaaaaggagaagaaggaaaaggagatgaggaatcaaatcatgcttgatgccaaagaattcaagaaggcatttgctgataagcgaaagctgaaccgtgagacatgcaaggatcaaa

SEQ ID NO: 15671 - DNA, 419 bp, Oryza sativa
  Clone ID: uC-osflcyp173d03b1
caagcatctctcttcttcactagctacttctccaagttgaagagatcaaagctagaatgggcagctgcaagattctcctggtcacagctctcctggtcggcattgcctcccagcagagctctgccaccaggaacctgcacggagatcatcacgtcgcggaaaagaagttcggcggcggcggcggcggctacggtggcggtggcggtggagggtacggtggcggtggcggcggcggcggctactcaccgtcgcccacgaccggtttcaccgggagctgcgatttctggaagagccacccggagaagataatatcgtgcatcgggtcgctggggagcatcgtggggtcgttctgggacgtgtgcagcggcttcttcgggagcaagctgcagacgctgcaagacgcgctgtgcagcacccgc

SEQ ID NO: 15672 - DNA, 407 bp, Oryza sativa
  unsure (1)..(407): unsure at all n locations
  Clone ID: uC-osflcyp173e04b1
ctttgttgtcgtgggcactaagcctaaattaacccagggtgtacatggaatatcagtgccatatcaaaccacagactagtgtaaagtagaagagacgtgtccatccaaaaacccataagctagaagcattatggggaaggattgcggcaagcacggcgacgacgacttccggcagggatgccggcgattcatcaccgtccttgtcgtcctcgccatcctcgtcggcattaattgcctcatcgtctaccctngttcttcgccccacccacccttgcttctaccttcaggacgccaccctccgccagctcgacctttccaacttctcctccaccgtcggcggcgtcctctccaccaccatccaggttacctgttgtttccgtatccctaatgatccgtgtggtgtttat

SEQ ID NO: 15673 - DNA, 397 bp, Oryza sativa
  Clone ID: uC-osflcyp173e10b1
tggacgcgtgggcactaagctcaaattaagcaaaggattacaagcaaaaccaaaccaaaccaaagcaaagactagtgtagagtagaagagaagagtccaccaagaaaccaagaagctagaagcatcatggggaaggattgcggcaagcacggcgacgacgacttccggcagggatgccggcgattcatcaccgtcctcgtcgtcctcgccatcctcgtcggcatcatcgccctcatcgtctacctcgtcctccgccccacccaccctcgcttctacctccaggacgccaccctccgccagctcgacctctccaactcctcctccaccgccggcggcgtcctctccaccaccatccaggtcaccgtcgcctcccgcaaccccaacgaccgcgtcggcg

SEQ ID NO: 15674 - DNA, 479 bp, Oryza sativa
  Clone ID: uC-osflcyp173f01b1
aaaatgagaaaaaaatcgaaaaacccctcgaaaaacggcgaaacgggtggagagagtggaggagagaaagagggagctcaaaagatgaggccttcgaagaagaaaatcgaagaagaagaagccctcgccggcggcggcggtcggcgcggcggcgccgacgacccctccggcggcggtggatgggggagcggggggcgagtcgtgctcgccgtggtcggaaaccctaaccctagctgctgcggcggcggcggcggcggtggcgtcggagacggagtcgagcagcagctgcgaggcgttcacgtgctcgttgtcgtcgtcggctttcaaccccgggtcgtcgggggcggacttgacctcctccctctccgccttctcgtcgtcggcctccaccgcgttcgtcgtcggccgtcggcgaccaggcgggcgacatggcgtggctgctggacgccttcggcaccgtcacgatcgaccaggtggac

SEQ ID NO: 15675 - DNA, 598 bp, Oryza sativa
  Clone ID: uC-osflcyp173f03b1
tactatagggaatgctgctccgcctgctggtgctgcggcggaattggggcgtcccacgcgtccggtgattcctgtggtgagcagcttggacggggtactaagatcaccctctacctcaaggatgatcagctggaataccttgaggaacgtcgcctcaaggatctggtgagagatggattctgagttcatcagctaccctatctccttatggactgagaagacaaccgagaaggagatttctgatgatgaagacgaggaagagaagaaggatgctgaggagggaaaggttgaggatgttgttgaggagaatgcagagaaagagaacatatagatgaagatcaaggaagtctctcatgagtggaacgtgatgaacaagcgacaacctatttggttgaggcagccagaggagatcaccaaggaagagtatgcggctttctacaagagcttgacaaacgactgggaggaacatctggctgtcaagcacttctctgtggagggtcagcttgaattaaggccatcctgtttgtaccaaaaatagcgccatatgatcttttgacactcggaggagcatgcaacattagctgtcgtacccgggtgt

SEQ ID NO: 15676 - DNA, 469 bp, Oryza sativa
  Clone ID: uC-osflcyp173f05b1
gagagtcatccatggcttccaccgtcgccctcaagggccgcccgctcgccaccctcctcaggcagctcctcgccgccgacgcgccgcccgccgccaccgggaggcccgtcgccgccgctcccgccgcctccgggaagcccgtgaccgcccccgccgccgcgaccgccaccaacgccgcctcccgccgcctgtacaacaccgagggcgcgccgctccgccgctacgacgtcgtcgacgagtccggcaccgacagcggcgacgagtacgacgccaccgctacggcggtgaccgcggctacggcggcggcggcggcggctacggcgggggcgaccgcggctacggaggcggcggcgggtacggcggcggcggcggaggcagccgcgcgtgctacatgtgcggcgaggagggccacatggccagggactgctcccagggaggaggcggcggcggtggctaccgtggtggtggc

SEQ ID NO: 15677 - DNA, 332 bp, Oryza sativa
  Clone ID: uC-osflcyp173g01b1
gttcgccttctgcttcgatttcgacttcgattcggccggcggcggaggcggcgtcggttttggggggagttagggttagggttagggttagggtttccgggggtgatccctcccatggtgcagctgccgagctccgggaagcggccggccgagccggccatggcggcggcgtcggcggcgggggctacggtgaagctggaggcggacgagatgatgcatggcggcgaagaggacggcggcccgctcagcaagcgcgccaaggcgggggtccagatgcccgcgccgacgtcttcgactacgtcttcgcagcaagcaggacatgtatcaccatg

SEQ ID NO: 15678 - DNA, 531 bp, Oryza sativa
  unsure (1)..(531): unsure at all n locations
  Clone ID: uC-osflcyp173g04b1
cccacgcgtccgcccacgcgtgcgccgaccccatcatccagacgctgctccccatgtcgcccaagggggagatctgcgacatcaacggcgtgtgcgtggacgccaccgaggacgagctgttccggctcaccaccaaggaagggaagctgaccgtggagcgggagaaggtgaagatcgagacgcagcccttctcacccgtggtgcagttcgagcaggaccccgtccagatcctcgacgcgctcctcccgctctacctcaacagccagatcctccgcgcgctccaagagtcgctcgccagcgagctcgccgtcaggatgagcgccatgagcagcgccaccgacaacgccatcgagctccggaagaacctctccatggtctacaaccgccagcgccaggccaagatcaccggcgagatcctcgagatcgtcgtcggcgccgacgccctgccttaatccaatcaactcatttcttcatcccatccacctngcttgagctgctgaggttgctgctggtatatatactactctattc

SEQ ID NO: 15679 - DNA, 350 bp, Oryza sativa
  unsure (1)..(350): unsure at all n locations
  Clone ID: uC-osflcyp173g10b1
gtcgaaatgacttttcctgaggcaactgaaacaatgatgtagatgctgatgctaactacattagaaggtcacttttggtgtatccaggcatttggggggagatgtggatcactgcaaagatcaaacctccaccgagcacacacatcttcacatcttttccgtcgacaacttgcagagtcgacttatcacgcggccatcccagaactcggtagtattcataatcgcgacggcttgctggagcttgtatatgtgcccccactactttcatgtgtttaaatccctttttgtccttttggatgaggcgttctggctaacttaagaaatgatataggtttgcatttgcnnaatac

SEQ ID NO: 15680 - DNA, 408 bp, Oryza sativa
  Clone ID: uC-osflcyp173h01b1
ctcgatttttcaaaattttcaaattccaggagagaaacaactccatcaagctttctccccggagaggtgagcgatctggagtcggatctggctggaggacagaagcgcagccgtccactaccttctgcggcaacagcctcagcacagcaagccacgcggccgaagattccgccggccgccgagatcgaggcgttcttcgcggcggccgaggaggctgaggccaagcgcttcgccgccaagtaagtatatacagaatttttaccgctcgctgtaacatctagtaaaagttactgcgcgccctagctagcttcgttcttcttctccgatgctcgcgcgtgggcgtgaatttgccgctgctgccggcgagcaagataattaacggtgcgtgcgctttttcccatggccgca

SEQ ID NO: 15681 - DNA, 520 bp, Oryza sativa
  Clone ID: uC-osflcyp173h03b1
ctcagataccagggagatggacggccgttctggaggattgtggtggcagaggcaaccgaatgcaccaataatgattatttcgaagaagtatatgagtattacgctcatggagatgcatggcgtctgcctgctggggcttacgaaacactgcgtgatctaaaggatgctggagttaagctagctgttgtatctaacttcgacacacggttacgaaaattacttaaggaccttcatgtctcggatatgtttgatgccattgttgtatcatcggaggttggacatgaaaaacctgctccagagatcttcaagagagcattagatcaaattggcgtagaggccagcaaggcagtacatgttggagatgatgaaactgcagacaaggcaggtgctaatgccatagggcttgagtgctggctgtggggacaggatgtgaggacattttttgagatacaagaccggattttaacaagatttccacaatgacatcatagaaaccttaccgcaggtgatcttcacaggc

SEQ ID NO: 15682 - DNA, 503 bp, Oryza sativa
  Clone ID: uC-osflcyp173h09b1
gtaagcgagccaatctattcatacaggtacggagtaaatgtccagccaaaagtaaaaaaggtatcatcacttcatcaagaacttatgtacaacagactgccttctgctttcacttaaaaagcaaaagttttacaacacaatttccttctcggagctaaatccatttggtaaaatggtacatttcccgcacaagaacaggatatgaatagtaccttgatatccagagtaaaaaggaaagaaatgaaagaagaaaaatgccgggaacaaccacaacggcatgcatccacaaccacaaccagatggcaatatgaggacatcaaactatgttgctattcacaagctagcttggtaccaaagctgctgaggctgatagcaaaggcttgaaacgctgagagtggctgccggtaatccatcgtgaagatattgtcatcgaccttaccaaactgcaacagaactgtttcctcatccttcgagctagcaggatcattgggatcagcagcagc

SEQ ID NO: 15683 - DNA, 378 bp, Oryza sativa
  Clone ID: uC-osflcyp173h10b1
tacatacactcgggcagcatatgccctacatctgatactgctaagattggtcacttgagctgcaaccgtgggatgagcgatgctacctgatgccgaaggaaagccacataagagcacaacgactacctggacatgcgtcggtagacagcccactgttactgtcatagacctgaatagacttatccgatagttaatatgctgcaaaaaaggtaggacatatggcaaacattcctgcttaacgatgtgcaaacaaagatcaaggaaattgacggaatgctgaactcatcagatactgagcatgctactagaactactgacaatgccgagaagatacagagaatgctaaatcaagcgcggattgctaccattatcattgac

SEQ ID NO: 15684 - DNA, 474 bp, Oryza sativa
  Clone ID: uC-osflcyp017a04b1
tttgttttcgatgcggcaataaaggtggtgctgcagccacccaaggcgaagaagaagataaaggcgcaaaatggagcacgcccccctttgtgatctaatcatcagtagacgacgaagaagaagaacgatgaagttgccaggctttattattgttgcgtcttgcttcagcgaaacagcattcatggtccggggatcctagtttactggcagctgcagcaaggcctctttgtcgaggcaatgagcgatccgtttgtttcattttctcctttctgccttgtgattatctcgtgtgactgacaagtcgtggcaattaggtaactttcctagatggtatttcctggtgttgagaaaaaaaattcttgttatccctggttcataagtagacatgatgtaatcgcacctcagttattcttttccttgttatttcactttaatggaaaattatggtttccctttaaaaaaaaaaacactttt

SEQ ID NO: 15685 - DNA, 469 bp, Oryza sativa
  Clone ID: uC-osflcyp017a07b1
tctacgtagtgggggtgtgcttgaggctattagaataagtcttgctggttatccaacaaggaggacatataccgaattcattgatcgctttggacttcttcttccagaacatatggatgaaaggtttgatgagaaatcgctgacagaaaaaatactaaggcaattacatcttgagaactttcaaaacaaaagtttttctcagggctggccagattgctgttttggactccaaacgtaccgagattctggaaaaggctgccaggatagttcagggtcgctttcgaacctttgttgcttgcaaggagtttcattctactaagaaagcttctgtttctctccaagcatattgccgagggtgtttggcacgaaatttgcttgatgctaagagacagatagtagcagctgtttcagtagaaaagtatgctcggagatggttctgtcggtgtgaatatttgcatcttcgttcttt

SEQ ID NO: 15686 - DNA, 437 bp, Oryza sativa
  Clone ID: uC-osflcyp017a08b1
gtggttttgctcctaacattcaggaaaacaaggagggtcttgagctcttgaagactgcaattgaaaaggctggatacactggcaaggttgtcattggaatggatgttgctgcttcggaattctacaatgacaaggacaaaacctatgaccttaacttcaaggaggagaacaatgatggttcacaaaagatatctggtgatagcctgaagaatgtatacaagtcatttgtcagtgaataccccattgtctcgattgaggatccgtttgaccaggatgactgggaacactatgctaagatgaccgctgaaattggagagcaagtgcagattgtcggtgatgacctccttgtcaccaacccaaccagggtggcaaaggcaatccaggagaagtcatgcaatgctcttttgctgaaggttaaccaaattggatctgtcact

SEQ ID NO: 15687 - DNA, 235 bp, Oryza sativa
  Clone ID: uC-osflcyp017a10b1
tttacttcccctcatatcatctctgctggcgagctggttaaccgagcataggttcatatatacaccgatcgatgctgagccacactatcgaaggcgatcgcatgatgtacaactaactaagcttagctgagctgactagttctctagaacgattaggttgctagtgttgacaagctgactacagacgagaagaggaccgcgaacgtgttatgaaggcagagcagtactaggattc

SEQ ID NO: 15688 - DNA, 430 bp, Oryza sativa
  Clone ID: uC-osflcyp017b05b1
tttgagagtatcagggaactggagaagtttattgtgaagcataggaaggactatgttgacttgcatcgcaccacggagcaagaaagggacaacattgagcatgaggtcagtgtttttgtaaaagcatgcaaggaacaaatagatatcctaaagaacaggatccatgaagaaaaaggtggaagtacaaagacatggcttggtacaagcgatgagagctcccggttggatttgatagctcaccagcatggcgtggttttgattttgagtgagcgtcttcactcagtaactgtgcaatttgatcgtcttcggaccatgcgttttcaagatgctattaacagagcgatgccaagaaaacggattcagaagaaacgagaaaccaaagctgctgaaccatttaagccaaaccttgtattaaaatctgatgtttcaa

SEQ ID NO: 15689 - DNA, 232 bp, Oryza sativa
  Clone ID: uC-osflcyp017b12b1
acgcgcgtgtgttccctcagcggcaatcaaggtggcgcggcagccactccaggtggagaagaagataaaggcgcaaaatggagcacgcccccctttgtgatctaatcatcagtagcgggaccgcaaccagaacgatgaagtcgccaggctttattattgctgcgtcttgcttcaatgccaccgcactcatggtgcggggatcctagctaactgccatcctcatgtaggcctc

SEQ ID NO: 15690 - DNA, 460 bp, Oryza sativa
  Clone ID: uC-osflcyp017c01b1
ctagcaatggcgtcgcaatcactgctaccagtacaaagaaggctgatctgatttttggtgagatccaatcacagataaagaacaagaacatcactgtagatgtgaaagcaaactcagactcaaatgttgttactactgtaaccgttgatgagctaacaccaggattgaagtccatcttgagctttgctgttccggatcaaagatctggaaagtttgagcttcaatactcgcatgattatgctggtgttagtgcaagtattggtttgactgccagtcctgtagtcaatctctccagtgtttttggaaccaaggctcttgctgctggtgctgatgtctcacttgataccgccacggggaacttgaccaaatataatgctggattgagcttcagtaatgatgatcttatcgcgtcattgaacctgaacaacaagggagatagtctcactgcatcttattacca

SEQ ID NO: 15691 - DNA, 419 bp, Oryza sativa
  Clone ID: uC-osflcyp017c03b1
ttacaacttcaacgcctactacgacccggagctgaagcgcgcgcggcagaggctcctcgccggccgcggcgtgctcgtgctcgacgccgacatcaacgacgcgctcctgctcgagaagctgttcgacctggtgccgttcacccacgtgctgcacctcgccgcgcaggccggcgtgcgctacgccatggaggcgccgcagacgtacgtggcgtccaacgtggccgggctcgtgaccgtcttcgaggtcgccgccaagcacgccgacccgcagccggcgatcgtctgggcgtcgtcgtcgtcggtgtacggccttaacaccgacgcacccttcttcgaggagcaccgcaccgaccggccggcgttgctgtacgcggcgaccaaaaaggccggcgaggtcatcgtgcacacgtacaaccaca

SEQ ID NO: 15692 - DNA, 400 bp, Oryza sativa
  Clone ID: uC-osflcyp017c06b1
gttctcaatgaagaggatgttgaaactgtcttggacaaggtgatgatgctcttcagatatttgcaggagaaagatgtttttgagaaatattacaagcaacacttggccaaacgtcttctatctgggaaaactacttctgatgaagctgagaggagtatgcttgtgaagctgaagacggaatgtggctaccagtttacgtcaaaattggaaggcatgttcaatgatctgaagacatcgcatgatactatgcaaagtttttatgctaatctctctggtgatactgatagcccaacaatatcagtccagatactcaccactgggtcttggccaacacagccatgtaccccctgcaaacttccacctgaaaatggtgatatatctgagaaaattcgggcattct

SEQ ID NO: 15693 - DNA, 416 bp, Oryza sativa
  Clone ID: uC-osflcyp017c08b1
taagaagctcatctcctcctcctctcgcatggcagccatggccaccaccgcgtccagcctcctcaagacctccttcgctggcgcgcgcctccccgccgccgcccgcaaccccaccgtctccgtcgcgccgcgcaccggcggcgccatctgcaactccatctcgtcgtcgtcgtccactcccccctacgacctcaacgccatcaggttcagccccatcaaggagtccatcgtgtcccgcgagatgacccggcggtacatgaccgacatgatcacctacgccgacaccgacgtcgtcgtcgtcggcgccggctccgcggggctctcctgcgcgtacgagctctccaaggacccctccgtcagcgtcgccgtcatcgagcagtcggtgtccccccgcggcggcgcgtggctcggcgggc

SEQ ID NO: 15694 - DNA, 523 bp, Oryza sativa
  Clone ID: uC-osflcyp017c09b1
ttagaggttgaagcaaccagagagaaccttggatggccctatgagccattctttgtgcctgaggatgtgaagagccactggagccgccatgtgcctcaaggtgctgcttttgaggctgactggaatgctaagttcgccgagtatgagaagaagtacccagaagatgcagcgaccttgaagagcattgtctcaggggagttgcctgctggctgggctgacgctcttcctaaatacactccagagagccctgcagatgccaccaggaatctgtcacagcagtgcttaaacgcacttgctaaagttgttcctggtcttcttggaggaagtgctgatcttgcatcctccaacatgacattgcttaagatgttcggtgacttccagaaggatacgcctgaggagcgcaatgtccgatttggagtcagggagcatggaatgggcgccatttgcaacggcattgctctgcacagcccaggactcattccatactgtgctactttctttggtttcactgattacatgagag

SEQ ID NO: 15695 - DNA, 412 bp, Oryza sativa
  Clone ID: uC-osflcyp017c11b1
ttgtaataactgtaccactaatccactcaggtgcaagataccctatagttcctcgcattgtagtgagaacttgagtaaactcccttcccagaaactttgccatcccaaaatctgcgatttttggaacaaatgatgcatcaagaagtatgttctctggtttaatgtcacagtgtataatgcaatcctggcaactatcatgaaggtaagctagtcctctagcaactccaagagcaatttgataccttatgctccatttcaagactgtagcgtcactgtgaaataaatgggtatcaagagagaggtttggcatgtgttcatagacaagcaatcttgtatcaccctcacaacagaaaccaattagtttaactaaattgatgtgttggatgattccaattgatcctacttcagctct

SEQ ID NO: 15696 - DNA, 446 bp, Oryza sativa
  Clone ID: uC-osflcyp017d02b1
ataaatatgggacaaaaaataaatccacttggtttcagacttggtacaacccaaaatcaccattccttttggttcgcacaaccaaaaaattattctgaaggtctacaggaagataaaaaaaatacggaattgtatcaagaactatatacaaaagaataggaaaaagggctcgaatagaaaaatagaagcagactcaagtttcgaagtaattacacataataaaaaaatggactcaggctcaagttccgaagtaattacacatatagaaattcaaaaagaaatcgatacaatccacgtcataatccatattggattccccaatttattaaagaaaaaaggagcaatcgaagaattagagaaagatctacaaaaagaagttaattctgtaaaccagagacttaatattgggatcgaaaaagtgaaagaaccttatagacaacctaaca

SEQ ID NO: 15697 - DNA, 506 bp, Oryza sativa
  unsure (1)..(506): unsure at all n locations
  Clone ID: uC-osflcyp017d03b1
ttttctggtacgtaaaaaaagacgcagatgagggtgaaaagggcgatgcgccaagacagggcgacaagtggtggatccctacagttcgagtccctcccgagggtctgccagatgcgtcgaaaaaatggattctgcaccagaaagaccttgtagggcaggtgctgaaggcagccatggctatcaatgctgatgttcttacagagatggagatcccgggagagtacattgaaactctgcctaagaatggaaggtctagtcttggagactcgatatacaaaattataactgatgatcatttcgatcccaatgagctcttaagttctgtagacttgtcgacagagcacaagatcgtcgatctcaaagaccgaattgaggccttcgttgtaatttggcagaagaaaatttccaataagctttcctggggccccggtgttagcttggagaagcgagagcaagttgaagagcgggcgcaaactgtcctactcatncttaagcaccagttcctg

SEQ ID NO: 15698 - DNA, 235 bp, Oryza sativa
  Clone ID: uC-osflcyp017d04b1
tatggacatggcggtggcgttggaggagggtttggtggcggaaaaggtggaggcctaccttcccgctgctatatctcctccttagccgttatgggattcttcgtcgcgccgttccacatgttgtagattcagctcgacgacacgacttttgatgcctatgttgttggtaaacgaaaatgcccctggaattgttgttttgcaaggaatggcggggggttgccttttagatcaagaa

SEQ ID NO: 15699 - DNA, 399 bp, Oryza sativa
  Clone ID: uC-osflcyp017d05b1
gttaccgtcatcagcacgtcgccggggaagcggcaggaggcactggagcacctcggcgccgacgagttcctcgtcagccgcgacgcgggccagatggcggcggcggcggccaccatggacgggatcctcaacacggtgtcggcctggcacccgatcgcgccgctgttctcgctgatgaagccgatggcgcagatggtgttcgtcggcgggccgaccaggccgctggagctgccggcgtacgccatcgtgcccggagggaagggcatcaccggcaactgcgtcggcggcatcagggactgccaggccatgctcgacttcgccggcgagcacggcatcactgccgaggtggaggtcatcaagatggactacgtcaacacggggatggagcggctggagaag

SEQ ID NO: 15700 - DNA, 421 bp, Oryza sativa
  Clone ID: uC-osflcyp017d09b1
taggaactggtttcctttctcaagttcatgagctctcaccagtttttctgcataaggactggataatggatcagtgggagaagaatttctacataacagcaatagctggatcagctaacggaagttctttagttgtgatgtccaaaggaacaccttactcccaacagtcatacaaggttagtgagtcattccccttcaagtggatcaataaaaagtggaaagaaggttttcatgtgacatctatggccaccgctggaaatcgctggggtgtagttatgtcaaggaactcaggttactctgaacaggttgtagaattggatttcctatatccaagtgaaggcatccatcggcgatgggagactggttacagaataacctcaatagcagcaacaaatgaccaggctgcttttatcttgagcat

SEQ ID NO: 15701 - DNA, 311 bp, Oryza sativa
  Clone ID: uC-osflcyp017d12b1
tgaaaatgcatcattcttctagccagagttcagcctttcatggatccagtggacactgttactcatgagaggatgagaccctctttcacagtccttaggggattacacattggtaagtactttttgtttacggtgtttgttattgtaattgaatttacattttttttcattttttgtattttttttgttgatatctaactttttttctttacatttatctgttttttggctctctacttatatctcatgtattattactactttacttttttttggttttttctttacttttaattcatcttctctatttc

SEQ ID NO: 15702 - DNA, 399 bp, Oryza sativa
  Clone ID: uC-osflcyp017e05b1
ttttatacctatggctcgcagctattatcaagttgcacggcctgctctatgaaactgcttgcgcatgtgtatgtaaatagtttgcagcatgttattctatagacatgaataataattatacgatcctattgaatttgaccactctctgttctaacctattacaccactaaagaatttttatagcattttataaaatgctatatctgtattggtaaatactaccttaccgaatatgtaacatagccaatatagcagccagacatggtgtacgatttgacctaaaacatgtattggtgtgattgttactcagttatttaagattttgcaaatttgcacttcataatttaagacatttcattatttgaatataaatttgaccacccatcgatgggtggttcc

SEQ ID NO: 15703 - DNA, 474 bp, Oryza sativa
  Clone ID: uC-osflcyp017e07b1
tgttggatagaataaagcaatgcattttattggacagtatggtggattcacttgaccccgttgatcttttatctcttaaacaacttcttaactgggtttggaaatggtcgcgagatccagtgaaagttccaggaatgaatagtgtttatatacacaatgcaaaatttcatccagtaactcatcagatgttggtgaatgcgagatatatacctaatccattaggatgtctgcactttgcggggaattattttagccatgctcataatcatcagctgaatctagaagaagctgaagctgcatttgcggaaaacaccgaaagcttcttaccttttatactacagttcatcgtggtggaaggaatcattaaacagaaatttaatgttcagcgcattataacatccttacactacttcgggaacaaacttgctgataagaacactgggaaagaaccttcaggtcaggataccgggagtt

SEQ ID NO: 15704 - DNA, 368 bp, Oryza sativa
  Clone ID: uC-osflcyp017e10b1
ttagtgtttggacaataactgtggctgctggcaagatagggacagtaatgttactgtatgcacggataccttgcgcgtgcttgtttgcagagtgcgccggtgggagaggatgaacggtgctggtgttgggtactctacttgtgcagctactggcattgtgaggtgcgacactaaaatcggaggacgcttgcttgagcctatgcacgtgaggacactatcttgctgctcgcatgaagactactacggctgggaatgcacaccatgtttgaagggtgacggactaaataggcgagacgatattgattaatgctgggagaaactttactgttagtgcatgggctgcaactgtgacaatacatggggttact

SEQ ID NO: 15705 - DNA, 427 bp, Oryza sativa
  Clone ID: uC-osflcyp017f01b1
aaataagtccagtgctccaatagatgagagtaatgcacaagatattgttacagagaaggtgctcaagaaaagaacattcagggtcccgttaaaggttgtggaaaagatggctggtgctggatcaattctttcgaaggagttgtattctgaagcaaaaactaggttagaggcgcttgataagaaggatgctgaaaggaggagaactgctgaactgaaaaataacctggagtcttacatatactctatgaaggagaagctggaagagaacacagaaattttgaccgtctcaactgaacaggagagggaatcttttgcagagaaacttaatgaggtacaagattggttgtatatggatggtgaaagatgctcaagcaaatgaattcaaggaacgccttgaccaacttaaggccatcggtgacccattctt

SEQ ID NO: 15706 - DNA, 243 bp, Oryza sativa
  Clone ID: uC-osflcyp017f06b1
gtgttcctagccctcgccctcgcctcccgctcccgccaccccgccgcgccgccctcgtcaccgccgcgcaggaccctcggtggcggcgggccatggcgtcgctggccgtctcggcgtccgcgtcggcgtcgggggaggaggtgacgcacctcgcgcagcgccaggcggcggagatcgacgagcagctcatgggcccgctcggattgagtgctctacctctcatggagcttgcggggctcagcg

SEQ ID NO: 15707 - DNA, 211 bp, Oryza sativa
  Clone ID: uC-osflcyp017f07b1
ttttccgaaaatatctcgccgtcgttgcgcgcggtagctagctagctagctgcgccatcgacgacgaagtctcatccatggaggcggcggctgcgctgacgacgacgaccggcgcccagtacagctgctgcttcggtctcgcgcatggcggcgccgcacaacggaggaggaggacggcggcgggtttcggggcggcgaggtggtcggggct

SEQ ID NO: 15708 - DNA, 191 bp, Oryza sativa
  unsure (1)..(191): unsure at all n locations
  Clone ID: uC-osflcyp017f09b1
taaacccccccacctcgagctctagggtttcgcggatcgaggggcgccgcggctagggtttgggtggggggtgcctgcgcgatggccgctccggcggcggagtcggcggtggtgggggtgggggtnnacacaaaaaaaaaccccaaaaacaaacgcgctcgaggcgcccgcgctgccggtccgcgcgcttc

SEQ ID NO: 15709 - DNA, 435 bp, Oryza sativa
  Clone ID: uC-osflcyp017f10b1
gtcaacctcgtcgtgtccagcccgctctccttcagcatcgtcggcaagtacccctacggcatgacatacttccaccgccccaccggccgctgctccgacggccgcctcgtcgtcgacttcctcgcgcaagcgttcgggctgccgctgctgcagccgtacctgtcgcgcggcgaggacgtcacgcggggcgtcaacttcgccgtcggcggcgcgacggccatggatccgccgttcttcgaggagatcggcgcgtccgacaagctctggaccaacctgtcgctcagcgtccagctcggctggttcgagcagctcaagccctcactctgcagctcacccaaagattgcaaggagttcttcagcaagtcactcttcctcgtcggggagattgggggaaacgactacaactacgccttcttcagggcaagagcttggacg

SEQ ID NO: 15710 - DNA, 476 bp, Oryza sativa
  Clone ID: uC-osflcyp017f11b1
tttggaatctggatcgaccatggatgttgttgctgcacaaacaaaagcaatttctgaaaggatcaaggattggactaatgtggttgttgcctatgaacctgtgtgggccattggaactggtaaagttgctacaccagatcaagcacaagaagtgcatgatggcctgaggaagtggctcgctgctaatgtcagtgcagaggttgctgaatcaacaaggatcatctatggaggttccgtaactggtgcgaactgcaaggagctggcagcaaagcctgatgttgatggttttctcgtcggtggtgcttcattgaagcctgaatttatcgacatcatcaactccgccaccgtgaagtccgcctaagatcttcaccccattcaccttcggcgtgggaagatgtctgaagaggatcatacctttttctgtgcttatgtaatgctagtagttttgtgctggagcagctacttttttttcttcc

SEQ ID NO: 15711 - DNA, 421 bp, Oryza sativa
  Clone ID: uC-osflcyp017g02b1
gttccattctcgccggagcgacctcgccggcgacgccgtcgccgccaccccacctccgtgcgggtaggtagtggcggttgccgagatggccgggatggtcgccgccgcggcgccgccggcgtctctttgccgtccgattgctgtcccccgagctcctatgcgccgtcgccggctcactccccgcgtgaagacgacgccctcccttcgctgcgaagattccccgaagatcgctctactccaggtacaagccatgcgatcttcacaagagagtagttctgatgaggacgatgagatcctttttgagcttaaagagaagtgggatgcttttgagaacaagtcctctgttctcttttacggaggcggagcaatcattgctgtttggctattcttgattgttgtcaaagctgtctatttaatttca

SEQ ID NO: 15712 - DNA, 478 bp, Oryza sativa
  Clone ID: uC-osflcyp017g03b1
cttttggaagagatgcttttggatctgttcagttaggctgttggctgctttcagagtttcaggtttccatggcacaatacacttgcttcccccttatttagtttttgatttttcttaggtacttctcagcttgtaatgtttcttcgttggttcataaggtcaaaagtttttttttttttttggtttgctgaagcagtggttgacgagttttttagttgagtcgccgtgcttgaggtatagagcaagttgtaaattttgttagtttagatcaggtccgtagattaaattcttttagaacgagaaagggcatcccataggttgtaagtctttggcggaatgtataaggagtatagtggctctctatttgttggaatttctcagttgaaggcatttaagtctgtacatcggggaaatagtaccctgccaacatttgtattggtcattggagaataaatgaagtgtgtccttctgagttttg

SEQ ID NO: 15713 - DNA, 445 bp, Oryza sativa
  unsure (1)..(445): unsure at all n locations
  Clone ID: uC-osflcyp017g04b1
gcggtttagggatgaataaacaatacacaccaagccaacatagagcgacgatgggaccgcttactactaacatcgtgctggccgtcgacgtggagacagctactgctcgggcgcggtgtnttgtgcgtggccgcccaaggatggcaccacggcccgaacatgacgacgcagatacaacgccccgtggttgcccgacagggccacctggtacgggcaggcctacggctcgggctccaccggcaatgggggcgcgggcggtatcatgaacgacagcctgccttcgtacagcggcatgaactgctgcggaaacgtaccaatcttgaaggacggaaagggatgcggctcatgctacgaggcgaagtgtgagcagccggaggggtgctctaagcagacggtgactgagtacatcacggacatgaactacgaggcgatcttggtgtaccag

SEQ ID NO: 15714 - DNA, 483 bp, Oryza sativa
  Clone ID: uC-osflcyp017g10b1
taaaatgttgttcccttggcaagtgagaagtctactgacaacaatgatgctatgaattcagagccagtgaattcagaaccatatgaagcatctcctgctaataatgctgaaaagggagatgtgatgcagcagagtgatgagaacaatggtgataaacaggagaatcaggatctgttgtctccaatggcagaaacagcaggaagtgacagtacctcagtcacatcgatggaagatgttcaagaagcaaaggatgctgctccatcagagacagatgatgctactggccaccctcctgatctgtcaaatgacaaagcttgtgctggaaatggaaatggaaatgtcttccaaaatgcaaagtgtgtcttgacaacttcgacaaagaagatgaagagaagtgcatctgcaactacaaggaagtcactgcaagctactaatactgacgaagggaatgcttctactctcaccaactcggaatcatcaaat

SEQ ID NO: 15715 - DNA, 390 bp, Oryza sativa
  Clone ID: uC-osflcyp017h06b1
cttcaagctccgccgattcctctcctcctcctccgcctcctcctccggcgtcgtcggcgtcagcagcggcgccggccatgggttgcggtggctccaaggaggacgtggccaccggcaacaccaccgcccccgccgccgccggcagcagcaagctcttccggaggaagtcctccgtctccgccagccaccgctcctcctcctcgtcgtcttccaatggatgcacctccgtctccgtcaaggacgtcgcgacgaagaaggaggaggagaccgaggccgacgccgtcgaggtgacgtcggccgaggaggcggcggcggggcggcggtggcaaaagggacgtcaccatcgccgctgccacgctcgcggtgaccgaagcgatggcgaaggcggcg

SEQ ID NO: 15716 - DNA, 403 bp, Oryza sativa
  Clone ID: uC-osflcyp017h09b1
ttcgcctccgccgcgtgctctccgcctacggcctcttgtatcccgcaaccaaaaactactcccaaaaaaaaaaaatttctagtatcacaccaaaagaaaaaagagaaaaaaaatttcccccaaaactccgcgagatctgcccgtgccgagctatataccaatccatcagctagggtttagagcagatttttttttttgtttcgcggaaaaaaattgaaaaagagagaagggtgagggagcgaggtcgagggatcggtgggcgatggcggcgcaaatggcggcggtggcggtgaacgggggctctccgggggctgtcaccgcggcggcggcggcgggaggggtcggcgtccccgtgggcctcgggggcggcggggcgcagtcgcttgtacgtgggcgacctgga

SEQ ID NO: 15717 - DNA, 521 bp, Oryza sativa
  Clone ID: uC-osflcyp017h12b1
acccctgcaggtgccgggccggaagctccggtgcgacccaggcgatctgttttgcccagtctccaccctacggagccggcggtcatggagggccgtcgaacactactttctcctcttacacggcagcctccagacgtgcacacacatacactagggcctgatattgtgctcgtagcccgtgagggatgaactctaactgaggggaggaggaggcgttaagcatgatagcaggacgcattttgaagaaaacagtctggaactggtctgcgaatttgaagttttctgacctatggtcatcgactctttgattgctgactattgaattgcgccactcattgaatttgatcttcattctttctgtgaaaagaacatccgcagcactctttaatggcgcatcttcttcctcctcggaagtgtttggatatgcagatgtttcattattatgcaatgtatataatttctgaagtgcctcttcttttgtgttctggaaaataatatattcccttaaggaagcatgtgtt

SEQ ID NO: 15718 - DNA, 507 bp, Oryza sativa
  Clone ID: uC-osflcyp024a02b1
cctgccggtacgcgccgcggacggaactggcgggcccacgcgtccgttgttttcggagcctgctcaactaaactctgtggggcagtgtagcagcaggccttgaccatgccgaatcagatccacgagatcaaggacttcctcctgacggcaaggaggaaggacgcgaggtcagagcggatcaagaggaccaaggacgcctgcaagttcaaggtgcgctggtgcaagtacctctacaccctatgcgtctgttgacgccaacatgggcaacaagctcaagcagccgcttaccccgggtttgactgttcaggaggtttaagcatcaaagccagaccatgctgtttgtagcagcaggattgcttgctcccgctcgcattagtagctattagatgctgaaattttatctgtcttgagtattgaatgtaacacccaaagtgtatgtgctgaaccctttttgagtcagattgcgctgatactcctttctggagatagctacaaacgtactggccc

SEQ ID NO: 15719 - DNA, 377 bp, Oryza sativa
  Clone ID: uC-osflcyp024a06b1
tagtatgcagcgcacaagccccagcaccagcaagctgctactcatcatcagcgagagctagctagctgtgtgtgccacttacactgctgctgctgctggttctagctaagctcaccgatcgtcgtcttcgtcatcgccggtgacctggtgaattagtcgagagagatggcggcggcggtgacggtggaggaggtgaggagggcgcaaagggcggaggggccggcgacggtgctggcgatcgggacggcgacgccggccaactgcgtgtaccaggccgactacccggactactactttaggatcaccaagagcgagcacaatggtcgagctcaaggagaagttccaagggatgtgggacaagtcgcagatcacgaaga

SEQ ID NO: 15720 - DNA, 520 bp, Oryza sativa
  Clone ID: uC-osflcyp024a10b1
ttcgattcaaacccgccgtttccaagcttgctctcctctcccccccaatccttccctcccgagtggcagggtgctcgacgggatggcgcagaaggaggccaatggcagcagcaacggggagcacaccacccgcccgccgccgacgccctcgccgctccggttctccaagttcttccaggcgaacctgaggatcctcgtcaccggcggagctggcttcatcggctcgcacctcgtcgacaagctcatggagaacgagaagcacgaggtcattgtcgcagacaactttttcactggttcaaaagacaacctgaagaagtggatcggacacccaagatttgagctaatccgtcatgatgtcacccagcccctgcttgtggaggttgaccaaatctatcaccttgcttgccctgcttcaccaatcttctacaagcacaaccctgtcaagaccatcaagacaaacgttaatcgaaccctgaacatgcttggacttgccaagagaagtggagctaggattttgtga

SEQ ID NO: 15721 - DNA, 480 bp, Oryza sativa
  Clone ID: uC-osflcyp024b02b1
tatgttgcgagagagagagagagagatcagttagtttgttgagtggaagcagatcaggaagatgctggagaagctgtgggacgacgtggtggccggtcctcgaccggagaccggcctcgagaagctccgcaaggccgctacaacccgcccccttgtcatcaacaaagatggcgacggcgaggcgagcggagtggcgtacaagcggacgcagtcgatgccgacgaccccgacgacgccggtgacgccgtcgtcttcgtccccgacgacggcgacgacgacgacgccgcggggcagcaacgtgtggaggagcgtgttccacccggggagcaacctcgccaccaagagcctcggcgccaacctcttcgaccgcccccagcccaacttccccaccgtctacgactggctgtacagcgacgagaccaggagcagccatcgctgaactgaataatcccattgatcggaggctggtcgatctctctg

SEQ ID NO: 15722 - DNA, 342 bp, Oryza sativa
  Clone ID: uC-osflcyp024b04b1
cataccgatctttgcggacaactattgcggttggtgacctaaatgggaaggactagtgtaaccttccagctgtaaatttggtgcctgtatcatctaaacatggacggcgacgacaaggcaggaaggggccagcacaaggtggtgttaaactgtctcgggctgggcttgctgccggtgttgatgctaatgaaatactaggtgagaattcttaggccgggactgatgatggccattgagattcacctactgctgctggtatacctatgcctgcgcgtcactgtagctacaatccgggtgcaagacgtggactgtgaagctgattatcacagtgtgtcactcgga

SEQ ID NO: 15723 - DNA, 370 bp, Oryza sativa
  Clone ID: uC-osflcyp024b05b1
gcggtagatggcgcggcggagcaacgacgtgatcgaggaggcgcggagcaagctcctggagaagcggcagtgcagcagggtgaaggcgctcgtcggcgccttcgagaccgtcatggacgccaagcccgccggcgacggcgccgccgccaagccgcagcactaccaccctcgccgttgattaaggaggaggaggccttaattgaaggagattaataaccactaatgcttgcttgcttcgtaaattcgccttttggatttatttatttactgctccgacttttcgtcacacactatactactgcatcacggagtaaatatatgattattctgtgatgatttaattaaggagggagatgaagagaggttggat

SEQ ID NO: 15724 - DNA, 493 bp, Oryza sativa
  Clone ID: uC-osflcyp024b11b1
ttgttttatttcaaatgacaggttggcctttgaacctgaaattcttgactggtggcagtgagagatccatatcatgccggagcaactaagaagaaatttcgacaacattgagtcatggataggtacatcttacatttacaaagtctgagcagcactgcggaagacgaggccaaacagagtgccagggatatccaaaagcgtaaactggcctttattcttgcctgaattcttgtttcaccaagcttgtgtggtctatccccttgttatggctgttctaacccatgccatctgcatctggtggcgctagacggtcttggataaacttttcatcctcttatttctcttgcttttgttgttgcaagggtcttatataaactgtgcattctttgatcagatttatggctgtgtgcattctatgcagaggccggcggtggactcaaatggaatgtatcatgctggagtatttaactgagtattataaaacttgcattat

SEQ ID NO: 15725 - DNA, 495 bp, Oryza sativa
  Clone ID: uC-osflcyp024d01b1
gcatgctgcacagagctagcgttagcttggttagttgttcttagcattctagctagctcaatggcgaaagacattgaggcgtcggcgccggagggcggcgagttctcggcgaaggactacaccgacccgccgccggcgccgctgatcgacgtggaggagctgaccaagtggtcgctgtaccgcgcggtgatcgcggagttcatcgcgacgctcctcttcctgtacatcacggtggccaccgtgatcgggtacaagcaccagtcggacgccaccgtcaacaccaccgacgccgcctgcagcggcgtcggcatcctcggcatcgcctgggccttcggcggcatgatcttcatcctcgtctactgcaccgccggcatctcaggtgggcacatcaacccggcggtgacgttcgggctgttcctggcgaggaaggtgtcgctgatcagggcggtgctgtacatcatcgcgcagtgcctgagcgccatctgtggcgtgggg

SEQ ID NO: 15726 - DNA, 353 bp, Oryza sativa
  Clone ID: uC-osflcyp024d04b1
ccatgcgtttttgtctcaatctaactccactcatgatatatacctgatgtgtctgaacggacatgcatgtactatagttgctctgctaatgtactaccatcagcttttagcattttgcatcacaaaatatacctatggactatgcaatacgattctctattaaatggttatgatgacttgcgtggaatgggactcccacacttgtgggagggcagagaaacaagctagatagcttagaaacttttaaagaagctacaggttgcatatagcatcgtaaaggaacatatgaaggtctattggtcggatcgatatagattttcatgccaacctgttggcagagatcattttgctaa

SEQ ID NO: 15727 - DNA, 533 bp, Oryza sativa
  Clone ID: uC-osflcyp024d08b1
actggacatactctactactactagccagtaagctagctaactaactacgtggctatggcccccaccgtgatggcctcctcggccacctccgtggctccattccaagggctcaagtccaccgccggcctccccgtcagccgccgctccaccaactcgggcttcggcaacgtcagcaatggcggaaggatcaagtgcatgcaggtgtggccaattgagggcatcaagaagttcgagaccctatcgtacctgccaccactcaccgtggaggatcttttgaagcagatcgagtacctgcttcgatccaagtgggtgccttgtctcgagttcagcaaggttgggttcgtctaccgtgagaaccacaggtctcccggatactacgatggcaggtattggaccatgtggaagctgcccatgttcggctgcaccgatgccacccaggtgctcaaggagctcgaggaggccaagaaggcctaccccgatgcctttgtccgtatcatcggcttcgacaacgtcaggcaggtgcagttgatta

SEQ ID NO: 15728 - DNA, 501 bp, Oryza sativa
  Clone ID: uC-osflcyp024d09b1
tcggaaaaatatattccagatgatcaggacagtctgggtctctgatggtctgaaaggtttttacagaggaatcagtccaggtgttactggatcacttgctacaggggcaacatattttggtgttattgaatcaaccaagacatggctggagcattctaatcctaatctaagtggccattggtctcactttattgctggaggaattggagatacacttgggtcttttatctatgtgccatgtgaagtcatgaaacagcgaatgcaagtccaaggcaccaagaaatcttgggccttaactgccacaaaaggaaatatttctcaaactccaggggctccgatgtataactactataatggaatgttccatgctggttgttctatctggagagatcatggtctgaagggactttatgcaggatactggtctacacttgccagggatgtaccttttgctggtcttatggtcactttctatgaggcaatgaaagaactgactgagta

SEQ ID NO: 15729 - DNA, 478 bp, Oryza sativa
  Clone ID: uC-osflcyp024d12b1
gcattgccttgttccacctgcagccaaactgtgtaatataagcaagcttgctatagggggactaggcactctaggcttacctaatccaccccttcaggcttcagctgttcagtgcagacacagagaatgaattgggtggagtttctgaagcccgtagtcgcaatgctggtgtttgacacgctcttcgcgctgatgacagcattggtcaagaaggctttggctgatgggttaaaccacgttgtctttatcaccctacgccagtttgtagcggcagtcctgctcgctccgattgcttatttcaaagaaaggaatacaagaccaagatttacaacagagatctttgcctacatgttcatgagcgcattgcttgggggattatgtgctcagtatctgttctttctggggttgagctacactacagcaacactgactgcaacattctccaacatgacttccggtttcacctttttaattgtat

SEQ ID NO: 15730 - DNA, 481 bp, Oryza sativa
  Clone ID: uC-osflcyp024e02b1
tgaggatgtaaagaatatgctatacactgacagtgctgaggctggggaggctggtggcattggcatgggcttgcttatggctggaacagacagtgagaaggctggagagatgcttgcctatgcacatgatacacagcatgagaaaattattcggggcttgtcacttggaattgcattgacagtttatggcagggaagaggaagctgacaccttgattgaacaaatgactagagatcaagatcccatactccgttatggtggtatgtacgcattggctctagcgtacaggggaactgcaaataacaaagctatccaccagcttcttcattttgcggtgtcagatgtgagcgacgatgtccggaggactgcagtattggctcttggttttgttctgtacaatgagcctgagcagactccaagaattgtggctctgctctctgaatcaaataatccgcatgttcgttatggtgccgctttagct

SEQ ID NO: 15731 - DNA, 375 bp, Oryza sativa
  Clone ID: uC-osflcyp024e04b1
gttatgaagcagagagagaagaagaggaagcagaggaggaggagtccaagaattgaagcaggagaagaggaggtggtggtttgattcaagaagaaggagaagagcaagagcaaggatgttgcgaggagggacgagcttgctggggatcgtcaacttcgtgacgttcctgatctcgatcccgatcctggggggaggaatctggctggcgtcgagggccaactccaccgactgcatccgcttcctgcagtggccgatcatcgccatcgggctcgccgttatggtggtgcccctcatggggttcgcgggggcgtgctaccgccagacgtggctgctccgcctctacctcttcgccatgttctttatcggtcgtcgcct

SEQ ID NO: 15732 - DNA, 421 bp, Oryza sativa
  Clone ID: uC-osflcyp024e08b1
taaaatgtctcttctggaatggtttgctaatgaatacaagaagtttggttgctcgcttgagtttgtcactaataaatctcaagagggatctcagttttgtagaggattcggtggcattggtggtatcttgcgttaccagctagatatccggtcatttgatgagctttctgacgatgagggattgtatgaagactctgattagcaatcagccaatcacatgactgtgctggcccagggaaggacgccgcagctgcaacgagtctgattcgctctacttacgcaggaacacttcgaaagcagctatccagaaattgatgggcgtgggccagcctcatcctatgctggaagggattaaggcgaaaggattactgagtcacatcatcatgatagtaatgtgtcaagaagttatcgaacttaaaag

SEQ ID NO: 15733 - DNA, 497 bp, Oryza sativa
  Clone ID: uC-osflcyp024e09b1
tcgttcatctcctcctcctctcgcatggcaggcatggtcaccaccgcgtccagcctcctcaagacctccttcgctggcgcgcgcctccccgccgccgcccgcaaccccaccgtctccgtcgcgccgcgcaccggcggcgccatctgcaactccatctcgtcgacgtcgtccactcccccctacgacctcaacgccatcaggttcagccccatcaaggagtccatcgtgtcccgcgagatgacccggcggtacatgaccgacatgatcacctacgccgacaccgacgtcgtcgtcgtcggcgccggctccgcggggctctcctgcgcgtacgagctctccaaggacccctccgtcagcgtcgccgtcatcgagcagtcggtgtcccccggcggcggcgcgtggctcggcgggcagctgttctcgccatggtggtgcgcaggccggcgcacctgttcctgacgagcttggcgttgcgtacgacgagcaggaggactacg

SEQ ID NO: 15734 - DNA, 523 bp, Oryza sativa
  unsure (1)..(523): unsure at all n locations
  Clone ID: uC-osflcyp024e10b1
gtcaagatggtctgcatcccttgcgaaggacagagtgaagagaaattttgtgtcaaaaccagctaggtgaaggatacaagggcaacggcaatttgtagttgtgcaaaggtgttgtcagtgctgaatgttgagagaatgcacaactcacttgcacatcaacaagcatcgcaagggcgaggctctatgttgagcgaatccaaatttcggaaagcaaaacaggctgtgcagcccaacttgatgtacctccagggtcagcagcttgagaatgaggaagaaattggtacacttgtctggggcgaggctgatgtatctgatccatagatatttagttcactcactagtccaccttttccgaccatagatgctatgtgatccgctgcggcggcagcattagcattcgcagcagctgtagcaatgtgaggaattggggagatccctgcttcttgcgcagttcgatctcactggctcgagcggcctttgagggttaacggttgccgatctgtggngttttttgttaaccatg

SEQ ID NO: 15735 - DNA, 465 bp, Oryza sativa
  Clone ID: uC-osflcyp024e12b1
tcgtatttctgtagtgaatttaaggaccttttcaattggagacacttcattgagtcactcaaagaagacattgatattgttgaaatgctgcccccagcatacaagcatattgagcctgtggctaaagctccaatatcttggtcaaaggtgaattattatagagatgaaattctccctcttttgaaaaaacacaaagttatttactttacgcatacagattctcgccttgccaacaatggtcttcctagttatattcagaaattaagatgccgagttaactataggtctttgaagtattcccaaacaattgaagatcttggtgctaccttggtttcacggatgcatcaggatggaagcccatatcttgctctccatctaaggtttgagaaggatatgctagcttttactggttgcagccatagcctgacatcagaagaagaggagaattgcgtaaatgcgttatga

SEQ ID NO: 15736 - DNA, 445 bp, Oryza sativa
  Clone ID: uC-osflcyp024f02b1
tcttgttgcagcctcggcgatttccggtggtggcctggtggtcgtcggtagggacgccatcctccgtccgccggaagagaatgattaagtgatgtcgtcggctgcctttcctcccacaaccttttttcaaggcagttggggatctgaaattgaatccaatcacttcttcatagccggtgaaggaggggcggtggaagccatccatatgctgcaacatatccgggggccatccatatgctgggagccacagcgtcgcctgtggtgggagaggacgccacatatcagatccagcacggatatcggcaggcactactggtgagtgtctagatcgtaaatggaattctactcctgcaaagcacatagcaatctggtgaagttgtatcccagttacatctttagacgttcctctgactgaacccgctgcaggcttcacacgagactctac

SEQ ID NO: 15737 - DNA, 208 bp, Oryza sativa
  Clone ID: uC-osflcyp024f05b1
tgttaaggtcatgatggccaagtgaggcaccacttcccctgccgatgatggcatagtaccctgggaggaggaaaccgtgcattgccgtattagtaaggggatgcaaacactggtttcagtcgtcttccctgatgaagaaaaccgaaccgtactagttgtagttgctgaacatttttctatctctccagtctctccggtgtgccatggc

SEQ ID NO: 15738 - DNA, 523 bp, Oryza sativa
  Clone ID: uC-osflcyp024f06b1
ggatgttcttcacgatggatcttttggagcaatgcaaccatcgtcgggatttcagaacagttggtgtggggtgccaggtcagatgtcaatggctgatattgtgaaaatgggcagacctcaagtgaggtcttctagcaagcctgtggcttcaacagacaaagcctattctggccaaacctcatctttctcaagtgtggtaaaccagaacccaaacaaatctgcaagcactgccccaccaacaacatttgagcaaagatttcctgttcttcaagatcctattcctcaagttaagaattccagtcatgcttctgctgataaccatgagacacaagagagtgattggtttcaacaggatgggacactaccagggagtcaattaacagtccctgagacatctcgtgacatatctttacctgtggcatctttggaatcatcaacgttggttgctgacgatgcgaactcgtataataattctcatgtaggagagagcagctcagctataccttttgatagacacctggaa

SEQ ID NO: 15739 - DNA, 544 bp, Oryza sativa
  Clone ID: uC-osflcyp024f08b1
ttaatcggaaaggaattcttaattggtttaaacttcggaaacgtgaaggtggagcttctattctgacaagttcagaaggtgacaagtccagtttgactaaatcaactgctccttcaacacctattggggagagtgttaattttccttccgaaccaagaatatcaaattctttggttggtgagagtgcatcggttgatctctttagcattggccatggggagttcgctactgacagccttcatggagaagaaacacctctggccagcagaaaaacaatagatcacgttgacttactgagagagcaattgaagattttgtcaggggaggttgcacttcatacaagtgtcctaaagcgccttaccgaggaagctggaaggagcccaaataatgagaagattcagatggaaatgaagaaggttaatgatgaaattaagggaaagaagcatcaatagcgtctttagaaagggagatacctcattccatctcaaataatcaagggatggctgacaagttagaacttactccgcttatgctgaactgcttg

SEQ ID NO: 15740 - DNA, 518 bp, Oryza sativa
  unsure (1)..(518): unsure at all n locations
  Clone ID: uC-osflcyp024f11b1
ttggccagtttttcacttaactggctcccaggtcaacaagatctttgccgaaaatgcgtttgatgctgttatgcactttgctgctgttgcctatgtgggtgagagtacattggaaccccttaggtactatcacaatattacatcgaacaccttattgattttggaggctatggcgtctcatggagtcaagacccttatttactctagtacatgtgccacctatggagaaccagagaagatgcctattgtagaaaccacacgtcagttaccaattaatccctatggaaaagctaagaaaatggcggaggacatcatactagatttcacgaaggggagaaaggacatggctgtgatgattttaagatatttcaatgttatcggatcagacccagagggaagaataggtgatgctcctagacctgaactacgagagcatggaaggatattcngggcatgctttgatgctgcgttaggaaatattccagggcttgaggttaaggaacagatatcctacaact

SEQ ID NO: 15741 - DNA, 355 bp, Oryza sativa
  Clone ID: uC-osflcyp024f12b1
attgatgcccaagcgcacaacgcgggggggttttaacaaccatacgtgcgacatgaggcctccagggcaaaggcctttttaatgatctcagaaaataaattcatggctgtaatcattaatgcgtcgcctgaagacacgaccattacagtatacagatgtggccctctagaatcccatcctccggggggcaaacatccccaatactacctttgataaagctccagctggtctcaaggcttcatcggcgtatagtagacggaaagcatatccagagagcccggtaccctttatggaataggggtctgctgattctaaacatctcaaggtatcaaaacattccgttatcagaggcttc

SEQ ID NO: 15742 - DNA, 538 bp, Oryza sativa
  Clone ID: uC-osflcyp024g05b1
ttatggttacccagctcacctacctagctgcatcagcaggagtgtgcttggcttcagctctagccatcgccttgctgtccatcgccctctacatcatcggcgtcgtcgcctccttcgccgtcctctgcgccaaggagttcgccgagagagcccacgaccggccgccgctcgtcggaacagttttccggcagctcaagaacttcgacagaatgttcgatgaacatgtcaactatgcaaccgcgcatcgcaccagcaggattgtgtatcccggtcactgcgaggtctttacttctgatccggccgtcgttgagcatgtcctcaagaacagcttcagtaaatacagcaagggggacttcctcactacagccatgaaggatctctttggagatggaatttttgcaacagatggggatatgtggcgtcatcagaggaagctagcgagctacgaattctcaaccaaagtgttacgtgacttcagcagtgacacattcagaaggaatgctgcacaactggcagagaagatctcatgtgcagcagc

SEQ ID NO: 15743 - DNA, 458 bp, Oryza sativa
  Clone ID: uC-osflcyp024g06b1
tccgcatgggccccaagagggagctcaagtttgccctggagtctttctgggatgggaagagcagcgctgaggatttggagaaggttgcgaccgacctcagggccagcatctggaagcaaatggctgacgctgggatcaagtacatccccagcaacaccttctcgtactatgatcaggttcttgacacggctgccatgcttggtgctgtcccagagcgctactcatggactggtggagagattgggttcagcacctacttctcgatggctaggggcaatgccactgtccctgccatggagatgaccaagtggtttgacaccaactaccactttatcgtccctgaacttggtcccaacaccaagttctcctactcttcccacaaggctgtgaatgaatacaaggaggctaaggcgctcggcgttgacaccgtgccagtacttgttggaccagtttcatac

SEQ ID NO: 15744 - DNA, 393 bp, Oryza sativa
  Clone ID: uC-osflcyp024g07b1
ttgtacgcgtgggcggacgcgtgggctctcctctcctgctctgtctctgtctctggcaccaccgctgtcttccgccgctgcggctcacggctacgcagctctcttcccctcctcctcggctccgctctcttcgatcgatctagggtttggtcttctgttgggggattgttgttgctcttccgcgcgatcgatcgacgccgcgtcctgagggtttgaggggtttccgtcctcccgccgcacgcccgcacccccgtgatgtccggccggagctcgccgatgtacgaggggctcgcgtcgcgtcccgacgagggggacgtcgtcctcaaggtgaagtatggtgaaactcttaagaggctcggtgggtatgtgcaaggaccacaattcagcctgaac

SEQ ID NO: 15745 - DNA, 504 bp, Oryza sativa
  Clone ID: uC-osflcyp024g10b1
agctaccaaatcgaacctaccaactcattcccgatcgatcgatcttaaaaaaaaactaatcgtaacttttctctctctctcctatctttagaactagcaggtagcaactgcttcgagtgtagtgtggtgaacgtacgatctttcgttcgttcatcaagatgaccgtgatcgacggcgccgtcgctgccgacgccggcggcgcagccgcggcggtggtgcagccggggaacgggcagaccgtgtgcgtgaccggcgcggccgggtacatcgcgtcgtggctcgtgaagctgctgcttgagaagggctacactgtcaagggcaccgtcaggaacccagatgacccgaagaacgcgcacctgaaggcgctcgacggcgccggcgagcggctggtgctctgcaaggccgacctcctcgactacgacgccatctgccgggccgtcgccggctgccacggcgtcttccacaccgtctcctccgtcaccgacgaccccgagcagatggtgg

SEQ ID NO: 15746 - DNA, 469 bp, Oryza sativa
  Clone ID: uC-osflcyp024h02b1
gaagtgttcgtgagagcagttatggggtgaccgtcatcaaggcagcaatttaccctggaaatgtgctctctattcacatgaataaaccatcaagtttcaagtacaaaagtgggatgtatatgtttgtaaaatgcccagatgtttcgccttttgaatggcatcccttctccataacttctgcacctggagatgactacttgagtgttcatatccgtacattaggtgactggacaacagaacttagaaacctatttgggaaggcttgtgaggcacaagtaagttccaagaaggctacacttgcacgacttgaaaccactatcatagcagatggtctgaaagaggagacttgctttcccaaagtctttatagatggtcctttcggcgcaccagctcaaaattacaagaaatatgacattcttttgcttatcgggcttggaattggagcaacgcctttcatcagcatactgaa

SEQ ID NO: 15747 - DNA, 375 bp, Oryza sativa
  Clone ID: uC-osflcyp024h05b1
tttaaaaattgcggttgttccactgaatccttgtggtggaaagttctatgtccaaacagctgggaccatagagcggctttcattcacaacaggctgcaacttaaaacttaattattcacctgctaatgatgcttccctatctgctggaagggggaaatagttcttgcctcagttaagtgctgacaactcctggaatagagcaatgattgagaatggacctccaggagccgtattatctcaccaccactgggccgaaagatgcttcctcaaccctgagggcctggaagaaaaaatcttgctgctatattcctcctgctgacccatcaatttcctctactcctgctcttgctaagttgtgcacccttgccttcataa

SEQ ID NO: 15748 - DNA, 330 bp, Oryza sativa
  Clone ID: uC-osflcyp024h12b1
tctttacaaacacaagccccatccccgggaagacgaggctgtgtgtggcacgtcacgtgccccacccccctacccacccacccgtcttgacacccacccatctccaaatccatggcccccctccccgccatcgtcaccgccaccgtcttcttcgtcgacacccccgccgacgacaaggcccactccctccttccttccaccccctccaacgaggaggatgacgacgacctcgtggagcgcgcctaccaggcgaccgagaaggatatcttttcgatctaggacttccccgacgcctactactatgaggaggagtccggtctcgtcacctcc

SEQ ID NO: 15749 - DNA, 524 bp, Oryza sativa
  Clone ID: uC-osflcyp026a03b1
ttgattatctgcagcttgatcagttccaaaactgagatatatctgcagcttgatcagttccaaaactttagctgggcacgcactaccggcagcagttcaaggacaaaccaatttgaaggcggctagcgccagcacaggcatgccgatctcgcatgagctgggcgagcctgacgaaagcttctacaatctatggaaggaagagtgtgaagaactgtgggaggaagaggacgaactgtggggggacgaagatgttgaggaggagctgtcgctgcgtcaccctggattcaacaagtggaccgtccagcagggtgctgcaggcggggaccatattcgcgccaaggacaagaacttttactgctttgaggtccaagttcacttcactggagaactagttgacggtacgcagttcgtgtcaagccgagaaaatgacatttcagagaggtttatactggggcaagaggatgtgacgcatggtttcaacttaactgtcagttcgatgcaaccaggggagaaagcttattcac

SEQ ID NO: 15750 - DNA, 511 bp, Oryza sativa
  unsure (1)..(511): unsure at all n locations
  Clone ID: uC-osflcyp026a11b1
tcttccttcagatcgcccggaatcccgccgccgcgagcccaccgatccctcgcctcgcctcgcctctgattcaggcccccgcccccgccgatcctccacaccgcgcgcctagggtttcgactgctcatccatccgctcctgggggaaggagaggagccaccgccgcgcgattcggggcttgtatgtgtatgtagggttattagattcgtcgacctactgattctactctctcggatgacctagatttcacgtaggatcctctacttccaaccgattcgccttctgcttacttgttacatttacctctacacctctccactcttcctgctcctgcacctgcacctgctgttgctgttgaagatgagctccgagcccccagagccagagcccgccaagcgcaacatgaggatcagttactccagggactttatgatctccgttggagagaccgaccgctgcaagaagctgccccaggctttgatgcctcacctctcagtgatctgcangagat

SEQ ID NO: 15751 - DNA, 522 bp, Oryza sativa
  Clone ID: uC-osflcyp026b03b1
tttaatcgcgaaccgactgcgagtagtaagtaagggtaagcatccgtctccccccttctcgattgttctcgatccgccgccaccgccgtcgacatggacgtcgtcgtcgccgtcatccgccgcccgctcctccgctccgtcgccttctcctcctccaggtcccgctccctcctccacctcctctcccgccccctctcctactcctaccccccttccggctcccccaaccatctccaccacccccaccagcagcagtggcagccatcgcctccgcctccgcctccgccgtcgcaaggaccttctccccagtggtctcctcccggaaactaccaccagcagcaggccccttcccctccgcgccactactacggtcccccgcagcatcaacctcgctacaactacggcccttcgcagccacaggcgccgccgccgccgtgcaacgactactggccaccgtcgtcgtcgtcgtagcagcagcagcagcagcgggaggctgtggtggcgccagggagctgatcgggc

SEQ ID NO: 15752 - DNA, 497 bp, Oryza sativa
  Clone ID: uC-osflcyp026c06b1
ttgatgaaagtcttaagtggagaacagcttacaggccagaagacattcgttggcccgagatttctgttgaatcagaaacaggtaaaatgtacagagcaagttttgtagatagagaggggagaactgtcgtcattatgagacccgcaaagcagaacacatcgtcccatgaagggcaggtacggtttcttgtatatacgttggagaatgcaatcctcagcttgcctgaagatcaagagaaaatggtttggttgatagatttcacaggatggaccttggcaaatgcgacacccataaagactgccagagaatgtgcaaatatcctgcaaaatcattaccctgagaggttggctatcgggatcctgtttaatccccccaaagtatttgaggctttttggaaggttgtcaaacattttcttgacccaaaatcaatccagaagggtgaattctgtatacctgaaagacgaggagagcatgaagatcctgcacaagtacattga

SEQ ID NO: 15753 - DNA, 482 bp, Oryza sativa
  Clone ID: uC-osflcyp026c07b1
tttgaacttttctttctcgccctcaattagggccgattttgtgcatgcccgccccatccaagtccattccatcttgatgggcatatcttctgctgctcgcagtggcgggtatcttgctagtgatgatggcgtcggcgaccaacgtggtgggcggtgaatggagcctaccacctaaacctgggcaccaattatcagatatggacctggatcaatgtgaggaaactaccatgcatgatgtgaacatagaagaggagatgaggcgcaagcagtatcaaaggaagcaggaagcgtacgacgaagatgaggaggaggatgctccaagagtacagtgtgctcaacagtaagaagtgtcactttctggcgcaagtgatgatactccatgtaaactaagtagtttttggtgagactgttcattttagtgtattttgtactagttaaattaaatagtgaatgtctaagttgtgccgtttgtatattagctt

SEQ ID NO: 15754 - DNA, 90 bp, Oryza sativa
  Clone ID: uC-osflcyp026c08b1
cggtacggaacccccgggacgacccacgttttttttaaacacaagaaggaaacaaaaagggggggcaaaataaaaagaaaccttgccgtt

SEQ ID NO: 15755 - DNA, 447 bp, Oryza sativa
  Clone ID: uC-osflcyp026c10b1
tattggacaagaagaccttggacggtgcaaaattggcaagggaggaaagccatcgtctgagagccgacggtttaggtgatgacatagttcctttggacaactacctggacacgcagtactttggagagatcggcatcggcactccaccacagaacttcactgtgatattcgacactggaagctccaacttgtgggttccatcagtgaaatgttatttttcgatagcatgctacttacaccacaggtacaagtcaaaagggtcgagcagttacaaaaagaatggagaatcttgcagcatttcctatgggtctggatcaattgctggtttcttcagtgaggatagcgtgctagttggggatcttgctgtgaaaaatcagatgttcattgagacaaccagggaaccgagccttactttcatcatcgggatgtttgatggaattcttggac

SEQ ID NO: 15756 - DNA, 357 bp, Oryza sativa
  Clone ID: uC-osflcyp026d01b1
tcttattgtgactgtgtatgcattggccaagaggacgattgatggtgagtggttcctcatgacctgcttcaagggcgcgcatggcggatgccttgtgacgaacgcctcatacgacgtgcacagcgggatcctctactgccagaaccacttgtggcagttgttaaagaagtccggctgctacaacaacctgatgaagcccgacttcgtcggcgaccagaacacgcgggaatccaaggacgccgtcgtggagcccgcgaaggacgacctcgggactggggaggcagacaaggaagcagaagaagcgttaccggagcaggtcgcggaagctgttgtagaggaccacggagcactcatgag

SEQ ID NO: 15757 - DNA, 446 bp, Oryza sativa
  Clone ID: uC-osflcyp026d04b1
ttggtcttctccacctcctcctccaagccgcgcggcggctcctccgtcggattctcctcgcccgcgcggttccggcgcacggcggcggcggcggcctccaggggcacggggcggcgcgcggggctgctggtagtgcgcgcggcgagggggaagttcgagcggaccaagccgcacgtcaacatcggcaccatcggccacgtcgaccacgggaagaccacgctgacggcggcgctcaccatggtgctcgcctccgtgggcgggagcgcccccaagaagtacgacgagatcgacgcggcgcccgaggagcgcgcccggggcatcaccatcaagaccgccaccgtcgagttcgagaccgggacccgacactacgcccacgttgactgtcccggccacgccgactaccgtcaaggaccatgataccggcgccgtgcaaatggacggtgcca

SEQ ID NO: 15758 - DNA, 480 bp, Oryza sativa
  Clone ID: uC-osflcyp026d06b1
ttaatatcaggagttacagattgttacagaaactggagttgtagcatctttgctgggatttcaccaggccctcagtatcagccaccacagttaggtaggatgaaccttttgggttgcagatcattgccatcaatctatatgtctcagctccgaaaacggagatgaagaaagatccaagatacagtaccggatattctacagcaagtcaccgctgttagctgttcttgatggatttcctcatgccacattcaataagtctatttatatgtgcttacataattgtgttcatcatatttgcagctgaaaatattttggtgaattcagtaagacgggggagaagatacttaacttcaacattctttgttaaaggcattacccacagatcatatagcttagatagcacttcaggattaactttgcacctcactgttacctgcattgccttcttgcttgtcagcattgttcttcaaagtgacattt

SEQ ID NO: 15759 - DNA, 422 bp, Oryza sativa
  Clone ID: uC-osflcyp026d10b1
tgcaggccttcccaatccttttgatttttgtcagtttagcaacttgctcaatgatccatctataaaggagatggcagagcagattgcaagcgaccctgtgttcacccagatggcagagcagctgcagaagagtgctcatgtgaccggggaacagggtggccctgcattggatcctcagcagtacatggaaacaatgacacaagtcatgcaaaaccctcaattcatgtcaatggcagaacgtcttgggaatactcttatgcaggatcctggaatgtccagtatgctcgagagtttgactagtccttctcataaggagctgcttgaagagcggatgtcccgtattaaagaagatccctctttgaaggggattcttgatgagataagagtggtggtccatttgctatggtgaagctctggaatga

SEQ ID NO: 15760 - DNA, 205 bp, Oryza sativa
  Clone ID: uC-osflcyp026e02b1
ctctttttgccgaccaaagaataaagcccagggggggggtgtattaaaaaaagcctagggtaacccaccgaacggtgaaacatatcccagaaagaaaaggtagagtccaccaccccatgtcaccacggcgtaaaaaacttagggatgaaaggacaagacaaccgatctcatcaaggaagcgtgaaagggatacagagcggaagca

SEQ ID NO: 15761 - DNA, 513 bp, Oryza sativa
  unsure (1)..(513): unsure at all n locations
  Clone ID: uC-osflcyp026e09b1
ttttctttccacacgtcagcctcttatatggagacctgtcagatgaggagaaggaggttgcaaggaagatggtagaggagatagacaaggagatttgtggattgcagtttgagatctccgagcttgcgctgtataggacggataccgaggacaaaagcttggagtcatgggaattggtggagatctgccaccttgagaggaagtgattaatctcctcccgttggtgcttctgccataagttaagtttgaggtgagtttgttcaataataaagcttgcccaaatgcaaagcgatgcctaaaatttaagttttgagttattcctactgtaaaagttacatatatacatatatatcttgggttcttcccagataatatttggcttattaattatctgatgtactgataactgagttatgtcatagacangctctgatcaactcttaatgtgtatgccacattattatcacatttagagatgcactctaaatatatagtgctgcattcgagattaat

SEQ ID NO: 15762 - DNA, 482 bp, Oryza sativa
  Clone ID: uC-osflcyp026e10b1
ttgtcggacatggcgtcgcccatgctctccggcgccaccgtgccactccagggaggcggcttgtcggagttctccggcctgaggagctcgtcgtcgctgccgctgcggcggaatgccacctccgacgacttcatgaacgcggtctccttcaggacccacgcggttggcacgagcggcggggcgcggcgggcgccgacggaggcgaagctgaaggtggcgatcaacgggttcggccgcatcgggcgcaacttcctgcggtgctggcacgggcgcggcgacagctcgcccctcgacgtcatcgccatcaacgacaccggaggcgtgaagcaggcgtcgcacctcctcaagtacgactccacgctcggcatcttcgacgccgacgtcaagcccgtgggcgacaacgccatctccgtcgacggcaaggtgatcaaggtcgtctccgaccgcaacccgtccacctgccgtggggcgagctcggcatc

SEQ ID NO: 15763 - DNA, 180 bp, Oryza sativa
  Clone ID: uC-osflcyp026f03b1
gcgtggtcaaatctcacccccgcaccaaggagccgcctttccgacgcttcaaaccaacggcgccgccaccctgacaggcggcctcgcccagatctcccagggagcccagccgcgcggcccacccactacaggtgcgcaaaccgacgaggcccgaaccggtgccgtcagggccggcccgcg

SEQ ID NO: 15764 - DNA, 469 bp, Oryza sativa
  Clone ID: uC-osflcyp026f04b1
ttaacttaccacttcaaattggtcggagaagaagaggtcgttcgcgcatggggtaggcggcgagcatgagggtggcgctggtgtccgtggtgctcgtgggcctgatcctggtttccacggcccacgccgcgcggcccgagaagctgcccgccgtcgtctccccctccatcgcccccgccgtcggcgaggtcgtcgatgccgccatcaacgccgtcgatctcctgggggtctcgaagatgcaggaggccaacccgtacactcgcggctgcagcaggttcaaccggtgccgtggctgacggacggcacgcgcgcgtcgcaattatacatgtgtatttgagtattgatcatcgacgacgacgatgagctagctggtggacgattgatttcgcgtggtggcgattggatcttattacccgtgtgtgtggactactccggtccttcgattttaaaatacctcccaattattaac

SEQ ID NO: 15765 - DNA, 511 bp, Oryza sativa
  Clone ID: uC-osflcyp026f06b1
tcttggtcgcgtgggtcacagggcgcaagcggcggcggcgtcttggagggcgtcggcggcgcgctcggccccaaggcgcaagcggccgtgactggcggcagcggcgcacgagcgggacatcggcagcgcatggggccccatggcgcaagcgaccgtgactggcggcggcggcgcgggagcggggcctcggcggcgcacggggccacagggcggaagcggcgccatgggacgtctcctccgcctatgccgcgcgcctcccggaggtcgtcgtcggcgccaaaccgcgagtcagacccgaagctgttgctcccatcgagccggcggaggaggagggcacgaacaccgggtagccgaacgcggcgttcgtcggcacgcacgttgcacaccccgtcagcccccttacgtacatgttccacgccctccccactccccagtgccctcgccggcgccctccacatccagctcagcctgctccccctgctcatgatggctgtttggtttgggtgggttg

SEQ ID NO: 15766 - DNA, 490 bp, Oryza sativa
  Clone ID: uC-osflcyp026f07b1
actgtcgacacctaagcatgggcgctcctgctcaagaactacgaccgcctcaacgttcgcaccggtcactacacaatgctgcgattcggccacttgccggtcaagcgccgcatcgccgaggacctacgctacggcgtcatcaacctagacaagccctccaacccctcctcgcacgaggtcgtcgcctggatcaagcgcctcctccgtgtcgacaagaccgggcacagcggcacgctcgaccccaaggtcaccggcaacctgatcgtctgcgtcgaccgcgccacccgtctagtcaagtcgcagcagggcgccggcaaggagtacgtctgcgtcgcgcgcttacacgccgtcgtccccgacaccgtccgcgttgcccgcgcgctcgaggcgctcaccggcgccgtgttccagcgggccccgatcatcttcggcgtcaagcgccagctcagggtgaggaccatctacgagagcatgctgctcgagcacgacg

SEQ ID NO: 15767 - DNA, 498 bp, Oryza sativa
  Clone ID: uC-osflcyp026f09b1
gttgcggacctcaccctaaaccctagccatggcggcggccaaccttctctctcgcgcgctcctccctgctctaaaccctaacccaagcagccacagcaaccgcgtcagcccttcggccgtatctctccgctgccgccacggcctgacggcctccgttcgcgcctctctctccacggcagcgccgtccccgccgccgcggccggcggcggcggcggccgacggtcgggcgccgaagcgctgtttccggcgcggcgccgatgggcacctgtactgcgagggggtgagggtggaggacgcgatgggggcggcggagcggacccccttctacctctacagcaagcctcaggtggtgcggaacttcaccgcctaccgcgacgccctcgaggggctccgctccatcgttgggtacgccgtcaaggccaacaacaatctccgcctgctgcagctcctgcgggagctcggctgcggcgcccgcctcgtcagcgggaacgagctccg

SEQ ID NO: 15768 - DNA, 484 bp, Oryza sativa
  Clone ID: uC-osflcyp026f11b1
tcaaagtcagtatcatcgttggggaatccaggagctttgcctccaaagctcaactatagccaatcctttgcttgtattccttatacagctgatgcatactatggtggggtcttgactggatattcttcacatgcaattgttcatccccagcaaaatggtacagctaactcccgggtgccgttgcctgttgagcctgcagcagaagagccaatatttgtaaacgcaaagcagtaccatgcaattcttaggaggagacagatacgagctaaattggaggcccaaaataagttggtgaaaggtcggaagccatacctccatgaatctcggcatcgccatgccatgaagcgagctcgtggatctggagggcgcttcctcaacacaaagcagctcgaggagcagaagcagcaacaggaggaggaggccgcatccggtggcgcgagctctggcaataggacatgccttcagaatggcaccggtagcgcgc

SEQ ID NO: 15769 - DNA, 503 bp, Oryza sativa
  Clone ID: uC-osflcyp026f12b1
atttgccttcgcagttaatcaggtttagggagggtttcctcctccccttccgcctccgccccagcgccgccgtcgtccccctcctctccggcgaagagccgccgtcgccgccatcaccggagcgagccacggtagcaaccgcaaccaccacaaccatcaccatcctcgtgagccgtcaagttttcgattgaagggcagtagggcacgttatacttatggactcaactcaggaacaacaacaggattttggtgtgctactgaagcagggggcggagggaagggtatttgtttcaacatttgtgggacggaagtgtgtaatcaaagagcggttttcaaagaagtaccgacacccattgttggactcaaagttgactcttaaacgcttaaatgctgaagctcgatgcatgacaaaagcaagaaagcttggtgttcccactccagttctttatgccgtggacccacttctgcatacattaacctttgagtatgtggatggcttatct

SEQ ID NO: 15770 - DNA, 492 bp, Oryza sativa
  Clone ID: uC-osflcyp026g01b1
actcgttcttcctctagttggtaggtacctggttgttcgaccatgtgtatggagaggtcgctcatcagcatggtgcggatcgggcacgtcggactgcgtaagtgtgccacgacgggacatgcgccctacaagcttggaggtctagacaagcgatggattgacagggtccagatggcaccccttgagatgaacaagcggcgcttcaagctcgcgcggcggctggagaagccaaaggacgcgcgcgagagaggtctcaccatggatattgccctgtggaagttcgagaccaccaaggggcagtgcgcggagataggtggccctggtcacggtgtgtgtacaaagcacatgagcacgggtgcctcacaagttgactgagcagtgcacactgatgggtaagggactggcgggctacaggttgatgtacagaagggacacgccgatctgcaaggaggagtgcatgaggtagcatatcgagatggacaggaacaggca

SEQ ID NO: 15771 - DNA, 478 bp, Oryza sativa
  Clone ID: uC-osflcyp026g02b1
acctttcctttatgacatcctgtccttcctgttcctctggtcactctgctctcccccgcgcgcgccaccgtcgtcgccatgtcgggcaacatcgccttcggccgcttcgatgactccttcagcgcggcctccctcaaggcctacgtcgccgagttcatctccaccctcgtcttcgtcttcgccggcgtcggctccgccatcgcctacaccaagttgaccggcggcgcgccgcttgacccggccgggctggtcgccgtggcggtgtgccacgggttcgggctgttcgtggcggtggccatcggcgccaacatctccggcggccacgttaacccggtcgtcacctttggcctcgccctcggcggccagatcaccatgctcaccggcgtcttctactggatcgcccagctcctcggcgccatcgtcggcgccgtccttgttcagttctgcaccggcgtggcgacaccgacgcacgggcttg

SEQ ID NO: 15772 - DNA, 349 bp, Oryza sativa
  Clone ID: uC-osflcyp026g03b1
tttttcttctagccagtaagctagctaactggctgcgtgtatttggaccccacttttgattgcctcctcggccacctgcgtggcttcattccaagggctcaagtccaccgccggcctacccgtcagccgccgctccaccaactcgggcttcggcaacgtcagcaatggcggaaggatcaagtgcatgcaggtgtggccaattgagggcatcaagaagttcgagaccctatcgtacctgccaccactcaccgtggaggatcttttgaagcagatcgagtacctgcttcgatccaagtgggtgccttgtctcgagttcagcaaggttgggttcggctaccgagagatccac

SEQ ID NO: 15773 - DNA, 473 bp, Oryza sativa
  Clone ID: uC-osflcyp026g08b1
tgccggaccggtacggacgggccgggccgccccactctttcctctgtacatcaggttaagtatggatcgcagggagtttttctcatgacttttggtcagactcgggtaggcatgcctggtatagatgcactcttcagggaccaagtaccgagaacaatccgtgtgacccatgagaatgacattgtcccacacttgccaccatatttttgttaccttggtgaatggacatatcaccacttatagagagaggtttggcttcatgagaccatagtaggaaatgtagttactaggaatgagaccatctgtgatggatcaggcgaggacccaacatgcagcagatcggtctacggcagaagtgtggcagatcatcttgaatactacggtgtttcactacacgctgattcaaggggaacctgccaatttgtgattggttcaaccaacacggcttatggtagcattcttgaagttgatag

SEQ ID NO: 15774 - DNA, 75 bp, Oryza sativa
  Clone ID: uC-osflcyp026h09b1
ttttccttttgaaccagaaagagaatatcaggggggggggtgatttaaaaaaacagttccttttaatacaccgag

SEQ ID NO: 15775 - DNA, 468 bp, Oryza sativa
  Clone ID: uC-osflcyp027a01b1
tttttgcgaggagcgtagccgcggtggtgtggctggcgatggcggcggtggcggcggcgcaggcgccgggtcccgctgcgacgccggcggcgggcgccacggggccgccgaacgtgacggcggtcctggagaagggagggcagtacacgacgttcatccggctgatgaaggagacgcagcaggacacgcagctgaacagccagctgaacaactccttcaacggcaacggctacaccgtgttcgcgcctaccgacaacgccttcaacaacctcaagccgggcaccctcaacagcctgacgcagcagcagcaggtggcgctcgtccagggccacgttcttccggagttctactccatggactccttccagacggtcagcaaccccgtccgcacccaggcgttcggcaccgacggtccctacaccctcaacattaccttcaccaccaacaacaacgttaacgtcttcaccg

SEQ ID NO: 15776 - DNA, 458 bp, Oryza sativa
  Clone ID: uC-osflcyp027a04b1
ttaatatgccatcacttagacctttattatgtatcaggtcataaaatctctcttcatgccctactcaaatatctctgctacttaacaggaattgtttatgcccacaccaattatcttccaaaattatttgcctctgtggcatgaggggtacaatcttatttctaagggtattgtcaacagctggaatatagatgtctttgcactctttgctgtattgtcagctaaatggtgatacaaagtacatattcggtgaagctattaataactccgtagaaagattcttttttgtttcgtttgaattaggcagctggagatgataattgtccattcgacaacaggagatggctcttccagagaagctgttgactgaaaacactttatcggacttgagataagcatgatagctgtctcaactggtgtcaagggaggactgaacggtgtatatctagaccatacat

SEQ ID NO: 15777 - DNA, 520 bp, Oryza sativa
  Clone ID: uC-osflcyp027b01b1
gttttgcttctcccgctgctcgcctcgcctcctcgacgatctgagatcatcgagatcgattgagtggagctaggcggcggctagggcgagatggcgctcgtattgcatgctggcagtggaaacaagaatgcattcaaggcactcattgctgccgagtactctggtgtcaaggttgagttggtgaagaactttcagatgggtgtctccaacaagacacctgagtttctcaagatgaatcctattgggaagattcctgttctagagactcctgatggtcctgtttttgagagcaatgcgattgcacgatatgttacccgctcgaaggctgacaacccactctatggggcttcactgattgaatatgcccacatcgagcagtggaatgacttttcggccacagaggttgatgcttatattggaaaatggctctacccacggctaggaattgctccctatgttgctgtgagtgaggaagcagctattgctgctttgagagaacattgggtgccctaacacacac

SEQ ID NO: 15778 - DNA, 173 bp, Oryza sativa
  Clone ID: uC-osflcyp027b04b1
tctcctgcgcggggaatggtagcctcctccgggggggtttattaaaagcactctgggcttcccgacgtagcgcagcagcgattgcattctgtccaactttaaggctgcagagaccgggcattgtcacagagggctccattccgcttaaggctggcgacagcttctcggtgccc

SEQ ID NO: 15779 - DNA, 527 bp, Oryza sativa
  Clone ID: uC-osflcyp027c01b1
ttgttttgtagtcgctcgctcatcactagcaggtggcactcttcatccatcacacggatcaacgatgcacaacaacaatactctcctcctccactgtgttgtttagctgcagctgcctgcaggatcgaggagcaacaaagaatggggggcatggagaaaggtggttgcgaggtggaggctcggggcatcaaccaccacatccgcatgcccatccccattcccaagcgcgctcaccctctcatgatgatgaagatatggagcagggaggaagacgaagacgagcagtagtcgtccaccaccaccaccacccggcacgttctgcgtaacgtcttctgccgcgcccgccccggtgagcttctcgccattgtgggccccagcggcgccggcaagttcaccctcctcgagatccttgtcggccgtcttcaccccttcccgtttccgaccagcttcttctaacggtgcccccgccaccaccgtcgacctacgccgagttttcgtctacgttacccagcgcgacgttcctttcc

SEQ ID NO: 15780 - DNA, 451 bp, Oryza sativa
  Clone ID: uC-osflcyp027c03b1
tgcttctactgaatgggtaaagggcaagcaaatggaggaagtagtgactataaaaaacactgagattgccaagcacttgtcacttccaccagtaaagctccattgtagcatgcttgctgaggatgcaattaaagctgccgtgaaagactatgaagcaaagaaggcaaagctagcacaaaagggtgaagagaaggctgccgaagcatgagtgccagaggttctgtcatgaagaatgttgcagtgccctgcgtactcgtagtaaagaacctgtcatgaagaagtctctgctctgcttcttgctggcgggaaatagtgtgtaacgctcacaaactctatgcagcatgtatcataaggatgaaggcaaacatttttgaataaatgtgctgtcatcttgaaagaaaaaaaaaaggtgtatgcgtgtgtatggcctagtaatgaacatatggtacgg

SEQ ID NO: 15781 - DNA, 126 bp, Oryza sativa
  Clone ID: uC-osflcyp027c04b1
ttgctccccacacaaaggtagcgaccgagcggggggggacttgaacaccctgtggatttacacacgatggcccccgctaggcgctggcaccaccgaagatccaatgatgaatgccagcggactcac

SEQ ID NO: 15782 - DNA, 485 bp, Oryza sativa
  unsure (1)..(485): unsure at all n locations
  Clone ID: uC-osflcyp027c06b1
tgttacgacaagctcaccctccctctcccccggtgctccctactcgacgacgcccttctctacctcgacgtcgtccacgccaacgccgccgagggcgtaaagccgctcgtcggctccgcccgcctcccgctccgcgacgtcctcgacgacgccggcgtaggcgcccgcgtctgccgctccctccgtctcaagcgcccctccggccgcccccagggacgcctcgacctccgcctcgccgtccgcgagtccgcgcgctactacgaccccttgccctacccggctccctacggccaacccgtcggaacacgcgacccctatggcgccccgcctacggcctacagctccggctcaggcgggcagtacccgaacggtggtggctacggctcaggcgggtacgcggcgccgccggcagggtacccgagcgcctacggggcgccgtcacagccagcgtacggtggcgcgcctnctgtggcggcgtacggtgc

SEQ ID NO: 15783 - DNA, 486 bp, Oryza sativa
  Clone ID: uC-osflcyp027c08b1
ttccattcccactttcgcccacacacacacgcagatccacagccatcctcccaccgccgccggcaccatctccaagcccacgaacacccacagccaccgtgagctcgagcgaggtaagaaaagctttagatctgagcgacttcgagcgtcttcaaggtaaagttttctcgaaaccctcttcttcttcttcctcctctggctcccccacctgttcttctacggtttcttggttaggttgcttgcagagagcgagagacccagggccttttagatccagggctcccagatctgctgcttttctttcatcttctttgtgttctagtgctaggatggtagccaagaggggttctttttccacaccgtacttgctagagctaccaccaaaaagccatctgtttttttactgcggctgacgattgctccctccttcctgcctgctctggattctggattcggaaccaggcaaatctttgtactactggttta

SEQ ID NO: 15784 - DNA, 526 bp, Oryza sativa
  Clone ID: uC-osflcyp027d01b1
ttcttagagcaagaagctcatctcctcctcctctcgcatggcagccatggccaccaccgcgtccagcctcctcaagacctccttcgctggcgcgcgcctccccgccgccgcccgcaaccccaccgtctccgtcgcgccgcgcaccggcggcgccatctgcaactccatctcgtcgtcgtcgtccactcccccctacgacctcaacgccatcaggttcagccccatcaaggagtccatcgtgtcccgcgagatgacccggcggtacatgaccgacatgatcacctacgccgacaccgacgtcgtcgtcgtcggcgccggctccgcggggctctcctgcgcgtacgagctctccaaggacccctccgtcagcgtcgccgtcatcgagcagtcggtgtcccccggcggcggcgcgtggctcggcgggcagctgttctccgccatggtggtgcgcaagccggcgcacctgttcctcgacgagctcggcgtcgcgtacgacgagcaggaggactacgtcgtcatcaagcac

SEQ ID NO: 15785 - DNA, 506 bp, Oryza sativa
  Clone ID: uC-osflcyp027d06b1
tatttaaatcaaacaaaaagaaaaaatattcccgatctgtgaaattcgcaaaaccctagcgcggcggcgatgtcgaacacgagggtgttcttcgacatgaccgtcggcggagctccggcggggcggatcgtgatggagctgtacgcgaaggacgtgccgcggacggcggagaacttccgcgcgctctgcaccggcgagaagggcgtgggcaagagcggcaagccgctgcactacaaggggagcaccttccaccgcgtgatcccggagttcatgtgccagggcggtgacttcacccgcggcaacggcacgggaggggagtcgatctacggcgagaagttcgccgacgaggtgttcaagttcaagcacgacagccccggcatcctgtccatggcgaacgccgggcccaacactaacgggttccagttcttcatctgcaccgtgccctgcagctggctggacgggaagcacgtcgtgctcggccgcgtcgtcgagggcatggacgtcgt

SEQ ID NO: 15786 - DNA, 425 bp, Oryza sativa
  Clone ID: uC-osflcyp027d09b1
taggaactgcagctcgctgagcccggtgaggcggtttacggacggcgacacctagtacctgctcgaccgcccggggctcgtcttcttcatcagcggcgtgcaggagcgctgcgagcgcggcctgcggatgaggctgcgcgtcaggcccgccgctccggggccggcgcaggcgccggcgccggggccaacgagggcggcgctgacgctgcgtcgtccacccatcggcgctcccaggccggccgccgtcaccgccgcgttcaccccgacatcgccgtccgcttcgcgcccgagcgccagaaccagcccgagtcccagccctgggccggcacaggcgccgagcggtgcatctggccgcgcgctcacgggcttctccatggcagcagcgcttctcgtcgtgtgtgtcgtctccgtgttcatcttggttt

SEQ ID NO: 15787 - DNA, 498 bp, Oryza sativa
  Clone ID: uC-osflcyp027e05b1
tgatcgagatctgcaactgcgacaacctccccggcgtccccctcggcgccgaccagccgctcgtcatggccggctgcaagagggccgccgtcatcaagcagcagcagcaggcgtcctcttctccggcgacggcggcggcggcggcacagtgcgccgtgccatcgtcgacgaaggcgatccacgtcggcgaggaggcacacatctcgtgcgcctaaaggcaggagagattgcgtacatgcttgtgtggctgcaatgcaattagggatgcaagtaggctgatgtacaaactcaccaaaataggttatttactactcccttctctcgtaaaaaaaccaatctaggatcggatgtgacacaccttcatactacgaatctagacatatatatgtccagattcacagtactataatatgtcatatctaattctaggtttgttttttatagcaaggatggagtacgtggctggtggttgggtccacttaaatagcatgtatgtgg

SEQ ID NO: 15788 - DNA, 515 bp, Oryza sativa
  Clone ID: uC-osflcyp027e10b1
tgttcggcgcagttgctctgtgatcccaggttgcgggttatgttgattcaattgttgagctgatttttgcccatttttttgaagaggctgaaagatgagatgaggcggctgtggaaaaaggtactgactgtgaatgggtaggcaccagacagcgtcgtccttcgggggccaagtaatcaagaaatgacaaatgtacagatatgggaaagggatacatacactctgtattttaaggtagattttgtggttaggaaataaataggtacatagatacaaaattctttttgccaatcttttgtattacttgattatatgttaaccatttttctttttcttccctcctcgtcaaggttttagatggagacttagtggtgtgtccaaatggaattttacgctttacacggtcacaagattgatctcctttcgtgacctatattcatactcttgctaaatttgacaccagtgagccatttgaactttgaccggcgaagctgttaattgaaatctcttcttac

SEQ ID NO: 15789 - DNA, 441 bp, Oryza sativa
  Clone ID: uC-osflcyp027f04b1
ttcttgctcgtcgccaagacccccttcctgggtgattccctgccgtacagtgccctcctacgggacatagacgccgacgtcaccggacgaatcaccatgagcaaggagctggggtacgggcctgacagggtgaaggacctggggccattctcggagcagacgccgtctgacctgaggggcgagtttcgggacgactacgggtgggacacggcggggctctacggggacccggaggcgttcgcgaggcacagggccctggaggcgatccacggccggtgggggatgctcggcgcgctgggctgcatcacgccggaggcgctcagagaagggggtgcgcgtcgacttaaaggagcccgtgcggcctaaggtcagggcccagatattctccgactgaggactcgactacgttggcaaccccaacctggtgcacgcgcagagcat

SEQ ID NO: 15790 - DNA, 509 bp, Oryza sativa
  Clone ID: uC-osflcyp027f09b1
tctcattccagctttgcgcacggtgggtaacatcgtcactggggatgacatgcagactcagtgtgtcatcgatcatcaagctcttccatgtctcttgaacctcttgaccaacaatcataagaaaagcatcaagaaagaagcatgctggactatctcaaacatcactgctggcaatagggaacagattcaggctgtgatcaatgcaaacataattgctcctctagtacatctgctgcaaactgctgaatttgacatcaagaaagaggctgcgtgggcaatctcaaatgccacttctggtggaacacatgatcagattaagtaccttgttgcccagggttgcatcaagccactctgtgatctgcttgtttgcccagatcccaggatcgtgacagtttgcttggaaggtcttgagaacatcttgcaggttggagaggcagaaaagaaccttgcggcaggggatgtcaattcctatgctcagatgattgatgatgctgagggactggagaaga

SEQ ID NO: 15791 - DNA, 496 bp, Oryza sativa
  Clone ID: uC-osflcyp027g12b1
tcctcattcctctccacttcttccttccgtgccggttcgacccgacagcagctttggcgtgtggaggtgggaggcggcgtgcagcggcgggagggcggcggcctcaggtgaaggcggcagcggcgggagggtggcggcgggatgggaggccgggcagcctccggtgaaggcggcagcggcggctgcaccctcccctccgccagatccagtgggagggaaggcggtgacccgacaacggtgcccgctggtggcggtggtggcggcgtcaacagtggtggtggagactggcgcgggctaggtggctgccggctgtaaccgccggattccggcgatggcggtggcgttgctggtggaagaggctggcacgggcgatgtggctaccggccgacatgaaattttctttttttgagatcttgagttctttctctcttttatttctcttcatgtcccatttgttgagttcttgagactttgtacatgtagtggtttgctgttc

SEQ ID NO: 15792 - DNA, 427 bp, Oryza sativa
  Clone ID: uC-osflcyp027h01b1
ttctgcggaggcggaggcaagcaaagccttctcccctcgcctcacctcgcaatccaccttgggcgggccgtccggcgagctgagcgcggcggcgccctccttactcctccctccccacgtgcggccccgtcggagcacggcggcgacgaagaaccaggggggtgggggggcgaggaggagggcatcattccaccggctgattcattcttcttggctcgagtcgaattggagaggtaattgcttgccttctgaggaactgcgggagggagcgaggagtcgaggagcgactcttgaaggatggcggaaggtgccaaattccatgggatcgttggcgctgttggcgcgcatgatggtggcgggaacttctgtgacatggggcactaccagaagctaggggagggcttcaacatgttgatcgatagcctta

SEQ ID NO: 15793 - DNA, 349 bp, Oryza sativa
  Clone ID: uC-osflcyp027h02b1
tttctctaatttctatcccctctctgaaatgaagagggtattagagcaagagatcctaaaaccctagccaccaaatccggtcatcgcaggcgcgccggcggcgctcgccgccggcgagccatcgtctcatcctcccgtcattagttggctgtcttcgagttgtagcagttttgctttttgtctcttctcttcgcatcaaagcagcagcaacaatcgcctcctcctgctgccgccggcctagccaccggctacctcgtccatccgtcggcctccgcgaccgatcccgttgcagatctcgcgggcggtggcggtcgtcgtcgtcgtcgtcgtccgttgtcatatgtcgcat

SEQ ID NO: 15794 - DNA, 324 bp, Oryza sativa
  unsure (1)..(324): unsure at all n locations
  Clone ID: uC-osflcyp027h09b1
tatcaatcgtgtattcgtgtggttaatttcactgagaatagaaggggttcgttatatcacacaaattgatacgctgagacacgcataggcgccgaagcgaccagctgcttaattaatcgataacacacgggtttaattcagcaataatcagcacacacacaaaccacactcatatgggtggtttttattgtggactaattaaggtaggtgactcgccggcggcgagtgttcggttgcttagtgacttcacttgccgcnctttttttggttattttaggcgaacaagcacggtgttcacgaaagattactttcgcttaaaattga

SEQ ID NO: 15795 - DNA, 387 bp, Oryza sativa
  Clone ID: uC-osflcyp028a06b1
cgcatttgcagttgcagagcaagaagcagagagagaagaagaggactcaatggaggaggagtccaagaattgaagcaggagaagaggaggtggtggtttgattcaagaagaaggagaagagcaagagcaaggatgttgcgaggagggacgagcttgctggggatcgtcaacttcgtgacgttcctgatctcgatcccgatcctggggggaggaatctggctggcgtcgagggccaactccaccgactgcatccgcttcctgcagtggccgatcatcgccatcgggctcgccgttatggtggtgtccctcatggggttcgcgggggcgtgctaccgccagacgtggctgctccgcctctacctcttagccatgttcttcatcgtcgtc

SEQ ID NO: 15796 - DNA, 167 bp, Oryza sativa
  Clone ID: uC-osflcyp028a07b1
cacacgcagccgtaataaagtgtagttctggaattgagacggtaactgctgcgtccactatgacgtgttctgttcggaggcctcgattccaattcgaaggtttcggaatctgaaatggcggcggcggcggtgcgggcggcggaggagcttgcggagagggagatggc

SEQ ID NO: 15797 - DNA, 532 bp, Oryza sativa
  Clone ID: uC-osflcyp028b02b1
gagagcccaataggacgtctgatatctccaagctcagcttgttcagggacttgctctccatttcctgaccctgaggtgcagacttcctcacgttccacattcccctcattcccagttcgtgagcctccaaagatactggatggcgagggaattgcaacacagaagttgatacctcgccatatgcgcaatggcggttctctcttggatggacatatttctgctgctgtaccagtcgtagacttctctgcccgacttcaaaataatgatcatgctatggatcatcgggtttcatttgagttaacagtagaagatgtagctcgctgtcttgagaagaaaaccaacattaatggggagtctgctgcagcttcttttcgccttgtgcccaccggtaacggagatcacattcatcccagagaatcgaatgatacaagagcagggctatgtgttgatgaaacataccatgatctgcctgagaagcacggcgctccttgtcccttcgtaggctaaagaatcaagttcaacatgttgatgc

SEQ ID NO: 15798 - DNA, 450 bp, Oryza sativa
  Clone ID: uC-osflcyp028b03b1
cagaaatttccggcgatgaagaaggagacggcggcggtggcgaaggaggaggtgtgggaggtgcggcccggcggcatgctggtgcagaagcggagcccggagtcggagccaccgccgggcggcgcgccggtgccgacgatccgggtgaaggtgaattacaacggggtgtaccacgagatctacatcaactcgcaggcgtccttcggcgagctgaagaagctcctgtcggagaagacggggctccaccccgacgaccagaaggtggtgtacagggacaaggagagggactccaaggcgttcctcgacatcgccggcgtcaaggaccgctccaagatgctcctgctcgaggaccccaccgcccaggccaagcgcctgctcgaggagcgccgccattgcaaggccgagcgcgccgcaagtccgtctcccgcgtcgcctcgacgtcgacagctc

SEQ ID NO: 15799 - DNA, 542 bp, Oryza sativa
  Clone ID: uC-osflcyp028c01b1
aggggacggagagggagtgggtggattgggaggacctcatcctcgaggacaccgtgccgctcgtcggcttcgtccggatgattctgcactccggcaagtatgaaaatggtgatcgactgagccctgaacatgaaaaggcaattttggaacgattgcttccttatcacccacaatatgagaagaaaattggatgcggtattgactaccttacggtagggttacatccagaatttgagaactcaagatgtcttttcatagttaggaaggatggtgagcaagttgatttttcattctggaagtgcatcataggtctcataccgacaaaagtaccccatgtatgcagataggttcattctcagacattttcgcaggaggcatgattaccgaattagtgactcgtaaaattatttcttggaacatttctctgattttgatttggcccatttgcccttaatgccctgtgatcttgcataccggtaagcacacctgggaaggttcccgttctacgtatcttgttgggcctcatccaatttccttcttcc

SEQ ID NO: 15800 - DNA, 506 bp, Oryza sativa
  Clone ID: uC-osflcyp028c03b1
acaccccagcagcagcagcagcagcagctgagcttgaagcagcagagcgaggtagacatggccgccgccaccatggccctctcgtccccggcgctggccggcaaggccgccgcgaaggtgttcggcgaggggcgcatcaccatgcgcaagtcggcggcgaagcccaagcccgccgcgtcggggagcccgtggtacggcgccgaccgcgtgctctacctcggcccgctctccggcgagccgccgagctacctgaccggcgagttccccggcgactacgggtgggacaccgcggggctctccgccgacccggagacgttcgccaagaaccgggagctggaggtgatccactccaggtgggcgatgctcggcgcgctgggctgcgtgttcccggagctcctcgcccgcaacggcgtcaagttcggcgaggcggtgtggttcaaggcggggtcgcaagatcttcagcgagggcgggctcgactacctcggcacccgagcctgatccacgc

SEQ ID NO: 15801 - DNA, 551 bp, Oryza sativa
  Clone ID: uC-osflcyp028c05b1
gcgctcttcttctccctccaataattctctcccctctgctgctgttgaccaccaccaccaccaccagcaggagcagagagcaccatgtccatccaatagatccccatgcttgcgcaccactcccgggcacattccgatcgaggaggaagaggaggaggagggttggccactttcatgccttctatctgtttgtggttgaagttaaaaggtccacatgaccgcctgcgattgtattgatgaacccttgcacttgcacggtctagatgaccaccttctgtaataggtatcattaacccaaggttgctatttgcagaggcagtgaagacacactttatagacctagtcgtctttacacaggattcgtgtcctatgttatcgtatttttgggtctcgggacatgtcgtcggcagagcttcatacgtttatgcatcccagtaaaattgcatgttagaaggtaattcggacccctgtgatcagtatggtttgaactttccttggctctaaagtgaaatagataatgcacatgcccgaactagttgtgtgaaaagaaa

SEQ ID NO: 15802 - DNA, 350 bp, Oryza sativa
  Clone ID: uC-osflcyp028c06b1
tttctggtcatccaaaaatatcttcagtttttttttctttctcagaatttctcgtctctatttatatggatcatatgtattcaagtctcatttctgtccagtatcaattcaccaaatgctgcatttgatttgcattgccttgtttcattttgatcagaattggccactttaattccatctatgtatctatggtaaaaattaaaagctacttttaccagctacatttgtatagattaaccacaatcaaatggagtgtccaattgtccttatttgtatagattaacattcaccgaattttaaacaaacaggcaacagcggatattttgcttaaggcctaatggcctttactc

SEQ ID NO: 15803 - DNA, 388 bp, Oryza sativa
  Clone ID: uC-osflcyp028c07b1
tttcttagctcctcgccgccgcattcgatccgacaaggaagggaagcgagagctcgaggtcaccctcaccggcggcgagcgatgggccactccaacgtgtggaactcccaccccatgaactacgggcccggctcccgcgtctgccgggtctgcgggaaccctcatgggctgatcaggaagtatgggctcatgtgctgcaggcagtgcttccgcagcaacgccaaggatattggcttcatcaagtaccgctgaaggccattttgcctcgccgttgagcctgagaactccgtctgaaccagagaaatggatcttttagtataatactacatttatgtggtttagctttcgttcggagtacccgttctattaaacatgtttaagttttgat

SEQ ID NO: 15804 - DNA, 470 bp, Oryza sativa
  Clone ID: uC-osflcyp028c11b1
tctggtcatccaaaaatatcttcagttcttttttctttctcagaatttctcgactctatttatatggatcatatggctccaagtctcatctctgttccccatgcttgcaccacacgctgcatcacattcgcatcgacgtggaggatgaggagcagaattggccactttaatttcatctatgtatctatggtaaaaattaaaagctacttttaccagctacatttgtatagattaaccacaatcaaatggagtgtccaattgtccttatttgtatagattaacatcaaccgaattttaaacaaacaggcaacagcggatattttgcttaggtcctagtgccttttactcacgcagatcttgtgtcatttggttatttgttgccacttgccaaggtagtaggtagagcttcatatgtttatgcattccaagtaaaattgcatgttagaagtaaattcttgcccctctcatca

SEQ ID NO: 15805 - DNA, 429 bp, Oryza sativa
  Clone ID: uC-osflcyp028d02b1
tccttttccactctctcctctccccttcgtggcggcggcggcggcggcggcggcgtgacgaggaggagcaatggcgatggcctcctgcgcctacgccccagcgggcggcgttggcacccactccgcgccgggcaggatcaggccgccgcgcggtcttggcttctccaccaccaccaccaagtcgaggcccctcgtgctcaccaggcgtgggggaggcggcggcaacatctccgtggctcggctgaggtgcgcggcgtcgtcgtcgtcggcggcggcgaggccgatgtcgcagccgcggttcatccagcacaagaaggaggcgttctggttctaccgtttgctctccatcgtttacgaccacgttattaacccgggccactggacggaggacatgcgggacgacgccctcgagcccgccgacctttacag

SEQ ID NO: 15806 - DNA, 125 bp, Oryza sativa
  Clone ID: uC-osflcyp028e02b1
tatatgtctgtgcgatagagcgctgtgcaaggagggcgcatactaagagcttgtgatgtaatgatgacaaacgcacctggtgtactagggatagaaagggtttaacgctacatggagttttggct

SEQ ID NO: 15807 - DNA, 160 bp, Oryza sativa
  Clone ID: uC-osflcyp028e06b1
ttctgtttcaacgacggctgctcggaattcggagggagggaggaaggaatcggagtgctcggtaagcttcgcgaagcgggatggaggctcctggcctactcctcctgttccttctactggcggcccttgtttgtttcgtcgccatgcttctttctttctt

SEQ ID NO: 15808 - DNA, 259 bp, Oryza sativa
  unsure (1)..(259): unsure at all n locations
  Clone ID: uC-osflcyp028f05b1
tctctgcctagagcattatcatcgatcgtcgtctacctagctagcttcacttgtgctccactgcaaccagtacaccacattaacttaattcacacctagcttagctcactatatagcttagcttcgcttaagcttaagctgatctcggagaagacgtacatgatggtggtggtgatgaggctttntcttnttttttttttttcctccctttcttttctttcttccttcttttcccctcgtcctctcagctttctgttct

SEQ ID NO: 15809 - DNA, 457 bp, Oryza sativa
  Clone ID: uC-osflcyp028f10b1
gcgagcggacatggcagcatcgctccaagccgcggccaccctgatgcagccggccaagctcggcggccgggcctcctccgccgcgctgccatcgcgcccgtcttcgcacgtcgccagggcgttcggcgtcgacaccggtgccgccggcaggatcacgtgctccctgcagtccgacatccgggaggtcgccaacaagtgcgccgatgccgccaagctcgccggcttcgccctcgccacctcagctctgctcgtctcgggcgccagcgcggagggcgtgccgaggaggcttaccttcgacgagattcagagtaagacgtacatggaggtgaagggaaccggcacggcgaaccagtgcccgacggtggagggcggcgtcgactccttcgccttcaaggccggcaagtacaacatgaagaagttctgcctggagccgacgttcttcaccgttaaggcggag

SEQ ID NO: 15810 - DNA, 471 bp, Oryza sativa
  Clone ID: uC-osflcyp028f11b1
taattaaccaaagctaattaagctagctcaagctctaatccacatttagctagaatggcgccgtccaagtccacagccgccgccggcgtcctcctcgtcctgctcgtcgcggcggcgggcggcggcgcagaggcggcggcgacgacgtgcgtggcgtcgctgctggagctgagcccgtgcctgccgttcttcaaggacaaggcggcgacggcggcgccggaggggtgctgcgcggggctgtcgtccatcgtgaagggggaggcggcgtgcctgtgccacatcgtgaaccacaccctggagcgcgccatcggcgtcgacatccccgtcgaccgtgccttggtccctcttcgtgacgtctgccttctcttgccgccgtgggaccatatctcacctgcgccaaccagaaaggtggtgtgccgtcccttaactattgcccggctccatcggctgtgttttttcagaaatgatcaa

SEQ ID NO: 15811 - DNA, 386 bp, Oryza sativa
  Clone ID: uC-osflcyp028f12b1
ccgtcacgccggagacccagcaggaccagatccgggcgctcaagcgcttcaacgtcggcgaggactgccccgtcttcgacggcctctacagcttctgccagacctacgccgggggatccgtcggcggcgccgtcaagctcaaccacggccatgacatcgccatcaactgggccggcggcctccaccacgccaagaagtgcgaggcctccggcttctgctacgtcaacgacatcgtcctcgccatcctcgagctcctcaaataccaccagcgtgttctctatgtggatatcgatatccaccatggggatggtgtggagggaggcgttctacacgacggacagggtgatgacggtctcgttccacaagtttggggattattttccggg

SEQ ID NO: 15812 - DNA, 540 bp, Oryza sativa
  Clone ID: uC-osflcyp028g02b1
tgctgtttcgacgatattgctgacaatgccactataacgctgcatttccatggtggcgttgatttgcagttgtccaggaatgccacctttatggagatcacctccatgaatggcgaccaagaggagcgctatgtgtgccttatcgttgacaagacggtggatgggacagcggtactgggcttatcaccccaacttgaccacaacataggatttgatctggagaacaagcagatctcaatttatcgcaagatatgttagtttgtccccttattaattacattgttaattttcttctactagctaattagactcattgttactgtacttttctgcaagcaccattcatatctaatatatgcatgctgatgaaatgtaataatgactatgactctcgtagcctttatttttttattaatatcacatagcttgccaattcatgctgggcaagacatgcaggttgttacacgcatttgtgcatattgttctacacaaaccccattgatactggatgaattcgatttgtgtgggggattgagaaat

SEQ ID NO: 15813 - DNA, 487 bp, Oryza sativa
  Clone ID: uC-osflcyp028g05b1
tgggcgccgccgttgatgtcgcagcagcagaaggcgccggctcccacttacccgccgtaccggcaggtgagggcgtgtaccccgcacagacgcgccgtctcgtgcgtgaggttctccccatgcgggcgcctcctcgcgacggcgttcctcgacggcacggtcgcgctgctctccccgtggtcgctcgccgccatcgccaccctgcgggggcacgccgacggcgtgtccgacatctcctggtccacggactcgttctacctctgctgcgcctacgacgaccgcacccttcgcatctgggacgtgcgccccgtcctcgtcggcctcaacccctgcagcggcggcggcggctggtggttcccattccgtcgaccccaactgcgaccgttgcattcgcgtgctcaagggccacaccaacttttggtttagcgccaactttaacccgcagacgaacagcactgtcgcggtcggggggttcgactgcaccgtg

SEQ ID NO: 15814 - DNA, 78 bp, Oryza sativa
  Clone ID: uC-osflcyp028g07b1
tctttcttgtaccagacactgctcccataagcccaagatgcgcttagagagcaagatgttgaactacgtaaagcagtg

SEQ ID NO: 15815 - DNA, 327 bp, Oryza sativa
  Clone ID: uC-osflcyp028h07b1
tgtatcgacaaaacgtactcagggagatgccaagggtttgctctttacattttctcaagatattaaaattcaagaaggagccacgttctcctggcctatttggttccatgctgcaactcctgggaacttttctctttatatatctctgtattatgaaatggagagcccaagtgagataacttatagaacattgcgcatgcactacaatattgaggtaatgacttgtgcttgtatttaaataatacatgatttgttgcaaatttggtggattaaacacctaaatttgttgttaagggttgtaagtgggttcttagcaaagttcaaggt

SEQ ID NO: 15816 - DNA, 377 bp, Oryza sativa
  Clone ID: uC-osflcyp028h09b1
tcgcgggtggaccaggggctccaacgaaactatatcccctctcttcttctctctgcagctggtcctcccgtgaggcctaagccaggcaccaatcagaaggttactggatcaaaagccctgatcaatcctaggggacagatcctattaggctagaacagaccaatgagcaagccaatgagtgaactgtgtatattcctctgcactggatggtgaccgtagccgaataaaccacttccgctttggacacggcactgtccatgtatgcagcttatctgcctgggtcaaactaaaacccgatgttgctaacgattacttgggtgaaagtggcggcccattaaaatggacaaagggattactgactggcaactgaatcccaa

SEQ ID NO: 15817 - DNA, 525 bp, Oryza sativa
  Clone ID: uC-osflcyp028h11b1
tatcggtgcacttgttaaggatgatgatactgaagttatcagttttctgttgcaaactgaaataattcctctgtgtttgcgtaccatggaaatgggaagcgagctgtcaaaaactgtggccaccttcattgttcagaagattctcatacatgatgttggattgcgctacatttgtgccactgctgagcgtttctttgctgtaggcagtgttttagcaaacatggtggtttcacttgctgagcagtctttcacaaggttgctgaagcacattatccgatgttaccttaggctgtcagacaattccagggcatgtgctgcactacaaacttgcctccctgacatgctgaaggatggcacgttcaataactgttttagggatgatcctacaacaaggcgctggctccagcaattgctttttaatgtgacaggcgcaggccatgggagctgctcctcagccatgcctggattacatgatggggatataaatcattctgatcgctgcaattgacaacatatataacctta

SEQ ID NO: 15818 - DNA, 456 bp, Oryza sativa
  Clone ID: uC-osflcyp055a01b1
taggtctggagagtggagaggaagaggaatcctggtcagtcctcaccttcatatgtcagaacacaggcaatcggccctagctgcaatccaacaagatgggcatgcctctgctgctgctgctgctgatcctcgtcgctgctggcccccaggcaggcagagctgcaaagccaatcccaaatctccagctcatgaccaaggagggcggcagttcaagaatcatccaggacgacatcataaaggcaatcaacaagcatcccaatgctggctggacggctgcacggaatccatactttgcaaactatactactgcgcaattcaaacatatccttggagtgaagccaacaccgcatagtgtgctaaatgatgtccctgtcaaaacttatccaagatcgctgatgcttccaaggagtctgatgccaggtctgcatggtcacagtgtaacacaattgggaccat

SEQ ID NO: 15819 - DNA, 105 bp, Oryza sativa
  Clone ID: uC-osflcyp055a04b1
ttccctggtccacccacgcctgcagagggattcgagggcctcgaagctctcgtgtggcacattcccccttcgcctcgcggggcggaggccggaggaggagaatta

SEQ ID NO: 15820 - DNA, 282 bp, Oryza sativa
  Clone ID: uC-osflcyp055a07b1
atggagttcgcctagttgtgtgctctgctgcgggttgatgaagccttcagatgggtggttcctagcctttctcagcttcctcaacacagccgtccagatggcgtccctgacacccgaagctgaagctcccggaggaggagccctgctcgccgccggcgacgacgtcgccgccgcgaatctggtcgccgccgccgtagccaccgagggtactggattggatatgcctgacttcaagatgggcgggcagaagagcgatgctgctgtggccactggtgccgaagg

SEQ ID NO: 15821 - DNA, 201 bp, Oryza sativa
  Clone ID: uC-osflcyp055a09b1
gtcggaatcaatggctgcgacttccggcgacgggggcgtctctacactgcccgggctacccgtggccgaacgacggagcgcagcgagggcgcaaggtgttcatgcagagcgactgcgccgcgtgccacacctcgctcccctacgccggcctcagcgacgacggctcgcgcgcgcggtcagcggctgtggagccccaaggcg

SEQ ID NO: 15822 - DNA, 376 bp, Oryza sativa
  Clone ID: uC-osflcyp055a11b1
tctaaattgtcgactggtcgcaaaattggtgggggagatttgttagaagcagggcggctgacaattataaacaacatgattcagtaccacccagaagctagcagccaattggctctgggtgcaacttttggtccagagccccctacagaactggttgatgtggacatagcaacccacatagacatatatgatgatggccctgacagaagcttacttggagtggaaacagctgaccgaccaggtttggtgggtgaccttgttaagatcattgatgacatcaacatcaccgtacaatctggagaatttgacactgagggcctactggctaaagcaaaattccatgtcagttataggggtaaaccattgatcaaagcct

SEQ ID NO: 15823 - DNA, 232 bp, Oryza sativa
  Clone ID: uC-osflcyp055b02b1
gccccggcccgggccaagggccttccgtccattttcggcagggaaccttcttcggccttggtctgaaccggtgggaagaagatcaagaccggcgccggtttcgagaccaatgtgacctattcatatcatgtttgccaaggtttggctgaaaggcccgcgctaggggtcttccaatttcgtggccaagaccggcgcaaacattttacggttacagcccattcaatattgagct

SEQ ID NO: 15824 - DNA, 345 bp, Oryza sativa
  Clone ID: uC-osflcyp055b04b1
ctggaagagcattggccttggcttcaagacccccagggaagcaattgaagggacatacattgacaagaagtgcccattcactggaactgtttctatcagaggcagaatcattgctggaacatgccacagtggccagaagaacagaactatcattgttcgcaggaacttacctcattttggtcaggaatatcagaggtatgagaaggaggatttccacatttccggctcacgtcttccccatgcttccgtgtcaaggagggtgaccatgtcatcattggccagtgcaggccgctgtcgaaaactgtgagggttaaccgtctgaaagtcatcccagctggatccacc

SEQ ID NO: 15825 - DNA, 398 bp, Oryza sativa
  Clone ID: uC-osflcyp055b08b1
atccatccatcagagatcaggtagaacagtgagagtgaggtgcagaaaaatttgagctgaagctgaggatggcaacatccatgatcacctcgccgctggtggcgccggcccgggccaagggccttccgtccatctcccgccggggatcctccttcgccatcgtctgcagcggtgggaagaagatcaagaccgacaagccctacgggattggaggtggcatgtcagtcgatattgatgcatctggcaggaagagcacggggaaggtgtgtgtaccaattcgttgacaagtacggcgcaaacgtcgacggctacagcccaatctactcgccggaggaatggtctcccaccggtgacacctacgttggtggaaccaccggtcttctgatctgggcccgtga

SEQ ID NO: 15826 - DNA, 421 bp, Oryza sativa
  Clone ID: uC-osflcyp055c04b1
cgcatttcccgggtggccccccacgcccgctttgtgcaagagaggagagggcttctgcaacggggacggcttgggcggcgaacctggaggacgtcccgttcatggatctgatgaacgagctgctacgccggatgaagtgcatctccaagcccgacatgcgcctgatcctcgtaggtccacctggctctggaaagggaacacaatcgcccattattaaggatgagtactgcttatgccatttagctacaggtgatatgctgagagctgctgttgctgctaagactcctttaggagtcaaggcgacagaagcaatggacaagggagagcttgtttctgatgacttggctgttggaattattgatgaagccatgaagaaaccttcatgtaaaagggcttcattcttgatgggctcccacggaca

SEQ ID NO: 15827 - DNA, 442 bp, Oryza sativa
  unsure (1)..(442): unsure at all n locations
  Clone ID: uC-osflcyp055c07b1
ggggtttgcgcgccctctccagggcccagattgactctgttctggatcttgcacggtgcaccattgtgtccgagctgtccaacaaggactttgactcctatgtcctctctgagtccagcctgtttatctattctgataagattgtgattaagacctgtgggactacaaagctcctgctcacaattccaaggattcttgagcttgctgaagggctttctatgccacttgctgctgtgaagtactcccgcgggatgttcatcttccccagtgcacagcctgctccccacaggagcttctctgagngaagttgctgtcctcaaccgctactttggccatctgaaatctggtggtaatgcttatgtgattggaagatccagcaaagcctggccagaagtggcatatctactatgctactcagcacccggagcaacctatggttacc

SEQ ID NO: 15828 - DNA, 464 bp, Oryza sativa
  Clone ID: uC-osflcyp055c08b1
actggacatactctactactactagccagtaagctagctaactaactacgtggctatggcccccaccgtgatggcctcctcggccacctccgtggctccattccaagggctcaagtccaccgccggcctccccgtcagccgccgctccaccaactcgggcttcggcaacgtcagcaatggcggaaggatcaagtgcatgcaggtgtggccaattgagggcatcaagaagttcgagaccctatcgtacctgccaccactcaccgtggaggatcttttgaagcagatcgagtacctgcttcgatccaaggtgggtgccttgtctcgagttcagcaaggttgggttcgtctaccgtgagaaccacaggtctcccggatactacgatggcaggtattggaccactgtggaagctgcccatgttcggctgcaccgatgccacccaggtgctcaaggagctcgaggaggc

SEQ ID NO: 15829 - DNA, 270 bp, Oryza sativa
  Clone ID: uC-osflcyp055c11b1
tttgatcgattcgatgcgcatctacttcgcgggggccgtctacctcaatgcgcgtcagcggctcgaacatcggcctcatcatggacgtcggcaacggcaacctctcgagcttagcttccagcccctccgccgcagccggttgggtcagggacaacatccaggcctacccgggcgtttgcttccgctacatctccgtcggcaacgaggctcaaggttgagacacccgctaacatccttacggccatgcagaacgtcaacagcccgctggtg

SEQ ID NO: 15830 - DNA, 309 bp, Oryza sativa
  Clone ID: uC-osflcyp055d05b1
ctctctctctctctctctctatctctctctctctctctttgcagccgccgccgccgccgccgccgccgccgccgcgtccgcttcgactcccgccgccaggttctctctctccagcgcgcaggcaccatggccgaagccgaggttaaggacaacgaggtttacgaggaggatctcgtcgactacgaggaggaggtggagaacggcaccgacggtggcgccaacgccgtcaacgcctccgccgatgtcgtcaagaaggggtacgtggggatccacagctcggggttcagagactccctgctcaagccggga

SEQ ID NO: 15831 - DNA, 410 bp, Oryza sativa
  Clone ID: uC-osflcyp055d10b1
gtgaggtacaggtcgtgggcgccggatagacaggagaggttcatccgccgcttcgccggcgagctcgcgcaccccaaggtctcccctgagctccgcgccatctgggtcaactacctctcccagtgtgatgagtcgttgggggtgaagattgcgaataggctcaacgtgaagccaagcatgtgaagaaactaaggcacaagaatgcatcatctcttgttaattaattggagtactaccaacaaataaggccagacaatgtcagatgcacgcatcttctgttgtcgttgggccatcttttgtatgcatcctattgttaattactaggacatgatatccaagtgatcatctgcaaggctacagaaattctgtaatacgataaattaaaagaaaccaaaatggagcctgcatat

SEQ ID NO: 15832 - DNA, 439 bp, Oryza sativa
  Clone ID: uC-osflcyp055e01b1
ctctcctcaccaccatcacctcctcctcctcctgctcttcctccgcgcgcgcgagatccagggagagggagagggagagatcatggcggggacggtgacggtgccgtcggcgtcggtgccgtcgacgccgctgctcaaggacgagctggacatcgtgatcccgacgatccgcaacctggacttcctggagatgtggcggcccttcttccagccctaccacctcatcatcgtgctggacggcgacccgaccaagaccatccgcgtccccgagggcttcgactacgagctctacaaccgcatcgacatcatccggatcctcggtcccaaggcctcctgcatcttcttcaaggactccgcatgccgctgcttcggctacatggtctccaagaagaagtacgtcttcaccattgacgacgactgcttcgttgccatggaccct

SEQ ID NO: 15833 - DNA, 398 bp, Oryza sativa
  Clone ID: uC-osflcyp055e03b1
gtatgtgcttgtacctatgctccaccaccaccagcagcgagtcatggcggccatggcgatggcgtccgtgcaactcacagtcgcggcgagggccctgcgctcccgccgcgcgctctccgtcttcacctgcgccgcacccccgaggcagcggcctcctccaggcccaaccaagcaccgtcgcctccgccacgacgccgacgcgcagcctcccaggaagcgaggtcatcctcctcctcctcctcccaggcgcacccgcacccggggcccttccgcttggccccaacaatcctacactgacgacgacgaggaagaggacgacccagacgaggaggaggggagctttctgtgggggcaccctgggctgccgccatgcccaagcccccagcgggcttcgtgct

SEQ ID NO: 15834 - DNA, 418 bp, Oryza sativa
  Clone ID: uC-osflcyp055e05b1
aaagaaaagaaaggctttcgtctcggtgggcaaaagcgcgagggcaaagcgaaggtatagcatctagtaggcgatggcgagctccggtttctcatggacgctgcccgaccaccccaagctccccaaggggaagacggtagccctcgtcgtgcttgacggatggggcgaggccaacgccgacaagtacaactgcatccatgtcgcccagacgcccgtcatggattcgctcaagaatggtgctcccgagaggtggagattagtgaaggctcatggaacagctgttggtcttcctagcgaagatgacatgggcaacagcgaagtgggtcaccatgctcttggtgctggtcgcattttttgctcagggtgctaagcctgtggaccctgctcttgcctctgggaaaaattatgatggagaggg

SEQ ID NO: 15835 - DNA, 277 bp, Oryza sativa
  Clone ID: uC-osflcyp055e07b1
atcccatgtcgacgccgtctcgacgaccacggcaccactacagccgacggtgccgaagcgggactacctccctagcctagactgagatctccgggctcactacgaggaactaccgctttcagcataccaaagttttggtgttgctttatggtgacctaagcacatcacctctttacgtacataaaagaacattctcaggaagactacaccgatatcaagatgagcacacagcttttggtgttctcgccctgataatttggacctacacactttattc

SEQ ID NO: 15836 - DNA, 202 bp, Oryza sativa
  Clone ID: uC-osflcyp055e08b1
gctcttgaaacctcgcgacctccaccaactccgatcgaacagcccaatcgaccatggccgtcgccgccgcccgttccggcgcgcatccgccatcgttcgcctcctcgctcggccggtgcagggttcttccagtcgtggtggtgcgtcggccgggcggctcagcccggcccttaccttctggtttatacggcgaggttcacgc

SEQ ID NO: 15837 - DNA, 334 bp, Oryza sativa
  Clone ID: uC-osflcyp055f02b1
cttagtcagaggtcacacagctcatcgtctcgagctacctagctggaagaagaagaggaagaagaggaggaggagctcgtcggagtttagttggtgagttcgccggagagatcgatcatggagaatctgaaggcgacggagctgaggctcgggctgccggggacggaggaggaggcggcgccgccgccgtcttcgcccagggccggaagcaagcgcgccctcgccggcgagcctgatcaggccttgatcaagcccgccgccgccgccaaggcgcatgtgtggggatggccgccggtgaggtcgtacaggaagagctgcctccagccgacgacga

SEQ ID NO: 15838 - DNA, 449 bp, Oryza sativa
  Clone ID: uC-osflcyp055f03b1
caaacgctgtgaatgcggtcacatggggtgttggccctggcaaggaaatagtccagccaactgtcgttgactcagccagctttatggtttggaaagacgaagctttcgaaatttggtcaaagggttgggcttgcctgttccctgagggcgactcatctagggagatactagacaaggtccagaagagctacttcttggttagtcttgtggacaacgactacatcaacggtgatctcttcgcggcgttcaaggagatttgatgacatcttatagtctgcaacctctcgtgtctgaattcctatctttatcaagtgttattgcttccacgactataggacagctttcgtcgaaagcttttgctcatgtgatctcgaaagattcatctagtctgatttttcgggacttgattcggttttattggattcatccacatatatcataaaaaatga

SEQ ID NO: 15839 - DNA, 466 bp, Oryza sativa
  Clone ID: uC-osflcyp055f07b1
ccagaactagaatttcgccaccccgaatcccttgcatggtaggacttccgtttgattccgggtcgaatccgtcgcctccgatgccggaacggtgaggttttccctccctttatatggacaacacgcgtttgttttttctgttgcgcaggtttcagatcttggatggacttgctcatccttcggcggccatggatctatcggcggaagctgctgctgctgctcgtcctcgcgttcggcgagtcagatctggagccgatctgacctcttagaggtccggttggggcatgctccgtacgagcttgcgtggatgaagcggcggggccagggaggaggcctggtcgtcgcctggatcctctccatcggtgcctcgcgcgatgatgcctctttggattgataattattcgatgaactttcgataattattagatctaagagatgttgttcgagggagccgagtgctgagatg

SEQ ID NO: 15840 - DNA, 375 bp, Oryza sativa
  Clone ID: uC-osflcyp055g01b1
cgaaagccacccacactctcgtgctcctcttcctcatggcgatctcgaaggcttggatctcgctgctgctcgcgctcgccgtcgtgctgtcggcgccggcggcgagggcggaggaggcgccggcggcggaggaggaggcgccggcggcggaggccgtgctgacgcttgacgcggacggcttcgatgaggcggtcgccaagcacccgttcatggtcgtcgagttctacgccccgtggtgtggacactgcaagaagctcgctccagagtatgagaaagctgcacaagagctaagcaagcacgatccaccgattgttcttgctaaagggtgatgccaacgacgagaagaacaagccacttgctaccaagtatgagatc

SEQ ID NO: 15841 - DNA, 349 bp, Oryza sativa
  Clone ID: uC-osflcyp055g04b1
ggatttttgccctggcaatggttggaatatgtgctggatttatagctctggaactgaatgtccacatgaagcagtgtgttgaatactgtaagatctttgatcgagctttctgattctattctatacttccctcttatgttaatgtgggagctttctgattttgttctaatacttgcctcttatgttagtgtgaggatatgtaaatgtgacaccttttatgcttattgcagcttcacaaaggtgtatcccatgccttccattgattaccttcattggtaacacatccatctagtcatgttgatcatatgtaatgccaatatctcttgcctcttggaagttgggactcaat

SEQ ID NO: 15842 - DNA, 449 bp, Oryza sativa
  Clone ID: uC-osflcyp055g05b1
ggccttctgaaagtccaaatccaaggtcaagggtgcccgctgcagaggcggctccttatgtcccagctgggcacttgcgtatgccttgccatagcatggctcctccagtcacagtcaggacttctatccctgttttctctgctccacctctcccacccccaggtgcgcggacacaacagcttcctcctctcatgagccacccgccgccaattcgaatggcttccccggttcgcatcaggccagctcctcctctttttactccttcagcagtccaagggccgaaacctatgatgcctgttcagataaaggatgtgcaacaccaacaaataaaggaaacccggtcacctgtgatgcctgttcaggtgaaggatgcacaaaaccagcttcttaagggatccctttcacctgtgatccctggtcagattaagggatgacaatcccagccaccg

SEQ ID NO: 15843 - DNA, 204 bp, Oryza sativa
  Clone ID: uC-osflcyp055h01b1
gcgtactcttgcattgggttgcatgataattatgtaacctctaaataattttgtcttgaaaaagatcacgctacgcgtgagcaagcaaacaattaatttcttgtggttattttgtggtaataagccagtggtaaaataaggcatacatgtgtccttccaaaacattgttgtggagctatatgtgaacacgatttcgaatatatg

SEQ ID NO: 15844 - DNA, 484 bp, Oryza sativa
  Clone ID: uC-osflcyp055h07b1
tctttccaacactagttggataaagccacagagagagctgttgtagtagcgagctcgccggagaacggtcgatctccggagaagtgggtgagagttcctcctcctttttttccgttagttgtcaccgttttatttctctttctttggtttcttcattcaccttttttttgttttccctgatggcctattccttattactgtttttttcctctgacccttatgttcttttcctctttttttttttttttgttttgtcctccttttttgttttccttttttcttctttcttttccttttctttcttttcttcttttttctttttcctatcttttctctcttttttttttttttctatttttttctttcctcttattttttttttcttctcttctttctcttttcttcttttttcttttctttttcttctatttcttttccttttttctttttctatttttttattattttttcttttttttctttt

SEQ ID NO: 15845 - DNA, 268 bp, Oryza sativa
  unsure (1)..(268): unsure at all n locations
  Clone ID: uC-osflcyp055h09b1
ggctgctgccctgctgagcgcaccgctgcgtacttgctgatcgacccacgcgtgcgtatattctgctgttcttgctatcttccctggtctgctcatctcctctgctccaggtcagaaattgctgctggttcttgcacatcggtgctcatcacgaactgatcaggagctgcagaaatcttgtgagaagctgaagaaatgggagggaagaatctggtggcgttgctcaaccggcttcnatgatacttagttgatgccaaaatacctggag

SEQ ID NO: 15846 - DNA, 417 bp, Oryza sativa
  Clone ID: uC-osflcyp055h12b1
ggagaactgcataaacagtctggtttatttttatagagaaattgccgaagttatgtcattacatcgagaatgatgtaattacacagaaaacatcattctgtaattgctaggtaatataccatttattgaggcaaatattactgtataccaagaatagcatagaccttcaatgaatttttcaaatcttcctacatttcagacagataaattccagataaatgaccatatgtcaagcaacgtttagacatccacaagctaacaaggcttgaagaagatcaaggattattgggagggaacaatgtcatacttgttacgagtgttcaatagcacatggtagatcgggtcttggtacgacacttggaaaagttgtatgacaatgtagccgcatgtcgtgatgcttccaaagctttttaacaa

SEQ ID NO: 15847 - DNA, 356 bp, Oryza sativa
  Clone ID: uC-osflcyp065a02b1
ttaaacttttcgagccaaaaactctaccaaaatgcttcgaaattcctgcgtgtttcaactcggatcaggcattcaggcccttgtccccggcaggatcggtggatggagatcatcaacgggccgcttctcccggagctatgctgttgcggagaccggcgccctgacctccgacgccaagatcagcgggcagctgcttaggcgcgtgcacctgatgagacgagcctgtgggctgcagggagaccactaccgggcggcgcgcaagttcttcggtttcccgtccgagcgggatgcgcgaagcggctgagtctggcctgtttgttgcagttacggctggggttccgacggggacggcgccg

SEQ ID NO: 15848 - DNA, 421 bp, Oryza sativa
  Clone ID: uC-osflcyp065a03b1
tttctcttcctctacatcacggtggccacggtcatcgggttcaagcaccagtcggacccgggcgcgaacgccgccgacgccgcgtgcagcggcgtcggcatcctcggcatcgcgtgggcgttcggcggcatgatcttcatactcgtatactgcaccgccggcgtgtccggcggccacatcaacccggcggtgacgttcgggctcttcctggcgcgcaaggtgtcgctggtgcgcgcggtgctctacatcgtagcgcaaagcctcggcgccatctgcggcgtcgggctcgtcaaggggttccagagcgccttctacgtgcgctatggcggcggggccaacgagcttagcgacgggtactccaagggcaccggccttgccgtcgagatcatcgggacctttgtgctcgtgtacaccggttttt

SEQ ID NO: 15849 - DNA, 342 bp, Oryza sativa
  Clone ID: uC-osflcyp065b03b1
atgggcttatcattctggcatagttggtcgttgtctggtgtatattgacaccatgttttttaccggcacgcaagacaagtgcacggcgtgcgacaagaccgtacagtggattgactctacttacggtgacatctgcgttgccgttccacaagacctgattcaagtgcactcactgcaaagggatttttctcgatgcgcagatacttatccatggacggttgtcctctactgcaagacccactttgaggcagctttttaaggagacggggagctttttcaagaagtttgggccagagttgtatacttcatacaaggaactgggctgggccccaagcaagaata

SEQ ID NO: 15850 - DNA, 434 bp, Oryza sativa
  Clone ID: uC-osflcyp065b05b1
tctatctctgctgcatgtaccgatgatgtatccatgctgaagactgaatcaatagatcgccatggctctgacgaagctgatcattccactgccccgcctgctgccatcaaacaagagagtggtactgaagttacgtgtgacgcttctgttcctgtttctgaaagctctatgtcaaaggtgatcgctacatcacctgagtgtgatgatgatcaagtggctacagcagctcccaattcaccaacgcaattatctgatgctactgatgtatctgctgaggagcgcacaccacccggaatatcgtacgcaaagctagaggagccggtacgaaaccaccttcccgtcgggtgcttgctactgaagaaaattaatacctgcgtgagcactcagattccaacacttgtctgattcagaagatagaacacccgccgaatctg

SEQ ID NO: 15851 - DNA, 517 bp, Oryza sativa
  Clone ID: uC-osflcyp065b10b1
ttctttaaatcatcaattggagatgttttcttgtatctgcttcacaagggtgatgtatatccttgcacctcatgcaagaaggatgtttccttcagggatatcataaaatgcagctcttgtcaaggtaattgtcataaagagtgcacattaaggtctgttggtagcaaagagggcaatgctgcttccagtttaacatgcaagttgtgccttcagaagcgtagtcttatgcttacaaattacaatacaaacgcaagtttcatcctacctcaacagaagagtaatgtccatcacgcagtggcagctcccaaaataatctttaaggttggttcttcccattccgctgaaccagccacaaaggttgaagctccgccaatcgtgaaggtagaagcccaaccagtggtcaagatagaaacctggccagttgtgaaaatggaaacccagcccactgcaaatgtagaagcacagccaactgcaaaagtggaaggctttccaatttcaatttggcaactaaaatatg

SEQ ID NO: 15852 - DNA, 483 bp, Oryza sativa
  Clone ID: uC-osflcyp065b11b1
ttttgaatttgttcatttcctgaaaaatcccaagaaatatgaagaactgggagcaaaaataccaaagggtgctcttcttgttggtcccccaggcacaggaaagactctccttgctaaagctactgcaggagagtctggtgtgcccttcttgtctatttctggttcagacttcatggaaatgtttgttggtgttggaccatccagggtgcggaacttatttcaagaagctcggcagtgttcacctagtattgtattcattgatgaaattgatgcaatcggccgtgctagaggccgtggaggcttttctggtggacatgatgagcgtgaaagcacattgaaccagttacttgtagagatggatgggtttggaactacatctggtgttgttgttcttgctggtaccaataggcctgacatcctggataaggctctgctaagaccaagaagatttgatcgtcagataagtattgataaaccagacat

SEQ ID NO: 15853 - DNA, 408 bp, Oryza sativa
  Clone ID: uC-osflcyp065b12b1
ttgaggagtagccatggcgcgtgggaagaatcacccggacggggaggaggaggaggcggcggcggcggcgggggaggaggaggcgccggtggagatggacgaggagggggagatggaggaggaggaggaggagcagggggaggtgtagggggtttatagtttctattttgttttctttttttatcttttttgtttctcttgttgtttttggttgtttatttttctttttctgtttttactttgttttattttttttttatttctatttttttttattttttttactatttacttttcttcttcttcattttttatttattttttcttttattcatttttttattttttctttttttttcttctttttttttttcattctttttatgctttttttattctttctttttt

SEQ ID NO: 15854 - DNA, 491 bp, Oryza sativa
  Clone ID: uC-osflcyp065c01b1
tctctgaccttttctatggcattccctggtcccagggaacacttgggtttcttgtttccgctgagatcaaactcattcccatcaaggaatacatgaggctcacatatactccagttaaagggtcactgaaggagatagcacaaggttattgtgattcgtttgcaccacgagatggtgatcctgcaaaggtcccagactttgttgagggaatggtgtacacagaaaatgagggtgtcatgatgactggtgtttatgcttccaaagaagaggcaaagaagaagggcaataagatcaactgtgtcgggtggtggttcaagccttggttttaccaacatgctcagacagcactcaagaagggtgagtttgtggagtacattccaacaagagagtactaccaccgtcacacccggtgtctgtactgggaggggaagctgatcttgccattcggcgaccaattctggttcaagttcctcttgagctgctgatgcccc

SEQ ID NO: 15855 - DNA, 419 bp, Oryza sativa
  Clone ID: uC-osflcyp065d01b1
tttgaacttcaatagacagctttttcttgaatcagatgttactgttcctggttcagaggttgcagtttattctgctcatagaaatcctgaaagtttagagagaactccttgttgagaaaatggaagtttttttactgctgagtttcgttgtctgaaatgaaaatgatgcatggaagatgcttttgttgtctgaaaatgaaaatgttagctgctgaaatgcgacattcagtcagtctctgaatttcaggggcccaaagccagctcgtttgctctgggtgccgtaatctgctcatgtatccagccggagcaacgtcgatttgctgcgcagtcttgcagtaccgtgaccgtggtgcctgcccccgaaatctagctgcaatgttcacgaaaattaagagagattaaaggggaatacaaatggc

SEQ ID NO: 15856 - DNA, 475 bp, Oryza sativa
  Clone ID: uC-osflcyp065d07b1
tgcatgcgattcgctcctatcctccggaacccgcgccgccgccgcctcctccgctccgtaaaccctagcctcgccgccatgtcgccgccggccgccgcctacctcgccaccgcctccgatcccgacgaggacctctgcttcaccaccgaatcggtcgcgcccgcggaggagaccgccccgcccttgcccgccactccgccgccggtgtccgcggaggagagggtggagcgcgcgtgggcgcactggaggcggctgggctccccgaagatggtggtggcgcccatggtggacaactcggagctccccttccgcatgctgtgccgccgctacggggcgaccggggcatacacgcccatgctccactcccgcatcttctccgagaacgagaagcacagggccatggagttcaccacatgcaaggagggaccgccactctttgctcagttttgtgcaaatgatcctgacatttcgttac

SEQ ID NO: 15857 - DNA, 351 bp, Oryza sativa
  Clone ID: uC-osflcyp065e09b1
tttttcctaaaaaaataggggggaaggtttatagatttttttcatgagaactatgaaacaaaatggagagccaagttagatgatgcaggaatatggtacgaacattggctgattgatgatatggtggcctatgcccttaagagtgaaggtggctatgtttgggcttgcaagaactatgatggagatgtgcagagcgatctaattgctcaaggttttggatcgcttggtctaatgacatcagttctggcgtgccctgatggtataaccatttaagctgaagctgatcatggtacagttacacgccattacagagttcaccaattaggaggcgaaactagtacaaatagcatt

SEQ ID NO: 15858 - DNA, 411 bp, Oryza sativa
  Clone ID: uC-osflcyp065f01b1
gtccaacccgacgaggcccgtccgccgcatgctcgtcttcgggctcggcctgatgttcatccagcaagccaccggcgtcgactgcgtcttgatgtacagcccgcgggtgttctagcgcgcgacacttacgagaaagagccactggctggccgcgtgcatggcggtcttccggtgcaagatcctgttgatcctgatcgcgacgctcctaaatggaccgcgtgtgtcagaggccgttccagctcgccagcggcagctggatgggcatcttgctgttcaccctggccacgtgcctgctcatgatggaccggcggccggagggccaggcgaacgctcttggcgccttaagattctctcgaagctttcgttcagggcgttctttgccttcgggcttggccccgtcccttgggtgtc

SEQ ID NO: 15859 - DNA, 434 bp, Oryza sativa
  Clone ID: uC-osflcyp065f02b1
atattaactcatcatattgcatgattaacacgatcaatcaacagaagaaagcaataaaaaataaaaataaaaataaaaatgaggctctgttagcctttatgaaggaagggtaggacatatatgcttgatcaatgttcttgggatgaagaattattcacttggacttcattattactcgatcaggcatcagcggcgctcggagatggagcagattcactgctggactcttccgctgggcctggggccgccgcaggcccagccgggctctcagcgggcgcgtcggaggccaacaataccctggagccaccggtgactgtcgaggcttccgcgaacggtgccactgcgatagcggcgaggaggatcacgacgagaacgagcgcgcgagccatggccgatgtaactgttggtgctcacctacgtgccttcgatttggt

SEQ ID NO: 15860 - DNA, 376 bp, Oryza sativa
  Clone ID: uC-osflcyp065f09b1
tttttgtaggcgccgacgacggggctggcgctgacgccttcctcggggatggcgccggcgccgccggcgccgccggggctggagttggagctggaattggagccgtcgtcaactgtgccgagttctctcaccggtgccgctgagggcgccgccggcgtggtacccaaggtgcatgtgtgagatcgatcgatcgatcgagcgcgccgtgggtttcatttccacgaattcatctcggccgcagttgggtccggcgatccatatttttacaaattctgaatgcgattgtttgtagttaatcaaagattggctaattcaatccggcgtgtgtttggatgtttatttaatatgcaaaacctggtgattagtgataaataat

SEQ ID NO: 15861 - DNA, 339 bp, Oryza sativa
  Clone ID: uC-osflcyp065f10b1
tttcgctcgccgccgatcggatcgcgtggggggatcattacatctctgcagagatgaaagagatcctgcacatccaaggcgggcaatgcggcaaccagatctgtgccaaattttgggaggtggtgtgtgatgagcactggattgacccttccgggcgttacacatggcactcatatctgcagttggagcgtgtcaatgcttacctaaatgaggccctatgcggtcgtttttgtgccttgtgctgttctcatggacctttagcccttttactatggacagtgtcccaactggaccttatggccagaacttccccccatgaaactttttgttcgggcaatc

SEQ ID NO: 15862 - DNA, 502 bp, Oryza sativa
  Clone ID: uC-osflcyp065f12b1
ttataatcctccccttccttgcttgcaatcctagcaagctccaagatcgcggcaagctagcctcgagggaggcccgcctgcccgggcctcgggctccgggggcccggttcttgaggtttcttggtcgtggggtcgaggaggtggtgggtggtggtggctgcggcttggcgcgatgaacaaccacgcggcgggcgggagcacgagcaacggcggatccggggtcgacggggatggcggcggcggtggcggcgcggccaggaggaacaccaagatgcccaagtattccaagttcacgcagcaggagctgccggcttgtaaaccaattctaactccaaaatgggttgtatcggtgtttttccttgtcggcgtcatcttcgtaccagttggtgttgtttcgctgctagctgcacaaaatgttgttgagatagttgatcggtatgatgatgcatgcgtgccaaccaacatgactgataacaagcttgcttacatcaaaaaccaaaca

SEQ ID NO: 15863 - DNA, 378 bp, Oryza sativa
  Clone ID: uC-osflcyp065g01b1
tttataccatcatctggtgctagagatgagaagagctcatagtcacaaactagtgttaacaggggtggccataatcaaagatcttcatttgagcaacaccgcacttcaccagctgcagtgagcaaaattgctccagtggtttctaggacgcccacccaggctccacattatccaaaagcacaaccatcagtttccaaggtttcacctcctcaacccgagaaatcacctcctaatgcatcaccaccaaaggttgagaagccatcagttgcaccacctcctaaggttgactatgcaactgatctcttcaacatgttatcaatggatggaacaaccgataaagaagcagagtcatcttctaatgatgaaagtgcatgggag

SEQ ID NO: 15864 - DNA, 189 bp, Oryza sativa
  Clone ID: uC-osflcyp065g03b1
ttatgcagcaatggcggtcgtcggcgtcctcgcgctgcagggctccttcaacgagcacttggccgcgctgaggaggatcggggtgaggggggtggaggtctataattctactattttaatggtgatcaactcttttatcatttatctatgctttacctctttattcaacaatcttattatataccttaa

SEQ ID NO: 15865 - DNA, 400 bp, Oryza sativa
  Clone ID: uC-osflcyp065g06b1
tcgtgctgttacttccccctcgccgagagagctgggagggttttcgctgccgaatttttttttaattcggggggagagattcgaagaggcggcaccatgttggtctaccaggatctgcttaccggtgacgagctcctgtcggattcgttcccctacagagagatcgagaacggtatcctctgggaagtcgctggcaagtgggtcgttcaaggagctattgatgtggacattggtgccaacccatcttctgagggtggtggtgatgatgagggttgttgatgaccaattttggtatggtggtcgacattgttgacacattctgtttttaggagctacctacttttgttatgacgctgttttttgccctttatgtaacgcttccttaaaaacctttttcttt

SEQ ID NO: 15866 - DNA, 193 bp, Oryza sativa
  Clone ID: uC-osflcyp065g08b1
aataagttcccaaactaagtttctttcgttatgagaggctgagagcaataagatacttctagtagtgacataatacagagttatacgctttggtgcctgaaattgccccaatcctggagcacaaattgttcaagatgacacaaagtgaaaatgtgtatcgattcaaaaaaaaaaaaaaaaaaaaaaagggcgg

SEQ ID NO: 15867 - DNA, 466 bp, Oryza sativa
  Clone ID: uC-osflcyp065g10b1
tctgcctgtattctcaacgatctgaaggcctgttggcctggattgttgtgaattgggctgagaaagtccctttgaacctgaacaggataatgcctgcgaagggagtgtgcatttctacttttatgtttccagggaactctcaacacaacccctttttggtgggagatcgagctatccaatatgttcctgaacgtgtgagctcagcagctggatatacctgtttcttacaactgaggtaacatggtaataatacttcatttggtaagtggcatgctgacatttcttcaacaggagaggatttctgcagataccacttcgtaatgtcccataactgatttagtcatacatttattatccgtgttaatttgcaaagcgttggccatgtcctatgcaatttgaatttaaaccatttatttggccatatttattaaagtttaaaccattttaaaccttcttatggacattt

SEQ ID NO: 15868 - DNA, 76 bp, Oryza sativa
  Clone ID: uC-osflcyp065h01b1
aacgttttaacagaactactaaactccgaagacgcggaggctcgattctagaccgcagaaacggaacccgacacaa

SEQ ID NO: 15869 - DNA, 464 bp, Oryza sativa
  Clone ID: uC-osflcyp065h02b1
gctgtagaaacaaacccctctcactcccactacgatggatttttgcaagttccggccgtttagctcgttcgacacgaagacgacgacgacgaacgcgggagctccggtgtggaacgacaacgaggcgcttacagtggggcccatggggccgatcctcctcgaggactaccacctgatcgagaaggtggcgcacttcgcccgggagcgcataccggagcgcgtggtccacgcccgcggtgccttcgtcaagggcttcttcgagtgcacccacgacgttaccgacattacctgcgcctactttcttcggttcccgggcgcccagacccccgttatcgtccgctttttcaccgttattcacgagcgcggcaggccggagacgatccgcgacccgcgcgggttctgcgtcaattttacacccgcgagggcaactgggaccctctttggaacaaatttccccggttttt

SEQ ID NO: 15870 - DNA, 414 bp, Oryza sativa
  Clone ID: uC-osflcyp065h03b1
tgttttaaccctagccgccgccgccgtcgccgccgccgccgccatggccacccaaacccgccccctcgtctccgtcaaggccctggagggcgacatggccaccgacaacagcagcagcctcgccctcgccgaggtgttccgcgcgccgctccgccccgacgtggtccgcttcgtccacaggctgctctcctgcaacaagcgccagccctacgccgtgtcccgccgcgccggccaccagacctcggcggagtcgtggggcacggggcgcgccgtgtcgcgtatcccccgcgtccccggcggtgggacgcaccgcgccgggcagggagccttcggcaacatgtgccgcggcgggcgcatgttcgcgccgaccaagacatggcgcaagtggcaccgccgcgtcaacgttcaccttcg

SEQ ID NO: 15871 - DNA, 405 bp, Oryza sativa
  Clone ID: uC-osflcyp065h09b1
ttttgaagaggaagtggttgcgccgacgacgaggtgagcgggttgacggaggaggaggcagcgcgcgccggcttcgggtgtcgttgtccctgctcgccaggtgctcggtacaatgccccactgtgcgctttgtttcttcagaatattagtagaactctttgaaagaagttagaagttagtaccttgttctcttcggaatgtttgttttcctatgttcttagggtgcatggcatcatttgtgatgctgttagaaatggtcaaaccacttaaatcaccaattggcattggcacacttggaattaacttggaagtgatttgttcatgcatattgatatcagcgtttccatcgcctgcagttgctccttcagacctgagctagcgtgacgagaaacatctttttgagac

SEQ ID NO: 15872 - DNA, 189 bp, Oryza sativa
  Clone ID: uC-osflcyp065h11b1
tttcgacgcgtgggacgtcaatcttcatggggagcttctgaagcatatgcaggatcaatggtcttagtaacaacaccagttcctgggtctcctgacatcaagtccatcgacagtccatcccggcggcagttggcgtgtcattcgccgacggtcgcggcgccatacgagcctgcccagattctgggccgc

SEQ ID NO: 15873 - DNA, 435 bp, Oryza sativa
  Clone ID: uC-osflcyp065h12b1
ttttccttcaactaaacttggatgagatgggcgtcttcggacagcagccagcggtgggcgctccgccggctcaggggtacccgtggttggactcgtccccgccgccggtgtaccctgggtgcggatactcaccgacggagcgtgggtaccatgctcagggataccctccacattaggtgcacctgtcgtagaagggctacgcgtcgccgcacgctgcagcacactgctgacgctataacaggagctccaccacagggggccttacttaacgaagggatgctagggtgcactatgaatgtgctgactgttggaggctctcttatgatcaatgatgctccagctgacaaaggtggtaaatcggacacgaacgctgggattgatgtgggagtattgctcctttgaaaaaaaacttatggtactgctggtgatggcatg

SEQ ID NO: 15874 - DNA, 118 bp, Oryza sativa
  unsure (1)..(118): unsure at all n locations
  Clone ID: uC-osflcyp066a02a1
gagcataaggcaaagctgcgagcgccagaacattttattactacaagcttcttggcgaaatgctacgagctactttatactccctntgcaaagaagaaacaccaagacctgtaattac

SEQ ID NO: 15875 - DNA, 343 bp, Oryza sativa
  Clone ID: uC-osflcyp066a03a1
ggggccgaaaatccgggggaaatatatatgaccaccgctttcccataattaaaccaacggggcccccccccagaaagtttttgggcgggggattggaatacccaagggggggaattaattaaattaaaaaagggacccttttagggccccacagtaggaaaccaagggcacaagggggttgcaaaaaggaggggaggcctaatggttcccaagggggagtcctttgccccaaaacgttaggcccccttgggggcctccaggaaacttttgacgggttgccttaaaaacccatccccctgctccacccgcatcgtaattttaactcttaccccctggcaaaact

SEQ ID NO: 15876 - DNA, 508 bp, Oryza sativa
  Clone ID: uC-osflcyp066a05a1
aaagcagacaatgccattgcagcacacaactttattgacttatatgcttgatgctgataaatacttatttcctcccagaacattatttcttcgatatactacgatgtcgacctatgtccaacagtcttctccaggctgagataatgagattctcatcataattctttctacaggacggttaaaatttaatggcatttacagaaaaatcttatgaccaagagaaggggccttaatggattcatccactctgggcttaaaagaccatagatgtgtgaagggcatgtcaaaaagcagagcttcaggcactcacagtctcaaacacgcgacctaatcatggcactaacatcatcgagcaattgggactccttgcagctgggataagatttgattcttgataataagatgagatcctttttattaccaaagagctgggatggggttactagtcaaggggacaacctctcgatgtgccatactgtgctcctatctacttctcgcagtgaatact

SEQ ID NO: 15877 - DNA, 328 bp, Oryza sativa
  Clone ID: uC-osflcyp066a06a1
aaatcagggcccaagctcaccatagaaaagtggtcgcaacaaaaaaacgggcgccgacaaaaaaaaaaaaggggggccccaccccccgaggggggggggggaaaaaaaaaggggcccccccccccaaaaaaaaaaaggccccccaaccaaccgggggaaaaaaaagggcggagccccgcgggccccaaaaaaaaacccggagggatttttgaaaaccaccgtaaacccaaaaaaaagtggggggggaaaaaaagaacccgggggggaaaaaatccccggaaggggaacacaaaaaaaaaggcgggggggacccccaaaaaacccccca

SEQ ID NO: 15878 - DNA, 474 bp, Oryza sativa
  Clone ID: uC-osflcyp066a08a1
gcaggaacagcatcactctattccatgcatccattgattaactgaaaacccaatagcaatacagcatggactacgttacacactgtagcttgcagttcaacggattgaaatccagcgtacagtagtagccccccaggcaattgcaacagctacgtcaaaagcatgagtagttgcttcaaagaatggaagcaaagataggtacaaccagatccgtatcatagtgtgtcttcttgacattcttcctataacagcaagacagggaacaaacaatgtcaaataataaacgatggaggccgagaaggcgaacgtctcctcaggagccgcagcatgcaaatccagaagctgctggtttgtcggcaccctgatccgtcttgttgttaatcttgattgtcttgtcctcaggcttggagtcggtctcagcaagcctctgcttaatgtcacgtgcaatggagaaaaaaacttgctccacgttga

SEQ ID NO: 15879 - DNA, 478 bp, Oryza sativa
  Clone ID: uC-osflcyp066a09a1
gaccatataaaatcagggactacatatcactagatcaggagaattgttacgttacggtacatgaatttaaagtacaaagacacagatgatcatcataaatctcgctgttaaaaattaagatacacgggtacatcaacctccggtgcagatgcagacattctgcaatgccaaactggctaagtatcagatgaaaaagacaaggatgatgcacagtaatcagcttgtccacaatgcaagacatgatttttgaagttagattatccgaacgatgccatctcgtatcattatcctgtttgcatcttgcatcctctccaaaatgaattctacttgacgtctattgtaaggtgcagctgcctctctattaacagtttgctcaatttcgtcaattgatatttgatcgagatgatttgccaacacatgctgaccaagaatcgcctcaaatgcttcaattctctccgcaggaacatcctgatcattc

SEQ ID NO: 15880 - DNA, 457 bp, Oryza sativa
  Clone ID: uC-osflcyp066a10a1
gaccaaacttgtaacatataatttcaccatattgctacgaaatcatcatcatcacgtcacaaacgcctcaacatatccatcccgatctcggccaccagctcttggagcagatcccgttcgatctgggcaccaatctcaaacgcctcgtgcaggacatccacgccgatctccacccccgagtgctggacgtcgctcgcgatcagctcatccacctccttcccggccatgccgctgcacctcgcgatctccctgtccacctgagcagccagcctctcctcggggcagatcaggggaaccctcgagaacgacctgtatccggagtcgcagaactgggtgaacagcgagtccaagcactccatgacggaatcgaacgcgaggcttcccagcgggctcctgctcttctccccttctgtggccttgacgacgccggcgttgaagctgaacccgttcttcttct

SEQ ID NO: 15881 - DNA, 419 bp, Oryza sativa
  Clone ID: uC-osflcyp066a11a1
tttttttttttttttttttttttttttttttttttttttttttttttttttttttttttttttttttttttttttttttttttttgttttccggacaaaaacaataccaaaaaaacacacaagtaatttttttgggttccccgaaatggggggggacccaaaaaaacacagggacccttacacccccggggggggacaaaaaaaacctgggcctgcctcccaattagagaaaccactttcaaaaaaaacaggggggaggggggggggaacccccttcccccggaaaaaaaaggggggggggcattcttttttttaaagaaaaaaacaccctcttaggggggggatggggggaataagaggggggaaaaaaaaatggtttcaaaagggagggccccatgggtgcccggggggaatgggtg

SEQ ID NO: 15882 - DNA, 362 bp, Oryza sativa
  unsure (1)..(362): unsure at all n locations
  Clone ID: uC-osflcyp066b03a1
aaaaagcaaacccctgtttttccttgcaaaggggaaaaggaagctggcttgtcaaagggaagccggcttgtaggggccctggccaagcattaaaacgacgggtggccccccctgccactagcaaacccccacatgacaaacaaaagggaagctcgttgttgcccacaaaaaatactttagcccaaccggaactaataaaaacaagttttctcggaaagggaatctttctcatcaatcgattagaaaaaaaagggccacaaaaaacaagctccccgggaatttaaacaccaacacttcggccaagggggcccgnccagccccttcaaggggacatggccaagggggggataattcctaccttt

SEQ ID NO: 15883 - DNA, 432 bp, Oryza sativa
  Clone ID: uC-osflcyp066b04a1
gatgacattagctactataataagtgcaaagcaaacaatttgtaagggcaccgagcagataaactgtctagaatacaaactacacggcagatctgtgacaaggttgatccaattctaacagagatccctcatttcaagtctggacacttttagaacacagaggtagctggaaacatgagcatcaagaggtgccatgacaaaaacgcgcagcttcaagcgatttacagcttggctggctgcctgttcttcttcttcacaccagacttggcaacctggaggctgcggtacactgagctaagccttgcaagagccggcttggtcagatctggcctgtagtagttgtcactaacctggttcttgacagccttagccatcttgcggaactccttgcgcatcacagacttgtggtagagcttagctggggcattctgc

SEQ ID NO: 15884 - DNA, 295 bp, Oryza sativa
  Clone ID: uC-osflcyp066b05a1
gcaaaccccaatttttttcagctttagaatgtgggaaggcctatttaaaattcaaaaaagtgctctgacaatccgggacaagcattgaaacctcaggcgcttgaaaaggaagataaacaacaatgggggctgggccaataacaagcccgtcatgaatttgggggggtgaacccatactgatgaaaaaccagaatcgagagggggaaataacaggtcctgcaagggggccttgccacaaaaaagggcctttacaaataaacccaacttggaaaaaaagggggggcggccattcttg

SEQ ID NO: 15885 - DNA, 445 bp, Oryza sativa
  Clone ID: uC-osflcyp066b06a1
caagaaaatcatcgaaaggatgatacttttatatagaacacaggtaacgaattacagagcaactaatccccctgtccatcatacacaagtgcaccttcttagttttagcatcggtacaagcacaattaagcatctaattcagatcctactagagatcaacgcaacacctaggcatcctagaacactactactactacacaacatatcatccatccatccactgcatccacatccaccgccgccgccatcgccgggaagcgtcagaatctagttgtcatcgtcgccggccgccgccttggcgctgccgccggccttcttggggaggagcaggttgtggatgttgggcatgacgcctccgctggcgattgtgaccgtgccgagcaggcgggatagcttcttctcgttgcggacggcgagctggatgtggcggggcactatgcgggtc

SEQ ID NO: 15886 - DNA, 297 bp, Oryza sativa
  Clone ID: uC-osflcyp066b07a1
gttattgatatttaggttgaggaataagaaagaaaaaaaaaaaaaagcggcacaaaaaaaaaaaacaaacaaaaaaccaaggagggaaaaaacggacgggggggagaaaaaaaaggacaaacacagaccgaaaccaaaaaaaaagcaccaagacgaagaagcaacgggttggcaccgagaacgaggaaacaaaaccactgaaaaaaaaaaacgaaaccccaccccccgtccttaaaaattcagaacgggatcagtaggaacggagtggaaaagaacacggacgccaaaaacaccccc

SEQ ID NO: 15887 - DNA, 295 bp, Oryza sativa
  Clone ID: uC-osflcyp066b08a1
aaataaaaaaaaataaaaaaaaaaaaaaaaaaaaaaaacccaaaaaaaaaaaaaaaaaaaaaaaaaaaaaaaaaaaaaaaaaaaaaaaaaaaaaaaaaaaaaaaaaaaaagagaaaaaaaaaaaaaaaaaacacacccaacaggaaaaaaaagttgaaaaaaaaaaaaaaaaacaacaaacaaaaaaaaaaaaaaaaaaccccccatcaacacaacgacaaaacaaaaaaaaaaaaacacaaaacccagaaaaaaaaaaggcaaaaaacccccccaagccaactctcgaaggggg

SEQ ID NO: 15888 - DNA, 468 bp, Oryza sativa
  unsure (1)..(468): unsure at all n locations
  Clone ID: uC-osflcyp066b09a1
gacaaaacaaaattgaactattatatcatctagtagtaaaaagagtttgtatatagtatctcaatgcaagcccatctgccgggggtggttaatggacacaagatagatgggggatgaactctagcgattagcaccgcaccgacactggaaatccgctcaatcatcatcatccaggtaaattattgttgtggcctagcacattataaatagtatataataaatatatatattggagattctctgttaatcacacggngtatgactgctggatggtctcaagatccaagcccttctgcttcaccaccgactccatccgccccttcagggtggtcagctctctcaaccttgcgatttcggctctcctacgggcctcttctgcaagctggttgagatcgttgtagcttgccatgtcgcggaagacagccgcggtggcggctggctggagcccatggatggtcctctgagcag

SEQ ID NO: 15889 - DNA, 502 bp, Oryza sativa
  Clone ID: uC-osflcyp066b10a1
gatctcatcaaaatttactacagtgaaaaatgatgtgacaaacattgcttctgtgtatatatctttctcggcacatctgcaactagtgcagtatagatttcaagtgccgtgcaaatgaaaaatggtacaacacagagaaaaccaaacccttttggtgcttccagtgacagcttcaatataatcttccatgtgacgaaaattttccctcaccaagcaaatggacattttccttccagagagacgtggcaccagccccggtctcgaaccaatgggcaatgtttgccggtaacacaccgaactgggtaccaactttcaaccatattaaagtggctgcagtacttctctgaatcatgtattcttagctgatattctagtttgtatgatctaagtgattcatactgccaaaccagttgtatctactacgttctgcagaaagcgtgccttggcagaagggtccgtcaaaaactgacccagaactgcaatcgttgcagtgctactcctg

SEQ ID NO: 15890 - DNA, 451 bp, Oryza sativa
  Clone ID: uC-osflcyp066b11a1
gttcgcacaaggctaaaagccgaaatcttgtgccaacctgaacaagtgaagaaatgaaatgacaacaaactgtaacgatttacaattaagagatatacccccagtttccagtaccccaccatatagtgtcagtaggcacctggaaatacaggcatctccatgacattttaagtatccttccaagaaacctaataaacagaacttcattattccaacacactttggtcctaactaaaatagattaagaccagactagtgtttacttgacgctaggcaccttccacaccagtaaaacgacagacaggaaggccctagtacctgtacaaccactgctgctaagcccactaatcttggacgtcttcttcgctggggaatatgaatgttaaaaactaaattttgcccccaacgagttggctagttcatcacagcatagtgttacaacagtgtacgt

SEQ ID NO: 15891 - DNA, 342 bp, Oryza sativa
  Clone ID: uC-osflcyp066b12a1
acacaaaagacttataatatatggtatgttcctgccactatataattcgttactgcaaaaatgtggcaatgttcctaacagtctcctgttactgccaccaactaagtatttttactaccagcatccaagtacgttactgccactgtacaccttcattacttaaaaaacgtggcaatgttcctaacagtctcctgttactgccaccaactaattatgttactaccagcatctaagtatgttactgcaatcatttaggtacaaagttccaaaagacaacttggaaaaaagaacagagctgaactacttggagatcttcctaatcttaggcctatatcgctcaat

SEQ ID NO: 15892 - DNA, 481 bp, Oryza sativa
  unsure (1)..(481): unsure at all n locations
  Clone ID: uC-osflcyp066c02a1
ggaaggccttgaaacaaaacaaacttttataaataaaaatcagtcacagtggaatgttgatcccgtaggagatctgcaaattgttgcgttcgaattctaggattatcaaagacagcatctccgcagagtgaagatcaccacatggcaaccattaccacctgctaccgtctattctgaactcaaaattgaaacaaatcacagctcaagataggacagccatcacatctgatactctcaagacaatgtagttggtgccatcagctcccttgaactcactgcctgcgtacttggagtacatcacagtgctgcccgctgaaactgacaatggctgcctcttgccttcatcatcaagagggcctggaccaacggctacaactgttccgattgatggcttttncttagtggtttcagtgagaataaggccaccagcagttttgtcttcagncttagnaaccttgatgagaacccggtcattaagggg

SEQ ID NO: 15893 - DNA, 471 bp, Oryza sativa
  Clone ID: uC-osflcyp066c04a1
ttttttttttttttttcttttttttttttttttttttttttttttttttttttttttttttttggaatctttcgaaatatcaaaaataacttttttggcactgaaaaaaccccatggatgctgctaactcacaatgatatgggggctaaaggaaatgtaccgttgctgcacaatacaaattttgggggatgtaaaactaacagggtccaacacaaatgaaaaatagcaggggattcacaagccgtagttaagctaaactgtcgaaaactttttttccggggaaaaactttggcagctgcctccacggttttttcgatgccctgggaggggtgtgccaagctgggaaaacctgcctaaaactgggatggggctaggtacacacctttttaaagcatgccccggtagaacctcccaaacttgggggtgtcactttttttggggtcaccaaagttgtgaactgggccagcggtg

SEQ ID NO: 15894 - DNA, 398 bp, Oryza sativa
  Clone ID: uC-osflcyp066c05a1
cccctgggttttaatttaattccatcccgagggaaagcaacagggagttaaaaccccatacccaaggggaactaaattaaggggaacatccggggcaaaaaaccccaaacactggggggggggaaagggggtttttcgactggggagagccccgggacacaaaaacaactcgactggaaaaaaaaaagattctgccccggaaggctaaggaaaacgggccacaaggggccccaccaaaaagttcctccagaaaccaaccttggggccatccaccccaaggggggaaccattatgcccaaggaaatccagtttgccccgccaatccggggggagggggggaaaagtgccttttttaaagggggtgggtggggaaacccccaaacgaacgggggggaaaa

SEQ ID NO: 15895 - DNA, 365 bp, Oryza sativa
  Clone ID: uC-osflcyp066c06a1
agcagcatcttctccattctatgctccgctcattaatccttgtggacaaagcttcggaaaaccttatggcggccggcctacgaggagggggaacttcactactactggctccacggatggagaaggctggccaggaccctgggggaaaggagatacctggttgaaatttaaagccctaggcttttgagatggggtcccttgaaaccaaatgaaggttttttcactttgacccccgacccccggagatggagaaccctaaggttttgtttgagacatggttcagggtgagaaggtccccgttcatatgttggccgtggaaactcaataaacatgagtttttttgtttcaattcccgattgaatgga

SEQ ID NO: 15896 - DNA, 472 bp, Oryza sativa
  unsure (1)..(472): unsure at all n locations
  Clone ID: uC-osflcyp066c07a1
aaggcgcgcaaaaagagaaggtttcatcagtttttagtaatgctcacgatcgatgacacaacgacatcaaattcaggcaggcatttttgctcccagaaaaaaacttccacgctcacattccagcgtgtctaattaaataaacgagttatgaggtcatggcaaacaacccccagttactcctcgagtcgagccgtccaagttactcctcaagccgtccgagtatgtcgtgctctctgaaaagaaggtactctttctcagcaagcttcacttcagttcctccatactcaggtagcagaacggtgtcaccttctttcaaagatacagggatcagtttgccatccctgtcacgttcgccaggaccaacagccactacttttgcagaattcagctgcttggtggtctccgggaggaggatgccgccggcgctcttgttgggctgcagcagnttttncaccagcacccggttcatcga

SEQ ID NO: 15897 - DNA, 399 bp, Oryza sativa
  unsure (1)..(399): unsure at all n locations
  Clone ID: uC-osflcyp066c08a1
atattctgtttgggttttttgttccttggtgtgttctccaaaaaaaaaagggcgcgggggggaaaaaacaaggggggggggcccccatggaacccgacaccggggggggggccccccggggggggggggttttggggggggcccccccgggaaaaaaggctttaagaaaaccaaagggggggggggagcccccctgggttgggggtctggaaccaaaaaaaccggggggggtctggaaacacccccgggggggggaatatttaaaacccccccggggggaccctggaggggggccttttcacctggnaaaaaccccggttccccccccccgagggnntttgaacccccccctttttccccccccgctttttcggggggggggaaaaaaacccggggggg

SEQ ID NO: 15898 - DNA, 484 bp, Oryza sativa
  Clone ID: uC-osflcyp066c09a1
gatcagaaccaagcacttattgcatcttccaacagaagttaaaaacattccaaacacatgtccacaacggtgcaggttggttttttgctaaaatcacctctaagcaggtgatcgattacagacagtggcagctgcgataaccctaataggtactggatctcaacaacaccaggaggggttcgtggaaatcatcacttgggcagaatgggatgcacaaaaatgggacagcactggatggaaacgtgcggtgaaacagttgcacatagggggtttttggatagtgtactagggagttaaattgggaggtccaggcccctacgaatgcacacgcatcctctttacatcgttctctggtacatttgcgtccgccccgttgcctcgtgccgtgccttcacctgaatttggaactttttcatcaggaacaatggcatatctttctgatggcgagacccagactttggctgcaaatggtacagctgttgat

SEQ ID NO: 15899 - DNA, 499 bp, Oryza sativa
  unsure (1)..(499): unsure at all n locations
  Clone ID: uC-osflcyp066c10a1
agatccaaacatggtgttgaactttgcttataacgtttaatataatcatttgcgttccttcaaatcacgcttgcgccacgcaacatcaaaattaagcgttttgtgggagcatgtccacccacatctgaccgtggggaattattgctcaaaccctacgagcaaatctaaagcaccatcttcacaaaatttacggaaacgaagtggttctattcccatctagtagggctccactggtgcacggaatttggctccggcatagacggcagcagcaccaagctcctcctcgatcctaagaagctggttgtacttggcaaggcgctcagatctgcaaggagctccagtcttgatctggcccgtggataaaccaactgccagatcagcaatgaatgtatcctcagtttcaccactcctgtgactggtcatcacaccccagccagcacgttttgacatcttgacagcctcaatgctctcagtaacagatccaatttggntaccttaa

SEQ ID NO: 15900 - DNA, 498 bp, Oryza sativa
  Clone ID: uC-osflcyp066c12a1
aagctgctcttttgaaaccataacattaaaagttacggaggaagacaaagtaacacacaacatttaactttacaaactaaagactgttcaatacaagtcaatgttcttcagagaacagtttttgtatacactcacaaaggtctgcagacaattcttggccaaagtctctctcaagtgtggcagccaatatcaaccttctaacatgttcctctgtttgtagctaaaattctcccaagaattatccttgtgtgtgtgatcgtgttcagtcaagtgttttatgtcataagtcagtggcatgagatattgttcgttccgtaactcaagttttggaggcttgtgtctgacatatctgtcatccatctctgtggcccgccatcgtctccaataacattgtaggcataggatgaaagcccgacattctctccacatgagcttgcctctcccatgttatatagcctttgtgttcttgacagcaccacaaggtttggaaaatgttga

SEQ ID NO: 15901 - DNA, 474 bp, Oryza sativa
  unsure (1)..(474): unsure at all n locations
  Clone ID: uC-osflcyp066d02a1
ggcggttagacaatgtggatagaccactccatttcagtagattgcaagtagcgtacattgcggttacacaaatattcccttccctgcttccctatacagcatcaaacagacaacctttctcctcagacaaaaacactgcatctccatgtaccacacggaatgtttaccatatcagcctcagaaatcatagtcttttaggtccctcttggagtcggctaattccatttccaccaagcactcctcctggctgagtggaggaaggccgttcttgtggcgtgtgtagttgtgcttgtgccacccagatttgcaatgctccctatacaacttgtcctccacaagcacgtcacattctttgcatcttctctgctgcttgccttgtccctgcccaggattttntggttnacttgagatggactgtttctgcatggcctcacctatccgagtaacaggatcaatctccactgcaggcactga

SEQ ID NO: 15902 - DNA, 364 bp, Oryza sativa
  unsure (1)..(364): unsure at all n locations
  Clone ID: uC-osflcyp066d03a1
aagaacaccaaaacacaaaaaagaacacaccaccattggggcgagccaaaaaaccaaaaaaaaaaaaaacacacggagcgtaaaaaaaacccaccaaaggccccaaagaaaacagagcaccccaaaaaagaaaaaaacgccagggggaacatggaaaaaacgcgaaagaaaaaaaaaaacccgctaaaaaggtctgggaagaaggggcccccccacccacaacagtggggctccaaaaacccgggaaaaaaaaccattccgcccccccccccccccatnaaaaaaaaaaacaaacaacacccgccataattttgtgttatttntgttgtttggcggggggggggaaggcccccctcgccccccc

SEQ ID NO: 15903 - DNA, 360 bp, Oryza sativa
  Clone ID: uC-osflcyp066d04a1
ttttttttttttttctcaaacatactattaaatcgatggctgtcaacattgcatctgaaacatacgcaaacacaatgcatatcatgaaaacattttaggcatgtgcatctccagaataaacattacaggcaataaacatagtagcttgtcaatgaatccgctcgagaagaccactttccaacttcccaatgtttactagaggcacaaaatcatatagttttagccttttgagcagcagagacgagagatgcgatggatgcctttcctctgccagtacctagggctcttctgcatgtaccacctaaagggcaacaaaacaactccacacaaatattagcatggggtttgcactagtacagg

SEQ ID NO: 15904 - DNA, 479 bp, Oryza sativa
  Clone ID: uC-osflcyp066d05a1
ttttttttttttttttttttttttttttttttttttttttttttttgttttttttttttttttttttgtttttttttttttttttttttttttttttggcccggggggacccggggaccaaacccaaagggggaccattggcccgtgcaaaaccaaaaaaaaattaatccctacccgggaaaaaaaggcccaaaaaagggcccctacccccaaaagaaaaaaacaccccaatttcctggggcggggttaaactaaaaaaacacccctccgggggggaaaaaagcgttttcccttgttaaacaaaggggaaattaaaaaccccacaaaggctaaagcagggcccctgaaaaaaaccgccaaaaccttggaacgagcggaaggtaatttttttcgaaaaaaaagctatttcggcccctggggaaaaaaaaaaaaacttcttttccatccgagaaaaggtttttattttggaaccccggggg

SEQ ID NO: 15905 - DNA, 500 bp, Oryza sativa
  unsure (1)..(500): unsure at all n locations
  Clone ID: uC-osflcyp066d06a1
cgataaatattgcttcacttgtacaaagtacagataaaaatacattgatacatgacacggagagagccatgcacaccacttatttggacacacagagggcaaggctgcagagaaaatcaagcaacacaagctgaactcacggccccacctgtcagcctctcactggtcgaggccggagactcttgtgaaaaacagcaacaccacgcatgcagaagaagacaaattattacacacacaaatcgacgacacggcggccggcgacgtacggcgaggtcgtcgccgccgccggcgacgttgtgatgaggtcgatcagccgaagaggtggtgcttcttctcgccggtggactcctcggcgctcttgtggtccttcttcttctcgtggtgctcgtggaaggcgtagccgccggcgccgaccgccgccgtggccgcgatctcctccgtgatcttgtgcctgtgngcgttttncgggtccttcttcgcctcgtgcttctcatacaggg

SEQ ID NO: 15906 - DNA, 482 bp, Oryza sativa
  Clone ID: uC-osflcyp066d08a1
aaaacagaagtacagagttggcttgttttaacaacatgaaatggtgttagttcagaaaataaaaatagttagctgaaaacagaaaaaaaaaatctatgtttgagattacacaaaatgtgagtgagaacagacacgaatggccacggcacagacgaccttctcaataattaagatacaaagctaatggtcaaaagccaatctaacttgttaaattggtgttacaagtttgcctgtacctgactaatcgactagagtagtagtacacactacacagctgctaactgcatgatcggatcaaaacggagaaaggtttgcagcaacaagtacaatattaacagtcacagttgttgaagcttcatgagataacttcagttgtttctgcaagattatgcatccatggggtctccctgccctcttggtgaatgtacagatgaagcatgcatcactctttggtttttagcagcagcctggtggttatcatt

SEQ ID NO: 15907 - DNA, 447 bp, Oryza sativa
  Clone ID: uC-osflcyp066d09a1
aaaaaacaaaagacgatgtgcgtcatattctttcatacagcgcttcccgttttacattgccttccaacagttcacatcttcgttgaaaagaattgagcaatggctctcagattcttatgcatgcagttatacaacaaggtaaagtatgccacaataaacgccctacaagagttacaagacctaaacctcagcaatcccagatttctgacagttgcaaaactatggaatgcagcgcatccctattccctccgaatatgactagtctctcatcatgataaaaagttgaaaaccatggtcataatttaaaggtgttcattcactcgtatgggttcctgaagttcttgaggagttctggaatgtcgtatccaagcatatcattcaccggctgcaccatcttgggcttgattttctcaaacttgtcaatgctatacccacccaggacatctc

SEQ ID NO: 15908 - DNA, 471 bp, Oryza sativa
  unsure (1)..(471): unsure at all n locations
  Clone ID: uC-osflcyp066d10a1
cagttctaccatcgaatcataaaatgttctaatgacgatactgagacttcagatcgattacaaaatctgtgattttgtcctgacagaacggtgtctccttgttcctttggcatctatcagactttctagaccaacaagagctaataataagagcattgtgcggtacataagcagactagtttaaccatctaactctagtaattaattaccaaaagatgcaaatatacacaagaactttgcatctaactctaccagcacattcagactccaaaggttgccagcttgaggttgcacccagaacattgcatcatgtaagggacatctcgatcaatcaggatttgaagcatgacattttccttccacggaacatgttcatcatagagcatccttgtcgngatttctttttcttcttttccctctgcttagttggaggctggattactaccttgatagcagcatcaaacacacctt

SEQ ID NO: 15909 - DNA, 479 bp, Oryza sativa
  Clone ID: uC-osflcyp066d11a1
agaacatactatattgctatgcatgtgctcacatgcgaaactcttgctagaaacagaacaagtactgccaagccaatgctaaaataatagcacagtcacaacttccacacttgaacaaactcatgcgagggacatgagagtttgtggagcattcaccaggcaagagggttacgatccagattaattacaggcatcgcccctcaataggacgagttaaaaacagaactccagtaaaagaacagtttaccacgtaatggacagcatcgcggactattttactctccaggaagaccgaacacattttgatctgccaatggatgaatagcagcatagctagtctgcacctaattaagcatttggtggccaaagctttggatcttgagttgtgtccacagcagttggaggcaaccactgccacattgccatcccttggaatgctgcgggcgtaggagcatttttgttgcccagagcttgataag

SEQ ID NO: 15910 - DNA, 498 bp, Oryza sativa
  unsure (1)..(498): unsure at all n locations
  Clone ID: uC-osflcyp066d12a1
gatgcaaacatgcagttgttttttccctacgtagacaacaaaacatataggatttctgaaatttactctaacaaaaatatgggtctcgactctcgagtcacaaagtacaatacaattcagttcaagcggccaggacattaataaaattgaagttacaatcaggacccaaactgctgtcagaaatgcagatcagaactcggaaatcaatctacaatgaatagttggtgacggtaatctgctaaccatcagttatgtgctttcaaagccaaatattcggaaaacaccttcatcagcctggtacttgttcttgtcgtctcctgcgtaagccaggaggttgtacttggggttccattcaacactattcatagctgccttgcatggaatctgatgaatcgatcgtccagtttgaacattggcaatgtcaatgaagggatcttngctagcatatgcaagaaactctccagtatgattgaagctaactgttcttacaggccactc

SEQ ID NO: 15911 - DNA, 489 bp, Oryza sativa
  unsure (1)..(489): unsure at all n locations
  Clone ID: uC-osflcyp066e02a1
aggctaactcacttgagtctgaattaccagatgagcaatacatgtatttagtaagatacaaaccaacaaaaaccgccaataaaaaaagattacattcatttccaagcaaagcaaatctcaggaaacacttcaggcgaggcaccaaaactctccaggaactactccaatccaagcatgcaaccttgcctaacaaagaactttatgaatcccagattatttgtaataacagaagatctacaacagggtacaaccattccatcagagccaggagacaagatccaaagaacaattggcacagcgtgttaatcccgctaatgaagatcagcaacagcgcctggatcacccgacccttttccccctcataaggacctgcttcattgcggggatggcaggccagtataatggaaactctcagtgtaacaacggcgtacgatccttgcatcagagccagaagacaaggcccgaagaccagtttggncagtgtttatt

SEQ ID NO: 15912 - DNA, 214 bp, Oryza sativa
  Clone ID: uC-osflcyp066e04a1
caaaaatgatgatgacgaggagccccgcccccacgacaaactttaagctaatttaatggggggtttaacaacagaaactggttcccgttggggggcaattgatcgacgtcgaaacaaaataagcagttcgttaattaaaccacctggagttgatttgatggcatgctcgttttttttacttaacaatttttttcaaattaataatcaataatcc

SEQ ID NO: 15913 - DNA, 418 bp, Oryza sativa
  Clone ID: uC-osflcyp066e05a1
aaaaattaaaggagtatataaaccggttccgtaaatatcttaaggcgagatatacagatgccaaataggtgtacagtactcgaaattacaaagattataccagtataattaatcgttgggattaagagcatgaacgacccagttacgaggggtgcacggagtacgtgtgttgcttgcgcgcgtgtggatcgacgagattcttttgcaaaaattacctaattaattaatcggcgtgctctctggcgtcgtcgatattgtttattgtttggctagagttcgccggcggcggcggcggcgaggtcctcacaacctggggaaggggcgggcgaggcggtcggcgtcggtgtagatgtgggcgcgggtgatgtcggcgagcgaggtgcatccgctgagcgccatggtgagctcgaactccttc

SEQ ID NO: 15914 - DNA, 465 bp, Oryza sativa
  Clone ID: uC-osflcyp066e06a1
cttaaaaaaatcactttgcttaaatgttgaatgctgatacaagtgcataattatatgattgccgacaccttgtaaaaatgcagcatgctttgttgcatgcgacaaagtgtccagtcttctttaaaaaagatgaaaaacatagcaagagcctcgagagagaaatacgcccagatcgatctagccaaccaatttcgcatatacacacggcttataattctcgagtacagtaccatgcatttccttcctacacgcatttcggggctcccctgtttcatcgccgccgtccatacggatactagtaactaactaatgccattccatctcccatctgacggctaccaataactcggccgccatccaacggccaccgatcgattccagcggctcgcccgagccaccccgatagaatatcagatcattcatccctcccggctcaagccgccgagccgagccgagccgtcagaa

SEQ ID NO: 15915 - DNA, 412 bp, Oryza sativa
  Clone ID: uC-osflcyp066e08a1
atctggcaaaaaaaagtttgatttgattcttacagtcccagtcaacatattgacaactatgttgggcagcagttttatcaggttggtccaggtaaaaaataaaaaatgggggcctgatgtccctattttacatcttcctagaaaaatcaggtaagctcaaattgcagcacaactgcatgactgcctaaaaatatgtttttttttttaaaaaaaaagaaagtttaaaggatgccaccatgtgcaactgcactttatgtttttttccaaaactggtattctggaacaactttttttcaagtttcaactggctttaaggttggaacaatccctgttttcctccatattagagcaatcattattcaaaaaccagttattaacagataatttggtaatatggatagacttttgaaaa

SEQ ID NO: 15916 - DNA, 479 bp, Oryza sativa
  unsure (1)..(479): unsure at all n locations
  Clone ID: uC-osflcyp066e09a1
cttcttctccttcttctcaccttcagcggtggctacaggtggctcctcgctctccttggacttctttttctttttcttgccgccatcagcatcggccacaggagaatcctcgctatctttggacttctttttcttctttttcttctgaccctcttggtcaccatcctcttgaatggtttcctctgcacctgcaggctccgcctcttgatgtttcctcttctttgaagcaccttcaggcttctttggtgtttcttcagtggattgtccaagtaccagatcagccgcaggattgtatgtcttggcaggagtgattaaagccccagcacccttcttccggtccttttcatacacttctatcttgggctttcccttagtagaacctgcagacctgccaagttctttacnntnaagaacccgaagccgcgtctcaagcttgactcgactctcaagaccaatggagttatcttcaccatcaccat

SEQ ID NO: 15917 - DNA, 372 bp, Oryza sativa
  Clone ID: uC-osflcyp066e10a1
atgggtaaaattaaaaaaggtaaacacaaaaaacaacgaattagaaagaccacattttcactagtctaaaacggctgaatgccagggctttacttacaccttggtcactgaaggtccccgaggggggggggggggggggggggggagggcctggggagggtgcctcatctctgaagcaccttgaggcatttatggcgttcccaaagtggatcgtcgaaggaccagaccagccgcaggattgaatgaaatggcaggagtgaacaaagccccagcacccttcttccggaccttttgatacactaatatcttgggctctcccttagtagaacctgcagacccgcacaaggtctttaccctaaagaacccgaaacc

SEQ ID NO: 15918 - DNA, 105 bp, Oryza sativa
  Clone ID: uC-osflcyp066e12a1
tttttttttttttttttttttttttttttttttttttttttttttttttttttttttttttttaattttttttttttaaataaaaaaataaactttgtgctggat

SEQ ID NO: 15919 - DNA, 420 bp, Oryza sativa
  Clone ID: uC-osflcyp066f02a1
ggcacggagaagggcacaaataaccactgcatcaaagggcatacaatgtatttttgcgtatatagacttgcagttgcaaaccgaattacatgcgtggtgtcgcatagacgtacaaattccacaggctgaggctttcctttctgcatccaaccaagccctgcggtaatacatctggtcgacacgacaaaaccatgttcaactcaaaatatgtcagatttcactccggttacacaaatggaacacttacaggttacaacaagtctcccagcgaacaggttgaacttgattctaatacactatgtaagctacaatggcacacatacagtggtacaagcaattgcccgtgccttgcggttgcgagataccagcaattgccagtgccttgcggttgagagtttaccaggttggttgcacggcagc

SEQ ID NO: 15920 - DNA, 268 bp, Oryza sativa
  Clone ID: uC-osflcyp066f03a1
gaaccgaactccaataggaggaggatagcttaatttgcacatagtaaaagagggatacacaactgagtactgaaattacaagtctgtgttcagataaaaacagtagtacaacaaacttgaagaggaacgtcgactccacaataattactaacaaagcaggcagcgggaaacagccgcgcccatcagaaacagcttgctctggattggcatcttgacagtgataatagctgatgcaggttacgacctgctcttgaatggaattgccctg

SEQ ID NO: 15921 - DNA, 480 bp, Oryza sativa
  Clone ID: uC-osflcyp066f05a1
cttgcaagaaaatgccacagcaaattagcaataatcaaacactaggtctcgtatggatcattacaaagtacacaaatgtacaaattaaaacatcaaaagagttaactaagcttaaagcagcagctgacacataagttgcaaaccccaacttttttcagtttctgaattctggatggatcatatcagattcatcacagcatcgtacaatctgtgcaagcattggtacatcgagcgatggagagagagagtagtctacaatggcggctgggccattcacgagcccggcgtgaacttggtggcgtagacccaggcgttgttggcgacggggtcggcgaggtggtcgagcaggttctccaaggggcccttgccggtgacgatggcctggacgaagaagccgaacatggagaacatggcgaggcggccattcttgatctccttgaccttgagctcggcgaaggtgacggggtcgtcggcgaggcc

SEQ ID NO: 15922 - DNA, 412 bp, Oryza sativa
  Clone ID: uC-osflcyp066f06a1
ggggagttcagttcccagtttaccaaaagtaaattctttgttggaggggggcaatccattacaaacacatgcataaactttcagtttttttttccattttctaccattttactatgaaaaattttgggaaaaaatggcaacattggaaatgttttacataggcaaaaatttgaaggctctggatatttttcctttcattccaaacaaacaaaaaatctacggtttttgaacctgaatacctttggggcgttagagttttgaacaaacctggttaaaaaggtttactaaacattttggctcaaccaaatggggatggtttgggataaactatgcctaacacaaggtttgtttgagctttgttaaaggtttttagcattttaaccactacaaccccaaagccgttttcttggag

SEQ ID NO: 15923 - DNA, 134 bp, Oryza sativa
  Clone ID: uC-osflcyp066f08a1
ggttaaaaaaataattaaaattataatacaagggaacaaaaaaacaaaagaaacgacccaaaagagaagggggggggttgcctacacggtaaagccgaaacaccagaaggccggggggaaaccagccgaagccc

SEQ ID NO: 15924 - DNA, 396 bp, Oryza sativa
  Clone ID: uC-osflcyp066f09a1
ggggtaaaaaacccccccctttgggggccccaaaaaaacaaaaaggggccccccgatgtataaaacccattcccctaactttccccccaaaaacaatcccggtttttttcccacccccttaactcccccacccaaaccacaaccttttcccccccgggggatccccccccagggcccccccattttttttttcccccccccggatccccaaaaaaagcccccccaatcggaccccctttttcaaaaacccaggaccggggggggggggttaaaggccccccttatctcccccggggaaacccccccggggccccctccgccggattttcccccggggggcccaaagccccccccccggtttaaaaaaaaactttggtccccaccgggagggggggg

SEQ ID NO: 15925 - DNA, 483 bp, Oryza sativa
  Clone ID: uC-osflcyp066f10a1
acgacaaaccacgaacttggatattaaagatgccacaaagaaggttcacataaacaacacaggtcacagcagcgaaagctacaagcaaaccctgcataatcgaaaagcaaatgtttttcaaaaccagacacacaaactgatagatagaagcccacacggacagatcataggatagcagcagtaatcaagcattgccaaggcaccaggcaagaaccctgaacctctctagtactcgtcaccctcatcaccctcgtcaccatcgtcgaactcggagccgacctcctcgtagtccttctccagcgcggcgaggtcctcgcgggcctcggagaactccccctcctccatgccctcgccgacgtaccagtggacgaaggcgcgcttggagtacatgaggtcgaacttgatgtcgatgcgggagaacacctcgacgacgctggtggagttggagatcatgcacacggccctctgcaccttggccaggtc

SEQ ID NO: 15926 - DNA, 372 bp, Oryza sativa
  Clone ID: uC-osflcyp066f11a1
gatctgaaactcacatgattataactcacgacaaaaggggctaaacatttttggtttggtagtaagttcaggggggggcataattagcattgcccaagctgcaggtagcttcagggaagtgaaggggaggaaaaagagtatctgttccagcacaaaactactagcattacataagcacataaaaaggtatgatccttttaaaacattttcccacgccaaaggtgaatggggggaaaatcttaggcggacttcacggtggcggattttatgatgtcaatgaattcaggcttcaatgaaccacccccgacgagaaaaccatcaacattaggttttgatgccagctccttgcagttcgtcaccagttccggaacc

SEQ ID NO: 15927 - DNA, 414 bp, Oryza sativa
  Clone ID: uC-osflcyp066f12a1
aacaagggggggcaaaaattaaaaatttgggggggttttatattaaaaaaaacccccatgcaaggggccattaaccaccaacccagttttcctaatttaaggggaaaaaaaaaaaagggggacctttcctttttcaaaaccctcccaggtggttgggaataaaaaaaataaaaagggggcgggaacccacaccaacgcattgatcccgtttaaattgcccccaaaaaaccttaaattaaaaggatgaggaaaaggggtcaaaaatggggggggggaccgggtccctaagggggggggcccaattgttggggggccccttgccgggggggggggcctgcacgggaaaaccgaggaagggcaccatggggaggggggcgtgtttgatctcccccaggtgaagccgttcttttttta

SEQ ID NO: 15928 - DNA, 430 bp, Oryza sativa
  Clone ID: uC-osflcyp066g01a1
aacacgacaaacaaagatttttcgtcagggtgacagactgccagaatgatttcatcacacgaccaccgtttgcacgctcccatggcgcgccgactcgttcgtcgccggcgccggcgccggctccggcacggtcgggaagaccagggcttgatgcaccagcgccgccaccgccgcgccgaccatcgggccggcccagtacacggcctggttgctgtagtgcccgctgacaaccgccggcccgaacgagcgcgccgggttcatcgacgcgcccgtgagcgaccccgccgccagcacgcacgcgcccgttacggccccgaccaccagcgcgcccagcgcccgcgccgggggccccttcctgccgccgaagcctccaccccgggggtcgccggcgacgtgcaccgtgtacaccaccatgaacgtgagcaccccc

SEQ ID NO: 15929 - DNA, 474 bp, Oryza sativa
  Clone ID: uC-osflcyp066g02a1
aatagaagcccagcagactcgtctctgcctattctacagcccgcatgatatgtagttcttgcaaacaaaaacaccctattatgatcatcctgaattctgcaattacaaccccaattacaaaccataacttgcagttagaagccctgatgagcgagaactcaacgaaagatcaaattcaaatccaaacttgcagtgtgaaacaacctttctctatgaaagcagaaagggcagaaacactactaatttgcactcttctttgcatgtcgttaaatatgaagcctgatgctcgcacaaaacatttgccacttcaaatggcttagcaataccaaactaacttgcaggataaagttgatacacatgggaccaggtgtcgatataacaccagttgtgatgaacttaagaccagaattgaaaagaaacagttttttgtctttggaggaggagtagcattgatgagctcatgcaaggcccatg

SEQ ID NO: 15930 - DNA, 444 bp, Oryza sativa
  Clone ID: uC-osflcyp066g04a1
agggaagagggatgttgcaacataacatattgactgaacacaggcagcaaatccacacaagattaatatcgttgcacaagaggttgatagagcattacatatttagatgaggcacacaaccaaagaagcagcagcagctgaccaaagtttagacccatacatagggcaaccagtcattgcatacaagatgatactagtggattatggcagcttctctttttctcttctgattgagcagagagatgccaccgccattatttcttgaggtgagggaagcacgcggtgaggtcgctcttcggatgcttcgcctcagcatgctctttgcacttggtctcagaggtggtgcagatgaaagtctgcatgcatatcttgcactggatgttcatggccttcttgttggcctcaagctggctccccttggcgcccttgttcttctccatgttc

SEQ ID NO: 15931 - DNA, 409 bp, Oryza sativa
  Clone ID: uC-osflcyp066g05a1
gaaggccttgaaacaaaacaaacttttataaataaaaatcagtcacaggggaatgttgatcccgtaggagatctgcaaattgttgcgttcgaattctaggattatcaaagacagcatctccgcagagtgaagatcaccacatggcaaccattaccacctgctaccgtctattctgaactcaaaattgaaacaaatcacagctcaagataggacagccatcacatctgatactctcaagacaatgtagttggtgccatcagctcccttgaactcactgcctgcgtacttggagtacatcacagtgctgcccgctgaaactgacaatggctgcctcttgccttcatcatcaagagggcctggaccaacggctacaactgttccgattgatggcttctccttagtggtttca

SEQ ID NO: 15932 - DNA, 439 bp, Oryza sativa
  Clone ID: uC-osflcyp066g06a1
aaagcaaaagcaacatatgctttttttcaccagggtaaacagaaataatgtaaactgaattatcaaattattggattgacaaacgtaaaacggggtcatcactcatcacgggatggttacaaaaccttttgggttcttgagtaaactagctgattgctatgtcaatccctgtaaccacaaaagcaaattgcagaaagaaaaaaaaaagatcttgccgggcagggggatacatgtttgttcaacagaatacccaactaacgaacttccattgccatcttttgctgatatcgatattgccttttcttttcatttctttctggtttccattcttggagacaggcattgcgctactgactataccccaattgctcgtgggggtacgtgggacaccctttaagaggagaaagtcgaaaggatgttctttttgatgaccaattca

SEQ ID NO: 15933 - DNA, 302 bp, Oryza sativa
  Clone ID: uC-osflcyp066g07a1
cccccccccccccccccgtttttttggtcccaaaaaccccggaaaaaaaaaaaaaaacgggccccccagggttaaaaaaaaaaagggggttaccatggggggggggacccttgtaaccccgggggaaaaataaggggccccggccccccccttgtaaaaatggggccacctaaaaccaaaaggggaactgggggtttttttttccccccgaaaaaaaaaacatggaaaagtttccccaaaacggggaccaaaacgggaaaaaaggaaaaaattaggggggggggggggcccttccccccgaa

SEQ ID NO: 15934 - DNA, 429 bp, Oryza sativa
  Clone ID: uC-osflcyp066g08a1
agaacaataattacatgtattgaattctgcatcacagtttgctcatcaattctccaatccaaaccaaccaatcaatctcaatttcacatccccaacaccaaaactctcaaacgaaaagaaagaaaaagaaaagcagagaactttacattccacacgcgtcgagtcgagtcggatagatgaagtataagagaagaaggatgatgaatcgtgtcagatggagacgctgttgggtatccctctcccggggatccccttctccttgccggcgacgtcgccggcgtccgggtagagcagcgtgtacggcaccctcacggggcccctccggttgacgagcctggggtccttgttcctctcctccaccctcttctccacccgccggagctcgtcgcggaacctgtccagcaacagcagcacctcgccgtcgtccgt

SEQ ID NO: 15935 - DNA, 456 bp, Oryza sativa
  Clone ID: uC-osflcyp066g09a1
atgggaaaacggtaataccaatcgttatagacttgattgatatacgaatgcaagtgttacatgtaaataattggggccagcagcaagataagataaggtatccatctaaatatctaattgacggactaaatgttgaaacgataactttacattacttttttacatggggaataatccttcctgatgcttttcagcttcacgaccacattgtttatttccaacctttttgcaggtgagctgttgcaacacatcaagccaaccttgaatactgccacaagagggtcttcattggcccaagtagttgaacaaggcaaggaagtaacattgttctcaagaacaccttgttgtatcaatatttcaccttgcagaagaatatcattcgcaacatccgcaagcactggaaatgcttcagaaacccacttcctaaggctcatatcaccagcaaacatgggatca

SEQ ID NO: 15936 - DNA, 388 bp, Oryza sativa
  Clone ID: uC-osflcyp066g10a1
ccccccccaaaagggggggcccaaaaaaaaaaaaaaaagtttgccccccccccccaaattgaaaaaaaaaaatttttaaaaacccccccattggggggggggcccccaccaaaaaagggggcaaaagggggggtttttattggccccccggcccattgggaactttaaaaaaaaggagcaggggcctaaaatttctaggaattgagggccgccaacttgggcccaagggaaccccccccctaaaaaaaaaaaacggggggggctttgggggggaaaaccgggggggggttggcccccccccccacctgaacaaaagggaggcctcggggggggggggtgggggaccccccggggggggggaaaaaagggggggggaaaaggccccgcg

SEQ ID NO: 15937 - DNA, 470 bp, Oryza sativa
  Clone ID: uC-osflcyp066g12a1
ccactaatgaagtagtatatccttttcaacattgcaacaggcaactaatgcaaaaaaagcaaaacctgaaaactatgctcgtatgcttacatcagtacaagcactttggagccgtgactgaaggtaagtgagctcaagacattcccctcagcaccatggccaccactgtgagaaagagcaacaaagctcactcatcacgccgccgcacaaaaaaaattgactccattcttccattgcatacaataagcccaagttaaaaacggtaggctattgtctacactacactatctacagctctaatcctctaatgtagagcaactttggtcgagtgcacaaactcactttcacttctgagaactaatcaccttcttttgctgaaatcctttgagataaatcagcactgaatcgacgcacagaccacctttcgtatgggtgcagactatctgtgccagggagaacttgagcttgat

SEQ ID NO: 15938 - DNA, 425 bp, Oryza sativa
  Clone ID: uC-osflcyp066h01a1
gcatgtgatggaacactgtaaaaagcttaatcctctctatgttgtcttaaatccaaagcatttttacagttaagagggggagttcctggctagaaaaaaaagctaggcagcctgaagagttacagctacagcatacaacatcaaggcagtaagcatacagagccatgtacaccaacaattagcgtgcagagccaacaaaagatcatctaaaaatacaccaggcaccagctttgcgatgtgatacaaaacaatccaacaaaatacagtcgaaatgcatgtccagctaacagtccaacgatggatccagaatatttttcccaagctaattcatggaaattctctatgatagaacaaattagtcatgccaagtcgattaggtagttcagcccgttgaagatcccatcaaatagagcctagtgcacact

SEQ ID NO: 15939 - DNA, 468 bp, Oryza sativa
  Clone ID: uC-osflcyp066h02a1
cgcgaattaggcaataccataacgaggatgaattcaaccatagcaaatctttaatgttaaccacatagaggttcagattccagacaacaaaaagggctaatcagtaccaaaacattccgataagcatagacgctaattggattctccagttcaagaaacaagcattctagtaaccacccttgagatcattgaccacatcatacggaatgggggtaacagtctccagcgtagcaccctcaaccatgaaaccaggtttgggtccctcgggctgtctcttggtgctgataacctcaccacgggccttggcatcagccttgagctgatcgttcttgattttcctcaggcggagctcctcggtgcacctggatggctggacatgctccacacggacatggatcctcttcctgatgatgcggttaccgacctgcttgttgatctcgacgccgatggcgcgcttggtgacgttcc

SEQ ID NO: 15940 - DNA, 325 bp, Oryza sativa
  Clone ID: uC-osflcyp066h03a1
aagtagcattatgctgtttatctaaccacgaatgcttccagtaaactgtctttaggggatgataaatagacttcataatcgcaaacagaaacaatatgtaggataagataccatgctccattacatcctaaataacccaccattacaaaattcagtctctcagaaaattgcaactcagaggatgatcagacacgggagacaagaaacagcacttcatgatactaggtgaagataggagtttacgcatcctctgtgatggtacccttgtcgctcacgtagataccatccaagaacttcctgatatccttgttcttcacgtggcatt

SEQ ID NO: 15941 - DNA, 344 bp, Oryza sativa
  Clone ID: uC-osflcyp066h04a1
gggaaccgggggggaccccgggaaaaagcagccgcgccccggggggcccaaaaaaccccccagagggggggggaaaaaacccgggggaaaaaaggggaaaaaaggcagccggggggaaaaaagggagcccgcaaaagccgccaaaaaaaaaaaagcggggaaaaaaaaagaaaaaaccggggggcccaaaaggggaggaaaaacccaaaaaatggggggggggccacccccccataacaaaggagaaaacccccccccccccctcaaaaaaaaaaaaaccccccccccccgggggggggatatgaaatcgcgcccgcgggggggggtttttttttccaggggga

SEQ ID NO: 15942 - DNA, 379 bp, Oryza sativa
  Clone ID: uC-osflcyp066h05a1
gggggggacaaaattttaaaccgggtttttttgggaattttttttttgggaccaaaaaaatttttatgaaaaggtaattttaattcgccaccatttttttaaaggaaaaggcaattttaaattttgttgcagggggcagggacaaaggaaaagttttttttggccaaaatttaaaaaacgggctttttctgggggtgaaagttgcctaaaaaactaagggccccccctgggtttatagcgaggccggggaatttttttcccccggccctcttaatttaaaaaatgtggttttcccgagggagggccaggggggggcccttaaaaggaaaaaccaggcccggtcccttgggtttggttcccggggggccccaaaagaaaa

SEQ ID NO: 15943 - DNA, 483 bp, Oryza sativa
  Clone ID: uC-osflcyp066h06a1
gccaagaaaccaaattcagattactgcttgcaaaccagcaagaatttcagccacagagtacaagaaatcctgcagtgccattctgcaagatgataaattcaggcaattcatcactacccagcagattactactgtttcttcccccaactaatctctgagaaaggcagcacactcatcgactcatcgtggggttggttattgaatctatcttctccaatcccggttgacggattaaccaaagcgaaaaaccgaaagaaattcagtgcatgaagtacaacagggagatgatcagatgactgacgagatcatgcttcccatcctctgagaacggtggcgcgagcgacacggttgacaccgagggtgaaggcgcccatgcggaggtcgcagtggtggctcctgcacatctccttcacatccctgaacccacgggtcatgtaggtcttcagctcattgttcaccttctcctcgtcccacatgaaacct

SEQ ID NO: 15944 - DNA, 92 bp, Oryza sativa
  Clone ID: uC-osflcyp066h08a1
cgcgtcgtagcttgaccctttttagcggcgccttttttttttggggtcttttgctacgccgggatatcccggatggaggcaaccatagcttt

SEQ ID NO: 15945 - DNA, 456 bp, Oryza sativa
  Clone ID: uC-osflcyp066h09a1
ctcagaaatgaaaaaccattctgatcaggaggaactccagttacactcgagctgccacaatcgtgtagataacaaccacagacacagggcaagaacaggaggtccaaattataaaaaaaaatgagacacccacaaactactgcaatcaccagaacaagtacagccattgacagtaaactcgtagaaaaccacactaccttgtcaaacaaaaaaaaacaaatcagaatagcaatagtagtacatgtgtcgttcacctacttgctgtttttctttttcagtaagctcccaaactttttcagaagaggcttgttctttttctgttgctgctggggttttgtcggggacattgccactttgctggtatcttctgatacttgcccatttggatgctcagtgttggtatcctccttgggctccagttcatctttggaggatacggtttcttggtttttggct

SEQ ID NO: 15946 - DNA, 474 bp, Oryza sativa
  Clone ID: uC-osflcyp066h10a1
aataacacaaggcaagcatagcttaataaagaaagtaaatattccagtagtgtctccctctcccagctagcccaggaagcagcacagcctaacagctacaaaaatttccaaacatagttgcatacggaaaagagaaaaacatggaagccgtccttaaccacaattcaaatagaccccgtccttaccactcctcccaaacgagaaagttggtcatattaaaacaaaaacaaaaacaaacttttatccagaaccttacttcctaagacataatctagagaaggtcagcgacgttggccggcagctcctcgatggtcacattgtagaacctctggatgtcgaacagcatcctctcatcatcgcgggtgacaaagttaatggcaactcccttcctgccaaaccgaccactacgaccaatgcgatggaggtagttctcaggctgggtgggcaggtcgtagttgatgacaagggagactt

SEQ ID NO: 15947 - DNA, 478 bp, Oryza sativa
  unsure (1)..(478): unsure at all n locations
  Clone ID: uC-osflcyp066h11a1
agatataaatcttatccatatccctgacggtccaataatcaccacatacatcaagagtgcagcagaccacaatctgtagaatctactaaaatcgaacataagttttttttggggtacaaatatctggtgataatcctccattccagaaaacatctctttccatgtagcaactacgagattgtaagacagtatttctttagagattgatcgcacaggacatcaaagttgcgatagtggcaggcattgaactgcatgctgtctcaccctctcatgcgccatcagtgagggtacgctttgatgtgctgatgtataaaacattgtttcctcgtatgaaagcgtcaccgtacttgttcttcagctgaccattgacatattcttccgtttgctccattgcaatgttcatgtaaccatcaagacaagccaaaataccgcggtagtcgacgccggagttgagcttgacgacgacggngcgccccct

SEQ ID NO: 15948 - DNA, 451 bp, Oryza sativa
  Clone ID: uC-osflcyp066h12a1
gatgaaaaccacttcgagacaatttactcaggtagcaaatatttctcagccacaaatccaaacacttggtccttcctatcagaagatcagaatgaacaggttttcaaattcatctcccaactcgacgataatttacacgtacatttaacacattcttccacccttctcaaactcctcccttcttcttcccgggtaagattaaaattaacttgaggccagccagcgtcgccggcggcgagatgtttacaggctgggcgtcctctcggcggcgccggagatgacggtgagcaggttgttgccgaaggggtcgctgaggtgcttggagaggttctcgacggggccctcgccggtgacgtaggcctggatgaagaaccccagcatggagaacatggccagccgcccgttcttgatctccttcaccttcagcagcgccgcctggtccgggtcgctc

SEQ ID NO: 15949 - DNA, 345 bp, Oryza sativa
  Clone ID: uC-osflcyp067a01a1
gggaaaatcggctttaattaggggtttttaagcaagggccccgtctccagggtggggggattccaaccgggaagatgaaaaaaccccgggacaggtttttaaacccccccaaaaaaaattggcagtaatgggggaacagggataaatattccggggggccccggcaaggggccctggggcgggtttttttaaggggggctcggggtcctaaaaaaaagtttccgggacctgtttgggggaccctttttttttttcctggggggccccccccgcccccggggttttttttgggggctccgggagggggactcctggttcacgggggttttcggggggggggggggg

SEQ ID NO: 15950 - DNA, 438 bp, Oryza sativa
  Clone ID: uC-osflcyp067a03a1
agcttcaaaatttggttactcatagtactacagtatgcagtagtagcatggtcaactgatgaatacaagtccttttttctgactgcctgctaaaaattgtgttagttctatgtcacttctgttactattaggctccactgtacccgatgttggctgcattttcccctacaataacaaaccaagccggagcgcttcttccccgctcagactgctaggcacataaactccataggaatattatgggaaaaagaagagaaaaaatttgtgtgcaataacgtccaaataacatcaccataataaattttaagtctctccatcggcttttttagcttcagtaggaccatcatacctgtttggaggcgacctgattatacgagttctgcttatcacgaataaaagcactgtgatcatcaggaattcttttacaacagaacagct

SEQ ID NO: 15951 - DNA, 419 bp, Oryza sativa
  Clone ID: uC-osflcyp067a04a1
agaaatgctgggtttcattatcaaagtttagtttggggaaaaaccggcttcataagaaaaaatgctaaaaaaaggggccacacccaggggaggcgggggaaccccccccaagggagaggagaaaaaaccccccgacaggtgttcaaaaagcccacccacaaaaaaaatggccccgaaaaaaggaggaacaatgtgaaaaatattcccgggggggccgggaaaaggggggaggagggggggcgttttctaaaggaagggcgcctgggggccctaaaaaaaaaaagttcccgaacacctttcgggggaaccctctttttaattatgccgggggggggccccccccagggcggggtaatttctcgggggccccggaaaggggaccagggaattcagggggttcaggggggcggggggggggg

SEQ ID NO: 15952 - DNA, 438 bp, Oryza sativa
  Clone ID: uC-osflcyp067a05a1
cctagaagctcttttaaattcattcagacccttgaaatttcattgtttgccaagatagccaaacttggcattacaaaagctttgcagcattagccaaacacagcatgacaaaagaaccacaccatcagcctaaagcattacatcctttattctcttgaaattattctttacagcagtaaattatctcacaacctcgatgattttggagaagaaacacccgtattgaacttcttgatgtagttatagatgtgatcactgatttcctgtgctctctcctgctggatgaagtgcccagcacctttgattaccactacttcctcaagcataggaacatctttcttcaacctacccttgtgtatgtagcttttgactcctgggagatggtaaggccaggtcaccatccccgacaataaactttgttggcactagaacttttgc

SEQ ID NO: 15953 - DNA, 347 bp, Oryza sativa
  Clone ID: uC-osflcyp067a06a1
aggttatgtcccgttctttattacgaagagaaaagacagagcaaagcaatcttggttctcaacatcaattaaggggggaaagaatgtgtctgaacaggaatggaaagtgcctgtgcctccatttccctgctagtctgctactgccgtccaacgaattatgccattagaaaacctccaaactcattggcgctatactagctatatcccgctgcagaggcacttatgtttgccctcaaaatagccaaaaaaagaatggtagaattcaaggggggagccaggagtattatgtggattttgaaggggggaatgagaaacttccaacgggggttggatcattatttattaag

SEQ ID NO: 15954 - DNA, 443 bp, Oryza sativa
  Clone ID: uC-osflcyp067a08a1
aaagtcaaaaagaggcattttttttctctctttctttcttcggtcactcaaggaagaagggtcccctcggccctcgcacgcactacaacagctagtgaccgggcatctatcaagcctagtttagaaactactatcaccctctcaccggttcaggttacaagactttataccatctgtctgggttcatataaatgccaatgaaggagcgcacatatatatgaaaattcattagaacgtggacaatgctgagaaagtcttataatatgaaatggagaaagtatttcctagttccggccctacctgcgcgccatacaacttggccgagagaattccctagctctttacatcgttttaatcactctgtatccaaaattggacctttcatcatgtatgcccatgcaagcattgaaaacgaagctgccaaggaccaaccattgggggag

SEQ ID NO: 15955 - DNA, 439 bp, Oryza sativa
  Clone ID: uC-osflcyp067a10a1
gaaccacgagcaaagatgatacatctgcgaatttttccttcctcgctacaccatatgcatgatacatctgcctgtcgattgtcgaacaaaagatgggcactgttcaggtttacacggaacaaaaatgaacaccacaaaaatggaatctgaactatgcaacacaaacattacagattttcgatgagcctgtatagacaacattagcagctcagcaacccccgtgtatgaatggatttggaaacccaatttatagtctatagacagatcattgtgcccatttctccactgtaggcagcaaaatccttcccacgtacaaatagcgttatttggcttcgagatcgtgctgtaggagcttctacgtcaaaaatcggatacaaatgagcaacaatacacttgatccagtgacctaacactttgcgcagaggttgagaccttagac

SEQ ID NO: 15956 - DNA, 61 bp, Oryza sativa
  Clone ID: uC-osflcyp067a11a1
attctgggaggtcccaaagttttatttttttctttaatattttagctttttaaatttaatt

SEQ ID NO: 15957 - DNA, 427 bp, Oryza sativa
  Clone ID: uC-osflcyp067a12a1
agattatgtccccttctttattacgaagagaaaatacagagcaaaaaaatcttggttctcaacatcaattaagggggaaaagaatctgacagaacaggaatggaaattgcctgtgcctccatttccctgttagtctgctactgccatccaacgttttatgccattagaaaacctccaaactcattggcgctatactagctatatcccgctgcagaggcacttatgtttgccctcagaatagccaaaaaaagatggtaagatttcaaggggggagccaggagtattatgtggattttgaagggggaaatgagaacctacaaacggagtttgattcatcattcatcaagatcatccttaaagctagtcgatctcggcatactgggagtgccaggctgcgagaagagcacctccaatgccagaaccatcg

SEQ ID NO: 15958 - DNA, 485 bp, Oryza sativa
  Clone ID: uC-osflcyp067b01a1
gctgaagcaacaacaattcataatttaggtcaaaaaagtagaagtgacaaagctcagctccagatacaaattttccactagtacagtacaaatggatgccatatttttatacatacaaagtgctaaacacgctaagaaaacaaaccgaagttttctcatgatgctatctagtagttttctgtaattcatccagtctcctcctacagttattaacacctgaaaaaggctgtgaattttcattctacacctgcaacagttttgtagccgagtagagatcatgacaagtctatccaaccatcagcctttctacttggaaggaaacaattctatgttatgcgaggaaggtgtttgaaggtactaatcgagattgaaaataaatacctccataacacccgcataccgataccgcacatactgccccctacacaatctggacgcaagctggtgtgtcggaccttggacctgcgatcgtccgtagacgacag

SEQ ID NO: 15959 - DNA, 350 bp, Oryza sativa
  Clone ID: uC-osflcyp067b02a1
cattccgattgatagcaacaagcagtttaaacaccataaccaaagcgaactcaattcatggtaacatcacggacgaagaacacctaacactggatggatggatagagggcttcttgactcgagagagccactggacacgataacgactcgactcgatgataagatgattctgacacggatagctaaggataactggccacgatgggccccaccaatcagttcctccagttcccgccggagtcgccgccgtagccgccgtcacggctgccaccgtagccgccgtcgtcgacgtcacggccgccgtcgtaacctgcgtcgtcaccgtagccgtcctcacggtgcccgtagcc

SEQ ID NO: 15960 - DNA, 450 bp, Oryza sativa
  Clone ID: uC-osflcyp067b06a1
ctgcccagagatatcctttcattctccatgcttgggagaattcaagttacagagaaaatgtacattgggtgagcacgattacaacgcacgcctcagtgctctctggtgtggcattattagtttattacccatatatacgtgaacttgacaacttaagacttacagctcccagattcatgcagatatgtagacttgttagcacagggatgaagctttgcttttattttgtacgctggatgctgtaccttgaagctatcttacagggcagaacctgcacgccgacgccttgttgcgttagaggtagcaatctgaccaagctgttcgccctggcttgctgggactcgttctctgacaggtgtgtaatgcctcagccaaacaccagtgtatacctgctgaggcctaataatcttagtgtctggatcatcaagtgactctttccatgtgctaacc

SEQ ID NO: 15961 - DNA, 537 bp, Oryza sativa
  Clone ID: uC-osflcyp067b10a1
accataagaatagcaatcgtgtatactccggccattaaaatgccgtcaaaattcagttcatgcatatacacaagctatatatcaccgcgagaaagaataatactataagagagtgtaactaattctagctgtcagtccattgtgatccggcctggccctcccttcagtgagcggtacaaaggtctggatcgcttgaagccgaatatgtcagtgattcggtaagttttgggtgtatcagcttcagcaatggccttcttgaactctgccaaatgttcgccgccgaagacttgcacgcttacagttttcctttgaggggcaccaagtcttatatgctgatcaaaaaattcgatgaattcttctttcttcagctctcttagaagagctacctcagactcgaccctgtcaaacttgagagttcctgcctcaatctctccccaatagaagtgggattcctcccacaaatttttgatttctcagtttcgaatcgacagtgattttacttccttttaaatccttgctgacattcatgaatttgtt

SEQ ID NO: 15962 - DNA, 545 bp, Oryza sativa
  Clone ID: uC-osflcyp067b11a1
agcaaatcgatccatgcgaccatgctggcaaaagatatcggagcacaaatttacatgtggcacccacaccgtacacccatgcataataatacatgggatatacgtacgaacatacatacccctgttgatcacacgcaccattgatcgtacaaagttgcgtacatacatacgtacacacatatacgcatacgcacgtacatacatacataattaaaaactcgtaattaattaaatacgtagttgatggcatctctaatggaacttgaggctggtgaggatgttgttgtggacgggatcagcgaggtgatcaagcaggttctgcacggggccaaccccggtgaagagcgcctggacggagaagccgaggaaggcgagcatggcgagcctgccattcttgatctccttgagcttgagctccttcatgtgcgcctcgcttttggtcccgaagccgagcgggttgaagagcgggccgccggggtaggccgggtcgccggagccggcgaggtacttttcgaggcccaggaagtactgctttcccatggagc

SEQ ID NO: 15963 - DNA, 491 bp, Oryza sativa
  Clone ID: uC-osflcyp067b12a1
gtccgcaagtcgagcacttcagcattgtattcatctccaaaacaaaccgtatcttcattaggaagttagtaaggcctacaaatacaataacaatgtcaaatttgtttacatcgaccaaagcccaccaaattgctcctgcaaggaacctctcgtctcccgttgttatgtgcctccaatctcagccagctcatccaccgtcaaaacacacaaacagggagcaatttacgcaggccaaatgaagtacaattggtttcatcactcttccgatggctttgcgtcgtccatttgatcatcttctcccggaagcccaaatatccgtaggttacgatccatagaacctacggcaatgtacttcgcatcggtgccaaacttgacgtttgtcactttccctgtgcctgacaaatctggtaaggtcttgacaagattccattcaagcttaacatttgctacttggtaaacccttgtatctgaaccaccaacagctagataac

SEQ ID NO: 15964 - DNA, 514 bp, Oryza sativa
  Clone ID: uC-osflcyp067c02a1
ccaaacaaggcagcatgttcatgcaaaattgcaccaattactcgagaaatctgaaagtagctggggtggattgatcgaacatagtgcaagaggttcttgggctattataactcaggaatgaaccgatttttaaaacaattctcaagctctaaaccaacttaggccggtggtagcagcagcccttggcagctagaagaaatgcttggaacctctctctttgcccaagccttctcgcttccggcgtttccctttgcttcctttggaagccttttggggccaagaagcctttctggttactcaagcagccttccgactttctttctttgggcgatccctctttctttcttgtccagcgaattttggccacggctttcctttgggagggttgaaggggagttcacaagaacgctggaatctttaaggagccttgcttacctttttgccattcttggtagtgaatgtcctgcggtaggtgttgacatatttgcggacatcattatccttggaaaggttg

SEQ ID NO: 15965 - DNA, 432 bp, Oryza sativa
  Clone ID: uC-osflcyp067c04a1
aattacgactgcatttcttacttgaaaacatttggcatgagaaatacatgtataatagcagataagtggcaaaacagatgttcccggctaactccaagggaataaagatggcaacattttgcgaaggggccagtaacaagttacaagaaacttctcaagagtaatacataaattacacaaaaagaatggatggcacataatccagatcaacgtgtaatgaattgaacatggtacggcaggaaatacattaagatgatatgcctaatgacaaaccctggatgaagttcctttgaattccaatgcgccagccaaggaagagtatatggacatcgctaattatcacaacacgaactcatgtgtccaagttgcatgtattgattccatccttgcaatccctcgtcaagttgttgaaagtttcaacttgagtctttg

SEQ ID NO: 15966 - DNA, 429 bp, Oryza sativa
  Clone ID: uC-osflcyp067c06a1
tcgcgatccttctacaccaccatgggcaaggaggatgtgccgatcggttgggacggttgggaagtccagaaacccgagcatagtgggatatactacggagagtacaagtgcagtgggcccggggcgctgcctagcaagaggaacggctggtcgctggtgctgagcgacatccaggccaagcccttcaccggatcacactattggctaccgcaactcctgtaaagtggcgactaccaataacctgtaataagctatgggctgggctaactaaccacaacatgtgttgagacggagacgagattcttggcaggctattgaggcgagactcttttttttggaaggagttaagcctaagatggctttaataactggacagaacaatgacagtaagaggatatctaaacctgcttaccgagataatgaattgat

SEQ ID NO: 15967 - DNA, 479 bp, Oryza sativa
  Clone ID: uC-osflcyp067c07a1
agcttcaaaatttggttactcatagtactacagtatgcagtagtagcatggtcaactgatgaatacaagtccttttttctgactgcctgctaaaaattgtgttagttctatgtcacttctgttactattaggctccactgtacccgatgttggctgcattttcccctacaataacaaaccaagccggagcgcttcttccccgctcagactgctaggcacataaactccataggaatattatgggaaaaagaagagaaaaaatctgtgtgcaataacgtccaaataacatcaccataataaattttaagtctctccatcggcttctttagcttcagtaggacgatcataccgctttggagtcgacctgattatacgagttctgcttatcacgaataagagcactgggatcatcaggaatccttttagcaacagaacagctggatgagatccttgtcgcggagtccataatggagtaacag

SEQ ID NO: 15968 - DNA, 330 bp, Oryza sativa
  Clone ID: uC-osflcyp067c08a1
gcgaaaaaacatgctccatttttaatccccccaacgaaaacaacatcgatcctactcgcattttactaaaaactggcacatcacacgggggtttttggtcaaaataaatgggcaagccataaaaaggccaagctggttcatgggtacttttaagggcccacaagggggaaaagcgtgttcatgtagaaccccgacctgtcgccccggaccttgggggggacccggggggtgtacctgaccttggactcctcctttaccttttccaaggccacctccggccgggaaacgaaccctttttgtgaggaatttctttggggggccaaaccctaa

SEQ ID NO: 15969 - DNA, 470 bp, Oryza sativa
  Clone ID: uC-osflcyp067c10a1
aattatacatatgctatatatactattaggcatcaagccttgcagccttgcacatgttccaagcaggatgattacaacagataacatacagcaggaacatgcggttgttgcaacaagagccctgcatggtgtttttttgttgtcaaagataaaaagctaccgctaatacattccagtctgacgatagatactaggtattgtctagggtaaacgaagagaacgcgcgacgccaagtacactcagcttgggctttcatcttctctgcagaacaggcctattaatatgataggtacacaggacttaacttttctccaggttgcctttttccaccctggatcctggctgtgactcagtctagggtcattggctgggagatgcaacaccggaagcgggccctccggacagtgttaacgacctccatctccacttgctccagcatcctgaccacctcggtgaacgggggacgggca

SEQ ID NO: 15970 - DNA, 555 bp, Oryza sativa
  Clone ID: uC-osflcyp067c11a1
acaaattataatttactacaaaatattttatttccattatgtgtgtacgctacaactttgcattcaatgttttgtaggaatgtacaaccctgaacaaatgatgggatatgctggcagcacatagtcctacggagaaccatatagctacggtggggggtcgtcaacagcacaacacgagataggaccgtcacagcttgatgaatcgccaccagtaactcagcgacccaaaactacggccacgttgatctcagcggtgttgaggtggtccgtaggtctgtccgcgagcgacattcacctaaaagattatctttgtcaggatgcagacctccaaccggtgctagaagaaagggaaagaaaaaggacactaacacgtcacgaaatttcgatgatgaggctaatgagtagaacgcttttatattttgctcattcaaactaatatgtaatgttgtgtgttaaaactttctaatgtctcagctacatttctaaattaataacacttaaatatttacctgcctttccatcccgaatacttacaatatttacctttacataaca

SEQ ID NO: 15971 - DNA, 569 bp, Oryza sativa
  Clone ID: uC-osflcyp067c12a1
tcgcgatcctcctacaccaccatgggcaaggaggttgtgccgatcggttgggacggctgggaagtccagaaacccgagcatagcgggatatactacggagagtacaagtgcagtgggcccggggcgctgcctagcaagaggatcgggtggtcgctggtgctgagcgacatccaggccaagcccttcaccggatcacacttcgtctacggcgactcctggatcctgccgcctcccaagagcatgtaattctgcctgggctgggctagctaaccacaacatgtgttgtgtagggccgtgattttttccagcccattgggccgacaccctcttgactggttgcagttaagcagaggttggttttattatttgtttggaactatgatttgaagatcatatccaagcatgcatgcacatactttgcattattggggggagcatgatgttctgaggagcggctgatgagaatctggaatgagtagttctacaagcttacggcttcttttgtattcggattctgataatctgagtgagaaatttggttgtttgagaagctgaatattttgaatgaa

SEQ ID NO: 15972 - DNA, 387 bp, Oryza sativa
  Clone ID: uC-osflcyp067d01a1
ccagctgatgaaccataacttggtagtacatgaagcacacactctttccacatgcctaatctagtgtcctttttttttcagcacactaattctgtgcttctctccttttgttatcaacaacaattaagtaacacataaatgatactgttcctcacaacatcatgaactagtatacaacaaaaggacttacatatgtacccaaagcttggccaagcaactcacttcagttgaacttattgatgctgatgctgatgctgatgatataagaacagtactagcagtaacatgagtaggcaagatggctcttcttggacacgtattgtggagaccgaacttctgaaagccagagctgaactgctggacactggagcaggaactatgatgttt

SEQ ID NO: 15973 - DNA, 484 bp, Oryza sativa
  Clone ID: uC-osflcyp067d02a1
gcaaaaacatcatcttcttcttcatcttcttagtgtacacaacaccaactcgatcatcatctcgtcgcactaaacccatcttccccaacccaaagacaacgaactcgctggccacaaatccatccaaccacaattaaccactgctaagctacggtcccccacttcacttgccggggacgaagttggtggcgtacgcccaggcgttgttgttgacggggtcggcgaggtggtcggcgaggttctcgagggggcccttgccggtgacgatggcctggacgaagaagccgaacatggagaacatggcgaggcggccgttcttgatctccttcaccttgagctccgcgaacgcctcggggtcatcggcgaggccgagcgggtcgaaggcgccgccggggtagagcgggtcgacgacctcgccgagcggcccgccggcgatgcggtacccctcgacggcgcccatgagcaccacctgcaccgcccagat

SEQ ID NO: 15974 - DNA, 92 bp, Oryza sativa
  Clone ID: uC-osflcyp067d06a1
atttgggtgggatgaaagcagaggcagataatattaagaagcctggcacgcatgagagagatggtagcaggagtacatgaagagatcaccat

SEQ ID NO: 15975 - DNA, 256 bp, Oryza sativa
  Clone ID: uC-osflcyp067d07a1
ttagttatcggccttcctttttttttttttcataaagtacactttgtttgactacgcaccatattcaacacatactttcactttacactagagcttatttatataagttccacttaacaccaggatatacatggacactagcaatgtattttgatggaaataaacaattgcactggccttgcattacatgcatgattagctattgccaatttaaagtggccgtcaaaccagtcaaggcattaaggccagagatttg

SEQ ID NO: 15976 - DNA, 464 bp, Oryza sativa
  Clone ID: uC-osflcyp067d08a1
aaaaccactttactagacaccttgacaagcatataaacagttagtttaattggagcaccataaccacaagcacagtgtggacaatgacagtgtgaaaatagtaacaaaaaattgtcacctagaagcaagttcataattttgccgagcttgaattattggggtgcaagggttgctcattgaacaagtgctaacaccgataacagaaaaaaaaaatcctcaaattaaacatggcagttcttggaatctaatagactgcaacaaccaaaagatgcgcatgcgccaagatgtttttcaactcatctcaatttcatctttgaaatgtaagtacaccctgagaaaaatcaaggcttgagggccaccgcaatgccgacctttgagctcttgtcaatggccttggtgtcaacttctgctgagatggtccacacagactttggcctccactcgtgctggagcagcgcgctggc

SEQ ID NO: 15977 - DNA, 496 bp, Oryza sativa
  Clone ID: uC-osflcyp067d09a1
aatcttattatcaccatgaatcttattgcaaaatgtcaagctgatcaaattctgtcacaccagtggcaggcagcctagtacaagccgtcaagagtttttctcaaggtgatcaaacgctggtcgatctgcatgctcttgtgatacacaaagagcgatcgatctgacatgcccatgttttttttcctttttttgcaggaagatcaaggttcatgaggctagctagctcagtgcctgaagtgcctgacccccgtgaagaggagggagacgccgtacttgttgcagcagtcgacggcgtcgccgtccctgatgctggcgctcggctccgcgatcacgccgatgccgttctggcacgcctcctccacggtgtggttccaagccaatgggaagaatgcatcactggccaaagcagctcctttggcctcctctcctgctttcctgaaagcaattctcagactctccagtctgtttggctggccacttcccatgcctaacatgc

SEQ ID NO: 15978 - DNA, 576 bp, Oryza sativa
  Clone ID: uC-osflcyp067d10a1
agcgagaaccttgacgaaatttattggaccgactgcggcagtaataattaaacaattccaaaattgcactgtcaagcgttaaacattccatgttgctttccaacgatttccaggctttgatggatacaatgaaatcttggtttaatagtgattttcacggttcaaccaacaactaaccaactgctgccgaatctaattcaagctggtcaattggctacttctccggtggtgaggtcagctgccttaagttgaactttgcgagctctttgtacctctcgaccaccccaatcatgcatatagtcttagctatctggacaataatagtcctgtctggactgctgagatcaaccttgtgaggttgaggtacagattttgctaccgcgttgataattttcatcctatcaatacctgtgttcgaccttgcttcatataacacagcaaacttatataccgaagaagattccttttgaaagtacttttcaacaagtggactaaatgcttttgatatttcctcttctgatgcataacatgtcacctcagtgggcaaaaacctcagaataaaactagcatgcatta

SEQ ID NO: 15979 - DNA, 474 bp, Oryza sativa
  Clone ID: uC-osflcyp067d11a1
gggatgaaagcagaggtagattatattaagaagcctggcacgcatgaggagatggagcaggagtacatgatgagatcaccatgatgatagatgatccatccaagctagctagggatccatccaacattgatcgacacacgcacacactgacaacgacgacgacggttttatttaggcgtcagagcaaaaggcaaggcctgcctacatataagctgggtactaatgcaagcaaattaaggcctcgatcaaagctctgatcgacagtagcagcatccatacgataaatcctcatgcagccgggcgacgacgacgatagattcagttgcaggagcagcaggagcagccgctgcagctggtgccacacttgcaggtgttgcagccgcagccgccgttctcgccgctctccaccgccatctccattcctccagagctcgccttgttggatggagcagcgaggacgaaggtcttggtggt

SEQ ID NO: 15980 - DNA, 423 bp, Oryza sativa
  Clone ID: uC-osflcyp067d12a1
atggacgccacattgagggatatacttttctttatgacttcatttcaatggatttttcttgctccccatccgccatgtacatcggaagagaagaaaaatgctaatttcaagatcaaaacactgggatcgatcaataggctcggttgttgaatgaatccgacttttgcagcctaaattgctcgtaaaatttcgggatgaactccttggcctgcatgtcgatcggattcgggctgcatccaccggcctccctttccggagaaatcttttcttcttcctcggctttttttccatggccattgacgttgacaagctcctgcaggtcctgggcggacgagaaactgctggacatgctcatgccctcgctcctgaccggcgacggcgggtagtactccaagtggccgacgaggcggagcgggcccatgc

SEQ ID NO: 15981 - DNA, 500 bp, Oryza sativa
  Clone ID: uC-osflcyp067e02a1
ggcacttcaaatttcccagacattacatgagagcatcgatatgaaatcgtatatacatgaagatgaaccacgcatatgacttgctagaattatggtattacgacaaggcttagatgttaccatgatgtgtaatcaatctgccaagttaaccataactatagagtttcaattttggagattaatcataagtgtagcactgctggaagataatgacatagcagaggtgatagcaaaggaatttacacaaaataatcctagaagatcccttcgaccgtgaagatagatagatctttagaacatgtagatcaactcgacgtagcagagtatgatataaacaaaaggtggttgtcgaagaacaaaccttcaacttcaaaaatatatggatttagaacgttgagatgaattcaggtgcatcacccctcggtccagcaactgtcctgtaaatatacaacttcttcaccttctttgcatcattaagcattgctgcctcattgatactt

SEQ ID NO: 15982 - DNA, 494 bp, Oryza sativa
  Clone ID: uC-osflcyp067e04a1
gtagtcaaaattttgtaaggattttttattggtgtagtaaaaattttggaagagttatttaaagttcgtatagcatcctaaaaaatattaagtaccgaatgtttgtaattaaacataagttgtcggcggggccgcaggcgcagtgtcgacgacaggagctgatccggctgccgaagaggtctccttctcggcggctgatccggccgctggataggtgttcttatcggcggttgatccggccaccgcagaggtctccttgttggcggttgattcggctgctggagaggtctccttatcggcggttgatccggctgccgcagaggtcgccgtgtcggcggttgattcagccgctggagaggtctccttatcagcggttgatccggctgctgcagaggtcgccgtgtcggcgattggttcggccgctggagaggtctccttatcggcagttgatccggctgccgcagaggttgccgtgtcggcggttggttccgccg

SEQ ID NO: 15983 - DNA, 294 bp, Oryza sativa
  Clone ID: uC-osflcyp067e05a1
aatactggcatcagcagagacattccatgggcttaatttaattttcttttgtccggaactagtgacagtgctttaggagttcattcaggaaaagacaaaacacatactgcagtatcatacctagatgcatccaacttccaattctctgagccagcaaagatagggcatgttctaatttaaaactgcaaacaaactatagccgactcaaccaaagatagggcatgttctaattcaaaactgcaaacaaactggtgccgactcaaccaccaaacatatgagaggcagtaagggttg

SEQ ID NO: 15984 - DNA, 491 bp, Oryza sativa
  unsure (1)..(491): unsure at all n locations
  Clone ID: uC-osflcyp067e06a1
aacacaacttttttttagatcaacaggcacgatttgttcatggcagggcagaactctctcttagaacagcacaatatccagacacaatccttggatgcctaaaaccaacaagggaaagaaaagaagcttaaaaccatttggtgcagctaaaggccccaacgtcaagcttgttcagtcagtctcacagcatggtacagcaaaagacaaagcatcggcctacaggagaagacagaacaggattcacatctaaagttcaatgctttcctaaataaaacttgctactcgtcatccgattagctggataagtttccccacgatgagtttctatatgctctgcatctgggagaatgagatcctgatcgtgttaccctccagcgaggtggcatgttttgatacaagggcttcggtcgcctcctcttcgctctcgaactggatgagcgcctgccttttngcgttaccttaaacagctttgtgttacaacagaaccatgc

SEQ ID NO: 15985 - DNA, 372 bp, Oryza sativa
  Clone ID: uC-osflcyp067e08a1
ggagcatcactgatcaattcactgctacacacccaacgtaaaatgcatgatcccgtgttcgacttatacaggcaatgcttcgtattgagtcggaactattccgtcctctaagaattaattaacttggtacataattaagcagcatcaatccgaaaatcggatgagagcagacttgagacggtaaaccgatcgacacggtaaaaattaagaagtcgcaattacgaagtggaccataataatagtatacgatccccgctgcgcagctgacttgctttagcagacgccgttggtcttctttttggccagcacggccctttttcagagggagaacacctggcgctggttctacatatccctctcgctcgccgacgc

SEQ ID NO: 15986 - DNA, 449 bp, Oryza sativa
  Clone ID: uC-osflcyp067e10a1
gacgcagagcaaagatgatgctgacgatatgattttgtagtttactgtacaattatacaacaagagctcttttcgagctgtgagagtgtgagctactgagcttagtggttccgtagatttatatgccctctgatttcaaggaaaaccccatgaaccccactgaaacttgtaaggggccaaggaaaagccgaaaaggaaagtatatatatgtatgttactactcagttgttgcattttgcttctcttttttttttgtggtcagcattcacaacgaaatgcagagctagggaaacatctattgtcgggtgctatctttctaacattaatctcgttcattgcccggatcatttgtggggataggtgtatcctgtccatcaagtttaccttgggggcatcaaggattgccttgggtggagaacgtgcccattgcattgcccaaatggcgagag

SEQ ID NO: 15987 - DNA, 286 bp, Oryza sativa
  Clone ID: uC-osflcyp067e11a1
aaaaaaaacccaccacattggatatggacatatttagcagagcacacaaaggtttattcttattaacaccaacaacatggggggcttccaagggggcattaccagatgatggggcccatacaaatcacaccagaatgggctttcaaaaaaacccaaatgtttaggccttgcgaccaggagtatacacaaataccatggggtttttttttgaaagaaccattttacaggtgcaagaggcaatgtttttgtttattttgggggagtttaagttttttagggcgaaacc

SEQ ID NO: 15988 - DNA, 494 bp, Oryza sativa
  Clone ID: uC-osflcyp067e12a1
gggtagaaatgaaattaatatatccactaatacatgaagccccaaaataaaatttgggtgcttagtagagccaagcaaaccgaattctgcacgggtaatttcaggctattcttacaagcttactacgtgatggggttcttgctctgcatcaaaattctgcgcctatagcacaagcacggttgttgcatcggacactggatgcaaatctgtcacttgacgctttgctcctcagcagcggcagagagcttgaacttgaggtaggctctgatgaaggtgtccagctcgccggccatgacgccggcgatgtccgacgtctcgcaggcggtgcggacgtccttgacgagcttgtaggggtggaagacgtacttgcggatctgctgcccccactccgacttcaccgagtcgccgcggatctgcttgagctccgacgcccggtgctcctcggcgatcaccagcagcttcgtctttagccggcttagggcctttatcttgtt

SEQ ID NO: 15989 - DNA, 366 bp, Oryza sativa
  Clone ID: uC-osflcyp067f01a1
tttgaaaactgctttatggttgttacaactttatatatatacccacactgccctgtagcaacgggggaaggaacccctagtaattaactattcgacactaacaacaacaaagattaacacaaaacatcaatcaatcaaatggaacaaattagtgaactcagtacaaaatgataaacgtaaaaggccctcttcttccacgttaaaagacctacacaacaaacgcaggtcgggtcaagataattaacaaatttaaacactggcaagaaaataaaacacaaaattagtaaatgaatttttgtaaaagaaggaaaaaccaaacccaggttcttcccaaattcgtggacattctgatcgaatgacgtgaca

SEQ ID NO: 15990 - DNA, 434 bp, Oryza sativa
  Clone ID: uC-osflcyp067f02a1
ttttgaaaaaatgcgggtatgaagactaaacgagtaaagacataatctgtacttttacaggtgtacatgaacacataggttgatgagtgacagagcgaacacgtatacatgtatatcccacaagatgaatgacataattatctcagctaccagctctttcttttcagcactaaatctctgtatgataggtgtgatggaagatggtacacaaacgcgaaaccggtgccacgaatttaacacgaacagccttttttcttgaaggaggggcgacaaagtcatcatcatcatgaatggaacgacgcttcacatttctttttatgctcgcacactttggaagccgcggcatgctttcaggtaatgcagctcgctggagaataatgtctgttccgaagctcacgaacaaccagcgacgggagcgaaaaggcacttggaca

SEQ ID NO: 15991 - DNA, 191 bp, Oryza sativa
  Clone ID: uC-osflcyp067f03a1
agaaaaattcgagaagatcagtcctactttatctatgccatgaccatgcatacatatgggcttttacagatccatgaagaatttcctcgcccgaaaccgaaacatacatatatagcaaactcactcactctggctgcaaagcgaccgtgcgaagtgcgtacttacacgcaattttattagaacgatcgggg

SEQ ID NO: 15992 - DNA, 374 bp, Oryza sativa
  Clone ID: uC-osflcyp067f04a1
agaccattaaccagtatccaacacaactgaatcgtaaaggccacgttattctggagtaattaacattgagagcaactacgaaagagcaaactaagctgatcatgagacgttgccctacacgaccaaacaaaccagctgaaatgaataggtagtacgaaccaaacacacagctcatatatgcaaccagcataacaaaattacaactgccctggacggtttatattctttcacaagctaaaaagtagactcagggccatattatcagcatcgttacaacttacaagttggtagattggaaaacaaaatgcaacttattatcccaactagcattaacagagggggtgggtcctgattgaacaccctccacgttttat

SEQ ID NO: 15993 - DNA, 326 bp, Oryza sativa
  Clone ID: uC-osflcyp067f06a1
ggggggttattttttaaaaatattaaaaaactataaaaaaaaaaaagggggccgaaaaatcgccaaaaaaaataaaaccccaaaaaaaaaaaaaaaaggggcaaaattccccccccccacccttttttgaaaaatgagtttaaaaaaaggggaaaagcccccaaaccataaaggagggggcggcatcaaaaaaaaaaaagggagtgggaaggaaaaaaaaaaaaccccggaaacaaggaaaaaaagggggaaaaataaaaggggctgaagccttaaagcaaaggggcagaaaaccggcaaaaaaaaattgggctggggggcaaaaa

SEQ ID NO: 15994 - DNA, 296 bp, Oryza sativa
  Clone ID: uC-osflcyp067f07a1
acacaatcaggtccattgtacttttttcatcaaccaaccagataacattgttttacacaatctgaacgaacgaagcaaatattcgggtacccggaaagaggaaaacgtcgcgcgttttaccgcagcctgcatgaaagcaatggaccttaccgccgttgctcgccggagatccacactcacttgccggggacaaagttggtggcgtaagcccatgccttgttgttgaccgggtcggcgaggtggtcggccaagtttttcaggggccccttgcccgggaccaaggcctggaccaaaaa

SEQ ID NO: 15995 - DNA, 355 bp, Oryza sativa
  Clone ID: uC-osflcyp067f08a1
ggctataaagtctaatcatgttaattaattcatagtcgttctccaatgacaaatgaaatggcagaaaggggaggggaaaaaaatactatttcgtgtatcaagaagctgaaactactatgaaatatacactatgcttccttagttcctttatctgccttgtagttacataaactgcaaaataggatgctatgatacatgttggtggtggatccacaacaaaaagttgctgcttgtaatcatcttcccaagatcgacattattctagcaagatgaacttctttgggagctactaacccacatgggtgcgagcatcttatattcagagaaatcaagtgattcaaaggaatcaagtgaa

SEQ ID NO: 15996 - DNA, 562 bp, Oryza sativa
  Clone ID: uC-osflcyp067f10a1
gcagtgaatgccgttgatgagtaatttccatacattgttttacagattctgttgagaacaaaactcttacactttacaatctaaagatgaagcaccaatgcatataaaaaataaaaatcaaagttttacataatgatcagagtaatgtgtccatggtgatgatacaactatatttgatcatacaaatctaccagtcaaaagaagacattgtggcaataacattctccgctgaaaggttcacatccggagtattaattgcaatggacctttcatcgcttgagttgtctcaagttgaaagccattcaagatccagaaagtttgaatcaccagaatgaatgcaactttctttcaacggctggaacatgatgtatctgaggtaccatgggtgtatacctgtagcaaattttgagagaggaattaaggtttcaaaaacaaaaatggtagtagtccactatttaagacaccatgctttttcatgatttcctagtaaaatacttgtatgagaaggatgaggtcaacccttgacgaatagaaacaaccttattttgatactactttacag

SEQ ID NO: 15997 - DNA, 496 bp, Oryza sativa
  Clone ID: uC-osflcyp067f11a1
aagtaaaaacctgaaattttatacggttctactatagagtttgatatttacaggaatcctgtaggtacacagacatctgcaagaaacaattcatatcagtaattcaatatggacctacgaaatggtacactaatatacacggatacacctgctttctgcttatttgattccccaaagatttatacctgtttagaggagaaaaggcagagaaatggcacaaaacctacacaaggatcctccatcacaagaagtcatctctcgtgaatgaggttgtctcagtctctcagacatgcagaactaattagatgtgatgaaatccactacagcatcagccaattcttcgcgatgcgcggtgtagttatgatttgctccctcaataacttgcagcttgtgattcggtatatgcttcgcaaactcataggcgtcttccacaggtatagtctcatctgctgaaccgtgaactggaaaacctgcattcttgtaatgacatgcttac

SEQ ID NO: 15998 - DNA, 486 bp, Oryza sativa
  Clone ID: uC-osflcyp067f12a1
ttttttttttttttttttttttttttttttttttttttttttttttttttttttttttttttttttttttttttttttttttttttttttttttggcccaaacgggggttaagccaaacccccgaccatgccccccaggggggttctttaaaaacaaaaggggaaaaaacccatggggggggactttaaaaaaaaaaaaaggggaaaaaccaaaggccctcggctgccgggggggggggtgccaaaaaggaattaaccccccaaatggccccaaaaaggaatattttatcccaaaaaaaacccaaaccaaagcctgggggggacccaaaggggaaaaaaaaacccccccaaaatcttactttttaaaaaaataaaacggagattacggaaaaaattcattccaaaaccccgggggtaatttacgaaaaaaatttaaaaagccaaaaaaaccccgggttggctacaaaaaaaaaccgctaaggaggg

SEQ ID NO: 15999 - DNA, 267 bp, Oryza sativa
  Clone ID: uC-osflcyp067g02a1
tttttgaatttgaataaaaacaatggctggtagggagagttgagttaaaatgtacttggactcccatactaaccagtatatacagatgtgggacacactgatgcagaaaaatttagtgtactacaagcttatggcctttgcttagtgctgtaccacatttacatccagttaattagctggataactaatgtgtggcaaaaccaaaatgactgtattatgcgtacacttttatagtgggcgtatggagaagagtagagggcatgtgct

SEQ ID NO: 16000 - DNA, 343 bp, Oryza sativa
  Clone ID: uC-osflcyp067g03a1
accgtagtctcaagactctagaatttattatttcctcagaagatacatgttctagttacagttaactttaggggctgatcaatcaacccccagcttctatatacactgaagagagacatacacattttacagccatattcaggactcccttgctagaccaaaatacaaaccttaaatctggtctcagaattcaaacttatgaactcccatgccacattgcgaagttgtaatgataggccgaaccctttcaaaaccatctacacgatctgggtaccatgaatctaaagctgaaccatttacagctggaggctatcctgggcgcccaatcccatttgatgatctg

SEQ ID NO: 16001 - DNA, 363 bp, Oryza sativa
  Clone ID: uC-osflcyp067g04a1
gagattgaaataagctattagcatttcagaatgtacataatacagatagctaagttgtctcctttcacaaggtttgtttacacaagtattccatttccagagcccccctattgtaatactatgaaacatgagaacaggctacaaggaataaaggtccataaggagatttaactctgcacgaagcatatcgaaagcaggatttgctggtcgttatatatgcacacgacacggtaaacacatcgaatgcaaaacaaagaaaaaggctttcaatgttctagcacttgaagcccccgcaaataatcagccagaggaagagaatcaacgccgcaacagcaccacccaccatcaacttaaacctaaggt

SEQ ID NO: 16002 - DNA, 449 bp, Oryza sativa
  Clone ID: uC-osflcyp067g05a1
acaagttacagatctctcgatgtatatacatactatgatcctcgcctaatctcttcaatgtgtgcttcctcttcttactgtatagaagaatgaaataattggccgactagctgcgtttggtttccagtttcttcagcatttacctatgagcccggctacgttttgggcaatatcttttttggcctgcaatgagaccggtgaatcgccaatgtacataccgaacagagccctgcagaggtctttgctcttaacagcaccaatttgtctgccatcaatttctgttattagctggccatcagaagtttggcagaagtcgatctttgtacccccaggaataggaatgtcttcattgaagtaagaaccaaaaagttttcaagcaatgataatcagtggtgggattcatcttttggaggcgcaggccaagtgacttcttaaatacatctcgcact

SEQ ID NO: 16003 - DNA, 353 bp, Oryza sativa
  Clone ID: uC-osflcyp067g06a1
acagtaccgatttcattattccatttgcccatcgaagtgatatgatgcattgaaatctgataacttacataactaaaacgtagttgtttcaaatagtaaggcaaatcctatgattacaccataggaaaaactgctcattggaaagcctatataggaattatacatatagccaagaagcatcgtttttggcctagtcaaaatctggcaaaccatgacttgccgtagtatcatcaacaagcacaagctggtcgtctaatcgtccagctcaatgatcttcacaaccgaggaatcacccactttctggcagacaacaacgcgatcatgcgacttgatcacaccggaagctttgccat

SEQ ID NO: 16004 - DNA, 132 bp, Oryza sativa
  Clone ID: uC-osflcyp067g07a1
aacaactgccagcggcttaattaaagctgagttcacatgtacttgtactcacatcccaacccacatatacagaagtagaacacactgataaattcagttattgactaccaaagagaagggggtaaataagca

SEQ ID NO: 16005 - DNA, 411 bp, Oryza sativa
  Clone ID: uC-osflcyp067g08a1
aataattgaagtatttgacaccttgaattataatccataacgataacaccacggtccactggcaacaacctgagaaaactacttgacagtacactttattcactatagctgtatgcacatgcgactcgcatgcccccaccggacgggtataaatgtaagaactaatgtgtccagaaccaaaaatacgattacataggacacgaatcctgtacaggaatggagaagtttagaagtgtgtcttcactgcctctgcaaatagcaacctagcgtcagcaaaccaatttacagggggtggtcaactaggccgtgcaagtgcaagggcgcaaagaagaatcctccacgatcatgtgaaacttgtttcaaaaggtgccttgggcagagcttccacaaaatcgcaatctttgggggcac

SEQ ID NO: 16006 - DNA, 493 bp, Oryza sativa
  Clone ID: uC-osflcyp067g10a1
attacatattttatttatttttttatttattatttttatatctttttttttcattttttatatgcaaaatcatatttcatttactactattttttaaaaaaaaaaaggggggtacaaaaaaaaaaactacccggaaaaaaacaaacccaaaaaaaaaaagggttttaaacaatttaaaaaataaaaaaaggccccaaaaaaacacccccaatatttaaaaaaaaaccacacgggaaaaaagaaaccctttaaaaacccgaaaaaaaaatggtttaaaaaagaaaccctttcaaaaaaaaaaaagggaaaaaaaatggggggggccgttcccccccaaaaaaaaaaaaccggcaacttgaaaacaaaaaggggggggggaaccaaaggacccgaaaaaaccttctggggaaaaaagccttccccgcccccgggggaaccccaaaggaaaaagggcccccgggagggggggcgggcgccacccccccaaaggccc

SEQ ID NO: 16007 - DNA, 546 bp, Oryza sativa
  Clone ID: uC-osflcyp067g11a1
acaatgcgattttatattcaaagttttgaaataacatacatcaatttgatttgtcaatagcagcatgaaagcataatacaacgccactaatttataacctcaaacgccaaacatgaccatttcaacaccacctttaaatgttgggattaattgcaaataagaaatacacaagttatatgggctccaaactgggtacatcccgtcaatcaactggcatgttctgtacaaccaaccgttcaaatcttaccaaactcttttgttgagcagaagtataacttctggcagagcaatgaagatactctacgaatcaaaacgctctcacatcacctgagaggagaggtcagtcacggtgatgatggcagcggcggcgacgccgttggttagcatgagccgcctcggcgctatatttataaacacatttcttatgtctctgagagaagaggtcggtgatggtgatgatgacggcagcggcgacaccgttggtcagcacgagccgtctcggcactgaccctgaacccaccgagcgatgacccttgaacccaccgt

SEQ ID NO: 16008 - DNA, 472 bp, Oryza sativa
  unsure (1)..(472): unsure at all n locations
  Clone ID: uC-osflcyp067g12a1
gaaaaatatgagctactatgatggaataaaggagaaataacctacagaacacagccagtttacaaaatggaagattggtacaagaatcatgagtccccggtagattggcccaaaggccttaaaatgtagtaggaaagaacatggcttaattcggatgctaatccagtagctggtccactggctgtcgcaccaccgtttctgaagaaactcttctattcgtgacacactgctgctgctcccaagacaactacatgtaaggtttatatagaaggcagcaaatacgccgtagttactagaaactaatatcgctatgttgctagagttgattccacacgacatccagattggatgaatcagttgagccgactgccgcaatatcatccaaaacctacaagaatccagcttatgctacccgttcttgtcggntgaacttgcttgtccagccaaagcctcagcagtagcagcagcatgc

SEQ ID NO: 16009 - DNA, 341 bp, Oryza sativa
  Clone ID: uC-osflcyp067h01a1
ccccggccaaaaaaatggggggcctaaattttttggaccgaaggggggccccaaaggaaagttaaaaaatcggaccggggcccgaaaaacccaggggggggcccaaacacaaataaaaaagggggaaaaaaggaaaacccccctcccgggggggagctttttggcccccaaaaaaaaaaaccatgccgggaaaaaagggagccctttgtttgggccccgtctaaaccttggggggggaaaaataaaccctgggaaaaaacccccctttggggcaaaaaaggggggggtccccccccccctggcggggggaaaacaaggaaaatttcgggggccccgggcgg

SEQ ID NO: 16010 - DNA, 451 bp, Oryza sativa
  Clone ID: uC-osflcyp067h03a1
aatctcacaagagccaacatgagactccgatattaaccattgacacgtgaaacacattaaggtttgataaataaaaagatctccagctggagtgtgacaccacatagtctctgaggactgtctgggactctgggtttatttattgaccaacattacagataagaaagcgcacagcacaaacaaactcgaagcactcatgacgcgaactggaaatactcatgacgaacgaaatactgaaaagacgataaggcgaagtaggcgatgattgggaggagattcggcgcattactttttctcagattcagaatccgcgctctggagccactccacgaacggcttggcattctttaccacctgggacttcttgccaccagcaacagattcattataccactgagttatcacttcttcatatcaggacgttcccattatacaggggcttgagaacaat

SEQ ID NO: 16011 - DNA, 484 bp, Oryza sativa
  Clone ID: uC-osflcyp067h04a1
aaatggaacactccattcttttacattctaaaggcttacattccaagggttttgctatttaaaccagaaaagaacaaatggaacattctaagggcgtaatactcaacaagaaggcaagattgatcactcaagaacaggccttggcctcaaacattggaagaactacaaagggcgatcgatgtcggtgccaggtacaccggcgagttgacagcaacgagcgcagggctcatggccggaacgccgccgtcgtccgagagttccagcggtgcgccgttgagcagcatcgtcttgctctggaggtcgccgtccttggccgtcaggtggtactcctccctcctcgcgacgtcgcttgacggcttgcgccccagccatgaaaccgctcttctgaggctgtgtgagaaagaattgtgcttatgaaggctggctgttttgtcaaggctgacattgatgtcattctggagggtgacgttgtatccggggtatt

SEQ ID NO: 16012 - DNA, 504 bp, Oryza sativa
  unsure (1)..(504): unsure at all n locations
  Clone ID: uC-osflcyp067h06a1
atactgcagtataattaggagggaaatcagataaatttacaccgtcagatcaaatatactggtagtatatactagcagtagaatgtaccataaaaaaactcagcatcaaacccttcaccgagcgtacagcaagtaatgaaacctctgacactgatagtagtcatgagccaaaatctgactggcttgacacagtaagggggactgctacatctatctattcctgtacagcaagaaactagtcatgcccaagacattaaaccaaacaaaatccctgggatacattcaagcaagatgggcatatcacacaaatccatatcaagtgtctccctgcggccctgctgtatctggatctggtggtcagaaactgatgaaatcgtccttttgttccttcctgtcctgctgagatgaggtgccgcccttcttgccaaatatcatgtcgtcaagatcctgaagcaactcatcagcaccagaacctgctcgctttcctacagngccaactttagt

SEQ ID NO: 16013 - DNA, 436 bp, Oryza sativa
  Clone ID: uC-osflcyp067h10a1
acatgataatataaaccatgcgtattatatgattcttgagaagcgaaatgcatatgccattcaagttgcccctaggagaaaggtgtgtccacttcgtttgttccaaaactgtatgcagcaaagaaacaagaagctgtcctaattcgtgtcggcgtgtcatcttcagtaaacttatgtacaaaggagggcgcggccacattcatgagtaaggccgctcactatagtacagtattgttggcctgagatccccaaaacatgttcattgcgccctgccgttgcaattcccggtagccttcctcctccatgaacctgccattcttgagcaggccacgggcagcaaaccccatgagctcagaagggtccgtgtgctgtctgaagaagagcggagcaccgaaatcggagcagatctcggcacttggagctgcaggaacccatt

SEQ ID NO: 16014 - DNA, 405 bp, Oryza sativa
  Clone ID: uC-osflcyp067h11a1
atactgtagtttaatttttttttttttttttttctatttttttttttttttttattatagtgtaatatatactaataaataaaaagtctaataaaaaaactcagataaaacccttaaaaaaaaggaaaaaaggtaaaaaaaccaattacgcgggggagaaagaagaggctaaaaaaggagggtccagaccggataaatcagcgggatcagaggtcagttgatggagagaaaaaaaacccctccccacataatcgagaaggcgcaaataaaaacaaagatcaagcaaataaataatggtataagaaggagacgaacacaaaactccctaagaaaaaagaacaaagggtgcaaggccaaaccccccaaaaaaaagacccatcccaaaaaatgaagggaaactggggg

SEQ ID NO: 16015 - DNA, 329 bp, Oryza sativa
  Clone ID: uC-osflcyp067h12a1
ctattcattaattcgtttattttgcataatccagcatgcatgcacacttacataatactccagattcaagtccagtgcatgtgcatgcagtaaatcaaacaactccttggttcggatccaaatgaaaactttagaacacagtacgtacgtccgtagtagaactcatcacgcacatttttttttggtggctacgtacatagcacagcacgtacgtataatagaacgtttaatacgagactaattaatcaagatccgtaggtaattaattaacacggatcgatagcataacacagtaggtcgtacgtaattaattaactgattaattaatt

SEQ ID NO: 16016 - DNA, 525 bp, Oryza sativa
  Clone ID: uC-osflcyp071a03b1
tctgggcggcggcggcgctaatcggccacggggcagcgaggctgacgaggaaggacctctcagccaccgcggaggtcggccccggcaagacgcagaccgtgctcgacgagctcaccggctacgccgagccgggctcgctcaccgccctcatggggccctccggctccggcaagtccaccctcctcgacgccctcgccggccgcctcgccgacaacgccttcctctccggcaacgtcctcctcaacggccgcaaggccaagctctccttcggcgcctcggcgtacgtgacgcacgacgacaacttgatcgggacgctgacggcgcgggagacgaccgggtactcggcgatgctgcggctgccggacaagatgccccgggaggacaagcgcgccctggtggagggcaccatctaggagatgggcctccaggactgcgccgacaccgtcatcggaactggcacctccccggcgtcagcgggggacaagaagcgcccgtcagcatcgccctaagctcctcatgcgcccc

SEQ ID NO: 16017 - DNA, 375 bp, Oryza sativa
  Clone ID: uC-osflcyp071a05b1
tactgatcagtcccatgcctgatgggcagcgtgctgctttttatggcaatgagagcagtaacaaccgggttttgcaactagagagcgagctaagagatatgaaggagcggctactcaacatgagcttgcagtattcacaggtagaggctcagcgtgaactactatggttggaactgaaagctaccactaatggaggagggcggcggggctagaggtgaagtacaagaattgcctgccataacagagactgacatcacactaacctgtggctacattcttgtcacataggatgcttccagttattgaaactcgtactctgaaggcctccaagaagctttcttgtgaagctgagccgagctcctgactaatgggacc

SEQ ID NO: 16018 - DNA, 534 bp, Oryza sativa
  Clone ID: uC-osflcyp071a09b1
tgtcactgacatatgatttgtacaacccatgaggaggcatctaccatcctggaaatgctggcgagcatgaccatgacacagactatatagagccgactagttccaattcatgcccagacactgacgacagtttcccaatggatgaagaagtaggaaagaggttttaccccatggtgccagttccccatgttcctaaaattaatggagagatcccttcagtcgatgaagctaccatggaccatgaaaggctgacagaaaggttgaggttgtatgaactagttgagcacaaggtgaaaggagatggcaactgtcagtttcgggcactatcagatcaactgtatcaaagtcccgatcaccatgagtttgtgaggcagcagattatgagccagcttaaaagtaaccgtgatgcctacgatggatatgtccccatggcatatgacgattactcggagaaagtatcacaaaatggtgaatggggtgaccatgtgactctacaggctgctgctgacagtatggagtgaagattttcgtgat

SEQ ID NO: 16019 - DNA, 517 bp, Oryza sativa
  Clone ID: uC-osflcyp071a11b1
tggaaagaaaaaaaaaagaagaaaccctatccaaacatttacaaagggaagagagaagaaagccggagacttggaggaggaaccctccaccaccagcaaagccaatagagggatcatccgccgtaatctatctagccatcaatccatctccctctcctcctctgctctccatgaagagcaaatcctccaggaaggccgccgacgaggatgaggccaagtccaagaagctccgatcctcccgcggcaagcagcggcctaagcagcgccggcgaggccgctgcagcagcacctcctcccgctctgaatccccaccccgcaagcgctccaagaagctcaaggtctctgacaagaagagcaccaagaacaagggccgcagacgccaccacagtcttagccccagccccagcccttcatcgtcgaccgtgagttactcaacgcgcagcagcagcggtggcggcggcggcgcttctgagaggacggcgagcccaccgcgtaggagccgctctagagatgttag

SEQ ID NO: 16020 - DNA, 515 bp, Oryza sativa
  Clone ID: uC-osflcyp071b03b1
tctgtgatccacacacagcaaaagaaccaccagggtcttttcttcccgagatgaagagagcagcctccatggcgcccaaggcggagaagaagccggcggcgaagaagcccgcggaggaggagcccgcggcggaaaaggccgagaaggccccggccgggaagaagcccaaggcggagaagcggctccccgccggaaagggcgagaagggctccggcgaggggaagaaggaccgcgccgggaggaagaaggccaagaagagcgtagagacctacaagatctacatttgtaaggcgctcaagcaggctcaccccgacatcggcatctcctcgaaggccatgtccatcatgaacttctttattaacgacatctgcgagaagttcgccgccgaggccgccaagcttgccgctacaacaagaagcccaccatcacctcccgcgagatccagacctccgtccggcttgtcctcccggagagctcgccaagcaccccgtcttcgagggcaccaggccggcacc

SEQ ID NO: 16021 - DNA, 482 bp, Oryza sativa
  Clone ID: uC-osflcyp071b05b1
cagggcactggaggacaaaattctgccttactgtgatggaatcatgacccaactcctgaaggacttgtcgagcaatcagttgcatagatctgtaaagccacctatattctcatgctttggcgatattgcactggcaattggggagaactttgagaagtatttgatatatgccatgcccatgctacaaagtgcagcagatttgtcggcgcatgctgctgcagctgatgatgaaatgctcgattacaccaaccaattaaggaatggaatactggaagcatactctggtattcttcaaggatttaagagctcccctaagacacaattactgatgcagtatgctcccaatattcttaatttccttgatgctctatacaatgggaaggatatggatgatactgtgatgaagactgcgataggtgtactgggagatctcgcggacacgttgggtgtccatgctggccctttgatcatcaatctatctc

SEQ ID NO: 16022 - DNA, 465 bp, Oryza sativa
  Clone ID: uC-osflcyp071b07b1
tgtacatgcacaagacgatggcgtccggcggggggaggagggcctgctcggggagcctgcacgcaatgcacatcaagtgcgccgacgatacgcgcttcgcgcaggagttcacgcggaggctgacggactgtgacgaggagacaggtggacaccgggcagctgagcgcctacaaggtccacccgtttcatgtccactctacgcccacaggaaggatgtgaaccattatattcattggaagctgtaggtcgttgaataatgatatatatttatctttgagatgtaggtactattagccaaatctccatgcttagatctggataggagaaaacatactataatatatcattgactatatttgttttatcaaatatggctgtatataacctgccacttgtttacttattcttatgtatggaacggagacaacatatattatcatatatcggatactattaatggtttat

SEQ ID NO: 16023 - DNA, 477 bp, Oryza sativa
  Clone ID: uC-osflcyp071b09b1
gcttgtatccccatcgacaaagctagctaagcccagtcatggccgcctgtcacgcagtgccgacactccttctcctcctactcctagccgaactcgtcgcggcggacgatgcctacgactgcgccggcagcgccacccgcaacgccggcgccatccccgaccacaacatcttggacatggaggccatgtgccccaagacgacagacgtgcatgcgtgccagcgactggtgaagaacatgccaggcaacatgcgacgagagaagaaggacgccaggagcatcccccggggaggcatcgacaccggctgactcgtggagagggacggccccaaggactgcaccgacgccgtggacgagtgcaagaacaaggtggaccagtgcctcgacagctgccgtcacgctcttcccgacgagaacgacgccctggagccccagggcacggaccacgactccgttaaggtccccgaggacgagaagc

SEQ ID NO: 16024 - DNA, 579 bp, Oryza sativa
  Clone ID: uC-osflcyp071c01b1
gttttccccaccttctctccacgactccacctgaagcgcctctcgccgccgccggagaagacgcgcagcggcagcagcggcggaagcggcggggagccatggcgccggagccggaagacgacatcatgaacgagaagaacccccgcccgctcgacgaggacgacatcgctctcctcaagacctacgggcttgggccatactccacaagcattaagaaggtggagaaagaaataaaagaaatggctaagaagatcaatgacctttgtgggattaaggagtctgacactgggctggcaccacccagccaatgggatctagtatcggataagcagatgatgcaagaagagcaaccgctgcaagtggctaggtgtaccaagattataagtcctaatactgatgatgctaaatatgtgattaatgtaaaacaaattgcacagtctgtggctggcctaggggataaagcttctccaactgacattgaggaagggatgagagtgggtgttgatcggaacaagtaccagattcaaattcctttgccacccaaattgacccaagtgtaccatgatgacagtgaggaaa

SEQ ID NO: 16025 - DNA, 520 bp, Oryza sativa
  Clone ID: uC-osflcyp071c07b1
ttcaccctcgactccgcgctcctccgcatcgggcaccttcacgacctctcccgcctccccgaccacctcctcatcgacctcttccgtagaactatagctgccggtaagctgacagaaaaagtcctgaagatgtttctggcaacggattgcgaggaaatcgccttgcttgttcagatgctcaacattaagcagccgcttgtaccggtccttcccacgaggtgctctgagaagctctagaagtgacactgattaggccagtcttggttacctgagaaaagatgtctttggaaattcacgacagtgaggtcgacattgtgattgcagcactccagcccaacctgactactttctttgaggcatggaagccattcctctctcggttccacatcattgttgtcaaagatccagatatggctgaggagcttcaaatccctacaggttttgatctcaagggtcatacgaagtcagatatgggagtgctatgagccacatgcatcgacttctctggtcactgatgccg

SEQ ID NO: 16026 - DNA, 570 bp, Oryza sativa
  Clone ID: uC-osflcyp071c08b1
tttattatgccagcaaattcgaagatgccaatgtaacgattaactcactacaagatgcattgtcacaggctagagtgaatatttctgttcttgatgctgaaaagaaggaagctgatgccaagcatgaaacagaaactagtgctcttaatgctaagcttgccaaatgtttggaagagttggacagaagtcatggaaacttacaaagtcattcaactgaacatgatgtttaccttgagaaacttagtacacttgtaatggataacagcctcttatcattaatgactgaagaatttggaaagaaggtcagtaccttgagagaaatggcccttattgtgaggagtatgcgtgaacagcttgctgcaaagggttttcagattgacccaacaatggaggattcagaatcgggaatgcttctctctttcccagactacgataactttgttactgaaagaatggcatgcagcaaaatcagaaaagggaatgtcgatggagctttgcccttctctactgctgtagacagttgagcaccaagctgatacctgttgagaatttaagacttgcaggtacatg

SEQ ID NO: 16027 - DNA, 310 bp, Oryza sativa
  Clone ID: uC-osflcyp071c09b1
gtccaaagctcaggaacaatcaacacgaaccgggggtttctattcagatgcttcgggccatcgcccacgagctgaaggatccatcaagcttatatcgtctcaatcgttgtcgccgccgcagctaattactacttagtaatatcatatcatacttggaattgcagtatgctggtaatgtctacattttcaaatggatccacattaaataaaagttgtgattgattttgtccaaacaaataaaaaaagaaaaaaaaaaaccaaaaaaaataaaaacaacaaatctacaagaatatatgccaactttggccgc

SEQ ID NO: 16028 - DNA, 382 bp, Oryza sativa
  Clone ID: uC-osflcyp071c11b1
ttactcctccccctctttagcttttcctcctgggtttttttccgcggttcgcctagggcttaccgggctgagatggcggccccggatgtcgagtaccgctgcttcatcggcggcctcacctgggccaccgacgaccgctcactcgaggccgccttctccacctacggcgagatcctcgactccaagatcatcaacgacaggcagacggggaggtcacgtggttttggcttcgacaccttctcctccgagcagcccatgcacgacgccatcgagggcatgaacggcaaggagctcgacggacgaaacatcaccgtcaatgatgtccagtgccgccgttccggcggcggatgcgggggctacggcggcggcggtggcagctacg

SEQ ID NO: 16029 - DNA, 322 bp, Oryza sativa
  Clone ID: uC-osflcyp071c12b1
tctgccgccagtcccctcctcccccgcgctctgcctctccccctgacgccggcgcgtcgctgtccccgacacctccgcctccgtctcccgctcccgccgccgcaggtccgccgttcgccgcctccgttgccgaccgccaccgccccgcgccggcttccccgcctcagcctccgcctccgcctccgcctccgcctgcgcgcatcgcaacgcaacctcaggcgcagaggcggcgacttgactcccgcctacacggcctatcgctatggggttgcctacgatcccaggcaggagattacaccccagaggctagccaggggggccc

SEQ ID NO: 16030 - DNA, 517 bp, Oryza sativa
  Clone ID: uC-osflcyp071d01b1
attattcaatactcaaatctcaaaagtagcaaattacctgccaaatttggttctgttggcattttcatcttgtggtctaccatattataagctttgccatatggtcatcgaacaggtgagcttgtgttatgtcaaaatcgaatccaagccagtcaaacagtcaaaccacattttcaccatcttccccatccctatagctgcctttatgttcctcctcatgtctccttcaatttgacacccagggggattgatcaaatcggcttggcctgtgagcagagctagtcagtatttatgatatcagtagccatgtgatggtggcaggtcacgaagatcaatttaggagttattttttatccaaatgtttcctataattaatatcatagaagatggaattcgcacatcgtcagaacttagaaccatgccgtctaattctcttacattaaaatagaacacactttagatcgacctgttgtgatttatgttatggaaggaatcttatacttgcaattttactcta

SEQ ID NO: 16031 - DNA, 566 bp, Oryza sativa
  unsure (1)..(566): unsure at all n locations
  Clone ID: uC-osflcyp071d02b1
tttctgttggcccccattcctcccccaccccggtgtcctcccctccgccgctcgcgtcgccgcctttttcccctatggcgctgccgaatcaggggaccgtggattaccccagcttcaagctggtcatcgtcggcgatggcgggactggtaaaactacatttgtgaagaggcatctcactggagagtttgaaaagaaatatgagccaaccattggtgtcgaagttcaccctctagattttaccaccaactgtggtaagatccgcttctactgctgggacactgctggacaagagaagtttggcggacttagggatggatactatatccatggtcaatgtgcgataattatgtctgatgtcacttcaaggctgacttacaagaatgccccaacatggcatagggactcgcgcagggtgtgtgaaaacatccccattgccccgtgtggcaacaagggtgatgtgaagaacaggcaggttaaagccaagcaggtcacattccacaggaagaagaatctgcagtactatgaaaattctgccaagagccactacaactntgagaagcccttc

SEQ ID NO: 16032 - DNA, 218 bp, Oryza sativa
  Clone ID: uC-osflcyp071d05b1
aggggggtttttttaacaatttttcgcgtttctaactcagacaattttttttaggcatggaaacaacactcatttggtcccgcaaaaacttgctccagccaccatgaaaaaaggggatttggaaacctttacttattgctgccgaaaaatctaaaactgggaactgtttccccaaaccaattggtacagattatgggggggactaaaaatacccccca

SEQ ID NO: 16033 - DNA, 549 bp, Oryza sativa
  Clone ID: uC-osflcyp071d09b1
tttacgcccgaagcatcgacgccgaacggccgaggcgccgacccctcgacacgctgtccccggtcgcgcctcgcgggctcgcggcggaagggtggcaggcggaggctggagccccgagcaccgagctacgggtggacagcccttgaaacccatcccctccacggaccacgccgccagccgcaaaatattttgtccatcacaattgcccatggactctgccgttgatggcccgagacaacctccggctagggcggggagccgcctctgcacacgctgcggcgagcggaaggccgacctcaagcgcaccaaaaccttagagcagatatgcagggaatgcttctatgtcgtctttgaggatgagatccatcagactatagttgacaataatttgcttaaacctggtgatcgtgtggccattggagcttctggtggaaaagattaaaccgtgctcgcatatgagctatcagagctaaatcgtcggaacagatattgacttgatttgattctcttatctgcggatgaaggaattactgggtatagagacgactc

SEQ ID NO: 16034 - DNA, 363 bp, Oryza sativa
  Clone ID: uC-osflcyp071e06b1
ctggatttgagtggtattcttacagtgttcttctgtggtattgtaatgtcgcactatacctggcataatgtaacagagagttccagggtcacaaccaagcacgccttcgccacattgtcatttatcgccgagacatttctatttctttatgttggtatggatgcattggatatggagaagtggaagattgtcggcgaaacattcatcccaatgaatctattgctctgagctccactattttgttcttggtgccggtcgcatgacctgcttctgtctcctcactatctttcttggcaaatttcgacccctaaatctgtcgatggaacgatctcctatttaaccagatagttatcattttggtgt

SEQ ID NO: 16035 - DNA, 307 bp, Oryza sativa
  Clone ID: uC-osflcyp071e09b1
tagagagagagagagatggcgtcgccgccggggccgtctaaaatgcgctcgagctgcgcctcaccgcgcgcgcgctcccatagccgacgcctcgccttctcctcacccaggaaagcatctcgagtgagggcatcatccatggctgacaagtcctcgaagaatgacatcattgcgcccccttccatactttctgcacacttttccaagcttggcgagcaggtaaaagctgttgaggcggcaggaagtgactggatccatgtagatgtcagggatggacttttcgtgcccaataaaacaatctgaccct

SEQ ID NO: 16036 - DNA, 417 bp, Oryza sativa
  Clone ID: uC-osflcyp071e12b1
tcttattgaattaaggaagttgatgttgtatcaagaaagaaagttccttattatgaagaaagacaagtatatgaaggtccagcacaaattgatgtgatacaaggtggtgctagagaatacgcttctgctgcttctactgccgtcaatggtagattaattgctcaccaaaaattacctggtcaaagaattaaggaagtcgatgttatttccagaaagaaaattccatattatgaacaaagagaattatacgaaggtccagctcaattacaagttattaatggtggtgaacgtgaatacgtttctgccacctcaaatgccaggggaggacgtttgattggacatagaactttaccaggacaaagaagcaaagaaagtgatgtcatttccaaaaagaaagttccatactatcaagaaaga

SEQ ID NO: 16037 - DNA, 89 bp, Oryza sativa
  Clone ID: uC-osflcyp071f04b1
tttttaaaaaaaaaaaaaaaaaaaaaaaaaaaaaaaaaaaaaaaaaagggaaaacgataaaaaaaaaaaaaaggtacaacactggggca

SEQ ID NO: 16038 - DNA, 212 bp, Oryza sativa
  Clone ID: uC-osflcyp071f05b1
gtgtgaaccccctccctcccttctcttcctctggtccttaccgcagctatcggggagcgccgccgccgtcgccaccgccgccaccgctaggctttccttccccttcccccaccagaagcttctcgccggagaaggaaaggaggaggagagatggctgatctcttaactgcccaactccaacctcagttaagataagttcaaccccaccaaca

SEQ ID NO: 16039 - DNA, 415 bp, Oryza sativa
  Clone ID: uC-osflcyp071f07b1
ttctctcgaagaaggagaagaaggagaggagcagccatggcgtcgtcggtggcagcggcggcgagcacgttcctggggacgaggctggcggacccggcgccgcagagcgggaggatcgtggcgaggttcgggttcggcggcgggaagaaggcggcggcgaacaaggcggcgaggccgtcggcgccgacgacggacaggccgctgtggttccccggcgcggtggcgccggactacctggacgggtcgctcgttggcgactacggcttcgacccgttcggcctcgggaagccggcggagtacctgcagttcgagctggactcgctggaccagaacctggccaagaacaacgccggcgagatcatcggcacccggtttgagaccggcgaggtgaagtccaccccgttccagccctaca

SEQ ID NO: 16040 - DNA, 471 bp, Oryza sativa
  Clone ID: uC-osflcyp071f08b1
ttttatgtcaactcctcaccttagtggcattgctgctctcatcaagggaacacacccagattggtcatccgcagcgatcaagtccgcaatcatgacaacagcttatgttgttgataaccagaagaaggcaatcctggatgaaagatacaatattgcagggcatttcgcagttggtgctggacatgttaatccttctgaagccattgaccccggtctgatctatgacattgatgatgcacaatacatttcatatctctgtggcctgggttacacatatgttcaagttgagataattgcaaatcagaaagatgcctgcaaaggaagcaaaataactgaagctgaacttaactatccatcagtagcagtaagggcaagtgctggcaagcttgtggtgaaccggactgttactaatgtgggagaagcaaattcaagcctacaccgtggaaattgatatgcccagggaggtgatga

SEQ ID NO: 16041 - DNA, 59 bp, Oryza sativa
  Clone ID: uC-osflcyp071f09b1
taggcgggcagcgaggagggaggagatcggcggccagcgtccagaggggcgcagaaggt

SEQ ID NO: 16042 - DNA, 542 bp, Oryza sativa
  unsure (1)..(542): unsure at all n locations
  Clone ID: uC-osflcyp071f12b1
cagggtgctgcaggcggggaccatattcgcgccaaggacaagaacttttactgctttgaggtccaagttcacttcactggagaactagttgacggtacgcagttcgtgtcaagccgagaaaatgacattccagagaggtttatactggggcaagaggatgtgatgcatggtttcaacttagctgtcagttcgatgcaaccaggggagaaagctatattcactatcccttcagcgttaaccatgacaaaagctggctcccctgctagcatcccgtcaaacatacctcccaaccaaacactacggtttgagattgagctcatcgccatgtttactataattgacattttcaaagatgaaggcatattgaaaaagattgtcaagaacgcagaacccgacagaaaacaatctcactcaagtgattttgtatttgtgaaatacgacgcatgcctgatggatggaacttcaatgtccaaatctgaaggtgttgaattcagccttaccgacggcttcttttgtctgcatttgcacatgctgngcatact

SEQ ID NO: 16043 - DNA, 414 bp, Oryza sativa
  Clone ID: uC-osflcyp071g03b1
tttcagggaagcctgtcatagtcaaacttaagtggggcatggaatacaaaggatacgtcgctactgcggactctaatatgaatctgtagctggctaatacagaggagtctattgatggacaattctctggaaacctgggagagatactgattaggtgcaacaatgttctgaatctgcgaggagttccacaggatgccgatatagaggatgcagaacgagataacctggacctatgcgcagatcgatttgcgtaatatgcacgatgacatgaacaattcaagagcaatgtaaaattgatgcacaggatgctgtgtgagctggatcttaactatggtcatgatatggctatattaggcattgaaactgacttcatattgactagtgccattgctcacatgtgtgagagatcatatt

SEQ ID NO: 16044 - DNA, 525 bp, Oryza sativa
  Clone ID: uC-osflcyp071g04b1
aaggtgggacccctggagggaccgggccgggatttccggggcggaccacacgcgcgtgtttagtgagatagaaggaaggtcgggagaagcggtcatgaaccagcttcattcgatgcctacctgaacatggcaagtggtatgtgagccgcagcaacacagatggctcccacggtgggtgatttgaccttgataaggttgaagaacctttcttctcaaataaataatctggttttatcagtgtactttcgagagacgggatgcaggaaaacatgaaatgcattgtttttgtgaaacgaatgactggtgccagaaggatatcaaacattctgcaaaacttggagagacttgaattttggaaacgcgagtttcttgtgggctgccactcatgatcaaagaacatgtaaggaataagatggatgctattgctcaacggctttcttctgtgaggtgaatctttggctgctacaagcgtaggcgaagagggacttgatattcagacgtgttgccttggtgtgcgatttgatc

SEQ ID NO: 16045 - DNA, 452 bp, Oryza sativa
  Clone ID: uC-osflcyp071g05b1
tccgttacgcgtgggctgctcatcctcctcttctactactcgtcctctttgctctattcacagctagcaacaagaaggaggcttacacatgcatgtgcacggtctctgccggacgcatatgaatcaggcatgaatagggggcacatcagcagctcggagctcatcgacgccaagctcgaggaacgccggatctccacggccaagcactgccccagctgcggcaacaagctcgactgcaaaccggattgggtggggctaccggcaggagtcaagttcgatccgacggaccaggagttgatcgagcacctcgaggccaaagtgagggaagaaggctcaagatctcatcctctcatcgatgagttcatacccacgatagaaggggaggacggcatatgctacacccaccctgagaaacttccaggtgtgaccagggacggcctgagcaagcactt

SEQ ID NO: 16046 - DNA, 481 bp, Oryza sativa
  Clone ID: uC-osflcyp071g09b1
atctgcaaaagtcgggggttcagaatcctaaccctaactactaaacccatgactttgtatccaaggctccaagcaaacaccgatacttcgaagggaccaagtgaaatcgaaccttaattcgacttggcccctatcccaattcccatcacacttcaaatccaccaaccgaacaatttctcccatgaatcaacgattgcctcaggaatgataaaaccagtattaatattatccatcgagatcgtctactcccccgcatcagcggcgcctatcgaaagctgagagcaagagccgtggatttacctggacgcggcggaggcggattcctcctcgagccaggcacgaatctggcgggcgttgcggcggaacatcgcgccggacttgcggatgtcggtggtgaagaggagcgccgtcgcgcccaccgccgccaccgtcagcacgaagtttgtcagcgccatctctctctctcttgctctctcgctcg

SEQ ID NO: 16047 - DNA, 352 bp, Oryza sativa
  Clone ID: uC-osflcyp071h03b1
gtggctccccatcgtcgtccccatctggttcctcgccatcatcttccccttcttcggccccatcaactccgccgtcggcgcgctcctcgtcagcttcaccgtctacatcatcccggcactcgcccacatcctcacctaccgtacggcctccgcgcgcatgaacgcggcggagaagccaccgttcttcctgccgagctggacggggatgttcgtgctcaacatgttcatcgtggtgtgggcgctcgcggcgggcttcgggctcggcggctgggccagcatggtcaacttcatcaggcagatcgacacgttcgggctcttcgccaagtgctaccagtgtcccaagcccgccccg

SEQ ID NO: 16048 - DNA, 394 bp, Oryza sativa
  Clone ID: uC-osflcyp079a02a1
aggcaaaaatcaaacggattgattattggcaaatacttgacattccatgattccaaaaggcacagctcctagaaattagaaacaagagggggaaaaaaacccatgggggatgaggttggcaaccaaaccaaaggcagcagcagggtgggggagagagcgttttatgaaacctatcattttgatgggcagacaaaatccgtaacacagggccagcttgtgcccaggaagaagatgaccaccacggcggtccacgagagcacagctggtcgacgattagcggcggtaggaccatggtttgggtgtgtttttttgttttcctactccttgtacttcatgctgtcgagggtgaagcccggcatgtcgaaagagggggcgaactttttgacctccactt

SEQ ID NO: 16049 - DNA, 359 bp, Oryza sativa
  Clone ID: uC-osflcyp079a05a1
gggtggcaattttttttttttttttttttttttttattgaaaggcaggggccaacaaacccaactggcaataaaaaatccacacgggtaacacaacaatggacaagcccccacccaaaaaaagcaaaattaaacaccaaccaaaccaaaggggccccccccccgagaaggcataaaccaaaaaatttccaaccagaaacggcaaaacggatagggggggggggaaaacaaaccccccaaatgttctgcccgaggaccctgactttaccccccaggggacggggggactggccagccccccaaaacccccatagggggccaagaaacacctaggacccgccctggcacaaggcaaaaagc

SEQ ID NO: 16050 - DNA, 376 bp, Oryza sativa
  unsure (1)..(376): unsure at all n locations
  Clone ID: uC-osflcyp079a06a1
aattcttttttgtttggtatgaanncagagatactgattgcttggtgagggtgctatatatatggcagaaacctcatggtcagaaacaacagtttaaaacgggtacatctgcctttagctaagctcacaaaacatcaaaaatttggcctatatgccgatgatagacagaagcattgtttacttacattgtgttaggcgcaaccctccctctgtctacttcactaattaccttatcaataagaaccttaaagatggactttacaatggtccaaacaattccattgtcgttcactgtaggaggctttttcactttttcatgccttgcattgcatccttttgctagccagccatcttcctttttagagcaccttatcat

SEQ ID NO: 16051 - DNA, 234 bp, Oryza sativa
  Clone ID: uC-osflcyp079a07a1
aaacaccctaagggtaccctacctatatttcaaaacaacgcttgccacccccaaaacccccccccccaacacaaacatacccgagccccccaaaaagttaacgcccaccagggggatggtcccacccacgccccaaccaaggggggaagcaaaaaatttctattccccccccaaggccccccacacccttcaaacgacacaaaaaaaaaaaccgcccccccccacccaaaaccc

SEQ ID NO: 16052 - DNA, 121 bp, Oryza sativa
  Clone ID: uC-osflcyp079a08a1
ataacactgtattgttattcatttatgggcacatagagacaaaaaaggcatgcctaattttgtcatggtcagggctgacaaaagaaaatggcttggaccggcttattttaagaccatacag

SEQ ID NO: 16053 - DNA, 468 bp, Oryza sativa
  Clone ID: uC-osflcyp079a09a1
cctaatcttaactccttttgttatccacaaattccacagtacacatcaatcaaactagcataacagtgacatgtacatgactgagaaaaaaaatcagagaatacatgcatcttttcaaaaggttgaattgaatccatggtgaacaagtccacacgaccacaaagaacagtattctcggagaaagccggtcctggtgtcctgataatcccaaacacagcacacaggagatgaacccaaaacaaatggatgtgaggggtacaggaatcatgtccacagaagggaatagatcagccactgcaattacgaacaatttcaactaaatcgaacgaattgaataaataataagcttacagaacagggagcagcgcgaggatgtcaggctatgaacaaacgaatctaatggaactgtgggctcggcgggtaggcctggtagaaggtgctgctgctttcacttgcaaagatcgagct

SEQ ID NO: 16054 - DNA, 435 bp, Oryza sativa
  Clone ID: uC-osflcyp079a10a1
gtcctttttttttttttttttgttttgaagacgatagaagttaattcattttgggacaaagtttgaattacaaaagttcatttattttgggatggcgggagcacacatttgcacctggcgtaaaatgacataaacagggtgcaaaaaatggggagatattcatcagatggaacttggaaagacatattatcattgacagggaggaacaaaatccaggacagcttctcccacgagctcctcccagactccaccctcaatttgctcggggatatcaaccaactgcgctctcatcgtactgacccagcatgttccttcaaccttgtgcttgacaactctctctatcatgaccccaggattatctctactgctcaccacgaacatgcgagccccagtaattcaagctttcaggatgctacagacttttatccccaatgc

SEQ ID NO: 16055 - DNA, 449 bp, Oryza sativa
  Clone ID: uC-osflcyp079a12a1
cgggacctctaagctacaattttatatgtccagcatttgttgatcaagccaatccttcaaaaacaaccacctagtgaccgcatgactgcatcatatcatgtacaacagagcatcaagctgaagacctacatgcaagttcgtcagcaaacagttgatacttgaagcatgttactcaataaactcatcatcggtgctgtcataatcactatcctcatccagatcttcatcttccacctcatcctctacttgctccgacaaagtgttcgtgtcaaaagagttatcaacttccatttcctcaatgccaatcgtatcatatttcatgcgctcatcgaatttggcatcagaacagtttagaagccatgcaagagagcatgtgaatcccttctttgccaccatctcatgccgtggccttacagtcgactcaaggccatatgtaaagaatgcaggga

SEQ ID NO: 16056 - DNA, 433 bp, Oryza sativa
  Clone ID: uC-osflcyp079b01a1
ggggagaaatgtactgaaccacaaatgtattgtttcatcagttgcaccatgatctatttacaaggcaacaccatgtactagtaagtattggaccattattgctgcgggaggatggtccaacaaaatgtttgctttcaagcaccaacaaaacatagcattattcatacaacagtatacaagcaacatgagcatgaaattgaacaaagactgacgtctgatggtgtatgcacattattgccctaacatcagcgaaattgcgtcttcatcatatatcttggaaaaactattatttgtgcgcaagatcacccagggacaaagtagtccatcttctccactggcagattcatcactgaagtattagcctcctcaaatggaacaaacacaaatggggtcaaacccctgctgtgggtaacaagaggaacttctggatcat

SEQ ID NO: 16057 - DNA, 489 bp, Oryza sativa
  Clone ID: uC-osflcyp079b02a1
gcattacaattattcaccagccactttattcagtcatcaggcagagatatattaattactcctctgtccgaaatgtgtatatatatgtagggaagtttataagagtggttaattagctgctagttatcgccgcagtcgacgaactggtagtcgacgatgaggtggccattctggtagccttgaccgtcgctgtcgatcttggagaagacggtgtcccagtctaaatccagccccccattggcgcactggtccacgatcctcgccgtgatctgatcccctgtcgccgtgttcgtcaccgagagacatttgccacatgcatcctgaccagtgggaccaacgggcccacagaaggcggtccatccatacttctggcgccattcaagcggcttgtcagcatcccacgtggcacagtacgcgctaacggccggggcccccaaatcccaattgtttttccgccgacggtagtagtggtacgtggcacgcaccgga

SEQ ID NO: 16058 - DNA, 380 bp, Oryza sativa
  Clone ID: uC-osflcyp079b03a1
gggggccaaataagggccaaaaggtgttccctccccctttggggggggcccggccccctggccccccccagggaaaaccccccctgttaaatcccccaaaaaattgggccgggcgccctcaacaaaaaggggggggccccccccccggccccaaatttagggggccccaaccccccctggaacaaaaacccccccaaaaatttaaactcgccccccctaactaaaaaggtgcccccaggggggtgggcccccccccccaaaaaaacccccccccccaaaaaggaccctcgggtggggacacccctccaggcccctatccaccttgactccgcaccccttggggcccccctcctgaaagcgggcacactcctgggggcccc

SEQ ID NO: 16059 - DNA, 441 bp, Oryza sativa
  Clone ID: uC-osflcyp079b04a1
cagtctaaactctcattcgcccttgttattggagttgttgattgtcttaacatagcacaaacaccagtcacgtgatatatgtatctaattggataccactggatgacatcaactcaaatatgagtagttagggttcaggatcagagcaaaatgttgaaaacccccctcactaaagcatcttgatctataaggctatacaagaatctcatctatcaacaaaagctttgtatcagaacaccagcgttgtcttgacaagtttcactggctgaaacccaatctgaatccgtagagaagatcagccagctcgaagcatctgcatttatcaagggcagtgagcggcattcttagctgcaggcagtgctcaccacaattatgttgacaaagaatgtgttcaatataccgcataagcatgatttcttgcttgcatcgaggtcacaacag

SEQ ID NO: 16060 - DNA, 490 bp, Oryza sativa
  unsure (1)..(490): unsure at all n locations
  Clone ID: uC-osflcyp079b05a1
gttataagccaacgggataactattaataactgctaagaaaatcatgtgtaaagaaaatttaacataattttttatgtacgctagcgagtagccgtgctactgcgcgggactttatttacaaaagcaacctttgaggttaacttgctttggacgggcgtcggcagtcatgagttcactgtgcggttgtacatgcggttggttgaccacgcgcgagctcgtccagccccaccggcgaacacgcgaggatgaagcgtcccaacggctcggcctcgaccgagggcgcgcacggtacccattcccatcgctccacggcgctgcccaccccgtcacgtagctcgtagagcacggctccgattgtcgggtcggccgcattgtacacgtaccctccggcggcgttgccgcacaccccgatcgacggggacatctcctcttcgtccttcctatngccgtgcttgtcacgggggaacagcctctcggacatcttccccg

SEQ ID NO: 16061 - DNA, 471 bp, Oryza sativa
  Clone ID: uC-osflcyp079b06a1
aaatcaaactgttgtttatcatagtaaatcttgccggagaatcagatgctcagaattcatagtgttcttcagcatcttacaacttacaagatggcgcagatatacaagcgcaactatcttaaagtaagctgtaggaggaaatggaaccatttctaacaacgggaaaaatataggttatagaaggaaaccatttgaacaaattaatagggaaataaattaggaggatcgtttccgtccgatctcaatagaactggacgtttgatacgtagatggcgtctggcatccagttgaccgggatgacgtctttggcgatgaggctcttgccggactcggtggtgacgcgaatggagaagggtgccttgagtggcgtgccggtgtccatcctccagatggcgccccacgacagcttcatgggccttcacgctggcaatccggccttctggaggtccatctggatgacgtcaccgtcgt

SEQ ID NO: 16062 - DNA, 278 bp, Oryza sativa
  Clone ID: uC-osflcyp079b08a1
caaatacaagcttattacctgcttgggggagctggcattgcatatttacagtctccttaggtgctaatgattagtgcttacggggcaaagcttattaagggggcataacgtttgttagatgaggtcggcatctatgctgcactaaaatgaatgggctactttattgctaacaaaaggacgatctcactatatcttaggcgatacacatggcatttatcaaacatctattgtcatttggagctgagtgtgccttgtttaagagaaagatctcaacagtc

SEQ ID NO: 16063 - DNA, 343 bp, Oryza sativa
  Clone ID: uC-osflcyp079b09a1
cgggggggaaaaaccgccccacaaaattttccttctttgagggaaaaaacctttccccccaactatttggggaaaaaagaaccccccccctgtttctccgggggggtgttaacccccccttctttttaaaaaaagggggaaacccccccccccaggaatattgttttggccaattttttccccctttttttgcacaaaaaaaaaaaggcaggggccccccccaaaaaaatacattttgcccacccccccttttcccacccaggggaacaaaaccctaaacaaaaagggggtttccctttgggaggggcccttttttcccaaatcttcacaaaaaatccccccc

SEQ ID NO: 16064 - DNA, 404 bp, Oryza sativa
  Clone ID: uC-osflcyp079b10a1
acggcccgcccttttttttttttttttttttttggaccgacctctctccttaacttgggggttggttctcatgtacaatgagggaaacacacacgcacacacacatgggtgcactgtatctctctgagcaacgcactcgattgattcgaattcgatccgctagggattcaagagaagctgagatagagatttctacgaacatgctacgctgaaggagctggttgggctatcgacgaacttactggaggccttgaaccacctcttgtggccggcctggaccttgcacacggacagatcgccgtcgttgacccgggccgaaaccaactgatgcttggcgacctcttctacgcccggcattgtactgagaaacctaacgctggaatagtggttccctcccaccgccg

SEQ ID NO: 16065 - DNA, 496 bp, Oryza sativa
  Clone ID: uC-osflcyp079b11a1
actcttgtatagtatagcccatatctttatattatatgattagtaacaaaaacttgtcatgcccagctatggcttgggcgcgatctgatacacagaacaaagagaaaacattacaaggagaaataattaatagcaagcgtcaagccggcctgcttaaaaggtgtaaaggcagctgccgtcgtcgctcctcgccgttgggtcgaagttcttggcaacagggtcggtgcaaccttccggcacaggcaggttacctgcttgctgtgctccttgccctcctcctcctatgcaggccgcctacgatgcatcgatgggatgcgaatagctagagatcttttattcagctggatggcgcagaaccgtagaaggaaccagtcttcatggcgtcggagttagcgtcaccaagagcagcctcgctcaagtactgctcagccagctgcacacgcttgacgttctcctgcttcttcacaagcatgtatccgtactccatgagcttttc

SEQ ID NO: 16066 - DNA, 438 bp, Oryza sativa
  Clone ID: uC-osflcyp079c01a1
agaaagcaaccgtatttctttctacattgaaatatagaagatgtacattgaaatgtgtcaagaagagatgtaggagcaccctcatggagagggatttttagaagttccattgcatggtttcacaagttatgcaatgaccatcctactttcttctagctgtaatatttccaaaactagttacaagaaatgcgaggatgcccattgtcattgatatggtatggtgatgaagagattcacgaaatatgaatgtggagctcattaaacttttgccgcttcagtaggtgcaccggccctctcagcaataatctgctcatagagatctctaatcttcagtcctacgatagtttggaagagacctgttccattgttgctgccggggaagtctgcatgctttagcatttgctgtgtcacctcttcataaaatttggttgagaggtt

SEQ ID NO: 16067 - DNA, 475 bp, Oryza sativa
  Clone ID: uC-osflcyp079c04a1
ttttttttttttttttttttttttttttttttttttttttttttttttttttttttttttttttttttttttttttttttttttttttttttttttttttttttttattttttttttttttttaaaaaaaaaaaaagaaacacgttttttaaaaaaaccacctgggggggaaaaaaaaaaaaaaaggataaaaaaaaaccctttttttttttggggggagaaaaaatattgaaagaccataaaaagccccccctctaaaaaggaaaaaaaccttggtttaaatttccaaaaaaaaaaaaaaccccttgttttttcggtggggggccaaaaaaaaaaaaagggggggaaccccttctctttttttaaaaaaaaaaaatgggttaattatgccaaaaaggcacaatttttaaaaaaaacccccatatatatttattatttctccctaaaaaaaaaaaaattcctctaaagaggggct

SEQ ID NO: 16068 - DNA, 376 bp, Oryza sativa
  Clone ID: uC-osflcyp079c05a1
aacaaaagggagttctatctttcctcattttaccagcaaatttatgtaacgaaaggcaccctgcgaactgcaggggctgatacggtaattaaattgtctcccaaagatggactatgggagtaaaaacaagcatagcagtttttgttttgccacttaacccaacaaaatggggctaagaagacaccgggtagcgattacttcacgatgcaaatcttgatcacggatgcgacgccaatacggtgcagagcaacaacagcatcaccaggcttgcacaactgcttttgtacagctgacttgagagcagcatcaagggtgacctctgtcgactccgaatcgggggctttggcagaaccctcagccaggagaggaacaagac

SEQ ID NO: 16069 - DNA, 510 bp, Oryza sativa
  Clone ID: uC-osflcyp079c06a1
aaaatgtatacagaatataccaatgaacaaatatggtttacaatcaacatggatgtcagtaatttccctatgggtatatattcacaaggaagcaatctcaaattctttcagtattatagtataactaatgctgtatgtactgcggtgaggagtgcatccggcaaacccattcagcgcttcaaggaagagaaccacagaggattccactcttcagggttccaagctccaactatcaggaggggccaaaaggccaagcaataaaatccatgtccaaagcaaagctcccgcgtggttactaaaacaataaccagtgcttcttcctaggcttgtatttgctagggagatctcgagcatcatatagcgagttatagtgaacttccgaccagaaacttagccaaatttctctctgtggtgcctgatactgtggaacaatttcaacaaaacatgtgtctctgaatgatgttagaaggcatatttttgcagcaaacttatcagcagcagcttgcaatg

SEQ ID NO: 16070 - DNA, 444 bp, Oryza sativa
  Clone ID: uC-osflcyp079c07a1
agttccaagagcaggtggattacatcagactgaacttacacccaggtgcaattcagcacatgtaaccactggctaaattgtggggtgagggtcctacatatgagccctgcgcccagaattaatttttgacactgagatcagactaccaattaacacctatattaatttgtgcccactgcccattattccctacctcaccccgggaggacaagaagttacaggccggaattcgcagtgtgtatgcacaaaagaactcagaccctatgctggtcttgacaaggcaagagccttgtcccattgtccatggaccttctatgatatgactgccatctttattagcaccttcccgtccttgacaaccctgtcggccagctttgccgtgccgaggcgtcccataggcgcttgagctagcgttttgcccttggcgccgccaccgtggacgac

SEQ ID NO: 16071 - DNA, 401 bp, Oryza sativa
  Clone ID: uC-osflcyp079c08a1
aggtaacaaaagatacttcaatattggaattccatacgaaataactgtagttcatgtgctcgaattacaaaacctttctgaacagagtactgaagcaaaagatgaatccaaaacaagttctagcgtctcatacaatacaaaagcagggaagtgcaaaaacatcttaactcccaaaccacaaaaggaacaacagacagtaacaccggtattacatatccagccttgcaaagcggcagagctcaagcgccaggcaacaagtaaacatgcttctgcctcttttggcaacaatgacgagcacctagaacaaccgttcaagcagtgcagcaatcaaatttcagttattgtgctcatcagcagcttggtgatactggtagtcaccttcatcatatgcctcgcccttt

SEQ ID NO: 16072 - DNA, 200 bp, Oryza sativa
  Clone ID: uC-osflcyp079c09a1
cttattccactccatctcgagcttattgttattatcaaataaaagaggtaggtgatgctaacaaccaaagaaccgaattaaatctaacgactgacatgatctaaataaaaggaaggaagctgaatctgctgatgctgctaggggggcaggtgctggagatggaggatggttttggtccatcaaatagaattcgaattggg

SEQ ID NO: 16073 - DNA, 304 bp, Oryza sativa
  Clone ID: uC-osflcyp079c12a1
attctaaacagaaaatacccctggacataggtggggttcattgaacaagcatggcacaaacacccctatggggatatatgcacatgaatggaatcccacggtcgaccagaactcaagaataactaatgcgggttgaactgcagagcggagtgcataaaacaccacccaactaaagcttcttggtctataacgacatacgagaatactatttatgaacacaagcttcatctctcaacaccagccaaaagttgacaagattaactggatgaaccccgaactgaatccgcggggatgatcaaccagc

SEQ ID NO: 16074 - DNA, 139 bp, Oryza sativa
  Clone ID: uC-osflcyp079d01a1
caagggttgttttaaacgaagcataaatgcaccattacacgaagaaagacaggcttataaccctgaaacaagaaccactatgaaacaatgctgcaaaacggttcccgtaaaccaaaaatgacgagacccacacaaatcc

SEQ ID NO: 16075 - DNA, 251 bp, Oryza sativa
  Clone ID: uC-osflcyp079d02a1
acggcccgtccttttttttttttttttttctaacccagccattggacaacattagttgggtaggatatactaatacagaagagattgtgcaagaacctctgaacgagaaagaggtaaccggcaggagttccgagcccaccagtttggcctgcccggcaacgaatgcagaacgcccacccggttcaggggtcctgggcgtctgaagcatgacacatgattggcacacacacgaacgaacgcatgcattaatg

SEQ ID NO: 16076 - DNA, 219 bp, Oryza sativa
  Clone ID: uC-osflcyp079d03a1
ccaagccattgtacaacatttgtttggcagcatatacttatacagaagaaattgtccaagaaaatctgttcgagaaaaaagaaaccggaaagagttaaaagcacaaattgttagccctgccctccagcgcatgcagcacgcccaccctgatcaggtgtcctgcacgttttagccatcacacatatttggtacacacacgaacgtacgcatgcatgaatg

SEQ ID NO: 16077 - DNA, 486 bp, Oryza sativa
  Clone ID: uC-osflcyp079d04a1
agtagaacaacacgtattcaactctcttgggtgcagtaagcacaattctgttgtcgcaatatgtttattccacagcaagactttcatgtctttagtcttagtacaaaggtcaggaacttcaatcaaatacaagttacagcccgatcagattttgctgtaaagcatgataaacatgtatacagtagaggcaccatcattcttctttaaacacaatatatccatcatgaccaacaatagtataaacctttgttataaatagtgcccgaaacaccatgtctctcaagctcacatatagcaccctaccagaatggaaagagcttggatcaacagtccaagattatccaagaaattattcaaggctaaaccattcgctccccgatagaggtagggtacttgatactgcttccgtggcccaatgcagacactgctttgcagtgccgctgtggatgcaaccatgcaagaacttcgaagtgcttcgaagtggat

SEQ ID NO: 16078 - DNA, 93 bp, Oryza sativa
  Clone ID: uC-osflcyp079d05a1
ccttattgacatgataacataagggaaaaaggttcattttaacaggacaaatttaaacacgaccaaacaagtgagtttttacaacaaagggcc

SEQ ID NO: 16079 - DNA, 223 bp, Oryza sativa
  Clone ID: uC-osflcyp079d08a1
ctcaaccaagccattgtacaacaatcgttttgcaacatatacttatacagaagaaattctccaagaaaatctgttcgagaaaaaagaaaccggaaagagttaaaagcacaaatgttagccctgccccccagcgcatgcagcacgcccaccctgatcaggtgtcctgcacgtctcagccatcacacatatttggtacacacacgaacgtacgcatgcatgaatg

SEQ ID NO: 16080 - DNA, 81 bp, Oryza sativa
  Clone ID: uC-osflcyp079d09a1
actggtaggttatatttatgtcatttgaaatggggaaagaatatgacgaggagaacccccaaggcgagggaatcctagaac

SEQ ID NO: 16081 - DNA, 488 bp, Oryza sativa
  Clone ID: uC-osflcyp079d10a1
attaccaaacctcattgacatgagaacatacccaatcatgcacaatttgatggaaacatataacaagtcaaacaagtccattttacaagaaagggcccttttttttcactatggttatgtatcacattgctgttttcttcccactgtgtaacctcagtgcacccaggtaaagaaacttactgaaaattcagcaagttggcaatcactttggcccagctttcccatacgaatcacgcagggtaaccgtcctgttgaacacaatgttctcaggtgtcgagtctgtgtccactgcgaagtagcctatccgctcgaactggaacttgtcaccaagaaccgcagtcgcaagcgatggcacggcgtatgcacccttgatcacctcttttgagttcgggttaagatcacccaggcaatccttcagtttagcaggattctcacagaggaataatttatcaaataatcttacttccaccttaagcggttcaactcca

SEQ ID NO: 16082 - DNA, 310 bp, Oryza sativa
  Clone ID: uC-osflcyp079d11a1
ttgcatttttttttacttgcttgatgtattcgaaagcgtcctgggttctttgtttgtaaatgaaatcttagcactcataatcaaagtttttacaataaggggtagagtatcacaagatggtggattgtagcatcaaacatggtatgtgctgctatccttcacaaatactagaatgctatgagataggccagtattcttatgggcattttctgtaagaaccagctggaaaggactgcatactttactgcggctgctgttccttaactggcagcgatagatttaagcagtaactgttaacccaccacaggaa

SEQ ID NO: 16083 - DNA, 440 bp, Oryza sativa
  Clone ID: uC-osflcyp079d12a1
attcaattaaataatcatagtataacttagattaaataagtgcttattaattgatttagtgagctataaactcaaatcgttttccactgcaacatacgggctctagactagtaatgaaaaataatataaccaagtgttcgaatgaaaatagtataactacgtgtttcgaatgaaaagtgcatatcccttgctcaccacttaggaacctcacacatcgacaaggtcatctccctgcgaaaattccctatgatggctcgcctttttctccttctccgctctctgccaggaagagtgcttgtgtcatcgggaggttgcgctcaatccgccatcctcattgccaaccccaccccgccctgccgtcggagtcgcaccggtagcattgctaaggagcacggcgaggcgggaatggccctcttgatcggacgctgctgctactcaac

SEQ ID NO: 16084 - DNA, 466 bp, Oryza sativa
  Clone ID: uC-osflcyp079e01a1
aaaccggaacatgccaacatagttacatagaagcaatgagctttttcatcggtgtctggaagataaaaaaacaatttaaccacctaaataacacattgagtctagtctccaatagtaacagcacctacaccagaagagctagctagagatgcaacggctacagttttcttccctgattcaggttcagacattacactagataggggggctagttaggatccatggcgtcgcaccggagtaccttgagtaccaccgccacgacatttcctttcgcaagttctacgggggtcagacgggaccaaggtctggccactgatgatgatggggaggaaggagctcactcccaggataagctgggtagccctggctggccatggttggtggccgtgacaccttggtttagcgggctccccgggccgcccgttgatttacttaattggccctctgttggcggtttgtttggccc

SEQ ID NO: 16085 - DNA, 440 bp, Oryza sativa
  Clone ID: uC-osflcyp079e02a1
ttttatttggttatactacgattagttgcttgcgtcaatggggatcacttttaacaatttaacagggctgaacacgtggcagaagcaacccaagggtccgctacactacaccagatagcaacaacgaacataagcaacttgactgatcatcaaagaggaatggacatggtagcttgtatctctcactaccaaagaaaccttcattttggtggctcgatgctttacgagctgcagctgtgatgcttttcatggtgaaccatcttcaagcagaccatgatcttgagctattccatggttaaacccatactggcccgttattactttcttacggtcccgaaacggagcttcagatccctgcgctggtggaccgtctttttgacactgacgtcccgttttaaccaccccacgcgcttggtgcccgaacgcattgctttcctgcc

SEQ ID NO: 16086 - DNA, 105 bp, Oryza sativa
  Clone ID: uC-osflcyp079e06a1
cactactaaaatctctcttctttttacaaaaacaacacttattcaaggttggggggcgctctaggacaaatcccgtatccaaaatatgttaattccacatcaaga

SEQ ID NO: 16087 - DNA, 315 bp, Oryza sativa
  Clone ID: uC-osflcyp079e07a1
agggcggcctgtccttttttttttttttttttttttttttttttttttttttttttcaacgggtttattttcaacatattttacatggaagcaatttagctttttcatcggtgtttggaagataaaaatacattttaaccacctaaataacaccattgggttttgtttccaatagaaacagcccccaccccataagagtttgctagaaaaaaaaacgccaacagtttctttccctgattcaggaaaaacctttccccttaaaaggggggctagttaggaacccttgcggtctctacgggggacccccgggtccca

SEQ ID NO: 16088 - DNA, 342 bp, Oryza sativa
  Clone ID: uC-osflcyp079e08a1
actagatacccttttaattacttgatagcaataacgaaaaacagtttgcaattcaaaaaggcagagcgcgtgacagatccgacaataaggcccagtacaaacaacaaaaaacaagaaccaacattttttctcactgctcatcagaaccgatttacagtctctctctctctctcactaccaaatcatctctcatcttgctgttccaaagctttatgcgttccagttatgatgctcttcaggttgaagcagcggcagcgacgacatgatctgctgcatctcgagggtgaagtcgtcgtcggtggtgacgacggacgacggccccggagacggagccgacgaccc

SEQ ID NO: 16089 - DNA, 366 bp, Oryza sativa
  unsure (1)..(366): unsure at all n locations
  Clone ID: uC-osflcyp079e12a1
ttgagttttttttttgngaggggaacaacacgtattcaagtgttttgggtgcagaaagcacaattctggtgacgcaatatgtttattccacagcaagactttcatgtctttagtcttagtacaaaggtcagggacttcaatcaaatacaagttacagcccgatcagattttgcctgaaagcatgataaacatgtctacagtagaggcaccattattcttctttaaacacaatatatccatcatgacccacaatagtataaacctttgtttttaataggggccgaaacaccatgtcttttaaggttacattttggaccctaccataatggaaagagctttggatccaccagtcaagattttccaaga

SEQ ID NO: 16090 - DNA, 500 bp, Oryza sativa
  Clone ID: uC-osflcyp079f01a1
atccatcaaggggaattcaatccatagttatcttgacagcaaatagtttggtaactttgaaactccacagtacaatacggcgttctagaggtccagacaaagagcatcaaagcaagaatgaagagaaagacaattggaatcacataaaaagatggcccaaagcacactaatttttattacaaccgccacgacagtcttgatcgtactgactctaaggcgcaaaatacaaatcggcattaatcttttgcggatatcccgctctctaaaggcttcttattcctcagcaaatcccagttcagagagcttgaggtgggcctcggcgtaatccgcaaagaaggcgtcctcatccgcagcatatttctccaccagtggacggaaggctgggtcagccatgagggctttgtcacttggcagctgaagaaggcctttcttttcgccactcacaagctcggtgaaagtagagttgtcaaagatcaaagggttggacgttcaggctccct

SEQ ID NO: 16091 - DNA, 355 bp, Oryza sativa
  Clone ID: uC-osflcyp079f02a1
atggggaaccccgtttattaaaaattaaaggggtttttaaaccggttccgtaaatttcttaaggggagaaataccgttgccaaattggggtacagtcctcgaaattaccaagatttttcccgttttattaatcgttgggattaaaagcatgaaccacccattttccaggggggcacggagtacccgtgttgtttgcgcccgtgtggactcgaccagatttttttggaaaaattaccttattaattaattggggggctctttgggggcgccgattttggttattggttggcttaaagttcccccgcggaggtggtcgataggcccccacaaccctgggaaggggccggtcaagtgg

SEQ ID NO: 16092 - DNA, 475 bp, Oryza sativa
  Clone ID: uC-osflcyp079f03a1
agcaaaggatataatcagcagacaagagctttcatctttagtttggtcaatataacacagggaagcgtgataacaataacatttgactcatgacataagcagttccatgtttactttcacagaaagaaagtattctgctacaacatacaacttcattgccgacaaacaggacaaacaagagctatgcatggaggattacagagtggtaggtccaaacctaacataatctatatcacccggttttcggtaacattttacgcccattactttctacccattcttttctttgtgtttccatctagcagttggtgtcatatacagccaggccttgtagttctggaccttccaagcgtgggttcttccaaagttgcttaggggaatgtgctcaaatggccctgatgtaggaattgttccacacagatcattgcttgaaacatcaccaacttaagacttgatatttggggcagttcccctt

SEQ ID NO: 16093 - DNA, 412 bp, Oryza sativa
  Clone ID: uC-osflcyp079f04a1
aaacgcaaaagccacggttattggaagcccagcaagaactttatataaaggggatcactaataacaatgatgataaaaccacatgtggaaaggaggacgatgatccacaggatgggacaagtaccgtaggtacggccattattggaggattacacaagagcacccaaacgcactcacccaaaagacgaagaaaaaggagctaatctaaatggcagatgagcaatgtagtagtagtggtagcatgcaaccaaatcgaaatggaatgagaattttttttggcgggattttcttttttttctctttccttttttttttacttctcccagcacaaatgcaattcaccagatcgtccgatcaatggagcaaccggagcgacacggcgagctgtggaggacgatgacgaggatgtcgt

SEQ ID NO: 16094 - DNA, 459 bp, Oryza sativa
  Clone ID: uC-osflcyp079f05a1
agggtcaaatccaacttattcataaagcatactgctgtcccacaggaaactgtttcataaaactaacatatcatacggactcgatggtccattaaaccagacacaagtagacatcagcaccacaaatacttgacgaacagaggctcgggatgaccaggcacatcggcagctccaccaaactggctgattactgaccaccacggaggcggagcaccaggtggagggtggactccttctggatgttgtagtcggcgagggtgcgtccatcctccagctgcttgccagcgaagatcagacgctgctggtctgggggaatcccctccttgtcctggatcttggccttcacattatcaatggtgtcggagctctcaacctccaaagtgatggtcttcccagtcaaggtcttcacgaagatctgcataccaccacggagacgaagcaccaggtggagggtagact

SEQ ID NO: 16095 - DNA, 80 bp, Oryza sativa
  Clone ID: uC-osflcyp079f08a1
gcaaaggacataattattagacaagaggggggattttaaactcgggaaagctcacaccggcaagcatgataacagtacca

SEQ ID NO: 16096 - DNA, 417 bp, Oryza sativa
  Clone ID: uC-osflcyp079f10a1
ggccaattaaaacgcaaaaaccacgggtgttggaagcccaccaagaactttatattaaggtgatcactaataacaatgatgataaaaccacatgtggaaaggaggacgatgatccacacgatgggacaagtcccgcaggtgcggccattattggaggactacacaagagcccccaaacgtactcacccaaaagacgaaaaaaaaggggctaacctaaatggcaggtgaccacatgttgtatgcagtggctgcatgcaaccaaatcgaaatggaatgagaatttcttttggagggaaattccttttttttcttttccattttttttttacttttaccagtaaaattgcaatttaccagattggccgatcaatggaacaacccggagcgacacggtaagattgggagggccattaccag

SEQ ID NO: 16097 - DNA, 66 bp, Oryza sativa
  Clone ID: uC-osflcyp079f11a1
ggtgtggctttaacaagaaacagcttgcattctaatatacctttggaaaaaatcatacccagaggg

SEQ ID NO: 16098 - DNA, 313 bp, Oryza sativa
  Clone ID: uC-osflcyp079f12a1
agggggtcaaatgcattcaattgatatagtgtcgaccccataatgttgcacaagcaagtgagatgagcaaaaccaggaaatatgtggccccttccaacgacaataacgcctttctcctgctgtccaccctaacagctcaccatgacactccacatctctgcatccggcatcttagtagaaggtgacggtggcaatggcagccgcgacaccggcaacggcagcgcaccttttgagagcaccggcaccggagaaatcggcgttagccgcatcggcaggtccatcggcgacgggagacaccacggtggcgaacggc

SEQ ID NO: 16099 - DNA, 249 bp, Oryza sativa
  Clone ID: uC-osflcyp079g01a1
gataggatcaaagcatttatattaccacgactgtttaaggatggatttgaggagctctacttatacccgaaaatacagttgagggacactattttagaacagccgactgctttgccaacatggctggcaagctgagcctggcagtttacacaaagaacaggcgatcactattgaccaaacggtgacgaacgaagaaaataccgggtctttgttgtctgaagatacactaagggggtcggttggtcttat

SEQ ID NO: 16100 - DNA, 288 bp, Oryza sativa
  Clone ID: uC-osflcyp079g02a1
aacgcaacatagatcttattaagggatcaagttccagtcacaggaggagataagaggcatagagcagctaagcccatagtaattacacgcagtttacctggcaaggtaaccgctttttaagaggggcgcacgcgcacttaacacatatctccgggacaaatataccagttgcacaacaccacacacaggttataagcaagcaggccctgagacttgagcagcagccccgggggccggggctagccttacaccttgtcacattatttacgcatatacacacatagctag

SEQ ID NO: 16101 - DNA, 364 bp, Oryza sativa
  Clone ID: uC-osflcyp079g08a1
aactataattctgtttggctgacaaaattttggaccaaacactactcttataatggcaagagcaccatatacaaatggaactcaaaggagttcatacagcatggaacaaggattcagttaaaaaaaaaagaatgatgcactacaattaaggaccgattatttaatcatatagtagaaactgacgttgaacggctctgcttattcaaattagagttccaaatcaaaaatcctgccaggaagggaaggtggcaacaaaaaggcaggcatcttggagtacccccctgcttctgatccagatcagcatacaatacaatttggggaagctgaagctagggaccataatgctactgatcgatctaagcac

SEQ ID NO: 16102 - DNA, 465 bp, Oryza sativa
  Clone ID: uC-osflcyp079g09a1
aattcatgtagcatatgacagtataaataatagaatcaaacgtagataagttcacatatcactgaactcgcgtacactggttcagtacacatgtctcgcacaacttttatggtagtctatggctcataaaccgacttgctaatacaccaacacaaattaatcaagcttgaaccttaaccggcatcgcatgccgatcccgtcttttgacgttgcagtaattttccgttcattagcctctgcatacttaccactgcagcttaagcgttcatgcgagccgggtactgctcgacgcagtccagccacgggctgcgcgccgggcggcgcacgcggcggacggcgcgccacacgggcgctgttgcacttgaacccggagccgaaggcgagctgcccacgcggtcgccgcggcggacgcggcccttggccttcaggtacgccagctcgtaccagatgctgctgtcgacgtgt

SEQ ID NO: 16103 - DNA, 359 bp, Oryza sativa
  unsure (1)..(359): unsure at all n locations
  Clone ID: uC-osflcyp079g12a1
cnaaccanggaaaacgcaaaacaccaggggtattggatgcccaaaaagaactttatattaaggggatcactaataacaatggtggtaaaaccacatgtggaaaggaggaccatgatccacaggatgggacaagttccgtagggaccgccattattggaggattacacaagagaacccaaacgcacttacccaaaagacgaaaaaaaaggagctaatctaaatggcaaatgagcaatgtagtattggtggtagcatgcaaccaactcgcaatggaatgagaatttcttttggcgagatattcttttttttctcttgcctttatttttaacttgtccaagaacaaattggaattcaccaaa

SEQ ID NO: 16104 - DNA, 268 bp, Oryza sativa
  Clone ID: uC-osflcyp079h04a1
aggggggagaacacgacacaaccaaataaatggaccccttcaaaaaacggggggggaagcgcccaaccgcacccaaggatgggcgcccccaccccaaaaaacaaaaaacccccccccgccaagcacacccgggagaaccccaaaaaaaaaaaaaaccccacaagaaaggaaccccaaataacgggccagggggggcacacgccccaaaaggacagaaggggataacccgggaaatggggccccggacaaaaaaaacgaaccgggggga

SEQ ID NO: 16105 - DNA, 410 bp, Oryza sativa
  Clone ID: uC-osflcyp079h05a1
ggacacacaaacaatagtttaatttattagcaagtcaaaatttcttgaaagaataccatcgactcacttgtgtctacaagccttgagttatacttcttgcaacacagacaacactacagataccatacattcattttacctgtttcactcgcttttaggacgttctataacctcacatctggcgctaccatgctgaccggaccaaaaccttgttttccattggagggaatggaatgaagctctctctctctcttttttttagctaactagctgctgactgccatagacagggtaggctccatatgcagcagcatacatgttagggtgcggtcctgtgtgaggcataacccgttccacccgtataatggcgtcccatatctacttatttggtttctttcgggtgccaaaat

SEQ ID NO: 16106 - DNA, 343 bp, Oryza sativa
  unsure (1)..(343): unsure at all n locations
  Clone ID: uC-osflcyp079h08a1
tttttttttttttttttanctttccgggaaatctggcaaaagctttttctcagtcttggcatcctctctgaagagagattacacagggcattcattcagtttgtcaatgacccccaaaaaaaaaagggtaaaatgcagagactaaactttacaatggggcatcagctgactacatctgttgtacattttgggggttgttcttctggcacatgaacagttcccattttacaacacatcacatgccaaaaagaaaaacacgaaagaaacacaaaaaaacgaaatatgatggaagggaccacaagtgttggccaattcctcaggtccctgcaaacgctgtgcaacg

SEQ ID NO: 16107 - DNA, 459 bp, Oryza sativa
  Clone ID: uC-osflcyp079h09a1
ataggatcaaaacatttctattaccacaactttttaaggatggaattgagtagcaatactttcaccccaaaatacagtttagcgacactatcttagaacagccgcttgctttgccgccatggctggcaagctgagcctagcagctaacacaaagaacacgagatcactataaaccaaacggtaaccaacgaagaaaatacagggtcttttttgactgaagatacacgaagcgggtcggtttcttttatttttagtctgctctcctcctcgatgatgggtgtatgggaatggcaatggcgatgggatcttggcttaattgaggggaaaggggcttcgcccgttccactccttgaggcaagtcgagcatggggctgcatgaggcttgccctggctgatgccgaggaacaccttgttgcactcctcgccgggggacttgagcttttcgccggtgaggaatac

SEQ ID NO: 16108 - DNA, 451 bp, Oryza sativa
  unsure (1)..(451): unsure at all n locations
  Clone ID: uC-osflcyp080a01a1
tccccgcgcgcctcccgccgtcgccctgtgtagccgtgcaacacaccgccgcgcgggcctgcgatgcctcccccggcaccgcctccttcgacacggtgctggagacgctgatcggcggtgaccacttctcggaggaggaggcgctggcgacgctccggctgctgctggaggaggagatcgaggcgcgcatcgccgccttgctcgtgctcctcagggccaagggcgagacctacgaagagatcgtggagtcggctaaggcgatgataggctgctgcgtccgggtcgacgggctcgatgacgctcggctacattgtcggcaccggcggggactgagcggacaccgttgacatcttcaccggcttcactgatcctcgccggcgcgnagggtgccaaagtcgccaagcaagggagcagagctagctcgttcgcctgcggcagcgccgatgagctg

SEQ ID NO: 16109 - DNA, 215 bp, Oryza sativa
  Clone ID: uC-osflcyp080a01b1
ggggttttattggtggtttacttgggttttgtttatggtgatgaggactgaatgatggtattgtaagacttttcggagacagaaagatggtactgaagaaaggtgtaggagttttgataggcaaaatgggcgggcaaagaacagatggtgcagggacgaaggaaggagctaagggcgggcgaaggcaaatgtgagaagggacgcatggggaagag

SEQ ID NO: 16110 - DNA, 498 bp, Oryza sativa
  Clone ID: uC-osflcyp080a05b1
atataatttgagttccaggctagaggtgtgcagactcatggacatcatcatcaactcactctacagcaacaaggacattttcctgagggagctcatctccaatgcttctgatgctttggacaagattaggttcctggctctcactgataaggaggttttgggcgaaggtgacactgctaagcttgaaatccagattaagctggataaggagaagaagattctctccattcgggataggggtattggtatgaccaaggaagatctcattaagaaccttgggaccattgccaaatctggaacttcagcttttgtggaaaagatgcagactgggggtgacctcaatctcattgggcaattcggtgttggtttctattcagtatacttgggtgctgactatgctgaagtgatcagcatgcacaatgacgacaaacagcacgtctgggagtccaaagctgatggaacattgcctttctctgcagatacatggaatgaacccct

SEQ ID NO: 16111 - DNA, 493 bp, Oryza sativa
  Clone ID: uC-osflcyp080a11b1
tttaaaacaagccaaggaagcgcctgctccccgagcagaggtttctcccaaagatgagtcccgcgtgaaagcaatagctaagccatctaaggctaaatcctctctggatgctgatgatgactatgaggccgagtctcccaaggagaagccaaagcctaaagaggttgatgtagctaagttgaaagagatcaagagacaggaggagatggagaagaatagacttgccctggaaaggaagaagaagctggccgagaagcaagcagcgaaggcagcagcccgtgcacaaaaggaggcagagaagaaactcaagagagaggagatgagggccaggaggagggctggggcagctgacaccgaggcgtccactgaatcggacaacaggtctgatggagcagcggaggcacaagcagaggacgactccgctcctgcttctgctccggtgatgagagaacagagggagagtgtccggtacagcagaaacgtcgtgaccaag

SEQ ID NO: 16112 - DNA, 329 bp, Oryza sativa
  Clone ID: uC-osflcyp080b02b1
gttttataatacacaccctattaagccagccatggaggagcatggcggctagcgcggcggatagcaccgctgatgatggacgtagcttctggcgcggccgtcgcggcgaccggggatggcgcccatgctggcgccgtggccctcgttagaaggaggagaagtggttgcccgtaacaaaactaccgacgactcgctaaggaagggagggtctccaggatcgaggagatctaccttcactccctaccagcaaaggagcaccagatcgccgataccttcgcaccgacgctcaaggacgaggcgattacgatcacacctgctcagaaggagac

SEQ ID NO: 16113 - DNA, 501 bp, Oryza sativa
  Clone ID: uC-osflcyp080b03b1
atcagagatcaggtagaacagtgagagtgaggtgcagaaaaatttgagctgaagctgaggatggcaacatccatgatcacctcgccgctggtggcgccggcccgggccaagggccttccgtccatctcccgccggggatcctccttcgccatcgtctgcagcggtgggaagaagatcaagaccgacaagccctacgggattggaggtggcatgtcagtcgatattgatgcatctggcaggaagagcacggggaagggcgtgtaccaattcgttgacaagtacggcgcaaacgtcgacggctacagcccaatctactcgacggaggaatggtctcccaccggtgacacctacgttggcggaaccaccgggcttctgatctgggccgtgaccctcgccgggctcctcggcggcggcgccctcctcgtctacaacaccagcgccctcgccggctaaatttcacccaaatccagtctatgtatgtaacaccaagctgggtgtctg

SEQ ID NO: 16114 - DNA, 472 bp, Oryza sativa
  Clone ID: uC-osflcyp080b04b1
atcgcaaatactctctctcgccgatagcagcagcagcagcaatggccgccctcgccgccgcatccaccgccttcgccgccaagccgcgcctggcgcgcgcgccgtcgtccccggccgcgcggttctccgtgtcgtgctccgcgtcgggcaacaacggcggcgccggcgagatggcgcagtcgctggcggcgtcggccaagacgttctccgcggcgctggcgctgtcctcggtgctgctctcctcggcggcgacgtcgccgccccccgccgccgccgacatcgccgggctgacgccgtgcaaggagtccaaggcgttcgcgaagcgggagaagcagtccatcaagaagctccagtcgtcgctcaagaagtacgcgccggactccgcgccggcgctcgccatcaacgccaccatcgagaagacgaagcgccgcttcgagaactacggcaggttccgcctgctctgcggcgccga

SEQ ID NO: 16115 - DNA, 451 bp, Oryza sativa
  Clone ID: uC-osflcyp080b06b1
ctctcttcctcctcctcctctccccattctattcctcccctcacttccgtgagcggccgggcggaggcggaggcggcctcgcgccgcggcggccagctgagtggcggcggcggggcccttgcgctgtggggcggaggcggcctcgcgccgcggcagccgggcggcagcggatccggaggggaggcggacggccgccgccggatctgaagggggaggcggccgggcggcgacctcgtgcagagggccgcacccggcacggaggccggtgcggcggcaggccgtggcggccggcgctaccgcggatcggctgttgcttagttttctttgccattccttacatgtgcgattcgatctgtgttgattgatacgatctgtgttgaatgtgtgatttgatctgagttgctgtgaatgatttggggatggactatggcgtgaatgatttgggatgact

SEQ ID NO: 16116 - DNA, 462 bp, Oryza sativa
  Clone ID: uC-osflcyp080b07b1
tccacctccatgccaccgacacgcgcctcaagctagaaccctagccccgatccccgatggccgcgccgcccgtctcgggggatggggcggcggcggcggcccccgtggtggccctgggcgccgcgggggcggtgggggggccgaggccgtacgaggtggccgtcgtggcggcggagctccggcccgtggactgcaacctcgcggcgctgtgcgaccacgtgcaggcggaggggttcgggtccggggcgttctccgacgtcgtcgtcgaggccatgggcgccacctaccgcctccatcgcctcatcatctcccgcagcgcctactttaggaatatgctacatggttcttggagggaggctggagctccacagtggtgttgcatatagatgatccaaacattgactcagaagcaattgcaatcgcgtttgcatatcttttagggcaacccccaaagcttaatga

SEQ ID NO: 16117 - DNA, 518 bp, Oryza sativa
  Clone ID: uC-osflcyp080b12b1
gtacggcctccgcgcgcatgaacgcggcggagaagccaccgttcttcctgccgagctggacggggatgttcgtgctcaacatgttcatcgtggtgtgggtgctcgtggtgggcttcgggctcggcggctgggccagcatggtcaacttcatcaggcagatcgacacgttcgggctcttcgccaagtgctaccagtgtcccaagcccgccccggcgttggcgcagtcgccggtgccattgccgcaccactagcgcgcgcccgttccgcaccaccgccgccgccgcggcggaccgtgacaacgtgcaccgccgagcccggagcaaggaacctcgctctcctggccggcacggctgcaaaaattcagtgttgcttaggttttggtcgccttgtaatatacaaagcctctcctcctgtgctagggtgtcacaccaaaatggtagaagaagaagagggcatgggtccctacgatcttgccccgggccgtccgctgccgcgttgctttcccccgatcctcgatg

SEQ ID NO: 16118 - DNA, 516 bp, Oryza sativa
  Clone ID: uC-osflcyp080c05b1
gtcgtgccccaaccgcctctccccacgctagccactgtctccaccgccggctgccaactccagccgagtcgcgccgcctctccagtcgtccccgatctgcgccgtcgcctccctcggctttgcagtgaagagctctaccccggccacccgttcttttgccctgaaccccgccggaagtcgtcatcactgtgaaggccgaaccgtcgccatgttttgatctccggcgaagctttgccgtcgactccatggtcgccgaaccccgctgtctcctccgttggcatcgcagcgacaacagcaagcatggcagccgcccccgtgaagccacaagccatcggagcgtcatcgtcaccgtgaagccgatctaatccatcttcagccgtgccgctcatcgccgtccatcgccgccttcaattcgctgtcgccacccacgggatcgcaggagggaggtgaagactgtccgccccttagttgctgcctcccctcgtcaaaacgccggcgtcatcgtggacagagcca

SEQ ID NO: 16119 - DNA, 489 bp, Oryza sativa
  unsure (1)..(489): unsure at all n locations
  Clone ID: uC-osflcyp080c07b1
aaaaaaaacaaagctcccgaaaatattctctctgccccacccccgaaaccctagcgcgacctcgccgccggcaatggccgcatgaccgatgcgcctccgccgaggagccgcccgcacccacccagcagcagcgtcgccgtgcccgccgccgcggcggcagtgatcgcagccgccctcgcgtcctccttcctcgccctgctgcagccgccccggcgcgccccggtcgccgcgggatccagggtcggcatgtcgaaggcgagggtctacgccgacgtcaacgtgctgcgccccaaggagtactgggactacgaggcgctcaccgttcaatggggtgagcaggatgatatgaagttgcaggaaagttggaagaggtaaaaattnngaagtctttgaaggcatcaatgttaacaacaatgagaaatgcatcatcaagatactcaagcctgtgaagaaaagaagatcaaagggagattaaaatacttcagaatc

SEQ ID NO: 16120 - DNA, 498 bp, Oryza sativa
  unsure (1)..(498): unsure at all n locations
  Clone ID: uC-osflcyp080d03b1
gttactcgtcacagctcaaacaagtcaagagcgaatagttcttgctgatctgttgtttgattactttagttctcgagaggctttagctgaatccatcgatcgatcatggaggatgagaggaacacggagagccaccagggtggcgaggctgcagagcaggtggaggtgaaggacaggggcctcttcgacaacctccttggcaggaagaaggacgatcagccggaggagaagaagcatgaggaggagcttgtcaccggcatggagaaggtctccgtggaagagccaaagaaggaggagcaccacgccgagggcgagaagaaggagagcctcctctccaagctgcaccgatccagctccagctccagctcgtcgagtgatgaggaaaggagngtgatcgatgacaacggcgaggtggtcaagaggaagaagaagaaggggctcaaggagaagatcaaggagaagctgcccggccacaaggaccatgccggtgagcatgct

SEQ ID NO: 16121 - DNA, 475 bp, Oryza sativa
  unsure (1)..(475): unsure at all n locations
  Clone ID: uC-osflcyp080d09b1
ttttaatttctcatcttttcgctctcgatctcctacagaagcaatagtagccagcaaatcaatcgatcgatccgtacaatggcggccctgaagatgaacaggatggccgtggcggcgctgttcctcgccgccgtggtggtggcgggcggcgctggcgctagcgcccacgtcggggttggggctggggctggggccgacgccggcgtcggcgccgccgtcggggctggcgctgacgccgccctcgggttggcgccggcgccgccggcgccgccggggctggagttggagctggaattggagccgccgccaacgtcgncgggtctctcaccggcgccgctgagggcgccgccggcgtggcacccaaggtgcatgtgtgagatcgatcgatcgatcgagcgcgccgcggcttccatctccacgactccatccgcccgcagcggctccggcgatccatatttntataaattcgcagtcg

SEQ ID NO: 16122 - DNA, 494 bp, Oryza sativa
  Clone ID: uC-osflcyp080e03b1
tgttaggagagagatggccactgcttatgctcccatggcgagccagctgatgaagagcagcttggtgtgctccaagccgagggggctgtctggtgcttcgctgacaaggaggccccgcttcacagtcaaggccatccagtctgagaagccaacgtaccaggtggtgcagcccatcaatggcgaccccttcatcggcagcctggagacgccggtgacctccagcccgctggtcgcctggtacctctccaacctcccggcgtaccgcacacgacgtcagcccgctgctccgcgcatcgaggtcggcctcgcccacggctacctcctcgtcgggcccttcgcgctcaccggcccgctccgcacacgccggtgcacggccaggccggcgccctcggcgccgccggcctcgtcgccatcctcagcgtctgcctaccatgtacggcgtcgcctcctcggcgagggcgagccgtccaggcgccgacgctgacgctcaccgg

SEQ ID NO: 16123 - DNA, 484 bp, Oryza sativa
  Clone ID: uC-osflcyp080e06b1
gatgtagtagatcgattcggtccaccctccgattcctttaccgaaccgtgggggaaatccgcgccggggatgtcgtcgtcggtcggaggcggagggggaggtggcgcggtcggttgctgcttgtggttgaggtgcggacattgcgagcctgctggatatggccaaggagctggaccagctgcgcatggagcaggacgaggtggtcaccgagatcaacaagatgcacaagaagatcctcttctcttcagagatggttgattaacaggttgatgcttcgctgattcggcttcgtgctttatatacacgtgccatagaactttgtgagagtgaagtcagtgcatcgtttgcttttgttggactatttgtatggttcgttgcaatttgggactttctttgttcccgaaaagaagatttttgtttgtcacattcgatgttggaaggtgttttcggacatgaatgatacaactaattttatttctcgtct

SEQ ID NO: 16124 - DNA, 424 bp, Oryza sativa
  Clone ID: uC-osflcyp080e08b1
ggaatctcccgcgaccacccacgcgcccttagcttctctgaggaagatgctgtcctcaaccgctactttggccatctgaaatctggtggtaatgcttatgtgattggagatccagcacagcctggccagaagtggcatatctactatgctactcagcacccggagcaacctatggttacccttgaaatgtgcatgaccggactggacaaggagaaagcttcagcctttttcaagacttctgctgatggccacacatcatgtgctaaggaaatgacaaaactctcgggcatctctgacattatcccagagatggagaatctgtgactttgacttcgaaccctgcggctactccatgaatgcaatccatggctcaaccgttttctaccattcatgtgacccctgaggatggcttcagctacgccag

SEQ ID NO: 16125 - DNA, 474 bp, Oryza sativa
  unsure (1)..(474): unsure at all n locations
  Clone ID: uC-osflcyp080e09b1
gcgatcggctctaccgtcgccggagaagaagaggaggagcccggcatggggcgcgtgcgcacgaagacggtgaagaagacgtgtcggtaggtgatcgagaagtactactggcggatgaccctggacttccacacgaacaagaaggtgctggaggaggtgtcgatcctgccgtcgaagcgcctccgcaacaaggtggccggcttcagcacccacctgatgcgccgcatccagcgcggccccgtccgcggcatctccctcaagctccaggaggaggagcgcgagcgccgcatggacttcgtcccggacaggtcggcgctcgaggtcgacgacatccgcgtcgacaaggagaccctcgacatgctcacctccctcggcatggccgctccncggggcgtcgtgcgccagcccgacgccttcacctacggccgcagcagaacggctgccgccgcctccctacgcccgccggaacggcct

SEQ ID NO: 16126 - DNA, 499 bp, Oryza sativa
  unsure (1)..(499): unsure at all n locations
  Clone ID: uC-osflcyp080e10b1
attcaagggaaggaagttcagctctgtatgccatttctttggatatcaggctcgaggatccgtcccatcaaactttgactgtgactatgcttatgctcttggccgtatctccttgcatatgatagcagctggcttgactgggtacatggcaactgtggctaatctgaaggaccctgtagacaagtggcggtgtgctgctgctcctctaactgcaatgatgagtgtgaagaggcatttgcgtggtcctggagcaatcccgataggaaagcctgccattcatccttctccaattgacctgaaagggaaggcttatgagttgctgcgagagaaagcatcaagttttctccttgatgatttctacaggactccaggaggcattcaatatgaaggcccgggttgcaatgcaaaacccatcacattgaccattgagaaccaagactacatgggcgacattgagatactgaaagactgtctcagcanggtgaggacgatggtgaag

SEQ ID NO: 16127 - DNA, 139 bp, Oryza sativa
  Clone ID: uC-osflcyp080e11b1
ttgttacgcgtgggcgcgagcgcccgcctattttatttaacggaatttggtaggcaaggttgcgtctattttgtggctaccgacccttcttgacaacaaatttttggaagaatgatgaattaacttttaacttggaagg

SEQ ID NO: 16128 - DNA, 404 bp, Oryza sativa
  unsure (1)..(404): unsure at all n locations
  Clone ID: uC-osflcyp080f01b1
gtccttacccccacacccaaaatccgtgtgcgccgccccgcacggccgcgccccccgtcctcgcccccgtcgccgcctatatcaccgacgaccctgctttgctttcctnctnctncttcttcttatccccnggttgttcttttccggtgagaagttcaatttggggggttctttcggccctttttctttttccccttaccgtagggctgccggggacggtatatcgaatcgagtgctggagcagctcttcatgcaggaattcggaactggtggtctgttttgctggaccgagacgattgctttgcttcatgattcttgccgatgctgaccgtgttgcattgattggaccggngcatgggaatctcttgatctgaatgagtgccttcattagagtgaacatggac

SEQ ID NO: 16129 - DNA, 304 bp, Oryza sativa
  Clone ID: uC-osflcyp080f10b1
tttctctctaccccgatctcctttcgccgtcggcgtcggccgggtcgccgccgccctccgccgcgcagtccgcagatagtaggtgggggggttagccttagcacgagaggcctttgcctgagactgaaaggaaggaagaactattacttgacactgtgatgcgggactgggtactggtacggttgtgcgcgtgaacggtgcttatgggcacattgcgttacttcttggcagggttgttgtgctccgcggctacacggtcctcgccacaatccaagatagctatggccgagcgagaacactacac

SEQ ID NO: 16130 - DNA, 290 bp, Oryza sativa
  Clone ID: uC-osflcyp080g01b1
atggttatctgagaagcaccaggttgtactgctcaaggaaatcgcgcataagctctgcaaggaggcaacaccattgcaagtaattccatttaaggtgcggtcgccaccacaaccagtggttatggcacacaggaaggtggtgaagaggcagaaatttttttttaaaattttttttgtccccgcggttttatgggattgcctttcttgtttactggccgaggaaatcatatcgcgttcagtacccaattcgtttgggtgggagcaaatgtggcctgatgctgctactgaac

SEQ ID NO: 16131 - DNA, 427 bp, Oryza sativa
  unsure (1)..(427): unsure at all n locations
  Clone ID: uC-osflcyp080g02b1
ctcgacacaccaaccaaaaatcgaatcgcgttcgagccatcgagccgacaaggcgacaacagccacaacgcctcactccccccaccccacgcgctccgacgagctccgatccgccgnccacctcgccgcccgccggcgatgagcaccgtctcctcctacagaagngacggaggacgggggggggatggggccttgtctgacgcggggggcggaggaaggtggnaaaccttgcatctcaaacatgccgagggtacgcaacctccgtcgcttcgtaggcacggacgcccggcttggatacaaggccttgatggaactggaaacaaaaaggatactgcttgagattttcaaggagcgccaacggcagagatggaagctggtgccatccaagtttttataagaagaaacctgaagatggatccattagcaa

SEQ ID NO: 16132 - DNA, 475 bp, Oryza sativa
  unsure (1)..(475): unsure at all n locations
  Clone ID: uC-osflcyp080g05b1
angtgnttagggttccggccgccgtagaagcaagggggagagggggaggggggtccctttntccccctccctgcaagaggcagctcggtgttgctgcgaatttaatctatttctttcccccttcctcaggatgaggttttgatgccctgattctccccttttctctgtctatttcagcacctcatcgatttttccttgctcttctgatgccctctgttgtatagctccccaatcactccattgtatccctaattccatgcttgttgctcactcctttttaacaaaataatgaccagctactagaccattacataattatgctctaatcatttactctgatacttgctgcccccaaacacaaatctgtgatccaagcacaagttcttgggagtacaacacggttaacatcacatgaaactccttgtgcacttttttgtgcatgtttcctttgccccatctcaagagatcgttcttg

SEQ ID NO: 16133 - DNA, 376 bp, Oryza sativa
  unsure (1)..(376): unsure at all n locations
  Clone ID: uC-osflcyp080g06b1
ggtgtcccgacgccttgccccgctgctggtcctactgctctcgtccagcctcgccgccggccagagcaccggcgacaccgtcgtgttctggggccggaacacggaccagctcgaggggtccctccgtgaggcgtgcgacaccggcctctacaccaccgtcatcatctccttcctcagcgccttcggctacatcccgggcacctacaagctggacatctccggccacaccgtctccgccgtcggccccgacatcaagcactgccagtccaggggcatcctcgtcctcctcgccatcggcggccagggcggcgagtactccctgccgacctcccaggcgggncgtcgacctcgaggactacctctggaacgccttcct

SEQ ID NO: 16134 - DNA, 415 bp, Oryza sativa
  Clone ID: uC-osflcyp080g08b1
tcgtaaaaaaaaaaccacagaaaattaattaatagaaaattaattaatggtctgcgggaacctcggccgatctcttttcagacctaattctctccaggtggatcttttccaccggccccctcccccgtgcactcctttctcgccccttctcccctttccctcctcctccccgtcctccttcctcttcccgccccctctctctcctcctccctccccccccccttccctcctcccctcttccccccccccccccccccctctcccctaccctcctcccccttttccctcccctttctcccccttcccgtttttcttcccctcccctcttacctcctccccccccccctctttctctcccttttgcttttcttccggtgctccacccctctctcttttttccttctctcccctcctt

SEQ ID NO: 16135 - DNA, 387 bp, Oryza sativa
  Clone ID: uC-osflcyp080g10b1
gtaaagcgaggggagcaaaaggagagagagagagagtcttttcaattttcttttgtttttcttttctccctgcaagaggcagctcggcgttgctgcgaattccatccatgtcgctcgccgtcctcaggatgaggttttgatgcccgaatccggccttttctctgtctatttcagcacctcatcgattttttttggctcttgtgatgccctctgtcgtagagctccccaatcagggcttcctcacttgtgccatgtttgttgctcactcctttcttgattattagttggtagctcaccagtttttgcaggggttttggcagatcatgtagtctgcctgctcaatccctgggtcagttaatctagaaacctcattgaataaacaagttc

SEQ ID NO: 16136 - DNA, 557 bp, Oryza sativa
  unsure (1)..(557): unsure at all n locations
  Clone ID: uC-osflcyp080h03b1
tctgatcaacaagctgacgcaaaccncccaccccgcggcgttttataaaaaacccccccccccttaccaaacccccccccccaaaaacaaccacccaccaccccccacaaacccaacctcccaaaaaatccccaaccttcccccccccccccaccccccacctccctaacaccccctcccccccccaccccccccccaccccccacaccactcccccccaccacaccccccccccccacccaccgacttccacccaacccattgcaaaacacaatccaccctcccccctttccccccacgcctccaccccccccaccccaaccacccccccctcacccctcacatcctcccccacccccaannaaacccaccaccctacccaatccatcccaccacatcacacctaacacaccccaccccccccccccccccccgtcccccccccccaaacaaatcaaaccctgctccccctccccaccacccacccccccccaaccaccccacctaatcccccaccctaccccacaaaaaaacccctacccccccccatcatccca

SEQ ID NO: 16137 - DNA, 475 bp, Oryza sativa
  Clone ID: uC-osflcyp080h05b1
gtgttgtcgacgagcgaagagaacagaagcgagcgggcaaggaaggcgatccaagggagaagatggcggcggcggcggccatggcgatgaaagatccgagcctgtggcacaaggtggccgccatatccggggttgctgcccttggacttggcacctatggcgcgcacatgttccgccccaagaaccccgcgtacaaggaggtttggcacactgcgtccctctaccatctcgtccacaccgcggcgttgctcggggctcccatcaccaagcgccccgatgtttttggagggcttcttactgctgggattgttctcttctctggaacgtgctacactgtggcttatcttgaagacaggaagtattcttccacggcaccgttgggtggctttgcgttcatcgctgcttgggccagtctgctcttctgattatatcgtgttttagcatgtgaaaacgtattccattactgaatgctttg

SEQ ID NO: 16138 - DNA, 500 bp, Oryza sativa
  Clone ID: uC-osflcyp080h06b1
tcactaatgaaggctaaccctctggggtcccggcccgaatttcccgtttcgccccacccttccaatatgaaaacaacttaaacccaccgcccctgtgcattacttagaggaagaggaggagctagacggcatcctgcatacagctaaagcagccacggggacctccacccaccgcgcgtccttgacgacggagttgaacaagccaccgcccatcgccgtcagacatcgcaatctccaattgctttccccagctacaccaagctccatcaagtgtttggaggccaaccaagacaagagcaagtgccaatagcagtttgacgactataacaattcgcaaaatgagagagaggaccgtcttggttgaacacacccaagggtgcatcatttactcccatgggtaaagaacttccaccgaaggagaagccaaatcatagcttttaaaccaccatctaaatgccctccatgattatatatgctcatccttatgcgtgtaatccatt

SEQ ID NO: 16139 - DNA, 238 bp, Oryza sativa
  Clone ID: uC-osflcyp080h09b1
gtcgccgatcgatcaatcgccgccgccgtctcctcgtgtaaccctagcttagtggattagtttaagtgtttgccggagattatggggtcggtggcggcggaggaggtggtggtttttattttcatccttcttattatttttctctcttttcaacctcttctgaatattttttctttttttttcctaaaattttccattttttaccccctttctccattcgtgtgtaaattttttattt

SEQ ID NO: 16140 - DNA, 479 bp, Oryza sativa
  unsure (1)..(479): unsure at all n locations
  Clone ID: uC-osflcyp110a01b1
taattagtacagttacaacaaaatcctcaaggatctgaaaaaggaattctgttgtaatggtactgtagtccaagatccagagttaggccaggtcattcaacttcaaggtgatcagcgtaaaaatgttgcgacgttcctagttcaggctggaattgtaaagaaagagagcatcaaaatacacgggttttaggctacacataatgcctatgtgctattatatgatacaaaatattgaagtgtctgaagcctgaagttgtgataataccagtttttactacttctaagacatttgaatttgtgtcggtgtgagctcttggttattgatgcaacttgtttcaatatggtttgtacgtgctacctatatgaaaattcggttctgttatattgtctactaaacaaaagtatactgtgtttatctaagctttcgcttctcatgcaattgttgtttggatttggcattcacacnaaaaaagacatgg

SEQ ID NO: 16141 - DNA, 461 bp, Oryza sativa
  unsure (1)..(461): unsure at all n locations
  Clone ID: uC-osflcyp110b05b1
gggaagtcatcagttatcaacacgttacgctccaagagtgtttgcaaagtggctccaattcctggagagacgaaggtgtggcagtacattactctgactaaaagaatatttctgattgactgccctggggttgtgtaccaaaacaatgattcagaaactgatattgttcttaagggcgtggtgcgtgtgacaaatttggcggatgcttctgagcacattggtgaagttctgagacgtgtaaaaaaggagcatcttaaaagagcttacaaaattgaagactgggttgatgataatgattttcttgtccaactgagcaagaccactggaaagctacntcagggtggggagcctgatcttacaacaaccgccaagatggtgcttcatgactggcagaggggcaagatttcctttttttgtgcctccaccacagcaaggtgaagatagtccatctgaaacagctg

SEQ ID NO: 16142 - DNA, 439 bp, Oryza sativa
  unsure (1)..(439): unsure at all n locations
  Clone ID: uC-osflcyp110b06b1
gaaaatttaccaggagattgcaggagactagagagcgccactcccaatggggagtaggagcagaggagggagacacctcctcctcctgcttcacctcctctccctccattcctctctgctaccatgggcggcggtgtcggctgcgggagggggtggttccggggacccgtacgtcggcgtgacgatcgggacggcggtgacgaacctgctgtcgccgtcggacctcgccgagttcctccgcgcgcagcgcatcacccacgtgcgcctctacgacgccgacccgcgcatgctgtcggcgctgcgtcgtcgggcgcccgcgcccatcggcggcgtncccaacgacgagctcctcgcgctggggctctccccgccaccgnctctcctgggtcgccggcgngtgcttcctacgccggcgccactncagcaccccgggctcatc

SEQ ID NO: 16143 - DNA, 509 bp, Oryza sativa
  Clone ID: uC-osflcyp110c07b1
tgttagtgttacttcagatatatggagtagtagagctagagaggattatcttagcgtcgttgttcattttgttgatgatgattggcaattacaaaagagcgttttagggcttaggttaatagatgtctcacatacaggagaaaacatagctgaaagaattagggaagtaattaatgaatttaatcttgctgataaaatatttgctgtcaccctagataatgcatctgctaattctagggctattgaaatattgcaacctttattttgtgtgtatgctcaatcttttctactccatgagcgttgtgcatgtcatataatgaatttgattgttaagactgtcatgaagagggtaggtgaccacatggatgctgttcgtcaagcaatcgcgtggttaactgcctttaacccgcggattgctgcatggaagagggtttgcaatgcggccggtgtgaaagctcgtaagtttgccaccgatgcatagcattgatggaatgcaacgtatttaatgt

SEQ ID NO: 16144 - DNA, 511 bp, Oryza sativa
  unsure (1)..(511): unsure at all n locations
  Clone ID: uC-osflcyp110c09b1
tctcaccccagcaacatccaaggtcttcaacgacgaatcctttgctaagatgaagaatggagttcggatcatcaatgtggccaggggtggagtgatcgacgaagatgctcttgtcagagcccttgactctggcaaagttgctcaggcagcccttgatgtcttcactgaggagcccccagccaaggacagcaagctagtcctccatgagaatgttactgttacaccccatcttggagcaagtacagtggaggcccaggagggcgtcgctatcgagatagccgaagctgtcgtcggtgcactgagaggtgagctcgcagcaacagccgtgaatgctcccatggtcccagctgaggtcatgtcagagcttgccccgtatgtttcactggcagagaagctgggcaagctggcggtgcagctcgtcgcaggcgagagcggcggcataagggcgtaaggtggtgtacaccacggcccgtggccggacgacctcgacacgaggctcctncgcgccatg

SEQ ID NO: 16145 - DNA, 445 bp, Oryza sativa
  Clone ID: uC-osflcyp110c11b1
cccacgcgtccgctcgccttcctttccccaactaaaccctaactcctcgccgccgcctccgcctccgcctcctcgtcggagcagcgagccgctgctccttctcctccaccaccagccatggcgacccagatcagcaagaagaagaagttcgtgagcgatggcgtgttctacgcggagctgaacgagatgctgacgcgggagctggccgaggacggctactccggcgtggaggtgcgcgtgacgccgatgcgcacggagatcatcatccgggccacgaggacgcagaacgtgctcggcgagaaggggcgcaggatcagggagctcacctccgtcgtgcagaagcgcttcaacttccccgagaacggcgtcgagctctacgccgagaaggtcgtcaaccgcggcctctgcgccatcgcccaggccgagtccctccgctacaagcttc

SEQ ID NO: 16146 - DNA, 129 bp, Oryza sativa
  Clone ID: uC-osflcyp110c12b1
aaggacgcccgcggggacgtgaccgggaacggaatggccggttgacccactttttttgtagaaaggaagctaaccccaacttgggggggataatcaccaagagagcgctctcctcggccgtggcggcca

SEQ ID NO: 16147 - DNA, 499 bp, Oryza sativa
  Clone ID: uC-osflcyp110d08b1
tcacagatcagttctaccacgtacaacagcagaagtgagagagggagaagatgacatggcaagaggaggagcttagctagccagccatggggaggcgctctccttgcctcgccgtcctcatgctcctgcttgaggcgttgcccctggctagcgccttcattgatgaagctgccgatgctgcccgagggctaggccatggtgcccgctttatgagcacggagggactggtgacatacgagacgctgcctgagccggatccgaatgcaaagccaaagcctgatcctaaacccacgccgaaacctgagccccagccagagccggagccaaaaccagaacctgagcctgagcctaaaccggtaccaatggcagaaccaaatcctgtgcctaagcctgaccctaaaccatacccagagccaaaaccggagccgtagccagagccaaaacctgagccggagcctagacctgagcctaagccagaaccaacaccagaaccaaagcc

SEQ ID NO: 16148 - DNA, 367 bp, Oryza sativa
  Clone ID: uC-osflcyp110e10b1
cagaaactatagaggaagaagaagtcccggttagtccaccggcaaaaccggatactgcaaagccagatgctgcggagatagaagctagtgatagggggatcattggttgggggcgaacaacgagacgttgtcgcacaccgaggtgtccatcaggctacaacatttctgccgcatcttgaaaagatgccgacagaaaacatcggactatatttggatttgtagtagagatcttgatggagtggtataagaaggtgaagtttctttgtgattctactcacccatcattcctatatttgctttcgattttttctgtttttcttttcataaatgttgatgttatgtatgaatgatgctgtcaatgattctt

SEQ ID NO: 16149 - DNA, 185 bp, Oryza sativa
  Clone ID: uC-osflcyp110e12b1
cttgcggtggatacctaggtacccagagacgaggaagggcgtagcaagcgacgaaatgcttcggggagctgaaaataagcatagatccggagattcccaaataggtcaaccttttgaactgcctgctgaatccatgagcaggcaagagacaacctggcgaactgaaacatcttagtagccagagg

SEQ ID NO: 16150 - DNA, 521 bp, Oryza sativa
  unsure (1)..(521): unsure at all n locations
  Clone ID: uC-osflcyp110f03b1
gatggacgtgaacttctggggatccgtgtacccgacctactatgccctaccacacctcaaggccagcaaagggaaactcgtcgtgtcgtgctccgcggcaggaacagtcgccgcttcaagaatgagcttctacaatgcaaccaaagcggcgcaactgaggttctacgaaacattgcgagccgagctcgggtcggaggtcgggatcacagttctcacccctggctacgtcgaatccgagattaccaagggcaagggcatccagagcggcggcngatgtcgccgtcaacgaggaagccagagatgagcagatcggcgtgttcccggtgggccgcgtggcggagctggccgaggtggccatggacggcatccgggccggcgacgggtacgtcacgtggccgtngctgttccggccgctgcagctggtagcctgcctcgccccggggtgctggactgggcctgccgcgcgctgtacggcaccaggaagggggcacgaccgccgctcgggagaggatcatggaggc

SEQ ID NO: 16151 - DNA, 439 bp, Oryza sativa
  Clone ID: uC-osflcyp110f08b1
cggacgcgtgggggtggctgcgcgcgcgtgcaatcgtcttatccccggtgtgcacgccacaaagccccagcggtgatcgccgcgccctccgcgccaagtacatatacgcgcgcatccgggcgcctcgatccatgcagccgagcgagctaaggaaggaagaagcatacaggcggcagcgacgagccatggccgcacacgcagcgctcgcggcgggccggattccggccaccgcccggctgcacagcaaggcggcgtgcaagcagagggtggactgcgccgacttctccggactgaggccgggatcgtgctccattagtcacgccgcgagggagacgtccttctccgatgtccatggctcggagatcagtgccagtgctaccggagagaacgccgtgagggggccggatgaggcgaagttcaaggttgccataacgggttt

SEQ ID NO: 16152 - DNA, 434 bp, Oryza sativa
  Clone ID: uC-osflcyp110g01b1
ggtgtagagaaggagaagagggggccggccgccggcgtcgtcgcgttcctccccccctctctctcctctcctctcctatagatctccatccttccttccatccattcctccccgcacccttcgcattgctctcgtcgtctcgatccggtcgaggatctccaggaaaagaggaggaagcgatatgggttgcttttcatgctgcgcagcggatgaatgtcggcaagaagaagaagcgcgacgatccttacgtcccgacccctgagccacagtgacaactatggacgtagcaagcccgggcccccagcccctacgcggtccccccccaccagcagaaatctgccaattgcagaaccggccataaccctcgttgaagtaaagggaataaccaagaactcagcagagatgctatgactgcagaagctcgaacgccagag

SEQ ID NO: 16153 - DNA, 517 bp, Oryza sativa
  unsure (1)..(517): unsure at all n locations
  Clone ID: uC-osflcyp110g04b1
tcaggttgtgccacatattacagatgaaattcaagattggattgaacgtgtagcgatgaatccggtcgatggtaaagaaggacctcctgatgtttgtgtcatagaacttggtggcaccataggggatattgaatcaatgccctttactgaagcattaggtcaattttcctaccgtgttggacctggaaacttctgtctggtccatgtcagtcttgttccagttttaaatgtagttggtgaacagaaaactaaacctacccagcatagtgttcgtgggctaagaggccttggattggcacctgacattttagcatgtcgcagtaccgagccactggaagaaaacgtgaaagcaaagctctcacaattttgtcacgttccagtctcaagtattattaatctccatgacgttacaaacatttggcacatncncttgttgctaagggaccaaagggcccatgaagctattctgaaagttctagacctttcaattgtcggtaaagtaccacgagaacccaag

SEQ ID NO: 16154 - DNA, 516 bp, Oryza sativa
  unsure (1)..(516): unsure at all n locations
  Clone ID: uC-osflcyp110g12b1
taaaagatttggtttctgaatctgccaggcaagatatacctgatgagtttcatgatggaatgttaaaaactactgggagtagtagttcgaatgatgtggaacttatgaaagataacgtggttcttaataaagatcctacattagttttccatgagaagctatcattggaatcttcactaggcgcaactgatttaaatggtaaactaactcatgaggtatcacaagatggtccaccaaacaagttaactagcagcggccaagaatcaagaaagagtgatggtaaatatgtagaagatgaaagtaaagatggttcaagtcttgaggatggtgatgctttcagcttccaggctggaggacaaaatatcaacttccaaaaggaagctaaaacttcagttgagatggctaacgagctaagtagattcagtgacacacctggagatgcctnctttgatgatttattcccacctaagaagcgaggagatcatggngctgaagcttcacatccactactggtga

SEQ ID NO: 16155 - DNA, 502 bp, Oryza sativa
  unsure (1)..(502): unsure at all n locations
  Clone ID: uC-osflcyp110h03b1
tgtatggcctgtaattccaaacttttaattgcaagactagatcgcaaaaaaaaaaaggaaaaaaaaaagaggagaaaaaaacaaaaacagagctaaagaagcggaagcgggaagaacaaaagagcggaggacaggaaggaaaaagcgctgaccgagaagaagaaaaaaaaaaaaaagccaaaagctgggcttcgcccgcgaggattaaaacgtccaccaactcgaatcgcaggagaaggagcttttgcagctcaagcgtgaggctcggatgaggggcgggtttttacaacaggcctgaggacaaattctgtttgtggtccgcatcccgggtatcaatgccatgcaccccaagaccggaaagatcttgcagcttctgcgggtgaggcaagatcttcaatggtgtcttcctcaaggttaacaaggcaaccattaacatgctgcgcagggttgagccatatgntgcatatgggtacccaaacctgagagtgtcagggattgatct

SEQ ID NO: 16156 - DNA, 415 bp, Oryza sativa
  Clone ID: uC-osflcyp116a02a1
gtaaattgaaaaattaaaaggccagacccattgtaataattctcaaatttctcatccgcaatctcagatgcaaggcaccaccacttaataatcaacaccaaactttttccctgtacagcttttggagatctggctgttattttcgtcctgtttttctgggttgtgaaattacatgataaatactcggaatttttcgctgccgatatcagatgagcctcataccatgcttcttctccttgagtggtctgtggtaactgactttggatttgaaagatggtcagcaccaccgatgctcttgggttcagccagcctctttagtcgctcgatgaatgatttggtcgatccactcttttcttgctttagaccagttagagatggaactgatatacttagtccattggcatgctctctgctt

SEQ ID NO: 16157 - DNA, 455 bp, Oryza sativa
  Clone ID: uC-osflcyp116a03a1
aataaaagtaagtttagttacattgcaagatgacgaaagggacattcatcgttataggtagtatagatcaggccggaggctagcaacaacggagcgatatcgatcgagcaagtcgaatcatcacgatcgaattcaacacttcatcccatgcggtccctcgaggcattttttgaagatggttcccggcagcaattggccgtaggtgtggatggtgtataacattttgttcgcgcatccgttgttgacgttattgatcagcttgttgtgcgggcatgccaatgtaatgaacgcctaacagaacaccttcacccctgtcgtattgcacttgtttcccagctcgatggcgggcccctttattttggggaaccgcaccgggcacaccggctctagcggcacgttagtaacgggcattagttagcgggaggctgagggcaacgtgtcggccttgaaggcag

SEQ ID NO: 16158 - DNA, 233 bp, Oryza sativa
  Clone ID: uC-osflcyp116a04a1
tttggccgcttggctgcagatggccccagagtcgtggaggtcgctgccccacctgccgcccccgtcgtcaccggcggaggcggaggaggcgggggcttcgcagcccgggacgcggagctggccatgtgggagaggctgggagcggttgtcaggcttagctatggcattgggatttatgccgccctggcacttactggggagaatcaatatgccagaaggcccgaatagactgc

SEQ ID NO: 16159 - DNA, 86 bp, Oryza sativa
  Clone ID: uC-osflcyp116a05a1
ttacggggaatttaaaaaaacgcgggaagaacaacaacaaccagaaggagcggaagtaatacgccagcccattaaaaaaggaacac

SEQ ID NO: 16160 - DNA, 492 bp, Oryza sativa
  Clone ID: uC-osflcyp116a07a1
cccgctgggtttttgcagcaggcagaagcctccgctcgatgtataacaaataaaccaaaaacgaaaagaagaaaccaacagagaatgctacaattacagacccataccatacagttctatgagccggagcattgcgaagggatcaattagaggaatgcaacaaactgcaaaatcaacagcccgtaagcaatgcaaccaagagttgcaaatacaaactactaatgcaaccaattgaatggcattcctccagatccatactagaaaatccttccaaaatcctttcctgcaaaggaagacggcagtccgcctgctgtaaaagagtgaccaggccttcctccccaaggcattccgtcagccatagtagcaggtggaggttctgccatgccataattaggccatacaggctgaccattgtgatgattccccattggacgtaggtagctcgcagtcatatggttataccgctgaaatggttgtccatggcgactttga

SEQ ID NO: 16161 - DNA, 489 bp, Oryza sativa
  Clone ID: uC-osflcyp116a09a1
aagtaggaacaagtagtcttacttttcattcagtttggaagttatctcctgtctctcaggaagcgtaacagatatcgacatttctcatacattactcttaatcttttgatcaactaagctacttaaacaatcatttcttcgtacttacagttcaaagataaatatttggctcctgctactacttcacaataatataaattgactatatttgacaaatatagtaatattgcttgaaagacgctaatataactgggtccaattgcaacaggaaggcttctagttggaaagatgacacccatctgcaagaactgttttcccacatgtacaagtttgattatgtacatgcactatcacaaccatcaaatttgtctcaagattgatacaaagcttcaaagttcaaagtattgaagcaacccgcccaccttctattcatcaggatgcatgtgaaccttgaagcatttggaatgggcatagaagccgttagttgac

SEQ ID NO: 16162 - DNA, 386 bp, Oryza sativa
  Clone ID: uC-osflcyp116a10a1
gggggaaaactccaaatgaattattatcacttgcttgcacaaactaccaagcatgttccaacaatgtctcaagaacccaagatactgggatatccaaccaggggaccagggaaaagctgttgccaagatctttccttgaacccaagtccaacttcaattttgtaagaaaaccaaaagaggaagaaactttccagggccccaagttggatgacttgcccttctttgggcgcaaggttaccaaccctttggataggggggccttgaaaaaaaagggcttttattatttggttgaggaggactttttttccttaaaaggaccaggaaccgggaatcactttaaaaatttttgacccaaggagggaatttttttacaagcggggatggaa

SEQ ID NO: 16163 - DNA, 431 bp, Oryza sativa
  Clone ID: uC-osflcyp116a11a1
aatagtaatagactctttgatggagtattacaacatgcagcagtggcattaatacgccagtacattaattaagttacacatatgcaggctccattttggtttcttttaatttatcgtattacagaatttctgtagccttgcagatgatcacttggatatcatgtactagtaattaacaataggatgcatacaaaagatggcccaacgacaacagaagatgcgtgcatctgacattgcctggccttatttgttggtagtactccaattaattaacaagagatgatgcattcttgtgccttagtttcttcacatgcttggattcacgttgagcctatttgcaatcttcacccccaacgacttatcacactgaatgaagtaaatgagttaattacatagttagtgcaaattaataactttttttgccggaatta

SEQ ID NO: 16164 - DNA, 382 bp, Oryza sativa
  Clone ID: uC-osflcyp116a12a1
actgaaaggcatcgttcatatatatgaattcataaacccaggcgcttttacttattcaaagatggataacataaacttatcctcgtttgcgcgtgcaaacttattcttagggacgtatatgacggttacatccacacatgcatagatcatacaaatcccaagatcatcaaagatcgatcgatcagccgtgcgcgcgcgcgcgcgttcgattatgggcagaaaacgacctggtagttggggccggccgggcaagtgtaggtgctggaggcgtcaaccttggggtagctgaaggcgtccgggcacagacgtttgaagaactccaagtagttggtcgggccgaatttgttggccgacgatccggtgcaagaaaacctgtcctgcc

SEQ ID NO: 16165 - DNA, 458 bp, Oryza sativa
  Clone ID: uC-osflcyp116b01a1
cagaaaacacatctataagtccgtaaataatttgctcgtaagtacaaatggccaacaatatcaccccttcgtcgacttgggcatcgtgtaactgctggatggatgcaggtgagactgaaaaaaaaactgtacctaagcacctcccttgccttcccccaccatgtttcccggttcatttatcgctaagggtggatggttaattttgtgaaggtggtagcaaacaccagatttcttaactggtgcttttcgtggcatttagtctgatgattctgagccatagtcaagcatttctttgatgtttaacttgattgaaggccccattgatgagcataagtatgccgttttccagtatatcccctttgcaccagatggtttgttcctttcgacagagcgaacaacagccatgaagtttgcaataaggttttttttaggaaaatcaaccttcccaagggaatgtg

SEQ ID NO: 16166 - DNA, 179 bp, Oryza sativa
  Clone ID: uC-osflcyp116b02a1
tgtctggccgctcgcgtatctagaaccttgcggtggatacctagggggcccagagcacgaggtaagggcgttagcaagcgacgtaaatgctttcggggaggttgaaaataagcataggatccggagatttccccaaatagggtcaaccttttttgaactgccctgcttgaaatccatga

SEQ ID NO: 16167 - DNA, 360 bp, Oryza sativa
  Clone ID: uC-osflcyp116b03a1
tttttcatggatgtgttctgcgggcatatactgccattttccgttaaccctacagttatcttaacagcaacgagaatgaataggggatgtgatcatttcgtatctgaagatgccttatcttccggagtaatacatctttattcacgctgggaattgcaaatgcaggccctggtggagatcttcgtgtttatgctggagaacctcacagtttgcagaagatgtccgagtgctaaaattggcaacattccaatttggccaacgcttttcatcacacagtagtgaatccacacttggagctttctatgcaccaaaatagtgtggctagcttactcttattttcccttgatggcgccaaagtgc

SEQ ID NO: 16168 - DNA, 265 bp, Oryza sativa
  Clone ID: uC-osflcyp116b04a1
ggaatattattattggtttccgcttttttcgaatcataaaagcttttatagacgccatgtaactaattaataattaagttaggcccttcactggggacatgacgaacaattccttacacgctagcaatataaggaaagatgaacagcaaaaacaaacggaaaaaaatgggcaggagggaagccaatcaatcttttaaagggtggaccgaaccaaaggtaatgagaaaaaccgacagtactggagggtaaaacaaagggacgaacc

SEQ ID NO: 16169 - DNA, 433 bp, Oryza sativa
  Clone ID: uC-osflcyp116b05a1
ggtatcatagtaaattctttcccggttaattttatgctcagaattcatagtgttttttagcatcttacaacttacaagatggcgcagatatacaagcgcaactatcttaaagttagctgtaggaggaaatggaaccatttctaacaacgggtaaaatataggttatagaaggaaaccatctcaacaaattagtagggaaattaattatgaagatcgttttcgtccgatctcaatagaactggacgtttggtgcgcaaatggcgtctggcatacaaaagaccggggtgacgtctttggcgatgaggctcttgccggactcggtggtgacgcgaatggtgaagggtgctctttggcgccgtggtggtgtccatgctccagatggagtcccacgacagcttcatgggccctcaagcttgcaatccggcctcctgga

SEQ ID NO: 16170 - DNA, 425 bp, Oryza sativa
  Clone ID: uC-osflcyp116b06a1
gggcaccatcatacagaaactatttgtcatataatgcatacattttcacttaatttttgttccgctaatcaaacagtttctgcaattgatctaattttgctctcgtccttctggtcatgtagctacattgttctccctgacacaaatggaagaacagctttcgtgctaacttaaaatggattctcttcaatgttggagacttgatcgaagcaatgatctgaattttctgaattctgacatacatacagcctacggatttaatctttcttgaggagatcgtagaacacttcaggcttcttgtagtgctttttgcacgcctcctgcattgcaaatgctatgtggagcagagtcgccttggaccacggcctgccgatgaactggaagcccgtgggcaacccggctttgtcattcccaaccatgacggt

SEQ ID NO: 16171 - DNA, 344 bp, Oryza sativa
  Clone ID: uC-osflcyp116b07a1
ggcccaaaaaaagctttttgtagggggaaaaaattttagttttttttgggacacgtcccccttgaaaagggacaaaacgtacgaaaccaacacccaaaaaaaaaaaagtttgtttgggggaccgggccgatcaaccatgggggcccccccatgcatgcttggggattggacgaaaccttagctgggcaatctttttttcccgaatcccaatttggccttccttggccggggaacaaaattgggttcccacaaatgccccagggggaatccacttggggggaatcgggccgcggatgaaattgtttgatccttttttttgaacggaggtttaatttaccctgggg

SEQ ID NO: 16172 - DNA, 399 bp, Oryza sativa
  Clone ID: uC-osflcyp116b08a1
cagtgcaaaaatttttctgaaacaaaatgagtacatcatcctcctctatcatctccctccttaattaaatcatcacagaataatcatatatttactccgggatgcagtagtttagtgtgtgacgaaaagtcggagcagtaaataaataaatccaaaaggcgaatttacgaagcaagcaagcattagtggttattaatctccttcaattaaggcctcctcctccttaatcaacggcgagggtaggtagtgctgcggtttggcggcggtcgccttcgccggcgggcttggcgtccatgacggtctcgaaggcgccgacgagcgccttcaccctgctgcactgccgtttttccaggagcttgctccgcgcctccttgatcacgttgttgctccgccgggcca

SEQ ID NO: 16173 - DNA, 477 bp, Oryza sativa
  Clone ID: uC-osflcyp116b09a1
ctgaaatgtagcaagagttcattagcctgaaagtgggtggaaagtacagatttatatagtattcctgaatgaaaaatggctgttggaaaatggaaacccaaaatgaaattcataattgatacctattttgactatctggctggactattgaccctcgcctgtatccactcaaattttagaaagagagtaatggtagagctatctgtaaaacaatctaacaaaaatgatcgcatgtaaaatctgcttgaaattaacaatacaagcaagggtgcagagcacttcttccacaccccatgtgttgcctactctgtatctcttacccgagcagaagtgctattgttgaatctttaggactggaaaggcaataacatcccttatactcgccgagttggtcaaaagcattactagtcggtcgattccaaggcccattccggaagcaggtggcattccgtactctagggaagtcaggaagtcttc

SEQ ID NO: 16174 - DNA, 345 bp, Oryza sativa
  Clone ID: uC-osflcyp116b12a1
gcaaaccccaacttttttcaagttttgaattctgggggggtaatatcaaattcatcacagaattgcacaatttgggcaagcattgggacacttagcgaaggaaaaagagagtactttacaagggggggtgggccattaacgaacccggggtgaacttgggggagaaaacccaagcgttgttggcaacagggttctggaagggggccgaccaggttttccaaggggcccttgccgggaacaatggcctggacaaaaaaaccgaacatggaaaacatggggaggcggccaatcttgatcccctggaccttgagcccggcgaaagggacggggttttccggaaggccc

SEQ ID NO: 16175 - DNA, 277 bp, Oryza sativa
  Clone ID: uC-osflcyp116c01a1
gggaaaaaacaatttttttgcttacgggggggccaaccgcatgggataatcattttcccgggcgggccccttatcctgggcggtcaaattataccgcccacatggaacaaaagaaaaccaaaaattaaaaaaaaaccgaaaattgggggctctggacgcaaccggtccaccgcaactttgtcgggatctggggcggggtcccgtttgtttgtcgccctttccgggtcgctgccttgccaacgcccggtttgggtcccccttgttccctgttgttgcc

SEQ ID NO: 16176 - DNA, 416 bp, Oryza sativa
  Clone ID: uC-osflcyp116c02a1
gtatcaatcaaaaatacatgtaagatcatagctcaatttggaataatacaaagtgatttcaggtatctaacctgtccattgcaatgactaaaccagctgctgtccattgcaatttcgttttgttcatgtctgtacttaagattggaacagagaaactcaaatgattttagcaagcgcaacgcaataagggtactgtgattctttctgagccatgatctgtcctcaagaccattgaagattgttttcattggacatcggaagatcctattttggctcgaatcacagcacttagccaaaaattaacttacttaagtacacatttaaaagtgcttgacagatccaaatgtttcccttttgaccccatttgttactcatcactttaactttcctcctcactttcgacatcttggttaaag

SEQ ID NO: 16177 - DNA, 454 bp, Oryza sativa
  Clone ID: uC-osflcyp116c03a1
atctcaagctggtattggtattatcacatcaaaggtaattaaacgctgaaagtagggaaacacacggcagtatttacacatggaagatgtttacacacaaacacacttctttgggttgtcgctagcccttgataggagccagcaggctagctgacacgtaccggtctctggtagtactaacagagacagcaagctactaggaacagagtaacaagataagatagcaacatactagataattaattacgtattagataaccacaaggaccagcaaacatggcgtgacagagagatcgaccagcctccgatcaatgggattattcagttcagcgatggctgctcctggtctcgtcgctgtacagccagtcgtagacggtgggggagttgggctgggggcggtcgaagaggttggcgcccaggctcttggcggccaggttgcttcccggtggaacac

SEQ ID NO: 16178 - DNA, 406 bp, Oryza sativa
  Clone ID: uC-osflcyp116c04a1
acaggtagaatctataatttgttttgttattagcatctttacaggcgaaatatgtaaaattttggccgaacatcttaaacacggcatcagttattcttgaagcactaggctgcgtatatttttatggacgatatagaagaaaatctgtaccataactctaaatttttttatgctgaggatatacaactgcaaaaagcctgcattctgccaacagaagacagggtgcacgatgctgattttttaagaatcaaaagaattatttattgggcccttcttcacagcaaaatcgaagatcactcttggagtgctctaacatgggaactcatctctctgacttgattctcaagccgtcctgggtggcagaagaaatcgacaaatactcgtctttcctgctgcacattgcgcg

SEQ ID NO: 16179 - DNA, 354 bp, Oryza sativa
  Clone ID: uC-osflcyp116c05a1
atgaattgggaagaaacaagaaagacgggtacccccaaaatggtttaataggggggtggggttcatcccaaaaaagtgggggggataagggttcccgggggggggaacccttttagagggaaactcccaccctggggggggaacccctaatcatggactttacaaacccgaaattaatttcaggggcagccctaatggcatgggggccactaggggccattgggaaagcccttggggggagggccataacgggccctgggtttggctgaaaaaatccccttggggggcttccttttataaaaattttgggacaagggggcaaccctggggggggggaacccccccggggggaaa

SEQ ID NO: 16180 - DNA, 428 bp, Oryza sativa
  Clone ID: uC-osflcyp116c06a1
aactaaaaaggaacaaaattattgcctgtggctgttgcatgattcagaaggacaacaagcttattgagtatgctctgcttctcatacacaagaaaaattcacagaccaagttttgctgctcttcaaatctaagggcagtccaaattatactccaatttccaaccaagcatgcaacaactggggaaatttggagcaaaaacaaggaactaaaatcttttctgccgatgaatagcttccgaaaggtgtagatttcacttcttcaacaaggttgcactgcattgggccattatctttgaggctcttgtgattgcatcagtcatattgaagttttccacaacagttttgaatggagtagagcttaattgttgctttaccggaggctttacttcagaggaaatagtgcacggcttcctttcatctacatgcac

SEQ ID NO: 16181 - DNA, 343 bp, Oryza sativa
  Clone ID: uC-osflcyp116c07a1
ggaaagtccaaagcttgcacttttaaagtaacatttgcaggagtccatccaccataaatgggggttttttcgatccaggggcattttatgttggtccatactaggggtacagtttaacaataaactgttgtttaaacccagcagtttttgggacgattcttgagtaatacataaattctattttacatatattatctccatgccaagtatttttgaagactggcatagggggcagaagtttaatttgcttttgcactccttggaaaggcaaagatgcctacaaggcaccaattgtatgcaagccctcctttgacttgcaaattttacatgcggtcaaattttt

SEQ ID NO: 16182 - DNA, 374 bp, Oryza sativa
  Clone ID: uC-osflcyp116c08a1
gaaataaatggatgaattcatcacagaagagagtttagaaacaacgggtctgaactttcatcgatccatatagtaggttacataagctcaaattctcagatttaacgctgattttgttaagctctttttcctcgtaacctacttcgaatgcgaagtcaagtcctgttcgtagtcccctgggaccaaagcaaataagttactcgtgcgggggagctcgagcagagttttggcaagcaccagctccaacactaacacctacaggtcaatgactcgtgatagcttctggatgcggttcaccaggaagtccccttgcttgatggttgcctggtagaaagcatttttggcatcaggccggttcgtttccaggacgcaag

SEQ ID NO: 16183 - DNA, 299 bp, Oryza sativa
  Clone ID: uC-osflcyp116c09a1
tcgcgatctagaacgcggtgcgtgatattttgggtttcataaaatgggatgtaatcaaaagctcagagtaggtagacacaccgggtttcaaactcatggaagctatttagacacaaacacaattttttgggttgaggataaaccttgattggagtaagctatttttgttacacgcccgggtctatggaaaggctaaaaacttgtgggtagttccttggaaccgagtaacaagatttccttgtggggggctggtaaatcaaattcgtgttagataaccacaggaacgattaaacatactg

SEQ ID NO: 16184 - DNA, 122 bp, Oryza sativa
  Clone ID: uC-osflcyp116c10a1
ccaaaaaaatactgccaaatgagggttccctaaggaaaaaaaaaaccccaccaaaatttcaaaggccacggtattgacgggcgggccaaaaaaaatgttaagtacactatttttctaaaagg

SEQ ID NO: 16185 - DNA, 309 bp, Oryza sativa
  Clone ID: uC-osflcyp116c11a1
gggaactgaagaagacttcgttattgatcccaatttcatactatttatgaactgccttgatagagtacaatacaagaccccacccatacatatgagaatgaaatggtgttctgaactcgtgagagtcccatctaaaagctggggacacttgcgtcttatttagacagttaattgggaatcatttctagtactagtaccaacagtaattaatagagctccccattgatgacgtcatcgcagattgggttggaggaaggatggggtattttagaacgcaccttgcagtcgcagcaggctgggcttgagcgg

SEQ ID NO: 16186 - DNA, 386 bp, Oryza sativa
  Clone ID: uC-osflcyp116c12a1
aaccaaaacataggagggttcatttcttcttctcaaagtaggggaacatctttccttttttcacccttacataagcttaagcaataacagataacaaatcctcctcctcctttaggtaaaatttttaaacccaatacccttataaggacttattattaggaaaggagcgtgcatgggcataaatggcaacggggggcaggttaagaatcacaatgctgagcagcgggggaacaaaaccccctaatgggacagagcaaaagcctccgaaagggagcttttaggcagaagggttctcccacttgggggggtttaccaccttccaggtgaagtctgggtcgtcccttcccaagtgaccgttagccgccgttttgaggtagcgtcgttgc

SEQ ID NO: 16187 - DNA, 372 bp, Oryza sativa
  Clone ID: uC-osflcyp116d02a1
aacgcaaaagccacggcttttggaagcccagcaagaactttatataaaggtgatcactaataacaatgatgataaaaccacatgtggaaaggaggacgatgatccacaggatgggacaagtaccgtaggtacggccattattggaggattacacaagagcacccaaacgcacttacccaaaagacgaagaaaaaggagctaatttaaatggcagatgagcaatgtagtagtagtggtagcatgcaaccaaattgaaatggaatgagaattttttttggcgtgattttcttttttttctctttccttttttttttacttctcccagcacaaatgcaatttaccagatcgtccgatcaatggagcatccggagc

SEQ ID NO: 16188 - DNA, 396 bp, Oryza sativa
  unsure (1)..(396): unsure at all n locations
  Clone ID: uC-osflcyp116d04a1
aaacattagtttttatgctgtataataacacataattcggtttatttttaaactaaacaggaggttttatgtttatattaacaaactactaactactacagagatccggtataacaaactggagaggcaaggggttacatcccttataggcatatcaaaagtctaccgcttactgaatgaacatcccaaggggtattcaacccgcctacttcatataangcggcagcatcatgaggccaaaacataggtcttcaactagaacattgctgtcaataatgaggtacaaacctaaagcggttccattgtccaccatatccagcaggctgtggtaaacacccccttttgcaacagcaggctgtgggtttgcaggaagtgcagcatagccactctgagctg

SEQ ID NO: 16189 - DNA, 106 bp, Oryza sativa
  Clone ID: uC-osflcyp116d05a1
aaactacatgacttacatggtaaaatcggtatttccatcaagtttggaaatgctagtgtttgtttgctgtctttgtatcgtccactggtttttcttcatatattaa

SEQ ID NO: 16190 - DNA, 413 bp, Oryza sativa
  Clone ID: uC-osflcyp116d06a1
gcgcatggaacaaacaagttaccacaaattagtcggtcatatgaatcacaactaccaagtagtgaaatttgcagattttgcttctaacagcctactactagttgctgtactaaactcaaagaacttaactcacaaccattatagcttccagcccataatttccttgaacaatcatctatactgaacaagaacatctctcaccgacgaagcagtaagaaagaatgacacaggatgagcaaccaaaggtacaaatgaatacatcgactctgccacagatatggtggataaccccttgccggcttacacaggaggaaacctaaaagttggtagggaactaggagtgactagatgcacaaaaaggattacttgagtatacgtattccacttccaaacgattatagccactgacagtg

SEQ ID NO: 16191 - DNA, 498 bp, Oryza sativa
  Clone ID: uC-osflcyp116d07a1
ttttgttttttttttttttttttttttttttttttttttttttttttttttttttttttttttttttttttgggagaaaaggggaaaagggaaagggaaaactttttacaatttccaagccaagctgggccatggccaaaaccccagggggaccggaaaaagggtgggcatgggccttggaaaacccaaagggacatgttttttatgccccgggaaagcaccggggtttattcataaaattcccccctccaggggggcccggaccctgttttaggggcaaaaaatgggacccccggaggggtctgttttaagccgatgattcaaaacccggaccaagatctatggccctttaggggggggggtcccccaggggcttgaaaacccggagccgcttgaagttttccaacgccctttcccacaccttggccttgccccgattattgggccccccgggttccttcaccttgcggggggggggggggaagaaaaagggaaaaa

SEQ ID NO: 16192 - DNA, 177 bp, Oryza sativa
  Clone ID: uC-osflcyp116d08a1
ttttttttttttttttttttttttttttttttttttttttttttttttttttttttggaaccaaaattttttaaaaaacatgggtatttattttattaaaaccaaaggaacaaaactaaaaaaaaaatgaaatggtcttaaaaattcccaaaaacaataaaatgaaaggtgggaccc

SEQ ID NO: 16193 - DNA, 441 bp, Oryza sativa
  Clone ID: uC-osflcyp116d10a1
gaagcaaagggataggactaagcatccaaacatcagtcgacatgctgcagaataacacataattcggttcacttttaaactaaacaggaggttttatgtcatcttaacaaactactaactactacagagatccggtataacaactggagaggcaaggggttacatcccttataggcatatcaaaagtctaccgcttactgaatgaacatcccaaggggattcaaccgcctacttcatataagcggcagcatcatgaggcaaaacatagtcttcaactagatcattgctgtcaataatgaggtacaaacctcaagcggtccattgtccaccatatccagcaggctgcggtgacaccccctttgcaacagcaggctgtgggtttgcaggaggtgcagcatagccactcttagctggtggctggcagactgatcataagctggt

SEQ ID NO: 16194 - DNA, 514 bp, Oryza sativa
  Clone ID: uC-osflcyp116d11a1
aaactacatgacttacatggcaaaatcggcatctccatcaagtatggaaatgctagtgtttgtttgctgtctttgtatcgtccactggttttcttcatatattaatgataaacagatgggggcttggtgtcactgtgcccgtatatccagttgtttcagagcagacctcatgtcatcagtgccataaccctcaattccaatgatgtttgggctatcaagtgcaacaacatcttgtaaaggataccgcctaacagaatggattctatttgcagatgtgttgaattcacccttaaggatgaccgtcttatgaagacctccaaacaattcttcgtaatctgaatcaccagtttcaccaacaagaaccaccacattttgcaactctatgccccagcgaacagataagtaccttagagccttagaccgtgatgcgtggattggaattacagatagtctggtagcaccatggttatacagagcgtgacaacgagtgactgaatttttaataacttttgca

SEQ ID NO: 16195 - DNA, 481 bp, Oryza sativa
  Clone ID: uC-osflcyp116d12a1
gacaggcgaaggtatgccatctcaagctcttgaattgatttatgttttacaaagctgaccgtctcagattatgctcccggaggccggaattacatttataacatacacaataagggtagcaggtatataaagcattgcagttggtagagtgaggacagaaataaatatctccacttgacgtcgaataagcgtagagcaatcaagtgttgaggttctggaacagctcaggcagatgggcgttcgtgagcttggtccggcgtgtgatctcacgctgtttcttcttaggcttagccttgggctgcaccccattgatctgtgctgcagcccgccgtttagctgtgttggtcatgggcttgatgccattcttatggagctccttctcgatatccaccatgttccggggtaactacatcttccggaagagctgcttcaggttaatgtcgaccttgatctttggctttggtcgttaggatacacatgt

SEQ ID NO: 16196 - DNA, 455 bp, Oryza sativa
  Clone ID: uC-osflcyp116e01a1
gagtaaaagacactgaaaggtctcattttattcagagcattttgttcagcagcactcctaccaaccaacgctattcaaatcagagatgaatagctggtgggtctcacaatcagatcaagccattctcatacagttcagccaactccaacatcttaaaactatagctgcctttgcaccaaaatcttaacatttatacagtaacaggcacaacaacgaaatggcaggtaaatttctcctcaatttgccatcgaaggcatcagtttttcagtaccctctgtgatttagcacactaaaaaaaagcatgtctggctttgatttattttgttttggtctacacgatgatgctatcatggggacaaaaaaaaagaaggcctggggaaaattcatcaggcttgtatagaactccccatctgttcaatggtgaatggcaatttaattgcggtacgctgccatga

SEQ ID NO: 16197 - DNA, 99 bp, Oryza sativa
  Clone ID: uC-osflcyp116e02a1
gggcaaaatggaatttataaaacgtttcggtttacacgtagtacacacagattgggaacatccctgaaaaaattaaaatagatcatgcacacagggggc

SEQ ID NO: 16198 - DNA, 288 bp, Oryza sativa
  Clone ID: uC-osflcyp116e03a1
cattccgatagatagcaccaagcagttcaaacaccataaccaaagcgaactcaattcatggtaacatcacggacgaagaacacctaacactggtatggatggatagagggctttttcactcgagagcagccactggacacaatttacgactggtactcgatgatcagatgatttctgacacggattagctatggataactggctcacgatggggccccaccaatcagtttcctttcagtttcccggcggagtcgccctccgttgcccctcgttctcggcttgccaccg

SEQ ID NO: 16199 - DNA, 183 bp, Oryza sativa
  Clone ID: uC-osflcyp116e04a1
gctcacacactttatttatggatgaatataatatttcaagtttgatgtgtttacttccaaggctgaagaatgcaattgttggtttccaaccttcaattgtgtgggagttgatgctgattgcctaccttgaattttgattcggttttgggcacgcgtgtacccttgatctttacataccttgat

SEQ ID NO: 16200 - DNA, 405 bp, Oryza sativa
  Clone ID: uC-osflcyp116e05a1
gctaaaactttctatagataaggcagaaagaaactatgggcaaagttattgagaccaccaaaggttttatgacacacacacacacacaacattcactatatatataagacaccatttagagcaaagctatccaagcagcgcatattaccctccatttccaccgtttcttagagggaaagggactttgagctggaccattgcatagccatattcgaagccaagggagctgagagtaataagcgtttgggttaaggttaacgacacagtttgccttgtagcctaccctttcgggatttcctcgaaaggggaaaacccgttaatgtaagccttattctgttttaatatggaaggtaatttttccctttaacttatttcctgcaccgtgttgtttttagatcaaagtgt

SEQ ID NO: 16201 - DNA, 502 bp, Oryza sativa
  Clone ID: uC-osflcyp116e07a1
aaactgcgtagaaaccaaacattgtaaagctctgatatcttgcatagtttcccaacatggtccggtgaacagaaaatatatgaaactagacttcagaaaaccacagcactgtcgcatggtgctaactgagttcctcgtcaaaatcattacactgaaaaatgaaactacagggcgagctcaacggtggggggcgaatataatttaggtcatccgctgggcggcctccttagcgagaagcttttccctggccttggtcttcgcctgcgacttggagcccatgacgccgcctccccacttcttcctgacctcgtcgaacttgtcgttgaagttcgccttgatggcctccaagatcttgctgaactcaagcttgtcctcgttcttgacagtggtcaagcacagaacagatgcagtcttcttgtgaacaatcgatccaaggcgagctttgcccttaacgatgcagtaagggaccttcattttcctacacgggctgaagccacacaac

SEQ ID NO: 16202 - DNA, 455 bp, Oryza sativa
  Clone ID: uC-osflcyp116e09a1
gcctgaattattgttgttattatttatcaatgctatgaacctaaatcatcaatagttactacaatatggaaacctctggtcacccaatacaactaaatatgcacatcagctgggtagtctgcagggtgcttcttgattgtatccctcagcaatcgctcttgctctcttaggttggaaggaacttcatcataaacatcagtgaaaagttcagcgagtggctggttttggcattctttctgctacctgaatggctttcagaagctcttgcttcacattattcctgagttcagattcctcttcatcacaccaccagccatttccctgaacccattttctgtacctggaaatcggatctcgcgctgttcgccagtgctcgatctcatgactggcctgtacttggttgaatcatcagatgtcgagtgatggccgacccggaagtcagtgcctaactaaaa

SEQ ID NO: 16203 - DNA, 467 bp, Oryza sativa
  Clone ID: uC-osflcyp116e10a1
aggactatacatgcacacacacttcatttatgtatgaatataatatttcaagttgatatgtatacttccaaggctgaagaatgtcattgtttcttcaaaccttcaattgtgtggagttgatgctgatgcctaccttgaattttcatcgatttgtcacgcgtgtaccttgatcttacataccttgattacatggaccataacacaggtattcgtgatgttaccacttgggtctcctgataacacaggtattcgtgatgttaccaaaatatacatataatcttatttgttgaggcgacacacccgtgacatgctaacgagcatccatatattcacaaattcatccttctgatgatcctagaacaatgctgtcatcttcagatggcaaatcagcttagacatcagcaacttccgcttggtattatactgtttcgcggaagcgactgttgccttcaattaatttttagaat

SEQ ID NO: 16204 - DNA, 435 bp, Oryza sativa
  Clone ID: uC-osflcyp116e11a1
agaataaccaaaacataggaggtttcatttcttcttctcaaagtagtgtagcatctttccttctttcaccattacataagcttaagcaataacagataacaaatcctcctcctcctttaggtaaaatattcaaacacaatacccttataagtacttattattaggaaagtagcgtgcatgggcataaatggcagcggggggcaggttaagaatcacaatgctgagcagcgaggaaacaaaacaccataatgggacagagcaaaagccttcgaaagggagcttttaggcagaaggcttctcccacttgaggggctttaccaccttccaggtgaagtctgggtcgtcccttccgaagtgaccgtaagccgccgtcttgaggtagcgtccgttgccgtctttcttgaggtcaaggttgatgatgatcatgccaggcct

SEQ ID NO: 16205 - DNA, 486 bp, Oryza sativa
  Clone ID: uC-osflcyp116e12a1
ggcggcgacgggatcccaccccgcccgccgcatctcgccgagcatcgacttggcgaaggagcggaccgacctggcggcgtggcgcagcgcggcgaggaagtgggtggcgttgaggccggagaggtggaggccgtcgagcgcggcgagggtgcgtcccgggtgggcgcgctcctccagcgcgcgcgcggcgcggagatcgtcggcgagcgcggcgcgggcgcgctccgcctcggcgtcccgcgcgcgcagctcccgcccgagcttccccgccgtgatctcgtaggtccggaggaggtggcgctgctcgtcggcgtgcgcggcgagcgccgcgggcccggccgacgcgctcttggccgcggcggcggggtccctggcgaacctccgcttgtgggcggagagtttggtgagctcggcgaccatcgcgcgtccgccgactggatcgcctcggagtcgtaccggtgctgcgcctgctgcaattgcgcgtac

SEQ ID NO: 16206 - DNA, 240 bp, Oryza sativa
  Clone ID: uC-osflcyp116f01a1
agggaataacctggaacttgaaaaacatgtctatgaaatacaaagaacttacatagggggtttacgctgtcaatggcgtgctaaaaatacgcacatatgttgtacgaattggatgatggaaaaagtattacataagctttatgaaagaaaaggaacgaacgaagatagtgtcgatctccaacaggtaccatgataattttttttcaaaggaaacacatagattcgacaatcaatttccag

SEQ ID NO: 16207 - DNA, 135 bp, Oryza sativa
  Clone ID: uC-osflcyp116f03a1
taagggggttaactcacaaaaggggaagcacaaagcagaggaaagggactgcagaagaacacaaaccaagaggacaatggggcaacgaaagaaatggctaaagacaaaggtgaaagaatggaacctagagaaaaa

SEQ ID NO: 16208 - DNA, 388 bp, Oryza sativa
  Clone ID: uC-osflcyp116f04a1
atacaagaaatacaattatactcaattctaaaataccttttaatccctttagtgtagtagcaaattcggcatgagacaaattcggttcctagtcatctatcatccaatgcaaattgccgcggttcccagcgaaacaagacctttttttaattttaaaaaaacagcgacccagaagttgacttagctttaggcaccgcttattcttcgaattatctcatcgaaacttaatccctggttttttaaccgccgttaatggccaacatatcttccctcccttccccgcttcgactcgaactgtcttccgtcttaccggctaatccggcggccaatggaacgggcgttgggcctcggcgtgcacagggcggtgggtacaacgtcggggagcggg

SEQ ID NO: 16209 - DNA, 491 bp, Oryza sativa
  Clone ID: uC-osflcyp116f06a1
atgattaaacttgaacgaggttctatgggttaatctgggatgtatgaagcatatgttcggggtgaccaggacgtattgtttccgaaccgatcggtgaagcggagacctgatgcccttcagggactagcctcctttcccaagcaagttttcagccattttggagtaacacccgaggatcgtggttattaaaaaccggtgaaatagtcgactcccaacgctttttataattgtctttccttgagtaaagtcccaagaaggcagtttccaccctcaatcaccaaagcaggaatccaccttctggctttccgcaagtttgggagaattcgtggccattttccctgatagaaaaggttattctgattaactcttgcttggcttcatttttaagaagagccggcatttgttccaatccagatttccctggttgcttttttcaaataatttcaaatctcagccatagcttggtttctaactttttcgcaggtaaacag

SEQ ID NO: 16210 - DNA, 338 bp, Oryza sativa
  Clone ID: uC-osflcyp116f07a1
gcttatatcatctttgtcaactagagttcaatttaaatataggtcatctggcaatccgcacgggcaatgagaacattttaataagcgctgcttagccacatgaatttgtctaagcagagtaacatgtacgctcgcaattctgatagtgctacaaaatgaatatgatgccgccctgattcagtatgtcctttgaaaaaaactagtctccgcgcttgagcaaagacaaacctaaattctctacgactgaccacgcccaccacgaccccgtgttcctcggccgccatctttcctgtatgtaagagactggttgccacggccccttgcattctggtgagtgg

SEQ ID NO: 16211 - DNA, 434 bp, Oryza sativa
  Clone ID: uC-osflcyp116f08a1
cactcacaatagcacaagcacaaagtagaggttgttactgcataagaacaatcaccaagatgacaatgtctaaagcagatatgcttcaggttctgttcaggctgcactaggcaaaatagttctgttttattgagaccaagtactcacgtactggttcgggagtacggcataggtaggtagtttgtagccacagccatcgccatcttagtcacggcgcaaccttcagcatatatgcctcccactacaatcttaggactcgagatccttgacgatgaagttctggcgactgatggggttcatgacaaccggtggcccatcagtgcgaggccaggcttgaaacttcttgccagttgcttgccaccattccttgtcggacacggtatgtggtgtggtgcctccaaatatcttcttctcagcgataaaatgatcacaaa

SEQ ID NO: 16212 - DNA, 380 bp, Oryza sativa
  Clone ID: uC-osflcyp116f09a1
aatcctcaaaaagggttacttatgcagtgaaaagggttttatgctctttcatacagtgtgacagtgtgtgtacatataatttggaaaaacaaagtgaagatggatttacagcagcgtttctcagatacagcggacttatagctacaagctgatcacacaagggaactttgctgctgatgatgatatggatcatgttgttatagcttacgcccacgacgggttgtcgccggtcctgaaggcggttctccacccacggcacgaagagaaccttgccgtcgtcgacgttagagtgcaccaatgccagcgacaggggagcaggttcacggacgaccctgccctggttgatggactgagagccgaggcaggggcagatgaacttg

SEQ ID NO: 16213 - DNA, 493 bp, Oryza sativa
  Clone ID: uC-osflcyp116f12a1
gaaaaagaaaatgatcgtattttattgactgatcctaatgttttctttaaaatataaacaagctacaagcgaaagaaaatacatgcacctgaaccaggtctatgggttaatctgggtgtatgaagcatatgtttcactgatcaacagactgatacgaacaacactgtactaaacctgatgcctcagggctagctccttcccaagcagtttcagcatctccctaaccccgagatagtgttctaaaaccggtgaatagcgatccaacgctttatatgtcttcctgagaagtccaagaagcagttccacctcatcaccaagcagatccacctctgcttccgcagtttggagatcgtggcatcgcctgatgaaagctatctgataactctgttcgctcattttaagagagcgcatctgttcaatcagatttccctgttgcttttttaaaaaattcaatctcagcatagctgtttctaacttttcgcaagtaacagct

SEQ ID NO: 16214 - DNA, 424 bp, Oryza sativa
  Clone ID: uC-osflcyp116g01a1
gataggtcaaattcacaggcattagggaatgatgattaatttaactgttcactgacgtattcatcgtggttcaagactaattaattaaaagctgcagtaccttcacagaactatactccttacttcttagcataaagctgatcgagggagcgtataaaaatttaactttacatacagagaccaaattatatgcaataggattaatttgccgctgttccgttctgccaaactgcaggcagaaccatcgctgctgagaattgctttccttccttcgttcgttgcgcttcagatcctggacgggatgagcggcgtcgaattctacaggtacgccgccggcgacgtcacgccggagccgagcttaaccgggtagccgatgtccttgagcaccatctccacttcacttagggcacccatcaattgcagc

SEQ ID NO: 16215 - DNA, 63 bp, Oryza sativa
  Clone ID: uC-osflcyp116g02a1
ctccacagtttttattattattatttttataaccgcgattttaacacgtaaccaaacttgaaa

SEQ ID NO: 16216 - DNA, 330 bp, Oryza sativa
  Clone ID: uC-osflcyp116g03a1
gatcactccaagcctttggaaagctgacgctgtggcaattatgtagggaaaaatgcattcatcaagttgtgctagtgtcggcataaaagactgcaatagggctagttccgtatcaaaggtgccgcactgacactgaggatgagggtgtatgtacatgcatggggagctcttttgaccaatccacatgagagatgagggcagttctagtaagcctatggctgcgcaagcccacacacatacatactggcagtatgacatgcctgctgggagttgagcagcacaagcgatgccacagagatggacttctgcgctttagctacctccacttgc

SEQ ID NO: 16217 - DNA, 494 bp, Oryza sativa
  Clone ID: uC-osflcyp116g04a1
ggaggacgcgctggaggagagcggcgtggcggtgtacctccccaggcttctcgccggcgtcatctccggcgctctcaccggcctcttcgctctcgctggggccttgaccggagcggtgaccggcgcgctggccggaagggcttcagacagcggcgtgctccggggagctggattgggggcgttcgccggagctgtgctctccattgaggtcctcgaggcttctcgtgcttattggtgctcggaccggctgggctctcatggcacatcctccatggcagatttcatagagcagctcctccaagcgcggtttgtgcaagagcaaattgtaccttcaggatatgcaacgcatcgttggcaggtcagcatttcagattttggtcatgatgatctgtatgatatttttggaggatgttcatccaaagggctttcacgggagtcactgaataaaataccacactatgtggacaatgaccaaacacggaactcgtttggtg

SEQ ID NO: 16218 - DNA, 140 bp, Oryza sativa
  Clone ID: uC-osflcyp116g05a1
tttttgtgtgttttttttttttttttttttttttatttttttttgttgttttatctacggcgcttacaccggacaattggcgaacgacgggaaccagaccggagaggagaccggcccaaaggacggaagggctccagaca

SEQ ID NO: 16219 - DNA, 93 bp, Oryza sativa
  Clone ID: uC-osflcyp116g06a1
ggtattccaaaaaagcgaaatatatttcataatgaacataaatctgcttctacaaaatactcccatcagtaacatgaggcaccaaaccacaag

SEQ ID NO: 16220 - DNA, 311 bp, Oryza sativa
  Clone ID: uC-osflcyp116g07a1
gagcggacagtaacccacagctttattatgatgattattattactgctgctaacaagtactaccactgttgcaataacgtctactataggctagcagatgctcacctggcctagttactttttttggggtacgttgggagttggaggttgaaatgccgtgcgaaatctttcagaggaatgatggtgccgacgatgatctatcaatatcatatctggatgcaggatgtcaacatgtgtaccgggtgatttgcaggtgattttatggggcgccgtcccgtcatccatccagccatgatccaattccaatctac

SEQ ID NO: 16221 - DNA, 325 bp, Oryza sativa
  Clone ID: uC-osflcyp116g08a1
caaaccaaggtgatggatctttattgatcttagctatttactgacatactgtacatgctgaagttgcaaaaaattactacgcggccgtggctgggatgatgatggggctcctcacgatgtgttcgtccgagacccacttcaggttgccctcggcgccggcgacgttcggctggccggcccaccgcaccgttacggtgaagcctctgcatctccttcagctccgtgaaccgaagcattggcggttggacgatcacggacacgttcttgggcatgtcgacgacggccgtgtacacggaactgggctttccgacgttggtcaccgtcc

SEQ ID NO: 16222 - DNA, 274 bp, Oryza sativa
  Clone ID: uC-osflcyp116g09a1
attacaggaaactagataaactaatccatcaaatacaatgatttcgttaagggggtatacacttatctggtgaacaggcaatacacacataattgtacgctgtgatggtagaaaaattctactaatcttatcaaagaaaggaaccaacacgacatgccaatcccaacaattccatatatttcttttcaaaggaacaataattccacatcaatcccaaggtttgtgtccgatcgagactgcttggtcacacgggcagaccttgatcagaagcaag

SEQ ID NO: 16223 - DNA, 427 bp, Oryza sativa
  Clone ID: uC-osflcyp116g11a1
acagaaccggagagagtattaatcaagtcgattacatcataaatacaagaggggcaaacaaaaaatgttcagcaacatagagcctttctcatggcaaaactgttgtataagtgcacgcaatgctttatttccgaggtatacaagcatcgtgagagatgtggcacattgcatctccctatctatacggctatatatggggccaccagattctacaaacatgcaggttagtagtggcacccagcaccaatgaccaaacacatcggtgtgttggatttggataccatgcaacggatgtggggcaaatttacaatttacaggttgccccaaaaatgccgccagctccagcctccttaagctatagtattatgttgtgaattgagttactgcatgctattccagagagcagagaatttatgccctcaatgat

SEQ ID NO: 16224 - DNA, 440 bp, Oryza sativa
  Clone ID: uC-osflcyp116g12a1
ggacaacatgcaattcataaaacgtataggattacacgtagtacacacagatcgtgtacatactgaagaaaattaagatagaacatgcacacagggagcgtgcaacataaagtatacagctgatacagagagagaatggagcgctgcatgtctgccgcaggtgttattttaattactttgttcatatatgctgtagcaaatacgtgcttaattactagctgatcaactccgatcgagctagcgtgttaagctcgatcgatcgatccaagcaggattaattgatctagctgaccttgttgcagtcggtggagaggctgatggggaagccgacgttgacgccgcacttgccggggacgccggcgacggtgccgaggttgagcgacttgatgctgccggcgaggcttttgaggcagtggcaggccgtctgcggtcggcggtgg

SEQ ID NO: 16225 - DNA, 77 bp, Oryza sativa
  Clone ID: uC-osflcyp116h04a1
ggaaactcaaagcatctgacagccagaggcgagaagttacaccacaggcccatgcataacatgccattcttccttcc

SEQ ID NO: 16226 - DNA, 423 bp, Oryza sativa
  Clone ID: uC-osflcyp116h05a1
tctttgggggtttttttcttttttcggtatccaaatccaatttatcttatttttcaataaggcccttccccgacatctcagaatggatcccaatggcttgtcactacctatcctgtcacaagactttgtgtcattaggcctctctcaagttctctcatacaagcattgacattgcaaagttacaccgagaggtctgaaacaaaagtgcagactgctgatggagacaagccgaattagcttacgcttcatcaagggcaagaacacctgggagggtcttgccttccagcaactccaagctagcaccaccgccggtggagatgtggctcatcttgtcggccaggccagccttctcgaccgcagcaacggagtcaccaccaccgatgatggtcgtggcgccctttgtggtagtaagatcagccaact

SEQ ID NO: 16227 - DNA, 244 bp, Oryza sativa
  Clone ID: uC-osflcyp116h07a1
ctggccaaaacaaatctattttgtctcggttaaaagggaaccttacggggaaaaattaggtttacagtagtgttatttaaccggggggattaacaaagatatggggcttctgaaaaactggacaacatccacaaatttgacaactaaggccagacgcataaatcttaactgggtacatgaggggattgaaaagggttcgaaagggtccttgggagttagcatggtgggcatgcaatgttcaaag

SEQ ID NO: 16228 - DNA, 183 bp, Oryza sativa
  Clone ID: uC-osflcyp116h08a1
attaacttggttaatgttcattacacaaacaaaacccaccactgttcatagggggaaaaaaacaaaaaggggggccacacaaacaaatgttgggagaaaaaactcagggagttgtggtaaaaaaccaccacccaaagaaaaatggagcgcccgaacaaaaaaaacggtccgagggggggggaa

SEQ ID NO: 16229 - DNA, 278 bp, Oryza sativa
  Clone ID: uC-osflcyp116h09a1
aggtaaacaagcaattgatttattagtatccatccaattaaaactgtgtgttacactcgaaataaaattttctgttcgtaacacctctgaaaacaaaaaatgattcctacacaaggaaaagaatcaacgaaacaatccttagcaaatgctacaggagcaacatctcctggggaaccccctctgtggttggactgctggaaagtagcttgaagtagaaaaaccttcaacctttcatcagctctagtcccatcttaatattcaagtttatcatggggaaa

SEQ ID NO: 16230 - DNA, 514 bp, Oryza sativa
  Clone ID: uC-osflcyp116h10a1
gtgataaccgcatatcaaaatatcgatccatgagagtatgtatgtcagttcgaaccacttcactcgcggcagcgaggaagtcgaaaagcttattcacgactcatctagcaaaacttgacgataagcctatctcaagttcttcatacaagcattgacattgcaaagttacaccgagaggtctgaaacaaaagtgcagactgctgatggagacaagccgaattagcttacgcttcatcaagggcaagaacacctgggagggtcttgccttccagcaactccaagctagcaccaccgccggtggagatgtggctcatcttgtcggccagcccagccttctcgaccgcagcaacggagtcaccaccaccgatgatggtcgtggcgccctttgtggtagcaagatcagccaacttcttggcaattgcatcagtgcctgctgcaaacttctcaaactcaaagactcccataggtccgttccaaatgatagtgtttgcggtgtccaatgcttcgctggaag

SEQ ID NO: 16231 - DNA, 384 bp, Oryza sativa
  Clone ID: uC-osflcyp116h11a1
acttaaaacaagcccacgcgtccgagaagaccaaggccggcaagcccttcgtcgatgtcctcaaggagggcggagtcctccctggcatcaagggtgacaagggtaccgctgaggttgccggtaccaacaaagagaccaccacccagggccacgatgatcttggcaagcgttgcgccaagtacttcgaggccggtggccgctttgccaagcggctgtgccgtcctcaagattggccccaacgggccatcgcagcctttccattgaacctgaatgctcagggcctttggttgttttgccatttatttgccaggagaacggtctggtgccgattgtcgagcctgagatccttgtcgatggcttttaagacattgagcgctgtgcctt

SEQ ID NO: 16232 - DNA, 331 bp, Oryza sativa
  Clone ID: uC-osflcyp117a01a1
ccaatcttggaaataattgcaaagaggactgttcaaactgattcgatttaaaggaaacgcctttcgatttttagagctaggacccgccacagtcctactcttagcaattaacataactacgaattttgccaactctttttttaccataaaaagaactgaggcggaataaacactttgcacaatcttcgaacccattcctttggaaaacccgtgcatttctcttcaccggatcatttttactatcgggttaatcgtaccctggtatcttgacattacattcctgcccaatatattgtttggcttgcaaccctaaacttaaccacttgcaatg

SEQ ID NO: 16233 - DNA, 277 bp, Oryza sativa
  Clone ID: uC-osflcyp117a02a1
ttcttgtttttctttttttttttttttttttttttttttttcttttttttctttttttgtttttttcttcttttccttttttcggaaaaaaaccccgagggcgtgccccacgggcgcgataccccccccaaaaaaagggcccggggctgggccggggtttttctcctccacgggcgcgcgtctctgcccggagggggaacaccaagcgggggacccaaccccgcccccaatttatttaggaaaacaccctctcaccccggggccccccaaagggggg

SEQ ID NO: 16234 - DNA, 480 bp, Oryza sativa
  Clone ID: uC-osflcyp117a03a1
ttttttttttttttttttttttttttttttttttttttttttttttttttttttttttttttttttttttttttttttttattaaaattattatttattattaacaaaaaaaaaaaataaaaggaaaaaaaaaaaagaaaaaaaaaaaaaaaaaaaaaaaaaaaaaaaaaaaaaaaaaaaaaaaaaaaaaaaaaaaaaaaaaaaacccaaaaaaaaaaaaaaaaaaaacaaccacctaaaaaaaatgaatgaccaaaaaaaaaagaatacacacaaaaaacacaaacggaaaaacacaaaacacacccaaaaaaaaaacacaaaacacccaaaaaaagaaaaaaaaaaaaaaaattatttcaacaccacaccaccaaaaaaaaaaaaccccacccccctgggggaaaaaaaaaaaacacaacaaagaaaaccaaaaaacgcacacagaaacaaaaaaaaagaaaaaaaaaacacgaaggg

SEQ ID NO: 16235 - DNA, 51 bp, Oryza sativa
  Clone ID: uC-osflcyp117a04a1
ggacggttatgacaaatagaacatgcagaacgtgacaacaaggaaggaaaa

SEQ ID NO: 16236 - DNA, 89 bp, Oryza sativa
  Clone ID: uC-osflcyp117a05a1
ggtttggtttttttttttggcattttcttattttttttttatatgtttaggccaaaaaaaaaggcaagcattccacgggttattaacat

SEQ ID NO: 16237 - DNA, 508 bp, Oryza sativa
  Clone ID: uC-osflcyp117a08a1
tttgattaaccaaaactataggaggttttattttttttttttaatgtagtgtagtatttttttttttttcaccatttcatatgctaaagcaataacagataacaaatcctcctactcctctaggcaaaataaaaaaacacaatacccttataagtacttattattaggaaagaagcgtgcatgggcataaatggcaacggggggcaggttaagaatcacaatgctgagcagcgaggaaacaaaacaccataatgggacagagcaaaagcctccgaaagggagcttttaggcagaaggcttctcccacttgaggggcttcaccacctcccaggtgaagtctgggtcgacccttccgaagtgaccgtaagccgccgtcttgaggaagcgtccgttgccgcctttcttgaggtcaaggctgatgatgatcatgccaggcctgaagtcgaagttcttcttcacaatcttgaggatctccttgtcagggatcctgccagcgccgtatgtgtcg

SEQ ID NO: 16238 - DNA, 161 bp, Oryza sativa
  Clone ID: uC-osflcyp117a09a1
acacattgactttttttattttgttaatatttttgttttaaaatatttttttttatttttttataaaaacttttttctgagacaggaagtcagcaaaatcggtgatcggccgccagaagaaaagcaccaagaacttccagaagaaaacagaccggagcaca

SEQ ID NO: 16239 - DNA, 450 bp, Oryza sativa
  Clone ID: uC-osflcyp117a10a1
gaccaaggtacaaatcacattccaaagggcgtgaacaatgtaatgagcaacaatacatgcaacatgttagctctatttatgaaatggagccctttcaacagtgaaatttacatcatgataatttatacggggactagtgatataatcatagacgcgggggagaataccaggatcgtgtcatagaaaaaagggcttggcatacacatcgaatggctcgtttgcagttagctgtggatcctgcttcaagccgccactactaacgctgccttctgtaagaagtattgtgattagcgatgttacagtaccacctccgctgcccattgaatcacctgtactgcgtattgccgaacgcatggaggtcaggatattgccataggtggtgccctgcccacgctcaattgcttggataaagcaaaatgtcatagcgccagctgaagcgatttttgacaa

SEQ ID NO: 16240 - DNA, 380 bp, Oryza sativa
  Clone ID: uC-osflcyp117a11a1
ggaaaccatggtttatctaaagaaggcccattacagccaattaacattacctaagggaattacaaaccatcccatttggaacttggtaacaacgcaaaccgtattctatacacatcaatcagattgaaccccttggaagctttacattgggcactgagaaaacggatctgctcttacatcaaaaggaataaaatctacacacatttatcctctaactcctagaccaatatgaaggaactctttttagctggaacaaaatataacacctgctatctaaccatgccggaacgcattctacttttccattgtattgaacctgtgccggaccatgggaccacctaacttgtagggttacaatggcttgaggtgacaagctaagc

SEQ ID NO: 16241 - DNA, 566 bp, Oryza sativa
  Clone ID: uC-osflcyp117a12a1
gctgctgctgctgctgtcgctggcagcggcggacatgtcgatcgtgtcgtacggggagaggagcgaggaggaggcgcggcggctgtacgcggagtggaaggccgagcacggcaagagctacaacgccgtcggcgaggaggagcggcggtacgcggcgttcagggacaacctccggtacatcgacgagcacaacgccgccgccgacgccggggtccactccttccgcctcggcctcaaccgcttcgccgacctcaccaacgaggagtaccgggacacctacctcggcctcaggaacaagccgcggagggagaggaaggtcagcgacaggtacctcgccgccgacaacgaggcgctgccggagtccgttgactggaggaccaagggggccgtggctgagatcaaggactagggaggttgcggaagttgctgggctttctcagcaatagcagctgtagaaggcatcaaccagattgttactggcgacctgatatctttgtctgagcaggagctagttgactgtgacactttatataacgagggatgcaatggaggtctgatggactatg

SEQ ID NO: 16242 - DNA, 267 bp, Oryza sativa
  Clone ID: uC-osflcyp117b02a1
ccacgcccaccaataaagggggaactcgaaaaaaaaaaccggccggagagggggggaagagaaattaacaaatgggtaaagggcaaagcccatggaaaaggtccataaccaaatgggaaaaaaaaaaagtacggcatagttatatctgggaactacaataaacatggcccaaagaaaagctgcatccaactaattaggggcgggaatccaccagcggaaggctgagcctaagttaagaacgccaaaaaactcattaaaaccgggggg

SEQ ID NO: 16243 - DNA, 93 bp, Oryza sativa
  Clone ID: uC-osflcyp117b04a1
acattatcaaaccaagtgggatggatcctttattgatctttagctatttactgacatactgcccacgcctgaagctgcaaaaaatttacttcc

SEQ ID NO: 16244 - DNA, 564 bp, Oryza sativa
  unsure (1)..(564): unsure at all n locations
  Clone ID: uC-osflcyp117b07a1
aaaggcaagaatattattcataaatgacgcatgatttttatcaaaacgcttgcaaatgatatcagataagtagagtcaacaagacaaaactgtatctgccaaagcacacctccccaactccacccaattacgccattatttctgggcaaaagcaaacggcttcccattcctccccttcaccagtctcaaaccataaaccccacaacaaatcctcctaagtgacggcatataagatgatgaaaacaaagcaggatactccagagtcgtcatggcgaacttcaagttgacacttctcatgccacagccgctagtcgtgctgggcagcctagtaccggtagtgcgcgggcttgtagggaccctcaactggaacgctgatgtagtcagcctgcgacttggagagcttggtcagcctggcaccaagcttgcccaagtggagggcggccaccttctcgtcgaggtgcttgggaagaacgtacaccttcttctcgtacttgccagtgctcttttccttccacagctcaagctgagcaatgaccttgttagtgaatgagcangacatgacaa

SEQ ID NO: 16245 - DNA, 575 bp, Oryza sativa
  Clone ID: uC-osflcyp117b08a1
tttctatctgggcggccttcctttttttttttttttttttttttttttttgaaaaaaatgtggcgacgtcttttatgtgataaaaaaacataatttatgattttcaattaaaaggcaagagggaaaattgaccatgattgtccatctaatgaagggcacaaacaacctaataataggacaaaacctgccctacagatcatccacgacttagggtgacaaacaggaatttccctataactagttcgagggagtaacgcatggacctatgtttgcgggagtgcactccctcaatcgattcattccaaaactccattgcccaactctacagaaggagaaaggtgctcaccacctgcgggatgttggctaatcatgtaaaagatctaaccatttgcacaagagctctctttattcttcacagatcaaggactgtaaaactgagcaactaagggttgccgcttcatactattgtagaatttaagaatcacataactttttgaacagcagcacagttttaacctaccacagtgtccagtagccgccaaatccataactaacagctaatagaagccataact

SEQ ID NO: 16246 - DNA, 411 bp, Oryza sativa
  Clone ID: uC-osflcyp117b09a1
aagaaaatacagattctggattaattaactagcatatttaaatttaaaacgtaactgtttgagcaaataccacgaaatgttcaggcgctaagatacggcaataccgatacatccagcatcgcaaaaatggcgaagagcacagagtcagataaagctatagagaactagggcttcaggagatgggggccgaatgacaaccaatggcgcttagtcgacctcctacatcttgctatcgccggcgtggtcctccagcggcggtatgttggtgtcagacttagcagactcgtccttgtcgatgctcaggccgagcttgagcatccggtggatcctggtgccgaaggagttggggtccttaaggctgaagcctgaggtcaggagggcagtctcgaagagcatcatcaccaggtcctt

SEQ ID NO: 16247 - DNA, 400 bp, Oryza sativa
  Clone ID: uC-osflcyp117b10a1
aggcggaggataaagccactcctataaaacggtttataaagattccatttttacaaaaagaacttcacacatgagctttgaacgaataacaacaggggccccaaaaattagtttcacaaggggcacacaacatcccggtttattgtggacagatgaatttataccgatctggcatactggtacaaaaaatacaggctttggaagcttatgcgggctgctttttggatggggcctttgctggaccaaacaaacatgtggcggtccctccgtttgatgctcaagaaatattcagcgatctgactcttcatgggttccaaacttaccgtggaggtgggggagttggaaacatgggaggaactgcaaaaaagatggggttcttatcgattccacttttgacgtg

SEQ ID NO: 16248 - DNA, 142 bp, Oryza sativa
  Clone ID: uC-osflcyp117c01a1
ttgttttttttcttttgtttttttttttctttttttttcttttttttttttcttttttttttttctttttttttttttttttgggaaccgcgccccgatgcatccaatacatcaaaaaaatgaggcatccccccgttattaa

SEQ ID NO: 16249 - DNA, 428 bp, Oryza sativa
  Clone ID: uC-osflcyp117c02a1
gagacatcaaataccaatcatatcaataacataaattaccagtagcaaacagagcgtgtactccaacatgctttgagaattcaacaatctatccagtggaaacaagatgttggcgattgctggcgggacatgcagttcaatgaatgtgttagttgctctggaacataaaccctggaaggtttcttcatcaccaaagaataatagttttgacagttttactttggcacgattcacggcaattgatcttactgtagaactaaacagtatcggtcggcttctggagtcttcattttaaggacaggaaagtccaaacttcaaagtatagtacagcattggtttgttttctttgcctgcttgaagaacatctgtgaagcaacactcaggtctgaacttttctcaaccaagctatccaatctttcccctttttg

SEQ ID NO: 16250 - DNA, 474 bp, Oryza sativa
  Clone ID: uC-osflcyp117c03a1
aggaggtaaaactgccgccacataatttccttccctagaggcaacaacaatatccacctcatcattgggggtaaaagcagaccaccaactgcatatccagggaagtataaccaaccatccatctccaaacaacgggcaaaccgcctaccactgcatgtatgtcttgtccatttttttccctctcttctgaacaaaaaaaaaagctaggtgtcccctacgagaaatgcagcttgcccagcgcccctaatccgaaccaaaggcaaacaaaactaaaacagaaaagggatgtgcataggaggaggcagctaattacaaaatctgacagaagatgaccccccattcgttcgttgacgctttctgaaattatttgagctcgagatgcctgatgatgtcctccacttcttcagcatccaccgggagatgatcatccttggcgtcagcgttgacggcgttggcggacttaactgggttttc

SEQ ID NO: 16251 - DNA, 448 bp, Oryza sativa
  Clone ID: uC-osflcyp117c08a1
tttttgtttttttttttttttttggggggacataaatttccaatctttttaatttcataaattgccagtagcaaacaaagcgtgtacttcaacatgctttgagaattcaacaatctatccaggggaaacaaaatgttggcgattgctggcgggacatgcagttcaatgaatgggttagttgctttggaacataaaccctggaaggtttcttcatcaccaaagaataatggttttgacagttttactttggcacgattcacggcaattgatcttactgtagaactaaacagtattggtcggattctggagttttaattttaaggacaggaaagtccaaactttaaagtatagtacagcatcggtttgttttctttgcctgcttgaagaaaatgtgtgaagcagcactgaggtgtgaactctttttaaccaagctatccaatctttcccc

SEQ ID NO: 16252 - DNA, 540 bp, Oryza sativa
  Clone ID: uC-osflcyp117c09a1
gccgcttcggcggcggcgagcgcgggcgccgggaagatgacggcgtcggcgccggggttgtagaaggaggcgatggacatgcggttgccgtcggggcgcgtgaggacgcggtgcatgacgctcttgtacctgccgttggtgatcacctccagctggtcgccgatgttggcgacgatggcgtggcgcatgggcggcacgtgcacccactccccgtccttgagcagctggaggccgctcacctggtcgtactggaacagcaggatgatgccaccggcgttggtgtgggcgcggaggccgtcgacgagatcggggcgcgggcacggcgggtagctgctcaccttggtgccgaacgttgggccgttcgacccggcgaaggccttcttcaggtaacccttctccaggcccagattctcgcacagcaggtccagcaccctctccgagagcttctcgatctccgacgcaaattgctttatcacctgcctgtagtggtcgtcgacgtcggtgaggtcggagaggttggagatggtgtggtggtggacg

SEQ ID NO: 16253 - DNA, 562 bp, Oryza sativa
  Clone ID: uC-osflcyp117c10a1
gcacaacattgcactgaactcagtaaaaattatcctacaatttcagaagaaacaaaacgtttcctctttggctgcatattctaaattacagtatagtaaggacaaccattattctgaattcttgattctttctactaatgagtaacctctttcaaggttcaagccccaaggttgaagtaaaccgtgtagaattcgtctctcaggctgtacaatggttcaagcaggaagttcctcttcaccccctttgcaatgaagctgataggatggtactgcctcaatggagcagcctgcacaaagctcgcggcctgctcgaaaatcccgttgatgcttggaagagaactcttgcaactgacctgaatctttgtacccacggagtaatccacgcctatcaccaggaagcatcccggtttggtcccgagctcgagggagaccgagtttgggtttccatctagcccaggtacaatgttgaagagggaatctgaactcttttgcgcggattgggtaaggttgttgtgatcaccgttccttggaggtcaaatggttctatctgcacagaggtccc

SEQ ID NO: 16254 - DNA, 445 bp, Oryza sativa
  Clone ID: uC-osflcyp117c11a1
cgcttctgttgtggttgagcgcgggcgcacgggaagatgacggcgttggaaccgggggtgtagaaggaggccatggacatgccggtgccgtcggggcgcgtgaggacgcggtgcatgacgctcttgtacctgccgttggtgatcaccttcagctgggcgccgatgttggcgacgatggcctggcgcatgggcggcacgtacacccactccccgttcttgagcagttggaggccgctaacctgggcgtactggaacagcaggatgatgccaccggcgtaggtgtgggcgcggaggccgttgacgagattggtgcgcgggcacggagggtagctgctcaccttggtgccgaacgttgggccgttcgacccggagaaggccttattaaggtaacctttctccacgcccagattctcgtacagaaggtccagcaccttctacgagagct

SEQ ID NO: 16255 - DNA, 571 bp, Oryza sativa
  Clone ID: uC-osflcyp117c12a1
gaacaaaagagtctcatgctcccattgcattacgaattatttgcttattcaccagattacataactgtctagccagacccaaaaaaactgtgcataaataagattcagaccgccgacagcaccaccatagcgaaaaagattggcaccacaagggcaaacatcccttggatacagatgtttttttgttcatgacccaacagaagaacagaaactaagacagaataaacccctagagctcagcttgtagtttcaggaatatgaaacaagaacccactaagggtttgcgtgttgaaacatgcctaatccgcacgagattggccagcgcgggatgacaggatgatgccgacgatgagcccatagagagcaagcgcttcggcaaaaatgaggatgaggatcatacccacgaacagctttggttgctgggcgttcgccctgactccggcgtcaccaacgatgccaatggccattccggcagcgagaccggcgagaccacaagcgaaggtagatgagaggtgcgcgtagcccgccaagaggacgcagggcttggccttgggttgatccccgtgctgat

SEQ ID NO: 16256 - DNA, 73 bp, Oryza sativa
  Clone ID: uC-osflcyp117d01a1
ttgttttttattttttctttttctgatacatcctttttaaaatcaataccatttttatttttttattcatctt

SEQ ID NO: 16257 - DNA, 379 bp, Oryza sativa
  Clone ID: uC-osflcyp117d02a1
gggcagaaatccacctcggctgcctctgaataccagaataataacagcgtaattgtaaactgactagtagcacatagaaatgaacggagcattttaaacattattgctgaatgcccaacctgaatagcttcttttgtatggaattttgcttcaacaaggcaggtatgtaagtgtgtaaaggaaacatagacataagaagcaacctatttcttagcctatagaaaccttctctatattccttttgccacagatgaaaacttgttaagagctaactgtggaaaccatttcatattcaccttgccttcctgtttttcgaacaaatgaagaaagcgcctccaaaccgttgttgaaggaacagaaaaaccgacagcagtattgc

SEQ ID NO: 16258 - DNA, 416 bp, Oryza sativa
  Clone ID: uC-osflcyp117d05a1
gtaggtgttattttttagtctgcaagactaataccaacaatttttccacacactaaaccagtaaatcaatggaaagaatcaattcataagctttgtgaaagaaacatttgattccatcatggctaccaagttagaaacaaacagaacaagggtttagccctgggatcatcaagggatcacgaggtgtactcaaatggctggggtggcaggggatgctcgtcgacggccatggcggaggtgcctgagccttgctggccagcggtggcggctgcggcgttcgacgcctgagttgccggggcgtcggtgaggactagttcctccgtctcggagggcttgaggtcccggaggaggacaaattcggagggcgccagcttcacaggctcgtacctgacggccttcaggaaattttaatgaac

SEQ ID NO: 16259 - DNA, 111 bp, Oryza sativa
  Clone ID: uC-osflcyp117d06a1
gcaggtgaaaatttttttctcttgtcacttaatccaaccattttttccacacacttattccactctatcaattggatagtttcatatttcatgagaccatgcgccagaaac

SEQ ID NO: 16260 - DNA, 494 bp, Oryza sativa
  Clone ID: uC-osflcyp117d07a1
tttgtttgatggtttgctcggttaatattcatcaatgaaatttgatgtacaaggggtgtgtcactgataagtgatcttattagcataacgtgtttaactctaacatgagtaattttaagtaatctgtctatgaaatccaaatggttcagagaaggaaccattgcaaaacaaatcatagaaaacacatgtaagtttgacaccatcttgtatatccagcaaggaaataagactattctaaatcctgaactctgctggtctcagttgtgacctttgccaacaactcaggaaaatgggaaacgttgagcacagttacaggtaccttaagagcacaattactgattatactgcatgaccttgctggaattgacggtttctgcaccatgttctgagacacagatgatgcatttacccaaaggtataccgtgtttttaccatgtaaatgaaggcaaaacataggtgggataggagccttgcttgcggcacaatgaatcgat

SEQ ID NO: 16261 - DNA, 481 bp, Oryza sativa
  Clone ID: uC-osflcyp117d08a1
tttcaacattagtgaatatgaattatattctgaatccattacaatcactttgctttgcatagagcaaggctagagccaaggacaaagccagatgatcagaatttcagaagatacatatatgttacctttgcaataactatttaccttagcatggccattttcagagtcaccatgtgataacatgccaaaacttctgtaaggctctcggcactggtcgagaatgctactacctttttcctttacattcataacttatgtgacaagtgaacaacatagaagcacgaactaaagaaaaaacactaaaacatggggtatgagagaacatatatgattgggtactctaacggaaagcgcatttcatatatttttgaagagctttggtgaagtttccatgcaacctcataggccgcgttctatgggattcacgacggcgttcggccctagtccgagccatggctggttcttaggctccttcttgact

SEQ ID NO: 16262 - DNA, 557 bp, Oryza sativa
  Clone ID: uC-osflcyp117d09a1
agtatggaaggaataaaatttccttagatttgcaataaatatcagcagtagctcaattcaggcaatcaagacaacatgtaaggagccgaacacatcggcaacctgaataacaagtggcaacctgaataataacaagttaagtttatgcagtataagaactgaaccttggatctaataacaacaacaacatggccatgggacacgaaaaggtttcacctttgcggccacagctcacaccgcggagggctcctcgacatctctgccccttccgccgacgccagcggcgctgtggtgcggcaggtcaacgccagtggcgccctcgggtatcagggacgcggggcggttctcaattacctcgtcgatgagcccccaatcgcgcgcctcctcggggtccatgaagaggtcgcgctccatgcactgctcgatcttgtcgatctcctggccggtgtgcttctggtagatcttgttgaggcggtcgcgcaacttgagaatctccttggcctggatggcgatgtcggtggcctgccctgcgcgcccccgatggctggtgaatatga

SEQ ID NO: 16263 - DNA, 559 bp, Oryza sativa
  Clone ID: uC-osflcyp117d10a1
aaggactagcaaaactgacatttgtttgctaattaacaagtcaagagatagtgacacgtcaatgaagtagacaaaatagaactaagattaacattcataagattccaatcctactcgcctgctcggtaaggcaatagccgcaaaaggtaagcaaacactactagttcattacatcgctaaggctaatttattatctcatcgtcatgtcatatatattttggcagaaggacaaccagcacatgtattagatgggcacaaaatgaagctaacagaagaacctaatcgagcaattcagacattgcgttcttcctgttgaatggatcggtagcagcaagcaaagacgccacagccctattggggaaaatgtcatcagccttcatcctctccttgaatccataaggtggggtctttgcattcagatatgcctcaagaagcagctgatactgtctaatcctcccagtataacccatctgccgcaccttgctgaacaatttctctgcattatggacgtctcctttcttggataactatcaagcagcatcaagtatgggtgtacata

SEQ ID NO: 16264 - DNA, 555 bp, Oryza sativa
  Clone ID: uC-osflcyp117d12a1
gcatcaatggcatcacaactatgttcaatggcaacaatcgctgcttggtacagtttaagcttatgtttccaaatagtttctgcccattgcaacaaatgagataggataaagcacaacccttaatcaaacctagggctgccagctagaaaaccctaaattccgacaacagaagcagcatcatttagttccttggaaacaatagcatctgattcatcgttttctctcggagcaaataattccaactaattttgagatatacacaaacaacgaggaagataacctttacaagaatggcggcatcctctgaggatgcatggaatgatatccactatctgggtggctctgcggcattcgctccccggtgggtcttcgagtaaagcctccatgtgtatggttctgcatgggattgaaggtgccccaccagtgagattcaccgtcagctgggatccagggaaatggggtaaagccctcctggccccacccatatggccgatcaacaggtctagaaacagcctcaccatccgaggaattgctcctgttacaggaggagcaaag

SEQ ID NO: 16265 - DNA, 340 bp, Oryza sativa
  Clone ID: uC-osflcyp117e01a1
aaagttacaactaggtcacatccggtgggaaatgactcattcctaagaaatttatacatttcagttaagcttactgatgtagaaaagccaacaaaaaaaagactaacccctaatatgtgcaaaaattacgcctaattcggaatgaaatagcctatgctgattaaccttgctagtgagaaatgttactagagagaacagtacgcattgaacttagtcagaccatctagatataaactgagatgatggcatgacccaccatgaagctcaggtgtttggagttcttcacaaagatttgctggcctttagaaacaggtgatattccttgagcatcatctccccg

SEQ ID NO: 16266 - DNA, 449 bp, Oryza sativa
  Clone ID: uC-osflcyp117e03a1
cagtaacttctagtatcatacacgagaatagttgaactttcagtatcattttttcctttgtatgtttcaatcactcgaacgtgtctagctcacaggtgcagctgatgcaatgcttgcctgtcctctatacatattgaacacaacagcagccacggaaataacttaccgtgaacagtagtagtcgactccgattgtgaagcacagctggcagacggacctctacagccggatgtaaagtagacgacaatatacaagaatttaacagttgatgcagtctacttcaggaggtccgctgcgcatgtagaaagccacacagaccgccaccagcagcaccaccggaatgagcagccttagcaccagccacagcatcgactccttgctaccgtcactcctcgtgaacagccttctcagcagcgcggtgagtggccataggccatgcttcttgcttg

SEQ ID NO: 16267 - DNA, 186 bp, Oryza sativa
  Clone ID: uC-osflcyp117e04a1
tttttgtttttttttttttttttttttttttttttttttttttttttttgtaaaatttaatttttttgtttacggggggcccaaccccaagggaaaaacattttcccgggcaaaaaaaaaaaaccggcccgggaaaaaaaacccgccacaatggaacaaaaggaaccccaccatccaaaaaaagaa

SEQ ID NO: 16268 - DNA, 206 bp, Oryza sativa
  Clone ID: uC-osflcyp117e05a1
gacaaaaaggaacctgttttggccagaacactcctgataatcgccaattacaaaggggtgtctgacggatcgcccagtttatgcagattgttctatttcttgaacccagggagcctccctggaatcattaattaagttcctacctgggtttttctagggggactttactatctacaccccagtattttaacaagagattcctagcc

SEQ ID NO: 16269 - DNA, 559 bp, Oryza sativa
  Clone ID: uC-osflcyp117e06a1
atagtgagaatgcaatgttccattccattaatcaaattgtgcatcaaaaaggcacaacaaggcatatcacatactccacacttactacatgctttaccccaataatctctctttgattgttgattcctacctgcgctatatacaacacatcaagaatataacctccctcgcctccactggcatacaagcaaaataccagtactagtatgttgttctgacaatactaccgtcagtaattcaatacactattcagccagttatggcacaaaacttttggagctcattctctaggactggagatattgctctaagataaattcaacaccacaaaacacgccccagtttccacaacgtttatctttgaaacatttcactgtacaagcaaatcctgcgactgctgcttccatacgtcacacggttctaccgcaacctggtagggtttattaatccactggaaaagacaaccacgggctttaacaactttgagcatatgtgatggcaccatggatttgaatgcttcatgaagcttcacttttttcaaaccacagaccataagagc

SEQ ID NO: 16270 - DNA, 246 bp, Oryza sativa
  Clone ID: uC-osflcyp117e09a1
ggaaggtaaatgttcgtgaaaataggcacatatatgtatcgtgcaatgtcctattcgcttgtgcaaatgcaaataacatcagggggggaactgatcatcagctcacgagaacaaaggaagaaacaaaagttaataatgaaaaccatcaacagcccggacgagaattgcattactagagacacacattgccgccttcctataatctctccatgtatccaaatataaacccggtcatgcacaaaacat

SEQ ID NO: 16271 - DNA, 415 bp, Oryza sativa
  Clone ID: uC-osflcyp117e10a1
ggaaaaaacaatttttttgcttacggggggcccaaccgcatgggataattattttcccgggcgggccacttatcctgggcgggcaaattataccccccacatggaacaaaagaaaaccaaaaataaaaaaaaacgaaaattgggggcctggacgcaaccggccaccgaaacttgttggatctgggcggggcccgttcgtcgcccccttgccggtcgttgccttgccacccccgcctggtcgccgttgtcgctgttgggcccgtccccttcgacagcgaaggtgaagggggcccttttgggcccctgcggggagtccgggcggcaaaaccaggggatgatggaggcggccttgcggacccgggggcgcaaaaggaggggccctaagaaccgcccggcaaggggcaacggcaaggtg

SEQ ID NO: 16272 - DNA, 566 bp, Oryza sativa
  Clone ID: uC-osflcyp117e11a1
gcacataacattacgcgattttaacacgatccaaactttaaatactggacaagagcatgtttgacgcctcgcattatcgcatatagcggatgaaaaaacgtcaggccagcctgcgcgacaacgtctagttacagataagagcagaactgcaagtcaaatacactcttttctctccatagtagagtttgagcagcgagcgggcaaacataaattattcaattattaaatgatatgatcactcttgatcatctcaacactataggaacaaaacttcgctaccgcgattttactattttagttgtccacaacttcaatgagggttggttcgtagtcagcaggagcctcgaaaccatggaagttcattacggttgcagcaacattggcgagcccaggggtctgaatgtcagaccggaatttcacaccagggtgaagaccgggacctccaatagcaaccgggaccggctgaagagtatgtgaggtaagaatctggataccaccgttcttgtcgagaagtggatggccagatttgttttttttcaccatatcctcagcatttccatgatcag

SEQ ID NO: 16273 - DNA, 369 bp, Oryza sativa
  Clone ID: uC-osflcyp117e12a1
atagagagaaagcacagatacattccattaatgaaatagcgcgatcaaaatggccccacatggcttactcacatacgtccacgactcactacatgcatgacaacgagccacagaaccggatccgggttccttacctttgcatcctgcagaggggagggaatataacctccctcgcctccactggcatacaagcaaaataccattcctcctaaggatcaatctcggttctgcaaagggacattcaatgtacgacctttaactattccaggagaaagcttgtcgatctcattctctacgactgaacatttcgatcttccaatgcttaaacatagcaaaacacgccccagtatacacaccgtttatctttga

SEQ ID NO: 16274 - DNA, 390 bp, Oryza sativa
  Clone ID: uC-osflcyp117f01a1
gagaaacagtatttgtgattgatttgttgcaaaagcacaggcaaacatggtcctatcgtttgtactatttgattatgtcatcccaagctttactgatcatgctcccaatacatttcggcaacaacattttaacatcattttcctttcctacagacattgactaacctgatgaaccctttgctggtcacaacctccacatcaaaacgtgcttgacatgattcattttttgcacagtatttacagccccaatggttgacatgatccatttcgcacaatatatgttttggcattcggaaatgtcaatgatatctcagtagccaggatctcccaatggccatgagacacttagtgcctgccaggaattttcacccattgcagttgcacttgcag

SEQ ID NO: 16275 - DNA, 359 bp, Oryza sativa
  Clone ID: uC-osflcyp117f02a1
ggtataataacgaatctgactgggaaatacagtacatacatatttatggctgttgttggatccgcaaaaaggaaaaaagaaaaggaagaatgcacagatcagatcgtagagagaaaggaagaaagaagcagcaggaatggaggtgatccgaggagcaggtgataataatgaatgaatatgatggattcagaggtaaatgcaggacttgtcgagggagatgggcttgttgagcttggcggggttcatgaggaccttgcactcgatggcgcgtgtgaacttgggttttaccagcgcccccagcacgtacgcccctcgagtgcaccgtcgtccttaagatcatcggcaccggaaccatgctg

SEQ ID NO: 16276 - DNA, 421 bp, Oryza sativa
  Clone ID: uC-osflcyp117f04a1
aaaatattccgattgagcaacaaaacaatgttatgtacacagtgccttctgtaagcaccggccttattgcgatatactatacagttggagaactcattattatcagttttacattggataaacagaagctagtctgtatcccccatctctggttgcagcaagggccatagaacgatagcccaatgttcaccagggtgcaaagcttattggtgccgtgtgagatgatatagaacccgagagagggagccctaccgctcgtttctcaatctcgatcacgtagaataaatgctacttgaaatcgatttctctcaaagctaaacatcgtctttcattataccaaattgctgtagagctgacttaaggttatgtggaccctattcctcggttgaagtaattactggtttgtaaaggatatgacatc

SEQ ID NO: 16277 - DNA, 457 bp, Oryza sativa
  Clone ID: uC-osflcyp117f05a1
cacttcaaagtataattcgacttagaacaagaagacgacttaagtaaagtttcgacctttttatgctagttcactccaaatcgcccacaactaagaggcgatataagcacgctgttatagtctaacagaaatttactccaaccagattcggggtagaagcatagcaaaacagagcagctaataacagttctacaacgagaagcagtagcagtagcttcagtgaaacatcatttcagctcattacatcggcagttcgccgctgtccgcgatgacaactttgctcttcggtgacccactctgctggccctcagcttcaatcttgtaaaccacatccattccagacagcaccttaccgaacacgacgtgcttcccgtccaaccagctggtggttacagtggtgatgaaaaactgggacccgtttgtgtctctcccagcattggccatggacaggaggcct

SEQ ID NO: 16278 - DNA, 450 bp, Oryza sativa
  Clone ID: uC-osflcyp117f06a1
aacaaaagccatactctttgtattaaagatccaacagggtcagagaacacgcaagctcagaactacacatcaccaaaattggagcaagtttgggggtacatatccgctcatacagtggaggatttatttcttgattctacgagctttttaactagagttcgaccgggaagtcaattacggatagaaatgagcatcctgtcttcacaaaacccatgcacacaacagtgggcatgaaccgcatgatattcaccatcaagtttagtagggctccacgggtgcgcggaacttggcaccagcgtagacagcagtcgaaccaagctcctcctcaatcctaagaagctggttgtatttggcaaggcgctctgatcggcagggtgctccagtcttgatctgacccgtggccaaaccaacagccaaattagcaatgaaggtatcctcagtcttaccact

SEQ ID NO: 16279 - DNA, 327 bp, Oryza sativa
  Clone ID: uC-osflcyp117f07a1
gagaaacagcatttgtgattgattagttgcataagcacaggctaacatggtcctatcgttcgtactatttgattatgtcatcccaagctttactgatcatgctcccaatacattacgggcaacaacattttaacatcattttgctttcctacagacattgactaacctgatgaaccctttgctggtcacaaccttcacatcaaaacgtgcttgacatgattcattttttgcacagtatttacagcacgaagaccttgccatgagtccattccgcacaatatatgttttggcatccggaaatggcaatgatatctcagtagccaagat

SEQ ID NO: 16280 - DNA, 84 bp, Oryza sativa
  Clone ID: uC-osflcyp117f08a1
tgttgggttttttataactcttttgttttttttaattatgtctttcattttttattggctgtgatcggaaccctaaaaaggaaa

SEQ ID NO: 16281 - DNA, 157 bp, Oryza sativa
  Clone ID: uC-osflcyp117f10a1
ctcttttttttttttgtttttttttattttttttttgtttttttttttaaagttattttaacaaaatctttaaccattttatgatttctccccccaaccgcccacaacgaaaaggcgacgggggcccgcggcccggggccggagggactcaacgtcc

SEQ ID NO: 16282 - DNA, 386 bp, Oryza sativa
  Clone ID: uC-osflcyp117f12a1
tttttgtacaactatgctttcatttggatttgaaggcccgacaaggtggcactactatctaacacatgtattccgaagaaccactgtggtacgcaggttgggagtaactatatgaacaagatcggcttcgggatatggtcgacaaaatgaaaaccgaaaactagggttacaaacaaattgcagagctctgtatgagctgagagaactgcttctactaaacgcatgcacggagcatctgaccagacccgtacggggttatgaacctgaggaggaaggaggcggaggtgcaaggtacgttggtcgatgtaatacagggtgccggccattgttctccttgacactatgaggagcttattgtcagggaagcagttgtggtcgaaggccag

SEQ ID NO: 16283 - DNA, 400 bp, Oryza sativa
  Clone ID: uC-osflcyp117g01a1
gtatgttgatgaggaatatattacacatgaattgttgcatggacacgatcagttacacacgaacagggcgtgcagtggcttactacgaaacagagaacataaaggaattttacccaccgcagctcctttgcactttattttaaccacccccagggccaatctttattaattaatacagtacccagcaaggaccccttgttaagcgtgcggccatctagttctctggaactgattacagctaccaatactgtgaccaaaggttcacgccgaactttgaccaccatctcttgactttgcccaccaaaaattttaaggaatttgaaaagaattaaatttattatttgaatagggaacaacaaattatttttttggtaaattaaccttgggaaaaataaagggt

SEQ ID NO: 16284 - DNA, 295 bp, Oryza sativa
  unsure (1)..(295): unsure at all n locations
  Clone ID: uC-osflcyp117g02a1
agaattcgagaacttgtttaggtaaggtgctactgtaacagtagtaaaagtaaataccaaaatccgtatgttgagaatgcanaaatttatacagccattttgactcccctattattggacaantnnataatgatgatttcttgccaccgaaaaggagattacaaccgtacgcattgcctttctttgctgctacatttagtcgttttgcaccaaccttgtgcataactcagagaccaaccgtggggatgtatttgaccaagtacataacccttaggacaggctgatatgatatcca

SEQ ID NO: 16285 - DNA, 234 bp, Oryza sativa
  Clone ID: uC-osflcyp117g03a1
caaaaattgctgggaataaatacagacttttttatttgtagaacctatgggatcacattgaccagaacccgggcggccacagatcaagatttcttgagtaagtacgtatgtgtagaataaataatgagctcacacaaattcaaagtaagaatcatatcctgatagccgtggatccggtgggggtcaggccacagagctataggacgggttgtcctacatatatgggatggactc

SEQ ID NO: 16286 - DNA, 395 bp, Oryza sativa
  Clone ID: uC-osflcyp117g04a1
gatattacatcacctttgtgaagcaagaacagatctagggtataaaccccattgcatatccaagcgaaagagccatccttaagaaaggagagttcactgaactacgaaagcaaccttcctgaattgacctaacatcataacagaaaatggagcatgtcgacagggatctgcggcgaacccgggacgactgataccctgggcctaaagagatgggcattccgcttgacaaaccgttaattccacatgggctgactccagggaaacggaacaagaccgaggtttgatgctgagccgtacatttaggtgtgcgcgtcaccggactcagcaaaggattcctacagggctaatcacgtggggcgagctcaatccgaatgacgaacccaacatggtttttt

SEQ ID NO: 16287 - DNA, 385 bp, Oryza sativa
  Clone ID: uC-osflcyp117g05a1
aacagaaaatccacggatcccaaatgttctcattgattgatagcgatatcatagaagcagcgacccgaattaagatttaaaaccaaccccaagagggatcgcagatccaactccaccgaatcgatccaagaactccgcctaatccaaccaaaccatgggcgattttattttaccaacacgacacgaactcataaaaagactaacaccaccaccacctcctccttatttagggactcgacgactcaagacgactgatactggcgaaaggcgaaggggaacagcacagatctaggagagctggccgcagtcggcgatgacaaccggtttggcggtgctcccgccgtgggatcccaccttctcgatggccttgacgacgtccatgccc

SEQ ID NO: 16288 - DNA, 499 bp, Oryza sativa
  Clone ID: uC-osflcyp117g06a1
cacacgtaagaaataatagtcatgcccatgagcatttcgcacgtactccagacacgaacatgcaacatattgctaatagattgctaatgctaccgaataaaacacaataccaatagccagtttgaacatgaacacaaggtttatgtaggagcattcattacacaactcaattcaggcgctgctcaatttagtacatatttctgaattttcatccatcaaattaaattggatcaaaagggaatccagagtcagcgttgccctcctcgtagccaccgtctgaaggatgcttaagatcaattccagagttttggcatccgtgacaatgaccgtcgtcatcaggttgtaggggacagcaaaaatagtgtttctctccatccacaactttaacttcagcaaaaaagagacaagaaccctccaaatgagaatcaggacacttcgacttcattatgaaattgtaatgatgataagacttggcacaatcattaaaaatcaaacactg

SEQ ID NO: 16289 - DNA, 317 bp, Oryza sativa
  unsure (1)..(317): unsure at all n locations
  Clone ID: uC-osflcyp117g08a1
agaattccagaacttgtttaggtaaggcgctactgaaacagtggtaaaagtaaataccaaaatccgtatgtttagaatttataaatttatacagcgattttgactcccctattattggacaacttaattatgctgacttgttgntagcgaagaggagattataaccgtacgcattgcctttctttgctgctacattcagtcgttttgnaccaaccttgtgcataagtcagagaccaaccgtcggcatgtattgcaccaagtacataacccctagcacaggctgatatgatatccatgctttttttagtccgtgagtt

SEQ ID NO: 16290 - DNA, 274 bp, Oryza sativa
  Clone ID: uC-osflcyp117g09a1
ggggatgaaagcagaggttgattatattaagaagcctggcacgcatgaggagatggagcaggagtacatgatgagatcaccatgaggatagatgatccatccaagctagctagggatccattcaacattgatcgacacacgcacacactgacaacgacgacgacggttttatttaggcgtcagagcaaaaggcaaggcctgcctacatataagctgggtactaatgcaagcaaattaaggcctcgatcaaagctctgatcgacagtagcagcat

SEQ ID NO: 16291 - DNA, 433 bp, Oryza sativa
  Clone ID: uC-osflcyp117g10a1
gaaaggcgaaatttaatcaatacaattattattgattttttcttcaaggagcactaagcttagtactcccctttactactaccactacacttgatgatgggggaccggtccagtcattattgggcgaagtccaaagaaggaaaacgtttaagcgggtgctaattagcagcctaaggatagcccaaaaccttttttccactataacgaagaggcttttctttgtctcttgctcaaaataaataatctctcaaggaagaaagaccacgccgagaacgaagacgaagaaggacaccgggctattatatgtgggtgtcggagacggggattgcggcggcggctagaactggccacccttgaaggtctggccgaactgccagccggggtgggcgacgttgttgctggtgacggtgcggccgtcgctggcggtgacctg

SEQ ID NO: 16292 - DNA, 548 bp, Oryza sativa
  Clone ID: uC-osflcyp117g11a1
caaataagtatcttattgtaactggagaacattaattacatcccttctgtaaagctcagggaagcataccttattagtatttttaccatcactaagcactaaaatatagatgtaactagctagatacattgcctcattgcatgctttcttcagagattattgacacactgatgagatgaaagcaggctatcctctatatgttggatcatggaagtgcaggcagaaccttcccagtgcaggttccgaatccgacattgtagccttcacccttgcaacaagctgtcaagatgacctcatccccatcttctaggaacttgcgggtcgagtttccaactgatatctccttctgcccattccatgttagctccagcaaacatcccaaagattctgtctcaggtccgcttagtgtgccagttgcaaacatatcccctggtctcagattgcatccattaacagtgtggtgtgctagttgctgtgttaaagtccaatacagatgcttgaagttactctttgcaaccattgatggttcactttgctccttgggctta

SEQ ID NO: 16293 - DNA, 505 bp, Oryza sativa
  Clone ID: uC-osflcyp117g12a1
gataagtatcacgtgacataatattatatatttacgcagtgaagccaaacataggcgtctaaaagacaatccatttccattaagcaaaaaaaagagacttgtgttaactattgttgggttcatcgagaactgatatttcaacgtacatatatacaacagccagatttcattattttgatcaccttcataatttatatataccaacgtaccaagcacccaatggaattatggaaaccagtgcaatgctttctatggcagttgtcgtatgaggtgaccactgaatcgccggtatctcacatgacctcgtcttcttgtacgtagaggccaccgtccgtctcgatgggcatagaaggcggggttccaggaggaatgcaggcagccccgttagggcctgcctgatcacataatgcctccgcgtcctgaattgcccggtcaagatttatctcgccactgagctcattgatgaacttgagaagggtgtcgaaatccatctgctctcctatta

SEQ ID NO: 16294 - DNA, 413 bp, Oryza sativa
  Clone ID: uC-osflcyp117h01a1
agcaatgtaaatactcgcattccacaacagccgaagggcaattaattaggctcagaacaagtttaaaccgaacagaaaatagagagttttaaacgacacagtgcacacagcgggcatatgataataacggtcaatgcaacgagtgccatggccgtgcacaaaacttaacgaattagtaaaagctagatatcttaaatgcagacacgcaaaccaccacttgaacgaggatcatttcttcttggcggcagccttggtcaccttggcaccggttgggtccttcttctccacgttcttgatgacgccaacagccaccgtttgcctcatgttacgcaccgcaaaacgaccaagaagagggttcttagagaaggtcttcacaaccatgggcttggtgggaatatttttaccataccagc

SEQ ID NO: 16295 - DNA, 262 bp, Oryza sativa
  Clone ID: uC-osflcyp117h02a1
ggttagcttccatcaacccagtgttgttgaaggtgacacttaaaaaattcagatacacacttagaatttacatacattaatatcgaccacgtcggtaaattaaacaaacatgattgaggctgtatatttttgtgtgcctactatatttgcttcaattgacttcgatcgcttcaattgacttggatcgagagagatgcagggttactgattacggacgaacaaactcatatatcttgcattgcgatggatggaagccaacacg

SEQ ID NO: 16296 - DNA, 388 bp, Oryza sativa
  Clone ID: uC-osflcyp117h04a1
gaaaacacatgccctgtattaagcgggaccacaggtggggtatatacccccttagattttcaagcataagatcccaccttctaacaggagaggtaactgaactaccaaagcaacctttctgaaataacctaacatcagaacagaaaaaggagcaagtagacagggatctggggcgaaaccgggacgactgctaccctgggcctgaaaagatgtgcagaccgattgacaaaccgttaatccccatcggctggctccacggaaacggcacaagaccgaggcatgatgctgatccgtaaattttggtgagtgcgtaaccggactgagaacaggattcgaaaggggctaatgaagtggcacgagctaacccgcatgacaaacccaacaaggt

SEQ ID NO: 16297 - DNA, 512 bp, Oryza sativa
  Clone ID: uC-osflcyp117h05a1
agcactgtaagtactcgcattccacaacaaccgaagggcaacaataggactcagaacatccaagtttttaaccgaatagaaataaacgagttttaaacgactaacatagtgcacattgcgagcagatattaacggtccatgcaacgagtaccatggccgtgggcaaaacttaacgaacgctaagatatctcaaatgcagccagcataaccaccacttcaacgatgctcatttcttcttggcggcagccttggtcaccttggcaccggttgggtccttcttctccacgttcttgatgacgccaacagccaccgtttgcctcatgtcacgcacggcaaaacgaccaagaggagggtactcagagaaggtctccacaaccatgggcttggtgggaatcatcttaaccataccagcatcaccgttcttgaggaacttgggctccttctccagctccttgccggatcgtctgtcgatcttggtcaccagctcagcaaacttgaccgcaatgtgtgag

SEQ ID NO: 16298 - DNA, 421 bp, Oryza sativa
  Clone ID: uC-osflcyp117h06a1
gggggcccaattccggggaaagaaaaaacaggcccttttttaaaaccccccccaggggttttttccaaaaatttttttcccaatgggaaaaaccccaaattttttttaaaaagggttttaaagagaaacccccttttttttttggggaaaaaaaaaattttataggggggaaaaggacaaattgcccctcttggcccatctaaaaaaaacggccccactattaatgtcctttgggaaaaaaattaggaaatttgggagaaaaaaattttaaaacaatgggccttaaacacggaaaaaggggggtccaccaccaaatttaaggggggcccccgaaattcccttttataatttttttagaggggccccaaaaaattgggccccaattgccctggaaaaaaaggggggggccccggggggccca

SEQ ID NO: 16299 - DNA, 141 bp, Oryza sativa
  Clone ID: uC-osflcyp117h07a1
tttttgtagcaatgtaaatactcgcattccacaacagccgaagggcaatattgatgctgggaacacgtataaactgaacagacaatctagagttttaaacgacataatgtccaccacgtccgtaaattaaacacacatgat

SEQ ID NO: 16300 - DNA, 390 bp, Oryza sativa
  Clone ID: uC-osflcyp117h08a1
ggttagcttccatcaacccagtgttgttgaaggtgacacttaaaaaattcagatacacacttagaatttacatacattaatatcgaccacgtcggtaaattaaacaaacatgattgaggctgtatatttttgtgtgcctactatatttgcttcaattgacttcgatcgcttcaattgacttggatcgagagagatgcaggtttactgattacggtcgtacaaactcagatatcttggatagcgattgatggaagccaacacgtagtgtatgaacggaattgatggtttttgagcgaaacgtatcgctcctaacaagtcataagttgatcatatcttgcttagccatgagggttggcaacttgccatgatgcatgcaacacgaaccaaaac

SEQ ID NO: 16301 - DNA, 388 bp, Oryza sativa
  Clone ID: uC-osflcyp117h09a1
atatagtgtaccggccgtccttttttttttaaccacatactatatagtgtgggatatatggaagtaaaaactctagggagctgaatattgagaaattataacacattattgagagtttgcacagattcagaccaaggtgcagcataagcatgaggaaacttttcctttatttatagaatatactccgtatgttcgttcaaaaaaagaatatactccgtaacaaagtacgtatagataactgaaggcagtgataacacgtcaaaagccattcttgaaacaggctggaatgaggagcgccaatgatttccatatctctgaacagcataccaccaccaccttaagcttcatgactatagattgttaaactgcaaatcgaagtccaatgata

SEQ ID NO: 16302 - DNA, 419 bp, Oryza sativa
  Clone ID: uC-osflcyp117h10a1
cttcaaatgccatgtctgcattgaatcaacaaggggcatctataaaaccaatgactgacaagcattaactaacaacgactaacacaagaagtcagggaaggacctccaagcatgtgcacgaaattagctactccacatgccatatatacactggtaatggccgaaaatgaaccaacacttaattgttggtcagatgaagtgagaacatgaagaaagccaatcaaaaggtttattttgtccaatgcatgatcaccgggccaccggagcttcaactccaaaccttaacttggaaaaattgaatgacagcaaatccaatgagggaaccactatcgaaaaataccacggacgttgccatgaactaaccaaacatacatccctaatcaacttcaacatgcacccttagaccaggaatataaagc

SEQ ID NO: 16303 - DNA, 435 bp, Oryza sativa
  Clone ID: uC-osflcyp117h12a1
ggctatcaggaaaatgccgataagttataagcaactacaaagtcttatcacaatgaaatattggtcagaagccacgggaggcatcaagctgtgaacctagaattctccctactcccaacaaacattggttagaaagacttctcccccctgtgatcacaaaaaaataaccctgatactcgctacggccgactcgaaatgggactaactattggcaacaaacatcgaggacaattccataatttaccatcagaaccaactctgaacaggatgaagaaaattcacacagcatgagctcctggaagaattaatgagtgcatgccaagtaggggcagcatctgatgggcctttccagttgtcaataaaaaaaaggctggtctgatgccaaaaactccatggtgccaacacccatgaatcggtaagctagtaacaaagctt

SEQ ID NO: 16304 - DNA, 408 bp, Oryza sativa
  unsure (1)..(408): unsure at all n locations
  Clone ID: uC-osflcyp118a01a1
aggcgccactattttagagctatgcacgtctgcatgcagcgcgtatcgtaatgctctggatctctcttattgtcgnggccgccgtacgatctgcgacgggtgaggccgtcttaagagcgcgaaggcggcgccggtgagcgcgaggcgggagcagtagaccgtgaggtcccccgccgcccacgagaagggcagcgactccgccagcgactcgtactcgttcaccggcagctgctccggcggcacggggcaccactccgtcccctgcgacgagctcccgttccgcgacggcgggaccgcgaaccggcggctcccccgcccccgccgccgtccgcgggagcccccggccatcgtcgggaggagaggcgggaggaggaggaggcgcgcgtggaggggaggaggaggtttagc

SEQ ID NO: 16305 - DNA, 296 bp, Oryza sativa
  Clone ID: uC-osflcyp118a02a1
cagaaaaactaccgcagttttcattagaatctttggacgggaaacaacaatggattggcatggcctagaccaccaggacagataacccccggggacacagccgccagggggaagggaaaaaaaaacacggtgggcaccataggaaaaataaaccctggtttagacccccgaaaccggacccttaaagaaaaaacaaccacttctagctggcaagaagagacccatccatgaaacccaaaaaagggcaagcccctgaaggcgggatgtgctcaaggttaaaccctagagcccccccc

SEQ ID NO: 16306 - DNA, 371 bp, Oryza sativa
  Clone ID: uC-osflcyp118a04a1
actaacaagaagatctgagcatagcatattcggggaaaaattttacggtcgggtacaacatgagactttaaagatctaatgaaccgaatgaatctacctttaggccatatcggtgttcaatagcagaagctacaaactaacatcttggaagcacatcatcaacctctaaatcaacataaccaaaagaaaaatctaaaaataggcgccttggctttgattatgcaactgtaacgtcgaatctgcctgccgttcaggacaacagccggaagatttaatatggcattgaagtcttcttcaggggagccataggggacaaaaccaaaacccctggacctgccgttctgcgtgtcgtagatgaccttggcatctag

SEQ ID NO: 16307 - DNA, 325 bp, Oryza sativa
  Clone ID: uC-osflcyp118a05a1
aacactaccacaacaagtatcttgattgcgataaaagttattagggcaggttctttcttatccattcacaattcataccaacgtactacaaagcagaggcatatgccttccattttaacaccaccaaatctgaaacaaatactggcgcatccagtctccgacgcaaagatgtaattcagctcggtaccgagggacggatccagcagcagagctagctacctattgcttgaacgtgtacggctgggggagcgagatggggccccggcggtcgttgccgccgtcaagcatccgctggacccgcctcttggcggagtactgccggccg

SEQ ID NO: 16308 - DNA, 307 bp, Oryza sativa
  Clone ID: uC-osflcyp118a06a1
ggaaggaaaaaccatgtatagcttgaaaaacctttaaccaaagatacctacggcctccgacgtcccagttttactgagaaaacctaattttatggactttccctattacaagatacccttttcataactggggcaaacatccgacaggttacaagcccacctggtcttccgattccatttttgttccgtatggtttgccaacaaacgcatcaatggcctagtcacatccacatccaaacaagtcaatgtaaaggattagaaaagctttccagtggagacccaaccggcatgcacggttatctttgga

SEQ ID NO: 16309 - DNA, 379 bp, Oryza sativa
  Clone ID: uC-osflcyp118a07a1
acatggtagtataaatttcttattaatttttgtcacataaaaaataccgctgtttccattagaatttctgaatgccatacatgtgtgattggttgggctaaccatatcacaatttaatcaatgtcgccagttagcccttccaaaagtaactgaaaagattgtttgtacaattgcacatctcaaaattgctttcttttcctgtaaatggacgcttaatgacaaatcgatcgtgtataacttccatcaaaagacgaatctatgaaatttcaaaatgggaaagtccctgttaaccggatatgctcaagggtgcgctttagaccatactgaagaacagcttggttgccagctctaaaaccatcgccataggccattgaggtat

SEQ ID NO: 16310 - DNA, 292 bp, Oryza sativa
  Clone ID: uC-osflcyp118a08a1
ggggcacaaaaatggttggttgggaaaaacacatgaaaataaaccagggggaacactcgcctctgggggaaggcacaccaaagaacgtgggcccaaaaaaagaattcaaacccggtttttgaacccaaaaactgacaccccaagaaaaaaaaagggaaatacgctttgaaaagggggcccccctattgaggcccaaaaagggaaaacccccgaaagggggggctgtcacaagtgaactcggggggggcccccaaatatgaaaaagccccaaggaaaaagaggaaggatcccc

SEQ ID NO: 16311 - DNA, 326 bp, Oryza sativa
  Clone ID: uC-osflcyp118a09a1
gggggggaacaaaccgggttttttgaccgaaccgaaacttggttttacaggttggcccgactcctaacttaagcccctttgacggggatccctttgtcccaaagttttgacccccggaaaaaagatctaatttccctacatggataggtaggtaggaactttctcatgtcaagggggggttgccaaaaagggggtccaacttggcattgtcaccttcggacaagaacctggtgcaaatgggggccccggcccccatgagtgtcaacatggcccgcaagattgagcctaccccttttccccaaattaacccccactccaaaccccga

SEQ ID NO: 16312 - DNA, 493 bp, Oryza sativa
  Clone ID: uC-osflcyp118a10a1
ccactatttaagagctatgcacgcggcatgcgacgcccacgcaagcgtcgggagtcctcttattgtgggggcgccctctttttttttttttggtctaacaagaggatctgtgcattgcatctttggggaaaaattttcccctcgtgtacaattttagactttaagtctctcatcaaccgcatcaattttccttttcgccatattggtgtacaatagtagaagctacaaactaacatcttggaagcacatcatcaacctctaaatcaacataaccaaaaaaaaaatctcaaaattggcgccttggctttgattctgcaactgtaactcggatctgcctgccgtccagggtaacgccgtcaagatttgatatggcattgttgacttcttcagcggagccataggtgacaaaaccaaaacccctcgacctgccgttttccctgtcgtagaagaccttggcatcgagcaccggttccctgcttactgaacaggttct

SEQ ID NO: 16313 - DNA, 412 bp, Oryza sativa
  Clone ID: uC-osflcyp118b01a1
cgtcttttcttttagtgtcgactaatagcgcgaatggcagttcctttgagcgcgaggctgtagcattagaccgtgaggtcccctttcgtccacgagatgggcagttactccggcagcgactcgtactcgttcaccgttagttgttccggcggtacggagcaccacttcgtaccctgtgacgtgctgctttttctcgtctgtgggaccgggaaccgggggttcccccgccccctccgtcgtcctcgggagcccccggccatcgtcgggaggagaggcgggaggaggaggaggcgctcgtggaggggtggaggagggttagcggtgtatttttaagagtttcctttaaagcatgctcttttgcatatggggtccaagctcttaaaccatggctgttttccgttgacgtgttttc

SEQ ID NO: 16314 - DNA, 302 bp, Oryza sativa
  Clone ID: uC-osflcyp118b02a1
gtaacataaaaaagaccgatgttttcattaaaacccatgaaggccctacatgcgtgatcggtagggctagccatatgacaatttactcaatgtcaaaagttagcccttccaaaaccaaatgaaaagattgctagaccaattgaacacataaaaattgctttgttttcccgaaaacagacgcctgaagaaaaataaaacgcgtacaagctgcaatggaggaagaatctaagaaaactcaaagggggaaagcccctggtaaccggacatgcttaagggtgttcttttaacctgctgaataacat

SEQ ID NO: 16315 - DNA, 216 bp, Oryza sativa
  Clone ID: uC-osflcyp118b03a1
aagactcgaaaagaaaaaaatcctgaagtctgtaccaaagttcagtattacacctcacagaaaatggcccgtgtctgcagctgtgtttcttcttcgacagtcatgcgttcctctgtcgaaggggaacaacgtacgggcagccaatccgagcacagtatatatagtatagcagttctgcccggggacagtcaatgtgtgtgcttcgttacattatag

SEQ ID NO: 16316 - DNA, 372 bp, Oryza sativa
  Clone ID: uC-osflcyp118b04a1
tttttgtcagtaaacaggaccataggcgcggagaattactaagtctatcggattactccggggatggggacataatacatatcacatcttgatcaacacatcatgtgttcctggaaatcttaggaccggatgagaattggcatactatccgggtcataacaaaccctgcaagcttaactaaaacaaactgtacaggggagctaacgctcccagttgcgaagagatgaacacattaggaaccaaactttgcaaatgttgaaatattaacaagaaacaaatggaaggtacatttatactaaaaacagcacgtgaggcgatcatgttttctgaaaccaagaaatgatatgcatacaagtgatttagtgattttga

SEQ ID NO: 16317 - DNA, 144 bp, Oryza sativa
  Clone ID: uC-osflcyp118b05a1
gattaatactcctatggaatattcattttactaaaattatcgaaccagaacacaaagaggaatgaatggcatcgagaaaatgtcgccagatcagcatggagatgcttttgggccacgcctcggctaggttgacccccgggcggc

SEQ ID NO: 16318 - DNA, 422 bp, Oryza sativa
  Clone ID: uC-osflcyp118b06a1
ggcaattcgctgagctcgacatgcgccgtcttgatttgtttttaaaacacaacacactttggtaaaccacagcgcttaggggaattgaattccccaatacactagtccaggataaacatattagttggtccctatttaacaagagagaggtcaactgaaaaaaatatgccaactttataatgaaactaagcaacactgaaggagcaaatcgacagggtactgtggcagggccgcgacaattgcatacaagggcctctattgatatgcactccaattgacgaactggtaaaccccttcggctgcctccacggataccacacatatgagaggtttggcgccaagcctaagatttcggcgtgatcaccaccggacttcacaaaagatttcccggcgttcatcactgaatctgaccagctttgact

SEQ ID NO: 16319 - DNA, 403 bp, Oryza sativa
  Clone ID: uC-osflcyp118b07a1
acatggttgtttaaatttcttattaatttttgacacataaaaaataccgctgtttccattaaaattcctgaatgccctacatgtgtgattggctgggctaaccatatcacaatttaatcaatgtcatcagttagcccttccaaaagtaactgaaaagattgcttgtccaactgcacacatcaaaattgctttgttttcctgtaaatggacgcttaatgacaaatagatcgtgtataacttccatgaaaggacgaatctatgaaatctcaaagggggaaagcccctgttaaccggatatgctcaagggtgcgctttagaccatactgtagaacatttcggttgccagctcttaaaccatcggcataggccattgagggatctgtctcaatttggtgcttgaaaa

SEQ ID NO: 16320 - DNA, 347 bp, Oryza sativa
  Clone ID: uC-osflcyp118b08a1
ttttgggttttttttttttttttgttttttttttttttttctttttttcctttcccgaaaaagggacaaaggaccgaaaaaaacgaaaggaccggaaaaaaacagcgcccagaggcgcgggcacaggaaaaaaaaccgggggcaaccaagccaaccaaggccacgaccacaggggcccggggggcggcttcagaaaaaaggaccgaacccccgcccgcaaaaaacaaacggggggggaaacaacaaaccccaacaagcaagcagggggggaagcaaaaaagacacccaggggggcaaaagcacccaaaacccgcaaaggcccaaggtaaaccccccgaccggccgca

SEQ ID NO: 16321 - DNA, 393 bp, Oryza sativa
  Clone ID: uC-osflcyp118b10a1
gacatgaacttgtacaacttcgatcaaaagatgcccctatacgcatggatccacaccaaacagtagggagggggtcatctgatctctgctgacagcgagaccctgatttattctgcagggccataaacacaggacacgctaacagcaacacgacctgcatgcatggccgaactctaacagtcgccaaatgcaagcccaggtgacggatcgatcgatgcttttgttgccggtctctcgattaaccaggggaggatcttccagcgctggttgtcggccttacaccactcccagagcacgacggtggtgccgtcgtggacgccgccgtggtccttggcgccctggaaggccacaaacttgaggaacatgttgttcaccatgcggacgcagttgaag

SEQ ID NO: 16322 - DNA, 326 bp, Oryza sativa
  Clone ID: uC-osflcyp118b11a1
tttttgttttttaacactaccacaacaggaacgttaccgaaaggaaggataaaagagggatgttttggactcatcaaggaatcaaacgaatttaattcagagaagcagagtatcagttacatattatctctaacacccatgtaacaaagactgacgggtccagagatcctagcataaccgttatatagtgcgggacctaaggaaggaaccagctgacaggcttgcttcagatagcttccacacgtaccatgacggtcgcaaagagggggaccaacagaacgaacaagatgcaaggaggcgaagggaccactggtcgaatctgcact

SEQ ID NO: 16323 - DNA, 219 bp, Oryza sativa
  Clone ID: uC-osflcyp118b12a1
actaacaaggagatcggagcatagcgaattcgaggaatactgtgacggacggggacatacatgagagattaaaccgctaatgcaacgatggacgcgacattgaggcctttacggtgctcaatgacttaagctacaaggtagcttcttggtagcaattcatcatgctcttagggagggaacccgaatggtaattctaagaccagaacactgggttctacc

SEQ ID NO: 16324 - DNA, 242 bp, Oryza sativa
  Clone ID: uC-osflcyp118c01a1
ctgaagaaaaagggtgattcctattaggggaccgcttcacaaactgtccgtttgggcagacacgagttcaagaaaggggaacaaggactggcaccccggactctgacacgggatccctgacaaagaaaaggggacagttgtcggcttaacacgaaaggccccaggggtatccccccaagacaccggtcattagaccctaggagtgaccaaaggaggaccaattgcgcaaaaaccgctcaagg

SEQ ID NO: 16325 - DNA, 470 bp, Oryza sativa
  Clone ID: uC-osflcyp118c02a1
aacatgctaattttataattaatttacaacaccatatttcattgatcaggttcagaacctgtacagaaatacacactaccggtgcagatctcaccttttctccaatactcgaacatccatccacgcggtccacacgaatacgtacatctatacggtacacgtacgtacatctactgcaccgagtacacacacgcacactatcctgcagagacgcgcatcgacgccaacctagctagcttagctgaaggcgatgcgtcaccatggcagcacggcggcggcggcgctcacttgccggggacgaagctggtggcgtaggcccaggcgttggtgttgacggggccggataggtggaccgggaggttctcgagggggcccttgccggcgacgatggcctggaccaagaaaccgaacatggtgaacatggcgaggcggccgtttttgttctcctttaacttgagctccccgaaggc

SEQ ID NO: 16326 - DNA, 447 bp, Oryza sativa
  Clone ID: uC-osflcyp118c03a1
aaaggcaagaatattattcataaatgacgcatgatttttatcaaaacgcttgcaaatgatatcagataagtagagtcaacaagacaaaactgtttctgccaaagcacacctccccaactccacccaattacgccattatttctgggcaaaagcaaacggtttcccattcctccccttcaccagtcttaaaccataaaccccacaacaaatcctcctaagtgacggcatataagatgatgaaaacaaagcaggatactccagagtcgtcatggcgaacttcaagttgacacttctcatgccacagccgctagtcgtgctgggcagcctagtaccggtagtgcgcgggcttgtagggaccctcaactggaacgctgatgtagtcagcctgcgacttggagagcttggtcagcctggcaccaagcttgcccaagtggagggcggccacct

SEQ ID NO: 16327 - DNA, 332 bp, Oryza sativa
  Clone ID: uC-osflcyp118c04a1
gccgagagcgggacccactaacattgattcactcgttcactggatccacggagaggagacgagttctatccatgcgatcaaacacacaccatgggcggacacactgggaacactacacagatgggttcccacaaataggcctgatgataccgtgccggctgacacaggaacgaccctgccgtggtttgatacataaccctgtccatgatggcacaccaccgcatgagttacctacagtttaccgatgtgcgttagaacggagccgacggatcacgtgaaccggcgccttcatatccattcaccacagtcgaggcgatagtcaccgtcacccc

SEQ ID NO: 16328 - DNA, 287 bp, Oryza sativa
  Clone ID: uC-osflcyp118c05a1
gttcaacgctacgaaactatcattcttcatctatcaatcttgatacacaacacacagtaggctggaatagaaccgaaaagtccacacctgagacagacaccccgcattcaacgcactcacttgtgaccccaagggggtctcttatacccccactgttacaacgaataacccacctgttctttcccacaaaaccctatgataccggagaagctgcaagctaacataacttcaactcgtgcctgaaaatccggaaacctgaggggcccccccccaaccgtctatttcgc

SEQ ID NO: 16329 - DNA, 352 bp, Oryza sativa
  Clone ID: uC-osflcyp118c06a1
gcgtacatgaacacgtgagacccagcttggatggtatttacagcacctgaatactgggggctaccacaagactgaaaagacttggattaccgacaataatgcccaagataaagacacaactttaaccctaggtatgaagcgtggggcccatccaatacattctgcaatcctctgtttagaacttggtggggctgagggccatcatgaggtgcttactggcttaatgctccatacccttgatagaatggatccttatggttgtgtacgaacactggcatttccgagagatggctccaggtatctggcaccagagtagccacaattgttgtgcgatcctgcgctggccatttgg

SEQ ID NO: 16330 - DNA, 419 bp, Oryza sativa
  Clone ID: uC-osflcyp118c09a1
ctcataacatatagctactcaaaattccatgctcactggcatggccaatattgttgtggaagccattccaagggtttacaggatgtttcttcattaactatctaccattcaatataacgcaaggtgacttccacttggcaaacacaacatcccaaccagttctgaccaaaaatttcttaacccaacctgattgttcacaactaaaactaacttcttcagcttactcactcgggattactgtttcgcttctttgggcggaccttgcttttcttggctttacgacgttccctctttaaccccttaacatcgtttgataaactcattctttgcgattagctggcctggactgtagaccttgccccatcttgccatgccctgacttcttccggacattttttcatttctttagcatggatcag

SEQ ID NO: 16331 - DNA, 466 bp, Oryza sativa
  Clone ID: uC-osflcyp118c10a1
acatagtaatgaaactaacattctgcataactcaaacatcacatccaacagaaagtgaactggtatagaagcatcaaattcaaacctgatgcaaataaaactcattcaatacactcaattattcttcaaaatgggtttcttataccatcactgttacagggaataaccaaactgttcttttccacaaaatactatgatactgtagaagctgcaagctaacataactttaacttgtgcatgaaaataaggaaatctcagtgaactcctcctaactattcattttgcaatttcattgtgaaagttaagctcagcaccgcgcttcgaggtctagtttgctcatgaagattgctactggctcaccaggagaaggcggggtcttgtccagcatagaagcatgcacgccagctttagcacgagcagcctcatcagaagcagacaggacctctgcatgttcaaggcctacctg

SEQ ID NO: 16332 - DNA, 303 bp, Oryza sativa
  Clone ID: uC-osflcyp118c12a1
ctgtactctgaacaaattgagaccaagacggcgatctatctagcgttcctgaatacatatcaaacacacaaaatttgaaacatacaactgaatgacaaaaatgcccaaactaaggacacagctttaacagaaggaatgaaacgaggagccccagcgccatacattttgccaatccaatgtaaagccatagcaggggtcattgtcccatctaaaggttcttgcaggattacatgctcaatagcctgtctagctgtgatccttttgatcgggttgtaccgaggcattttaaagagaaggctcaaa

SEQ ID NO: 16333 - DNA, 480 bp, Oryza sativa
  Clone ID: uC-osflcyp118d01a1
gttaaaaatggttggagtaggatgaacccggttatctaatatcttagccccatgaataaacaaagtttatcttggacataattcaataacattttacatatcatggtaatcttctgcaaaatgggggagcctgagagcaacctggaaggttattgacaaatgacagaggtcggcaccggagtattgtttgagcaattgttaccgcaggcctggggataatgcttggtcccatgagaatgcttggaacaaccaactggccgtattatttgagggaatcataccagtctaaatgacagctgcattggcttgaactcatggccttttgaacaaatggttggtagctcgagccggtaatcagtaagtagctttgctccatctactgcccagaaatggctcattgtcgggtccttgctcttgaccttctggtaaccataaatcaatgtgatcgacgacctggttttttactttggtaccgctttt

SEQ ID NO: 16334 - DNA, 455 bp, Oryza sativa
  Clone ID: uC-osflcyp118d03a1
gtgcaaggtaatttcgttctgattgcctttggcagttgctacacatcttatatgtttaatttatctttgcaaaaaggttacacctgcagagctgcagctacaaattgtacaatatatacaagcccaaaatgatgaaggtaaagggcagcttggctggctataccgttcgctatattgaattgtcattggaagcatttgatgtggatgcgtcctcggagttccttgcttcagatttctcgttggagtaagttgacagtattgtaacccagattaactccacgcagtcaacccacagaagtctttgttcaacaggaactaggccatatgtaaccaagtgtgcaaaaggccacaactttcagccggcagtaagcatgggccaaaacgtggatttgagctcactggaaataggggccggtgattccaaacgaaagaaccccaagaccacgaagtagata

SEQ ID NO: 16335 - DNA, 467 bp, Oryza sativa
  Clone ID: uC-osflcyp118d04a1
aaagcaaggaataatccatatatagcaggaatatgagagaattcaatgttccaaaataccggtctgaacatgaacatgctaaccatcgtttgaactttccacccatccaacttgatagtacaacagagtcaacaaacaagaggggatgtactagactactagtaccataaattcgagcaggcatattgtcgttgaacaattctggtaggggaagatcgaccagggatgctcatttgcggattacaatctttaaatttgacaagcagatgctttaaatttgaaccggttagatatagcgtttcaggtactcatccatgcgggtgtactgaacctctgggtagagctgagttgcctcggcaccattgtcaccaatctcgaagtttgccaggcagccctcgtaaaagatgtggtaataatgtcctattcctacttgactagcaaaatccaaatctttcatagaagccaaa

SEQ ID NO: 16336 - DNA, 307 bp, Oryza sativa
  Clone ID: uC-osflcyp118d08a1
aagggaaaggtgcgagcgccagaacattctattactacagattactgggaaaatggtacagtagctttttcctcccttggaaaaagaaacccaaaccttatttacaaaggaacacacacaccggacacaaaggggtcgatcgatcgaagcaaacgagacgaccatggcgaactactaccagggaagggacaacacctaggctatacagggatacagcgggggggggcgaccaccggacagtccaaggctatgaacaagcgctggccttgatggccttcttggacatggccgaccggacggtcttggg

SEQ ID NO: 16337 - DNA, 489 bp, Oryza sativa
  Clone ID: uC-osflcyp118d09a1
tttttgttttaggttattttttttcttatagtttttggctgattgttttgttttattttgttgtgttagtcattacaagggtttacaggatgtttttttattaactatatacgaccaaaaaaaacaaagaggaaactgacaaaagggaaaagacaacatgccaggcagtaacgaccaaaaatccttaacccaacctgaaaagatcccaactaaaaataacttcttaagcttcttcactcgggatttatcttttgctagtttgagatggtccttgaccaagttggattcaagacagtccatcttcaaccggttgacatcgattgataaactcatatttgcgacctgctggtctggaatgtaaaccttgcccagcttgccatgcactggacccttcgtgacatttaacatattcttagcatgagcaggagtcttcattggttgttacttcaagatttaaactggatacccgtgtcgactaactactaaatc

SEQ ID NO: 16338 - DNA, 177 bp, Oryza sativa
  Clone ID: uC-osflcyp118e02a1
tttttagagagaaccggaccatgattaagtgttacaagggacagttcacatggtacatgtagttatactggagtaacagcccaattggactcgaagaaggattatatcataaactcctgggagtagacatgtgaaaagttcaagtacaggagaagaatcatcagtcataataatgag

SEQ ID NO: 16339 - DNA, 231 bp, Oryza sativa
  Clone ID: uC-osflcyp118e03a1
gcaacttgcaagcaccaagtaaaataccaaaaatagtttgcatcatacagtacaacaatttacagaagaaactacaagcaaggttaagtagacaacttacaggaacttacacaacttacgcttaaaatctaacataattggtacaaataaaaacaaaaaaaaaagagggtgacacataggtataagtaatccccttgtcgcaacttagaccattacccttgtggcttagag

SEQ ID NO: 16340 - DNA, 309 bp, Oryza sativa
  Clone ID: uC-osflcyp118e04a1
cttgttgggggcggcctttttttttttttttaccagattctgaagggacagggcaccataatgtcccttatgaaataaggatcgacaccgtgcgagacgaattaattacagaaagcgtgctggagtaacacgctggcagcatcatagggataccgtagaatggggggctaacaggcgagcgcgaaaacggagctttgcagggggcaaagttacgaatcaggtgatagtaactggccagttacaatgagaataaataagggacaacatcaggatggaatgaatacaggagagacaccagtagagttgata

SEQ ID NO: 16341 - DNA, 454 bp, Oryza sativa
  Clone ID: uC-osflcyp118e08a1
accgcaccgtgttcagtagctacaataaacagctcacaatttacaagtagttctactacagtagttgccgacttggtttctcctctcaattatattagaaaaacaacaaaaagtgtgtgatcggttagtcaaggaagcacagagttcaatatgcagccgccacaaatgtccaccaacctccagcatctggtacaagtaaattgcccgtcttcaagttcaacaccctggggcctctttcgattgcccatgggctctgagcgcttcaaggatgctttcaacccacccgtcaagtcccggggtggtaggataatatatgctcttcaggccaaatttcttagctgctgaggcagtcgttttgcctatgcaggcaatggcgttgccccagttgtcaacttgtgaagcaagatttagccaagctcggatagcaaaaggagaagctactgcaacaactgga

SEQ ID NO: 16342 - DNA, 192 bp, Oryza sativa
  Clone ID: uC-osflcyp118e09a1
tttttgtttttttcctcgcagcggaggaaaaccttaaaaaataccttaaaatggattgcagtcatgcacaacaacatttaacagatgaaactacaagcaaggttaagtagacaacttacaggaacttacacaacttacgcttaaaatctaacataattggtgcatttactatgcacaaataacctggtgagc

SEQ ID NO: 16343 - DNA, 397 bp, Oryza sativa
  Clone ID: uC-osflcyp118e10a1
cagggcagaaatttttctgaaacaaaatgagtacatcatcctcctctatcatctccctccttaattaaatcatcacagaataatcatatatttactccgtgatgcagtagtatagggtgtgacgaaaagtcggagcagtaaataaataaatccaaaaggcgaatttacgaagcaagcaagcattagtggttattaatctccttcaattaaggcctcctcctccttaatcaacggcgagggtggtagtgctgcggcttggcggcggcgccgtcgccggcgggcttggcgtccatgacggtctcgaaggcgccgacgagcgccttcaccctgctgcactgccgcttctccaggagcttgctccgcgcctcctcgatcacgttgttgctccgccgtgcca

SEQ ID NO: 16344 - DNA, 127 bp, Oryza sativa
  Clone ID: uC-osflcyp118f02a1
cgacactatatgaagatgctgtcgacgtcgtgatgcacgtcgcgacgtgaagcgttggactcctagtagtatggcgggccgctcctgtgactttgctttgtggtagtatgtaggtggttggtttgtt

SEQ ID NO: 16345 - DNA, 267 bp, Oryza sativa
  Clone ID: uC-osflcyp118f04a1
gaacgctagattctccctcataagtctgaaaataggttaggtaagtgcaatgccgttattcaagcatttgctgtaataaacttggatacataatttcatatgcgaaatatacattctaaataataagtataataaagttaacattatagatctagtgagatcaaagatgtgccgctgatttttatctctttgagcgtgtgttagggccatattcacgggcgtgtcaatgcgacggtggatggcccactctgttacagaaacagaggt

SEQ ID NO: 16346 - DNA, 436 bp, Oryza sativa
  Clone ID: uC-osflcyp118f08a1
ggtggacgcgctggaggagagcggcgtggcggtgtacctccccaggcttctcgccggcgtcatctccggcgctctcaccggcctcttcggtctggctggggccttgaccggagcggggaccggcgcgctggccggaagggcttcagacagcggcgtgctccggggagctggattgggggcgttcgccggagctgtgctctccattgaggccctcgaggcttctcgtgctcattggtgctcggaccggctgggctctcatggcacatcctccatggcagattccatagagcaggtcctccaagcgcggttcgtgcaagagcaaattgtaccttcaggatatgcaacgcatcgttggcaggacagcatttcagattgtggtcatgatgatcctgatgatacttttggagagtgttcatcccaagggctgtcacgggag

SEQ ID NO: 16347 - DNA, 146 bp, Oryza sativa
  Clone ID: uC-osflcyp118f09a1
tttttggttttttgagaagtataacaacaatcccctgcatattgaagggccataaagacggcgttatcagccacctcctcctcatagatgaggacacttttccccaccgttttcaggggaaaccggccccaaaaaccttacaaaag

SEQ ID NO: 16348 - DNA, 516 bp, Oryza sativa
  unsure (1)..(516): unsure at all n locations
  Clone ID: uC-osflcyp118f10a1
actatattaaaagagtatgacacggcatgcgcacgcacacaagagcgggtcctctattgagggcgccctctttttttttttttaccattttaccaagtatacattaacacaaaaacactatagaatataatctatagtagtctgtagtctatgtatacacatgaatgtctgaacgagatgtagctgcacgacattgtgttcacagcataaatgttagatacagttacttatgcaaaccgtgaggactctaggctatntcctaacaattccacaactatagcgagtactgtttgtctcccttcaccctttcttgggaaaacaagtgaaagctcatgtgatacaaattgtatgatctttccagttattctgccaccggatagcctgaatgtctttcctggatattgagagactccttgctcctttaccctttcttggggaacaagtgaagctcaagtgatacaattgtatgatcttccagtttatctgccactggatagctgaaaggcttcctggata

SEQ ID NO: 16349 - DNA, 399 bp, Oryza sativa
  Clone ID: uC-osflcyp118g02a1
cgcgccctcctttttttttttttaggctcaaaaaacaacgccttcattgctatgaattaagcaaaaggtccagccagataaatagaaatatgtacctccaaagttaaaatagctagaaccctaaaattgctctttgacaaaaaaagaaaagaaagaaaaaggatatacaacaatgatactctggtacacaagctgcgctgtacagaactgagcttgccaagggtaaagtttattgagcacctgactaacccaaacatgtcacaaaatggatggtaggccccgctttgagcgtcagatgcacaaataacaaccgatgcaaagatcctttaggccagaggcagctgagaccaatggctggaatcccactgaacttgcggaaatatgacttgagacacaatc

SEQ ID NO: 16350 - DNA, 110 bp, Oryza sativa
  Clone ID: uC-osflcyp118g03a1
acatatcattctgttatcatcattgttgtggtattaaaaaagaggatatgcagctgaaaggaatgcacatccagcacagcaacaatctgcatatcctgtaaaacagaatt

SEQ ID NO: 16351 - DNA, 468 bp, Oryza sativa
  unsure (1)..(468): unsure at all n locations
  Clone ID: uC-osflcyp118g04a1
aagtaaatatatcatatattcgattatatatatatatataatagcagacaggttacatccattagaactcagaatcaccggaattgaacatcaaaagtacaacacaagcagcagcagcatcagccagcagcaaacgacatgattacccacgcttttggatgaagaacaagaagtacgagaagaagaagacgatggtcgaacaccttgatcgagctcaacaatggcgatcgatcaccaatcacctacttggtgaactcgatggcccaggcgttggcgtagatgtaggtggccttgaagccggtgaatccggcggcgcgggcgagctccctgaactccctctcgtacctctccttgccgccggggttgtgggcgagcatgatcatgtcgacgtggaacaccccctgctccctcgccgtcgcgtcggagctctccggnagnacgcactccaccaccaccacctttccgtgc

SEQ ID NO: 16352 - DNA, 263 bp, Oryza sativa
  Clone ID: uC-osflcyp118g09a1
acaaaaacaaagcaacgggttcccaagggtccacacttacaggacgttcaacgtacaactgatccaagcaaatgaaacaggtttgatgatgcactgatgcgaaaaactaaacggttggaacggagtcggaaacaaggcgatcatggacaagcgggggggggggcaatgagcttaatagtcggggggggggagctgctccggggggggggagaaaaaaaggacctcctagtagaccccggcgaggccaccgccaatgagggggc

SEQ ID NO: 16353 - DNA, 296 bp, Oryza sativa
  Clone ID: uC-osflcyp118g10a1
cattatcaattgttactatcatgtattgcattttccagcaaggctggctggttcattgacaaatgaaagtgtgaagtccataatattacagagtattgctgcatgtttagaactaccataacattaccgaggactcaccatcccagaaagcacgccgctactacttgcatcaacactagtaaaagtttgagatgaggccaagtaattcccatttgttgaatttgatgtagatttactcatagggtccttgctcatagcacgccctgagtatgtctgtggagtttccagctggataa

SEQ ID NO: 16354 - DNA, 452 bp, Oryza sativa
  Clone ID: uC-osflcyp118g12a1
atgacaactttgccctacggtaaatgcatttatgtctgcaaacaggctacagcttcaccatggacaatatatgatggaagaacgcgagattgtatactgatcaagatacaaaataagctggagttactactgtcagtaggtacaaataatgtccacatcagttgccagccaacgacataattgtacaccggtcgtattattgtgagctgctgcgcacaaacaggactggaagcctgatggatggagaacgtgttggtggtaatggtatacatcaaagccacatcgtgccggactgctacatgggccacaactctttcacaatagttttctaaacagattgtctccaatgttatctttgtcaacaaattgtgttaccaggctcatcatgcatgtaacttaatattgtcaattattttttcttttcgccttcagaatccgactctgcaaataca

SEQ ID NO: 16355 - DNA, 318 bp, Oryza sativa
  Clone ID: uC-osflcyp118h01a1
ggaatatatatatatatatacataatctatattgggtagactctcgagtagtacaaaaacatttttccttttcttttctcaaacaaaaaaactgacatcatctcacccttgcatatacaatgttcacatatatcacaccactaatatatcagatgcctatgggtaaaaaccactgccccaatcgatgttggatcacaggcttcctgccgagccattctcggcgatgtgcaccgacggcgcgccgctcctgaacctgagcctctgcaccatgggcttcatcttctcgatgagccttgccatgaccaagaagagcaccct

SEQ ID NO: 16356 - DNA, 361 bp, Oryza sativa
  Clone ID: uC-osflcyp118h02a1
agatgggaaacgaataaaatcattattgcaaaaacatcatcttcttcttcatcttcttagtgtacacaacaccaactcgatcattatctcgacgaactaaacccatattccccaacccaaatacaacgaactcgctggccacaaatccatccaaccacaattaaccactgctaagctacggtcccccacttcacttgccggggacgaagctggtggcgtacgcccaggcgttgttgttgacggggtcggcgaggtggtcggcgaggttctcgagggggcccttgccggtgacgatggcctggacgaagaagccgaacatggagaacatggcgaggcggccgttcttgatctccttcacctg

SEQ ID NO: 16357 - DNA, 352 bp, Oryza sativa
  unsure (1)..(352): unsure at all n locations
  Clone ID: uC-osflcyp118h03a1
ctgtgttgggcgccctcctttttttttttttttttttattggtacatcggtgttttatcgaacaatggcctgtccgcttgtcgaaatgcaaataacatcatcgggggatatgatcatcagttgacgagaacagaggaagaaacaaaaggtnagaaantgaagcctgaacaccccgcaccggcttgcatttctagataaacaaattggaggcttggtttaatttttggatgtattgttctatcaaccgggacacgcacaaaacattattacagtggcatatgggggtgtgagaactagaagctttggatgttgaggaacttgggcacctcggcccccaggtctgtgtcccacg

SEQ ID NO: 16358 - DNA, 451 bp, Oryza sativa
  Clone ID: uC-osflcyp118h04a1
acaaaactcaaagaataccaagaaaacgaatataatgcacaacttaggcatgcttcctaaccaacccactgatcaatcgacgtaatttaggtacaacagcaccgcagatgttaggtcatatatctacaggcaaatcttatctaaatcctgtcacaacctgtcgtcactcattagcaatgtcaaccagttaacacacaatggcccaatgtcgtggatagtcttcactaccatccttcttgctgagaagtctctcatccctaaccagaaatgcagcatttggaaatcaggattatcagaacctcaaaagatcaactgtgacattctcgaaaatgtccaatcgaacgatgggatctcagtgcaaaaccaaaggagaatcaggttctgagccgctgatggaggcaaaggatgacatactatcctcctttgaaaccgttgagaagttcagtggtgc

SEQ ID NO: 16359 - DNA, 364 bp, Oryza sativa
  unsure (1)..(364): unsure at all n locations
  Clone ID: uC-osflcyp118h08a1
agatgggaaacgaataaaatcattattgcaaaaacatcatcttcttcttcatcttcttagtgtacacaacaccaactcgatcatcatctcgtcgcactaaacccatcttccccaacccaaagacaacgaactcgctggccacaaatccatccaaccacaattaaccactgctaagctacggtcccccacttcacttgccggggacgaagttggtggcgtacgcccaggcgttgttgttgacggggtcggcgaggtggtcggcgaggttctcgagggggcccttgtccgngangatgggctggacgaaaaagccgaacatggagaacatggcgaggcggncgatttgagtctcttaccttgagct

SEQ ID NO: 16360 - DNA, 445 bp, Oryza sativa
  unsure (1)..(445): unsure at all n locations
  Clone ID: uC-osflcyp118h09a1
atcatcgggacacggtgattttattcataattttgatgctgacatgtagataggagtttgcaacaggacgagaaaatgcgactagattgacaaaactgaacgaaataaccaagcaactgacactgacgactgaaaaagaagcatcgtcgaattattacgcgcaacccgaccagctgtagtgatgaactcggggacaacgattccggcaggaggagatcagctcgatccggattacggaggcatcggtggctctcacaccttgaagctgaagctgaggaggaacttgttcaggccgnccttccagccgccgccgccccgtttcttgcagggattgcaggtcgcgacattcgccagctcaggccggccgcccttggccatggtgtcgcgcgccgtcttctgccagagcaggaagctccggcagccgttgaagtagatcttctcgtcg

SEQ ID NO: 16361 - DNA, 511 bp, Oryza sativa
  Clone ID: uC-osflcyp127a10a1
aaagagtcaaataatactactaaacattgaacaaggaacattattacaaaattgtgtgtccgatcctaatcaaaatggagaagtttacatatccgtgctggccaattgagctgagctttcgcagaagtgatacccctcagatatgcaataaaattcttagtcccaagatgttataatatgttcctcgaactaacagctatcctgcttttatttgtcatttgttctgtgctcattgctaaacagaataagagcagcaaactgtagaatttggaacaatatcggcctatactagagtgtgagtttcgcaacctggtatcagacatatacactcaaaccgaaggatagaggggaattactgagtgagggtaatctgatctcattcctgcaagtgagtaatatgcaagaatctgtgcctgaccgtccgggcaaacttcatcttgattcggggcaataatctcaatgttccagaagggtcgcaccattgccattagatcagtgccattgggagatg

SEQ ID NO: 16362 - DNA, 539 bp, Oryza sativa
  unsure (1)..(539): unsure at all n locations
  Clone ID: uC-osflcyp127c10a1
ttttttttttttttttttttttttttttttttttttttttttttttttttttttttattttttttttttaaataaaaaaaaaaaaaaaaaaaaaaaaaaaaaaaaaaaaaaaaaaaaaaaaaaaaaaaaaaaaaaaaaaaaaaaaaaaaaaaaaaaaaaaaaaaaaaaaaaaaaaaaaaaaaaaaaaaaaaagaaaaaaaaaaggaaaaaaaaaaacccgaaaaaaaaaaaaaaaagggaacccaaaaaaaaaaaaacaaagaaaatgccaaaaaagaaaaaatcaaccaaaaaagaaaagcaaaccccgaatgccaaaaaaaagggaaaaaaaaaaataaaagcaaaggcaaaaaaggacaacagggggaaaattgaaaaaaaaacaaggcaaaaaaaagggaaaaacaaggacaagaaacaccgggaaactntaaaaaaaaaaaaaaaaaaaaaaaaaaaaaaaaaacaccacaaaaaaagaaaaccaaaaaaacaaggtaaggggaaacaaagaaaaaccaaaagagatcaaggcc

SEQ ID NO: 16363 - DNA, 388 bp, Oryza sativa
  Clone ID: uC-osflcyp127e10a1
catcccaaacaagcgatatatatttcataaggaacataaatctgcttctacaatatactccatcagtaacatgagccccacccacagggtttattagagacaatgccagccccatgctgggacaggcttatttaagctgttcttcctcttaatttttttaataatggccctccttttatggccataatttatggccattttcgaatacgtccataagattatacctatttttttccccagttttgaaatgtccaaacatttatgggtttacaaccacgcggggttcttgatcggcgtgacaacggccttgacctgcaggtagttcttaaggctggggatgcccttctccctcccgattccgttttgtttgtatccgccgaacgggatc

SEQ ID NO: 16364 - DNA, 305 bp, Oryza sativa
  Clone ID: uC-osflcyp127g10a1
gcaagaaagtaggagtagtagtatactcctagcttaaagtttgctctcaacaaattcaggatagtatacgatcaagtactgtactatcctgtgcttaattttggcgttcttgtactgctactcctactatactgtactgtacttagttttggcattcagtatataggtccagaaggaaccagccaccaggaggcaggagcctttttgccttcctttttttggtttaacctgcagttttaataagggcctctgaatctctgacatcttcagtcatgtttttggggtttcattgcttggaattatat

SEQ ID NO: 16365 - DNA, 357 bp, Oryza sativa
  Clone ID: uC-osflcyp128g09a1
cagggggcccaaaaaaatgtataatataaggtcctaggggatttagttaattaacaaatgttaatttgcatgatacaaacataccccttagggcttaggccatcgatatcagtatgtagtatgctaatttacatccaacacagtggccccaatcattttgcaggcccagacaacaccataaaactccccctttatttattcacaatccagaaggaccctagcagccccagtaaaacatcaagaatcctccgctactttggcgttttctgatctttgagacaacatgaggatcttggcctatgcagacggggcaaatccatcattgaaaatgacctcacaggcccagatgatgtttta

SEQ ID NO: 16366 - DNA, 404 bp, Oryza sativa
  Clone ID: uC-osflcyp128g10a1
ggcagaaatcaaacggattgattattggcaaatacttgacattccatgattccaaaaggcacagctcctagaaattagaaacaagaggaggaaaaaaaccgatgggggatgaggttggcaaccaaaccagaggcagcagcagggtgggggagagagcgttttatgaaacctatcatctcgatgggcagacaaaatccgtaacacagggccagcttgtgccgaggaagaagatgacgacgacggcggtccacgagagcacagctggtcgacgattagcggcggtaggaccatggtttgtgtgggtttttgttttcctactccttgtacttcatgctgccgagggtgaagccgggcatgtcgaaggaggtggcgaacttctcgacctccagcttgaggttctcgat

SEQ ID NO: 16367 - DNA, 366 bp, Oryza sativa
  unsure (1)..(366): unsure at all n locations
  Clone ID: uC-osflcyp152a01b1
ggccggaattcccgttcgtttacgtgnccggctttcgatacccagccanccggngcangaancgccagaacggattgtttgagccaaactttccgttctctccaccagccagcagttcaagaagctcagggcctgacgttattgatgtggagtttgaggagaagtaagaacatgttgttacaacgtgcaccagcaccttagggaggggaagaatgagaagataggctggaagttagcgatatgcgggagtgcacgaagttattcgggcaattgtgcgttgtacataatgcgttccctgaaatttgaataaaacgaagcttcgccaaattaaagcactgcgcattacttgatatttagcattcgaac

SEQ ID NO: 16368 - DNA, 528 bp, Oryza sativa
  unsure (1)..(528): unsure at all n locations
  Clone ID: uC-osflcyp152a02b1
gatctcntttcacccccctcaactctctctatcgatcgatcgatcgatttgagcctccattcccgttgcccccatcaagatctcatcatcaggatcatctccctgccgccgccgccgagtgaaatcaactagtgtatgcctctcactgtggctgagatcaagtgaccgaggaagaagacgaaggagacggcggccggcggtgtaaagctgtatagctagctctctagctctgcgtgtgctcggtccccgcgccgcagtgctgtgcctgtgcctgtgcctgtgcgctatctagctgtggagatggaggcgcggctgcggctgctcgtcgtcgtcgtcgttgttgccgggcactgcgccgccgtcgcgtccgccgccggtaactcgtcggtggtggggtaccacggggacccgacgttcaacgtcaggaactacggcgctaaggggaacggccaaaccgacgacagcaaggcgctgatgactgcgtggaaggcggcgtgcgcggcgaccggggcggtgacgcttgtgctc

SEQ ID NO: 16369 - DNA, 603 bp, Oryza sativa
  unsure (1)..(603): unsure at all n locations
  Clone ID: uC-osflcyp152a04b1
attcccggttcgtttacttgtccgactttagataccatcctccnccgncgccnccccctgggccggtttatttagacgngcgccaccgttcttcccccccccttcccggccgaggcgatcgatcgatccacgcgcccgcgcgccaccgccgctgatcataacaagcaccagcagcctcccttctccgcgcgcgcggttagctcgcggctcgccatggcgcccaagacgacgacggacccttccacgtccaccccgccgccgccgggcgcgttcaggcgctgcagcgggcgcgtgcgcggcgccggcatctcgtgcgcgggctgcttcggcgacgcggagtccaagcggcggcggcgggtggcggtctacaaggcgtacgccgtggagggcaaggtgaaggcctcgctccgccgcggcatccgctggttcaagcgcaagtgcttcgacatcttgcgcgcctagcgctgatccctccaagaacaacgccgncaatgccaacgcatacgcgcctngcctcccctcttcttcttagtggaagtaaatttttgaaggaaaaaaaagagaaggaaaaaggaaaacacagggccttatttaataatgcag

SEQ ID NO: 16370 - DNA, 329 bp, Oryza sativa
  Clone ID: uC-osflcyp152a05b1
ttcactgtccggagatacgtcactgcacgaagctacctagcttaattacctggttactttatcgatcatcagcctagatatggcggctttgaacggtaaggtggtggtggcggtgatggtggtggcgatggtggcccattctctcccatctcatccctccgcaggattctcggccttcccctcctttgaggctcccacccccgaagccagggttgcagtagctgccgaatcttctactgcctcacccgaccatcccccgcactgcgggacttccccagcttggttcgttaccaaggcccatgctattacatctagccccgtgttgggga

SEQ ID NO: 16371 - DNA, 308 bp, Oryza sativa
  unsure (1)..(308): unsure at all n locations
  Clone ID: uC-osflcyp152b07b1
taaataactagggttggagggagtccagnccaccaccaccaggctcgcctccagtgctccctgctgtccacgccggcgccgngcctccccaccgtccccgccgccgtccgctccgtccccaccgtccaagccgccaagccgggggccgcgacggagcgactcctcgggtcgccgcctcgccggttgcgggttgccggcttggtggcttggcgcggcgccttctccagatctcttgcttggcaactgatccggcgctccaccattcaaccgacccctgttgaggtaaggtgaggtgaggtgaggcgagg

SEQ ID NO: 16372 - DNA, 492 bp, Oryza sativa
  unsure (1)..(492): unsure at all n locations
  Clone ID: uC-osflcyp152c02b1
tttcgttctactcgcccgcgcttaaatcttacgcggcgccgnncatcccggcagcgggcagttgtttttgaggacttttcgccttactgccgggagctcgncaagaccacggcgtggttccgcgaccactggttcaggcagcaccagatgtacgaggacgctgcggcggaggaggaccaccaccgccaggtgttcgacgacgacctcgccgcgctcctgcccgacgactcgctcgacctcctcgacatggtcgacaccgacgacctcttctacacccccgacccccccgtccaccacaagccgacgacgactcccaccctcgacgccgacgtgctcagggcgctcagcctcaactcgccgaggttgggcggcgccgggatggtgaggcacgccgagaagccggcccagttcgtcgccgccaagggcggcgccgtccgccacgtcattcaccagcctcgctagagcgccatgggtgagtggtgatgctgctgc

SEQ ID NO: 16373 - DNA, 564 bp, Oryza sativa
  unsure (1)..(564): unsure at all n locations
  Clone ID: uC-osflcyp152c05b1
tttactcgnccgcacataactaggggacgcaanngnnnnngaancngaaggggacttaatataacngggcacaccgtcaaaaaccgccannanggancangagaagaaaagaacaccngnggngaggaaaggnggccnnccngangcngnngnnnggaacccnngggacaagaaggctaaggctatgtcagactttggggatgacgaatataaacgcatggtctgtgtggaggcagctgctatagaaaagccgattactttgaagcctggngaggagtggactggaaagttggaactgtctgctgtcccatctagctattacagtggtcagctggatcctgatcgtgttcttcaggattcaagtgtcccggaggactcaatcagctagtccttagtggatatttgtccaggtagactattatatcatatgcataagggacattggcaacaaggagtgtcaaaacgtttattccattctattcaaatctttgttgttttttggcatgcatatctgaactgagggaattcaaaaatgaattaccgtttgatatctacaaaacgtaa

SEQ ID NO: 16374 - DNA, 555 bp, Oryza sativa
  unsure (1)..(555): unsure at all n locations
  Clone ID: uC-osflcyp152d03b1
tttcgttctactcgtccgggttttgtactgatgaggctctngcacaggagactgaggaattctttaaggntgaggagagtgttcctattgctgagaaacagggtgagcaggatgatgctccaactggagagaaggataacaaggagggtgctgcaaatgaggaagaagagaaggaagaggataaggagatgactcttgaggagtttgagaaattaagggaggaaaagcggaaagctcttcttgctttcaaggctgaagagaggaaggttgaggtcgataaggacctgcagtctatgcagccactttctaccaagaaaggaaatgatgaaattttcattaagctgggttctgacaaggataagaagaaggaaaatgctgagcgcgatgagcgtgccaagaagtctgtgagcatcaatgagttcctgaagcctgcggaaggagaaaggtactatggcggccgtggtcgtggaagggggcgtggagatccgggcggtcgtggatatgggggtggttaccaacgtggcccatattctacatctgcaccattcattgaag

SEQ ID NO: 16375 - DNA, 525 bp, Oryza sativa
  unsure (1)..(525): unsure at all n locations
  Clone ID: uC-osflcyp152d04b1
caattacatcggtgccgattncggcttcggcattaacaaggatcaccattaccatttggggtacttcttgtacgccattgctgtgcttgccaagattgatccctcctgggggaggaagtacatgccccaggcctactccatggttgcagatttcatgacattgtcgcggaaacacggcgcaagctacacaagattgaggatgtttgatctctggaagctccattcctgggccggaggtttgacagaattcgcggatgggcgcaaccaggagagcactagcgaggccgtgaatgcgtactactccgctgcgcttctcggattgagctatggggatactcaccttgtctccatcggcgcgacattgaccgcattggagatgcttgcagcacagacatggaggcatgtccgtgaaggtgacaccatctacgaagacgatttcaccggcaacaaccgtgtcgtgtgcgtcctgtgggcgaacaagagggacagtggcctttggttcgctccaccggagtggaggaatgc

SEQ ID NO: 16376 - DNA, 349 bp, Oryza sativa
  unsure (1)..(349): unsure at all n locations
  Clone ID: uC-osflcyp152d05b1
aaccccacaaaggaggacccgaaggaggggttgatttaagagaacctgccgctacaccccccggaaacagnnntggacttactgcagcgagcaccgtgagcataagcgacgagaaggccaagaagcaaagggcacaaaggacgacaacgcagcaagctatacgcgggccaagaaggggaaaatggacgcgcaaaacctgagaaagcaagatacgcgcctctggaaagacggcaccaacgggaagaaacactgccagaagcagccagcactcagagactagaaatcgcaaaagagctggagaaagaagaaggtacctcggaacccgaggaaaagcaagctggcgaggatg

SEQ ID NO: 16377 - DNA, 413 bp, Oryza sativa
  unsure (1)..(413): unsure at all n locations
  Clone ID: uC-osflcyp152d07b1
tttgttgcacttagctactctaggntggggagtagggccctttgtagaagttctagatacttttccgcactttgnatctggagtacttcatctaatttcctccgcagtcttaggcttcggtggcatttatcacgcgcttctgggaccggagactcttgaagaatcttttccattctttggttatgtgtggaaagatagaaataaaatgactacaattttgggtattcacctaattttgttaggtataggtgcttttcttctagtactcaaagctctttattttggcggtatatatgatacctgggctcctgggggaggagatgtaagaaaaattaccaatttgacccttagccccggtgttatatttggttatttactaaaatccccttttgggggagagggttggattgtta

SEQ ID NO: 16378 - DNA, 537 bp, Oryza sativa
  unsure (1)..(537): unsure at all n locations
  Clone ID: uC-osflcyp152e04b1
tcttcactcgnccgacatacttgcttctctngcacacaaggnagacgagggctattggttacgtcctcgtgctccttatgccatgccagggccacgtcatcccgttcatggagctctcccaccgcctcgccgacgagggcttcgaggtcaccttcgtcaacacggaggtggaccacgcgctggtggtggccgcgctgccgccgggcggcgccgcggagctccggcagcgggggatccacctcaccgccatccccgacggcctcgccgaagacgaggaccgcaaggacctcaacaagctcatcgacgcctactcgcgccacatgccgggccactttgagcggctcatcggggagatcgaggccggcggcgggaggcccaaggtgcggtggctcgtcggagacgtcaacatggggtggtcgttcgccgtcgccaggaggctcggcatccgcgtcgtctacttctcgccggcgtccacggcgtgcatcgccttcatgcgcaagatccccaagctgatcgaggacggcgtcctcaacgaga

SEQ ID NO: 16379 - DNA, 389 bp, Oryza sativa
  unsure (1)..(389): unsure at all n locations
  Clone ID: uC-osflcyp152e05b1
gcgatcgatggccaccacacgggggacgccggcgaggacgggaagccggaagnggagccggccgcgaacgccgccncgaacggcggcggcggcggcgcggcggcgacgaaggcggagctcaccgactatgggtcctacgaccaggagccggagccggagacgcagtgctacgaccggacggggtcggcggaccgcgactcgaagccgcggctgcacaccgactccagcgggtcggagcacgtgctgacgccggcgccgtcgccggacgacttccccggcggcggcggcggcgaccacgactacgccgagagccagcccagcggcggacgcagagggaggcccggagtagaccgggccgtcgacggcgacgacggcagcgccagcgacag

SEQ ID NO: 16380 - DNA, 571 bp, Oryza sativa
  unsure (1)..(571): unsure at all n locations
  Clone ID: uC-osflcyp152e07b1
gcaggaccggttcggaattttcggtttgatttacgcgnccgggtggacgtgcggctgggggcgaacaggnactcggagaggtattcgatagggacggcggcgcatggcgccggggacgacaaggactacaaggagccgccgccggcgccgctgttcgagccaggggagctcaagtcgtggtctttctaccgggccgggatcgccgagttcgtcgccaccttcctcttcctctacatcaccatcctcaccgtcatgggggtctccaagtcctcctccaagtgcgccaccgtcggcatccagggcatcgcctggtccttcggaggcatgatcttcgcgctcgtctactgcaccgccggcatctccggaggacacatcaacccagcagttacttttgggctgttcttggccaggaagctgtccctgacccgggccatcttctacatagtgatgcaatgcctaggggccatctgcggagctggagttgtgaagggctttcagcagggtctgtacatgggcaatggcggtggggccaatgtagttgccagtggctacaccaagggtgacgggcttg

SEQ ID NO: 16381 - DNA, 545 bp, Oryza sativa
  unsure (1)..(545): unsure at all n locations
  Clone ID: uC-osflcyp152e10b1
ttgactccgagagagatagcgnagcttcaattcgctactgttccttgcgcgtgctcctccaagctactagcagtctcccgcctccgtttacccggtccggctccggcatggacgacgccacgtcgtcgtcgtcgcgggcgccgcggcccaagacggaggagctggacgcggcgctccacgccatggggttcgagatcgagcgggtctcccccgcggaggtcaccggccgcctcctcgtcacccccacctgctgccagccgttcaaggtgctgcacggcggcgtgtcggcgctgatagcggaggggttggcgagcatgggggcgcacatggcgtcgggctacagccgcgtcgccggcgtgcagctcagcatcaaccacttccgcagcgccgccctcggcgacaccgtnctcgtncgcgccgncccgctccacgtcggccgctccacccaggtgtgggcggtgaagctgtggaaattggatccatccacgaaggagaagggggctcagatctctgaatccagggtgacttttctctgaatctgccgt

SEQ ID NO: 16382 - DNA, 562 bp, Oryza sativa
  unsure (1)..(562): unsure at all n locations
  Clone ID: uC-osflcyp152f04b1
tttcgatttacgtgtccgaaaatanattactaaccgaaaaaanannccccaacggggaaggtttcattaccctagcgcgtcgtttatgtccaacacgagggtgttcttcgacatgaccgtcggcggagctccggcggggcggatcgtgatggagctgtacgcgaaggacgtgccgcggacggcggagaacttccgcgcgctctgcaccggcgagaagggcgtgggcaagagcggcaagccgctgcactacaaggggagcaccttccaccgcgtgatcccggagttcatgtgccagggcggcgacttcacccgcggcaacggcacgggaggggagtcgatctacggcgagaagttcgccgacgaggtgttcaagttcaagcacgacagccccggcatcctgtccatggcgaacgccgggcccaacactaacgggtcccagttcttcatctgcaccgtgccctgcagctggctggacgggaagcacgtcgtgttcggccgcgtcgtcgagggcatggacgtcgtcaaggccatcgagaaggtgggatcccgcggcgggagcacc

SEQ ID NO: 16383 - DNA, 77 bp, Oryza sativa
  unsure (1)..(77): unsure at all n locations
  Clone ID: uC-osflcyp152f05b1
gcggtacgatcccgccgcgnnnaagcaaaaaaaaaaaagagggggataaaaaaaaaaaaaccaaccgagaccggccc

SEQ ID NO: 16384 - DNA, 554 bp, Oryza sativa
  unsure (1)..(554): unsure at all n locations
  Clone ID: uC-osflcyp152g01b1
cttatacttagaaggctcactccgtctccccctccggccgccgtaaggagaagcagcagcagcgatgcaggccgccgccgggcgcgcgcgccgcctcctcacgtcgccggcggcctccggtatcctctccgcgccgcgccccgggtgcgcggcgctcgccgggagcggcgcccttcttccccgtctcgatggtgtcccgtcctcgccgtcgccgtcaccggcccctccgctcctggctaggagcttctccgccacgtcctcgtctcgcctaccccgtaacttgctatcgccaagtatatcttctcaatggcggaatgagaaatcggtgtgctatcacatggctgcaactcactactcaacagaagcaagtgacattgatcaacctacagaggctgtagtggagctgtatcagaaaatgttgaaatctgttgaagccgagaccatgcctncgaatgcctgggtgtggtcaatgataagtagctgttccaataaggaggacatcaaactacttattcagattttgcagaagctaagagtttttagactatcaaatc

SEQ ID NO: 16385 - DNA, 538 bp, Oryza sativa
  unsure (1)..(538): unsure at all n locations
  Clone ID: uC-osflcyp152g10b1
ttgcttantcagtactagagtcactaacagcaaagcctgatgtgttggctaaggactcatttgttagcagtaaaaaatcatgtcgattgggttttggtcttggcacaattccggagtatggatctgttggagtatgccaaccttggtccacaagatcagcagaggttaaacaagtgcatcgggcgagaccaacagcaatcagaagtcaagaagatagtgatgctgcagctctatgtgctttggtcgagaccatggatttggacaccaaacctcttgctgaggctagctctggtagtaactcaggagtgcacatctgcggccctgacagggggcataactcccatccctcgtgtttggctaaagtgcagcatgctgcagacagagatgatgacgaaaattcttctgggtgtgtacatccaagcacctcaggaaataaccgtggttatattccacattatataggtgaccgcaggataaggagattgtttgccttcaggttaaggaaggcagctcgcaacaggatatgtggagagatgtc

SEQ ID NO: 16386 - DNA, 563 bp, Oryza sativa
  unsure (1)..(563): unsure at all n locations
  Clone ID: uC-osflcyp152h01b1
ctcctccatcccctccccgcgccaccatgcgccccttccaccctcctcgccccaacgccggccaaccccaccgcccgcgccccggcgaccccgccccgcctcccctccccatgcacccgggcttcaaccctccgcccgtccccaacctcgccgccgccaaccccatggccgccgcggcggcggccaaccctttcctcgcgatgcagctcttcggccaggcgcagcagctccagagcctcggcttcctcgccgccgccgcgctccagcagcaccatcaccagccgcagccgcaggcccccttcttccccgggggaggtttcccgccgaaccccaaccagttcggggccttccctgtccagcacgccgggttcaacggcggcggggcgtttcgacctggtggcgtgggcgtgggcgtggccggcccccgtactccccgcccgatgatgggcgcccctggtaatggttacaacagcggtggccgcagcggccatggtaccggagcttgtgcgccgagacccatgctgaatggtggngggaacgatcggaatagcagtgctgggaag

SEQ ID NO: 16387 - DNA, 532 bp, Oryza sativa
  Clone ID: uC-osflcyp152h04b1
acctccatacctccccctcctcccctctacctccggcgcgcgagatccagggagagggcgaggcagagaccatggcggggacggtgacggtgccgccggcgccggtgccggcgacgccgctgctcaaggacgagctggacatcgtgagcccgacgatccgcaacctggactacctggagatgtggcggcccttcttccagccctaccacctcatcatcgagcaggacggcgacccgaccaagaccatccgcgtccccgagggcttcgactacgagctctacaaccgcaacgacatcaaccggatcctcggccccaaggcctcctgcatctccttcaaggactccgcatgccgctgctacggctacatgggctccaagaagaagtacgtcttcaccatcgacgacgactgcttcgatgccaaggacccatctggcaaggacatcaatgctctcgagcagcacatcaagaaccctctcagcccgtccacccccgtcttctcaacaccttggatgatccctaccgcgaaggcgct

SEQ ID NO: 16388 - DNA, 533 bp, Oryza sativa
  unsure (1)..(533): unsure at all n locations
  Clone ID: uC-osflcyp152h07b1
tgagtagatgagagagancatcagcacccacatcgggcagtccttgatccaggtcggcaacgcgtgctgggagctctactgcctcgagcacggcatcgagcccgatggcaccatgcccagtgatacaacggttggcgtcgcacatgatgcgttcaacactttcttcagcgagacaggcgctggcaagcatgtgcccagggccatctttgtcgacctggagcccactgtcatcgacgaggtgcgcactgggtcgtaccgtcagctcttccaccctgagcagctcatctctgggaaggaggatgccgctaacaactttgcccgtggccattacactgttggaaaggagatcgtagatctatgcctggaccgtgtgcgcaagttggcagacaactgcactgggctgcagggattcttggtgttcaatgctgttggtggtggaactggatcaggacttggttctcttctgttggagcgtctctctgttgattatggaaagaagtncaagcttggcttcacaatttacccttccccca

SEQ ID NO: 16389 - DNA, 543 bp, Oryza sativa
  Clone ID: uC-osflcyp152h09b1
ccctcactacacacgcagaaatccgcatcaacagccagccatggtgttcacgctgaccaacgttggcctgtctaccccggcggcggcggcgtcgtccctcgttaggccggtcaccggagctggacgcgtggtgtttccccgtgttggccgcggcgggttcgcggcggtgagggcgagcgggccggcgacgccgccggacatctcggacaagatgtcggagagcatcgacaaggcgaaggaggcgtgcgcggaggacacggcgagcggcgagtgcgcggcggcgtgggacgaggtggaggagctgagcgcggcggcgagccacgcgcgcgacaagctcaaggagacctccgacccgctcgaggcctactgcaaggacaacccggagaccgacgagtgccgcacctacgacaactgattcttaccattatatgtttgctaatctctctgtaattaattataagttactgcgttgaaaagattatttgtcgtagaagacagaggggagtttggtggaatggtgtatttaccgatagttcaaggggg

SEQ ID NO: 16390 - DNA, 531 bp, Oryza sativa
  unsure (1)..(531): unsure at all n locations
  Clone ID: uC-osflcyp152h11b1
ttagatactgatgttcaccattgntgntgnngcatgtatactaacttagatgaactatctaaacaaggctcttgacacattcaatactgcagttgtttcgcctatatattatacaatgtttacatcactaaccattttggctagtgtgataatgttcaaggactgggatcgtcaaaatccaactcaaattgtgacagagatgtgtggttttgttaccatcctttctgggacgtttcttcttcacaagacgaaagatatggtcgatggactcccaccaactctacctatccgaataccgaaacatgatgaagatggctatgcggctgaaggcatccccctcaggtctgctgctgaaggcctccctcttaggtcaccaagagcagcagaatgattttgaccagcgaactgcaagcaatcccagccattctttcattccatacaaattgtagatgtactttaggtcttataaggtaaaagctcggctcccctgtaatttttgagacatcggtacagattggngatagatacccc

SEQ ID NO: 16391 - DNA, 430 bp, Oryza sativa
  Clone ID: uC-osflcyp153a01b1
gaaaaagaaaaaaaaaaggggggggataaaaaaaagagaaacccccaaaaccccccggacaaaaaaagaaaagaagaaggaccccccccaagaaaaaaacgaaaaaaaagacggaaaaagaaaaaagaacaaaggagaagcaaaacggaaaaaaggaaaccaaggaaaaggagaaaaacgaagaaagaaaagcaagaaagcaaacaaaaaaaagcaagaaaggggggcaaacaaaaaaggggagacaagaagaaagacacggacaaaaaaagagaaagaaaaaaaaaaaacgaaaagaaaccagaaaaaaagggcgaaaaaaaaaaggaaaaggaagcaaaaaagagaacgaaagaaacaacgcggaacaacgagaggaaaaaaaaatagggaggagagaaacaaaaaaagaagcaaaaaagacaggaaa

SEQ ID NO: 16392 - DNA, 445 bp, Oryza sativa
  Clone ID: uC-osflcyp153a03b1
ccgggccggaagacccggggcgacccacgcggccgcccctacaaatagcaatgacatggaaaccaaacggggggagtggtaaaaaccaaccgaccggggcaccccccaagggaaagcgatgggccaacgctacagcaaccacaaggcaaagggccagcacaagacaaggagatgccacaagtggcggacccggacaaagggcgaggaggccacaaaccagcacaagaacgggaggcccatggaaccccgagacaggggcaagaagccgagcacgagggaacccgccgacaagcagcggaggggcagggacaaccacgagcgccgcaagggctggagaacccagcagcggggcgagatgaaggaccgcaccggaagctccccacgctggtgtccaacacccgacagaagctcggcggcggcaactacaccaaggccagcgacgggc

SEQ ID NO: 16393 - DNA, 432 bp, Oryza sativa
  Clone ID: uC-osflcyp153a04b1
gccgcggcatgaccgagccatcgggcgccttggtgacacccacctgtgctgtgcccggggtgttaacatcctgctcggggcgggaggcggcgggaagcagctcgcggcccggccacgtgctcaccggcggtgcgccaccggcggccgccctcctcgagcgcgtcgagcggatcggcttccgcgtgacgcacgcgtacgggctcaccgaggccaccggcccggcgctggcgtgcgagtggcgcgcgcagtgggaccgcctgccgctgccggagcgcgcgcggctcaagtaccggcagggcgtcagcgtcctgtccctcgacgacgccgacgtcaaggacgccaagacgatggcgagagtgccgcgcgacggcaagaccgtcggcgagatcgtgctcccggggagcagcattatgaagggctacctcaacaacc

SEQ ID NO: 16394 - DNA, 293 bp, Oryza sativa
  Clone ID: uC-osflcyp153a07b1
agaagagggcccaaaaaccgtggagaagggcactacccaatgccggaacggggagtatgaaaaccccaaatgtcaacgggggagcaaagggctgatgaagcagaccggagacccagagggggatggcacaggggggcaaacaaaccggggaagggagcccgaagatgaaccccacaaaagcccgagacaagacaggcccaggactcgggcaagggccaagggtggaccaaaaaccaaaggggcccaagggcggaacacaaccggggcaactccaaggccagacaacaacacac

SEQ ID NO: 16395 - DNA, 506 bp, Oryza sativa
  Clone ID: uC-osflcyp153a12b1
ggccaacatgccgtaacatcggttttgtgtcagctgatgtcggtctcgatgctgaccactgcaaggcgcttgtgaacatcgagcagcagtcccctgacattgcacagggtgtgcacggccacttcaccaagcgccctgaggagattggtgctggtgaccagggacacatgtttggatatgcaactgatgagacccctgagttgatgcccctcagccatgtccttgctaccaagcttggcgctcgtcttacggaggttcgcaagaatgggacctgcgcatggctcaggcctgacgggaagacccaagtgactgttgagtaccgcaatgagagcggtgccagggtccctgtccgtgtccacaccgtgctcatctgtacccagcatgatgagacagtcaccaacgatgagattgctgctgacctgaaggagcatgtcatcaagcctgtcattcccgagcagtaccttgatgagaagacaatcttgcatcttaacccatctggtcgcttc

SEQ ID NO: 16396 - DNA, 539 bp, Oryza sativa
  Clone ID: uC-osflcyp153b02b1
gaccggccggaattcccgttctactccatgcgccggcctcggaggcttcgcactcgccttcggcctttaacgctcagtttcccaaagcctcttgttgattccgcgaacaagcccatgattctgcatcagattgaggccttgaaagaagttggagtaacagaagttgttttagccatcaactaccgcccggaggtaatgctcaatttcctgaaggactttgaggataagcttggcatcacaatcacgtgttcccaagagactgagcccttgggaactgctggccctcttgctctagcaagggacaagcttgtggatggatctggtgagccattctttgtcctcaacagtgacgtcataagtgaatacccttttgctgagctcataaaatttcacaagaacccatggtggtgaggcaacaattatggtcaccaaggtggacgaaccatcaaaatatggtgttgtggttatggaggaggccactggaatggtggaaaaatttgttgagaaaccaaaaatatttgtaggcaacaagatcaatg

SEQ ID NO: 16397 - DNA, 428 bp, Oryza sativa
  Clone ID: uC-osflcyp153b06b1
gaaaccaacgggtttactacgagaccattccggaaaatcgccgccagacaaatagcaggcgccaattagaaaccaaagacaagcacatatatgacacagggcatcatacaatattgatcacctgtaggccaaaatgacaccatttatcaccggacatgcatcgatgattcggcctgaagctagggggaccaacatatgggcgggcaagcaataacaggaacattatggattggcatatattctgcacaaatgcagaaacataatattatccctgggtccaaaaataaggcaaaaagggctgctcaaaaagagcatcacccaagagacttgtatggggatttccttcatgagaacaggggctgattgctccatctgacgatgataattaattagcgcctcaggctgtgcaggatatattcagcaaaaag

SEQ ID NO: 16398 - DNA, 493 bp, Oryza sativa
  Clone ID: uC-osflcyp153b07b1
gcgggtcagctccccgcctgctccctcctccgggtgcctgtcctgtctcgccaccgccatcgtcttcgcctccccgcctgccaaccgccccacgttgcggggagacagctcggcgcgggcggcgatcatggcggcggcggaggtgtactcgccgacggcggcggcggcggcgcagcagcagcagcgggggaaggtggcggcgcaggcgtggcaggcggtggggggaggatcgggttcctcctccagggcctgctgcagatcctacggggcaccccatcctgcgcccagctgctctccttcggcgggttccgctacccgctcctctccgggccggccgactccgagcagtcgccgacggaggccttcatgccgctccgctccgagcacccggccgacacggcccctgcgccgacgcccccgccggaatccctgcagcgcctcacggatgcgcttgatgtggatgaaactgtagttgctgcatatgaatcatcca

SEQ ID NO: 16399 - DNA, 462 bp, Oryza sativa
  unsure (1)..(462): unsure at all n locations
  Clone ID: uC-osflcyp153b09b1
ctcaagccgcgcgagagcaacacaagcaagcgggcggtagggtaccccgagacggcgagcgcccccgcggcggagagctacacgatggagngagctcgcgcccgggacccccacaaccccgacagcctcaacgacctcgagggctgcggcaacgagcaggagtccaaccaaacagataacttggatgcaaatcttaggctgcttcgactggaccaggtcgaaccagaaagngagagtgtgcagattgtatctcgcatactgattaaggctctcatggcaatgccaggcccggacttcagcctatgcttattcttaattccagagcatgtgcaaatggaggaacagttcaagacgttgatagttctctctcactacctggagactgctaggttccgtcaattttgggatgaggcgtcgaagaaccgcaacatattggatgttggcccaggttttgagcaggca

SEQ ID NO: 16400 - DNA, 344 bp, Oryza sativa
  Clone ID: uC-osflcyp153b10b1
ggctcataatccccaaagcctcctgttgtcgccgccgccggcgcgctgggggactaccgccacgccgcagcgccggctggctcccgagacagcccggacggcgccgacgtcgaaccacggcacccggacggggacgaatgaagcagcagctctgctcttgaacctgaacattctgggctgcatcagacgctacatgcaaaccgataagcttgattggctcctaacgtgacaggaaaggcaatctttctgtcagcaggcatggtgttgaaacatcagaatcattagatcgccgtgcatgactctggaagggttctagacgatgcttgtagatagtggtggcaact

SEQ ID NO: 16401 - DNA, 521 bp, Oryza sativa
  Clone ID: uC-osflcyp153c05b1
cacctaccaagactaactcaagaactagaagcgttctggacgttagacaagccaattacgaggttggagttgggtatcacatctgatgctcatgcagaaaaactaagactgttgatagatctcttctaccagtgcactaaaggaattgcatctgagcgcccaaaagctgaggcggtttacaatttactgtgctctctacccacatgctatgacatgaggtgaaagtgtggatcttaaatcagtatgacataaggtgaaaatgtggatcttgaatcaggaacctgttgatgagacagccagccagatcggcctgcgccaggatggcaagttatgctgggtggttttagcaggtcaacagatctggcctcgcttggtttgaacttctgaccagcatgccgcttattctttgagtgctggcgatgcggaacacgagaaatccaaccaaaaccaaagccggtggcagcattgttctgagttctctggagttcatcctgtgtcagttttgtagcagccagcccccg

SEQ ID NO: 16402 - DNA, 540 bp, Oryza sativa
  Clone ID: uC-osflcyp153c06b1
tgtttattctcgcgcccgctctctcatctccgcctccgctctcgcgagaactcctgagcgtttcgctccgccatggctggagacgctgatggaaaagccccactgggatcaagatacccccctgctgctctcaacgagcgcatcctttcttccatgtctcaaaaacatgttgctgctcatccatggcacgatctggagataggtccaggagctccagcagttttcaactgtgtggttgaaattcctagaggcagcaaggttaagtatgagttggataaggcaactggtctaattaaggttgatcgtgttctttactcatctgttgtttacccacacaactatggtttcattccacgcacactttgtgaggacggtgaccccatggacgtcctcgtcctgatgcaggaacaagttgtccctggatgtttcctgcgagctcgtgctattgggctcatgcctatgattgatcagggtgagaaagatgacaagatcatagctgtttgtgctgatgaccctgaatacccgcacttcagggacatc

SEQ ID NO: 16403 - DNA, 408 bp, Oryza sativa
  Clone ID: uC-osflcyp153c07b1
ccgggccggaattgctgtgttgattcacgcggccgctcagagcccgctggcaacagcggcggaggacatggcgtgtgtagacgagctggctgcttggtgcccgaggatgacggcgcagcggttagcggaggcggaggctgagcgccggcggcagcggcgacggcggccgaggctgaggacagtggcgacgtaggcggatgcgggtcgctagcgaggaggctgggcgctcggcagcagcggctgcggtggcggtggcggcgaccgtgtctgcgatcaccggaggcatggcggactcggatggctagccgagggcgaggcagacggttgcttttggccggcacgacatcgatagtggaggggacggagaccggatcggcacaaagaggcgcagccgacggcaacggaggc

SEQ ID NO: 16404 - DNA, 525 bp, Oryza sativa
  unsure (1)..(525): unsure at all n locations
  Clone ID: uC-osflcyp153c12b1
gttgtttttgattcacgcgtccccttcnattttgtgacacatatagaggagggttacttgcatctttttcgattaccagacggtaccggcgtcgcgcgagcgagcttgatcttgcgccttgtgcctgctagctgcttcggcggcggcggttatcttcttccgatctgtaacagccccgatcaagaaaggatccaacccacctaggaggactaacctgaacgtgctaatgagttcaaagctagtaacatcacctctgaaatccatggagcagggccatctagagcaacctctgcgcgatccgcaggcgccggcggagcagcatgacatggggttatctcccctgacgctcctcggcttcgccttcctgaccttcaactcgggaatggcagtgtacagatcagatagagacttggcaaccatcttcttcgtggacttctcctacgttgacctcgtatcgctcttctacttccttcgattatttgagaagacgccgccggaagtcgctccgccgcaccacatcaagac

SEQ ID NO: 16405 - DNA, 351 bp, Oryza sativa
  unsure (1)..(351): unsure at all n locations
  Clone ID: uC-osflcyp153d03b1
tttttgattctcgcgtccgggcctcantcctacctacacaagaaagagaaggaggaggatattttagagggaggcggaaaagaaccccgagctagagaagaagtttgttgtatttgcagctgtcagaaagaaagaaagaaagcagcaggtagagagagagatggcggacgctgatgacatccagcctctggtgtgcgacaacgggacggggatggtgaaggccgggttcgcgggggacgacgcgccgcgggcggtgttcccgagcatcgtggggaggccacggcacacgggggtgatgtgtgggaaggggtgccacgacgaagatctatgacccgctggaggaggacgcct

SEQ ID NO: 16406 - DNA, 473 bp, Oryza sativa
  Clone ID: uC-osflcyp153d05b1
gaccgtccggaattcctttcgtcatgcgccgacctccatccacagagagtgcagaccttgcatttgcaagctgtctggattgactttgtctctccggaatttattgctgcattgtctgtggatcagaggaggagattcaagctctttttcctgctactatctacggatgcttggaatgcctctgtcatacttgatgtggtataggcctctgtaccgcgcaatgagaactgatagcgcattcagctttggatggtttttcctttgctacatgcttcacattgccttctgtgtatttgctgccatcgctccaccagttatatttcgtggaaaatcattaactggtatattggctgcaattgacaccttctctgatcatgcaatagtcgggatcttttactttgtcggatttgccttgttttgcttggagacacttgtgagcatttgggttcttcagaaagtatacatgtatttca

SEQ ID NO: 16407 - DNA, 493 bp, Oryza sativa
  Clone ID: uC-osflcyp153d07b1
gcgcatagattccctccggctcgagccaatctctggctgtgtctctctcgcgctctccactagcaccggctcggctcggctcgcgcggcggcggcggcggggcggcgtggcgccgagggaggggaacgccggtgtggggagggcggcggcgaggggactcgccggcgacgagctggtttgggtatgagaggggttacccatgcggcgccgaccacgagcgtgccccgccgcggctccatggacggcctcctcatcttcgtcttctacctctcgcttcctatacggggtggccgcgaccactcgttaatctcctgctttaattgatagccgatctcgcctctgccccacactgtgtgatcccgctctctctctctgcttcgattcgattcgattcgatcttctccaccttgtcgccgacgaacgcaactcggatcgggaggataatggaccagccttctaatggcttcgccgccgaggtctttttcttcgcaca

SEQ ID NO: 16408 - DNA, 525 bp, Oryza sativa
  Clone ID: uC-osflcyp153d08b1
tccttttgattccacgcgtgcgcgtccaacctcatgcttcttcatttttgtcacaatgcttaccttggggagaagttagtattcaaaacaggagcattcccaaatcttagaacacttgtgactttcaatttgggatcagcaaagagatattagatttgaggatggcagctcaccccaattggaaaagatagaaataggcaggtgcagattggaatcagggattattggtatcattcaccttccaaggctcaaggagatttcagttcaatacaaaggtaaagtggcgatgcttgctcagctggagggagaagtgaacgcacacctaaatcgtcccgtgctgcgaatggcaatggaccgaagtgatcacgaccttgctggcgacgcaaaaggatctcctccctaagcaggagggagacagctcgcaagtaatcatgttgacaacaaacgacagagaacagatatgcatagctcaaggtggtttgatcaagtgatcatctcctccattggcattctccgtcgtccctg

SEQ ID NO: 16409 - DNA, 503 bp, Oryza sativa
  unsure (1)..(503): unsure at all n locations
  Clone ID: uC-osflcyp153e04b1
ttttgatcctcgcgcccgcggctcnatctactctgctctctctcaggctcactctgccaatccttctgggcccgagcgcgttcgcgctttccccccctcgccgccggcgacgagctcgaggcggcggtgcgctcgcctacctccggagggcggagcggggggatggagcccatgagcgtggacggcggcgggggatgcggcggcctggacacgcagatcgagcagctgatgcagtgtcgcccgctcgccgagcaggaggttaaagcactgtgcgagaaggccaaggagatattgatggaggaaagcaatgttcagcctgtcaaaagcccagtaacgatttgtggtgatattcacggacaattccatgatcttgtagaactttttcggatcggtgggaagtgcccagatactaattatttatttatgggggattatgtggatccgtggctattactctgttgagactgttactcttttggtagcgctgaaggtgcgtcacccac

SEQ ID NO: 16410 - DNA, 520 bp, Oryza sativa
  unsure (1)..(520): unsure at all n locations
  Clone ID: uC-osflcyp153e05b1
ttttgttcctcgcgtccgggcatttctccccgttcgcctagaagatatcctggaacacatcttcattgtgcacagcgttagaactcacaaggcattggtttttcctgttctttttgttcattctttagtgaagatagatttctttaatacgcttgtaatgccagtatttaaggtgaggtagacctttgaaggaagggatgacttccataccagcatgagatgatagtgagagagatgaagaaattttagctgttcttctcctgtctttgttagcttaggaccatcatttgctgtttcagttggctgttttcctgtcgaagaggttcacctctgctgcttgatctttcctttgtgttgttttctgttgagaggagactaaattgactagcatcaatgctactgtttggaagaaaaagacttctcgctgtgttgggaagtttgttgtacgattctttcgcttctcactccaactcagtgtgcttcaagcagccctgatagtttaaatcagagctacangatt

SEQ ID NO: 16411 - DNA, 500 bp, Oryza sativa
  Clone ID: uC-osflcyp153e07b1
cacgcgtccgggtcgatcgatcggatcgggagaggacgcgacgcgaggctgtctgcgatgtgagggagagaatgtctgctggcggtgttcgatcgggcggtggcgccgagccctgaaggggctccgcatcccggtgcggcggaggacggcgcggcggtgctcgccgagaggttccgcgacgcgcgccccggcgccgtcaccgtcgccctcggccccggcggcgccaactgcctcgcctactcctgccacggccagagccccctcctccccaggttgttcgcggcgacggacgagatattctgcctgttccaaggcacgatcgagaacatcgcggtgctgaagcagcagtacgggttgcacaacaagggcttcaccgagatcaacatcatcatcgaggcttacaggacattgagagacaggggaccctaccctgcggatcaagtcgtcagagacattaacggcaaatttcgcgttcgtgctctacgaatggttcaacaact

SEQ ID NO: 16412 - DNA, 511 bp, Oryza sativa
  Clone ID: uC-osflcyp153e09b1
ccggggcggaaccgccgggttgatccacgcgggccctcaatcaccaagggccccaaagccaccgcaggagaaagccaagaggccgcccagaagcgaccaccagacggcccgtacgaagcagaccgcccgcaagtgcaccggcgggaaaggccccgaggaagcagctcgccaccaaggcggcgaggaagtctgctccgaccaccggcggcgtgaagaagccccaccgctacaggccggggacggtggcgctccgcgagatccgcaagtaccagaagagtacggagctcctgatccgcaagctccccttccagcgcctcgaccgcgagatcgcgcaggactacaagaccgacctccgcttccagagccatgcggagctcgccctccaggaggccgccgaggcctacctcgacgggctcttcgaggacaccaacctgtgcgccatgcacgccaaggcgcggaccatgatgcccaaggacatccagctcgcccgccgcatccgcggcgagcgcgc

SEQ ID NO: 16413 - DNA, 446 bp, Oryza sativa
  unsure (1)..(446): unsure at all n locations
  Clone ID: uC-osflcyp153e10b1
gcactccaccccccccgacgccgccgagcggagcagcaacagcaggcgagcgacacgggagggcccgccaagacccagaagacccaggcctacttcaagcgttgccaaggcaagatcaagagacggaggcagggcaagactgactacagggccaggaggaggctcaccaaccaagagaagaacaagtacaacacaccgaaggaccgctttggggtgagattaacaaacaaagatatcacagcccaaattgtctatgctaccatagcgggtgatatcgtgatggctgctgcctactcccatgagctgcctcgagatggtcttgaagaagggctcaccaactatgcggcagcatactgcactggctggctgctggctcgccgtgagctcacgctccganggacggaccaggagtacgagggcaacgttgaggccactggggaggacca

SEQ ID NO: 16414 - DNA, 500 bp, Oryza sativa
  unsure (1)..(500): unsure at all n locations
  Clone ID: uC-osflcyp153f03b1
gaccggtcggatttctttttttatgcgccggacatcaaccactactggnctgacatnggattttttttaattttatcgcgattgtcctggcaaggtggcgttggcggtggggaatggcggtgctgctgctgctcgcggggcggcggcgccgggggcggaggcggcgtgcgacgcgctgcagctgtcgccgtgcgcgagcgcgatcatcgggaacgcgtcgccgtcggcgtcgtgctgcagccggatgaaggagcagcagccgtgcctgtgccagtacgcgcgcgacccaaacctgcagcgctacgtcaactcccccaacggcaagaaggtcttggccgcctgccacgtacccgtgccctgctgctaaaaccaaaccataatactccagttctgcgtgccgtttatacgtgtgtgagtgcgcctgtcgcatggcccacctgccatagacgccgtctatatatggacgtacgtacgtgtctcgcttacttgatttcgtgtct

SEQ ID NO: 16415 - DNA, 506 bp, Oryza sativa
  Clone ID: uC-osflcyp153f07b1
gaccggccggaattctgtttgatccacgcggcgatcccttagttatctgcatctcttgctagtgatgacaaatccatcatatgctttcaccttcaaaatctgactttgcgtgctgctgatcaactaaaaaaggaatctttgcgcatctttgatacttcactatgttattctcattaggtagaaggcacaaatccagtcgtgtatgtgctgaatgttagggatacttcactaagaacatacttaattgtgaactttgataagtgggatgttaagtttgtcaattttaggcttttcctgaacattagatatcaagttatctaatgtgtgtgggaataggaaatattttccactggtagttgcacactgagatgtttcctattatattctaccttgcattttcatggcatatccttggggatttcttgctgatgtcgtgcacgtcaggagttccaagtaggtatttacattgttctacctgctagaagttttttacaatctgacaaatc

SEQ ID NO: 16416 - DNA, 509 bp, Oryza sativa
  unsure (1)..(509): unsure at all n locations
  Clone ID: uC-osflcyp153g04b1
cacctccatgagccgccgccgcagcctcctctcggctgctcccatcctctccttcgagttagcttcctccttattcaaccatgggtaaggagaagacgcacatcaacattgtggtcattggccacgtcgactccggcaagtcgaccaccacgggccatctgatctacaagcttggaggtatcgacaagcgtgtgattgagaggttcgagaaggaagccgctgagatgaacaagaggtccttcaagtacgcgtgggtgcttgataagctcaaggccgagcgtgagagaggtatcaccatcgatatcgccctgtggaagttcgagaccaccaagtactactgcacggtcattgatgcccctggtcaccgtgacttcatcaagaacatgatcacgggtacctcccaggctgactgtgccgtgctcatcattgactccaccactggtggttntgaggctggtatctccaaggatggccagacccgtgagcacgctcttcttgctttcactctt

SEQ ID NO: 16417 - DNA, 547 bp, Oryza sativa
  Clone ID: uC-osflcyp153g10b1
cggaccggtccgaattcctggttttatcacgcgtgcgctcaacactcccaagccgacggcgagcgtcacattcaaggttacggtgatggggtcgtcgtctgcgccgtccgtcgcgttcttctcgtcccgggggccgaacaaggccagcccgggcgttctgaagcctgacatcaccgggcccggcatgaacatcctcgccgcgtgggcccctggcgagatgcacaccgagttcgccgacggcgtcagcctctccttcttcatggagtccggcacgtcgatgtccaccccgcacctgagcggcatcgccgccatcatcaagagccttcacccgacatggtccccggcggcgatcaagtcggcgatcatgacgtcgtccgacgtcgccgaccacgacggcgtgccgatcaaggacgagcagtaccgcagcgcgagcttctacaccatgggcgccggctacgtcaacccgtcccgcgccgtcgacccgggcctcgtctacgacctccacaccaacgactacatcgcctacctctgcggcctcggcatcggc

SEQ ID NO: 16418 - DNA, 446 bp, Oryza sativa
  Clone ID: uC-osflcyp153h03b1
ttccatgcaggcgggttcctaagtccgctgaacactacacccgcaacgggatgctctatgtgagcatcatcaccgccgtgatcggcctgatcgacgtccggggcgccgccaggctgaggaaaggtcgacaagctcgacttcctcggctgcatggccgacttcctcggcgtcctcctcgtctccgtccagatgggcctcgccatcgccgtcggcatctccctcttcaagatcctgctgcaggtcacccgcccaaacatggtggtcaaggggcgtcgtccccggcacggcgagctaccggagcatggcgcaatacagggagggcatgcgtgtgccgtccttcctcgtcgtcggaggcgagtccgccatctacttgggcaactgcatgtacctcggcgagaggatcatgaggtttctccgggaggaagacgagcgggccgtcaagtgca

SEQ ID NO: 16419 - DNA, 495 bp, Oryza sativa
  Clone ID: uC-osflcyp153h06b1
gcgagtcagaacacaccctcaacctacactagccatggggcgagtaaacaagattcccctgctgctcgccgccgctgccgacctatagctcgccgagagcgccgaggcgggggagcccggcccgcgccgccggccggagcgcatgcggctgtacatgcacgacgtgatcgacgggccggggcagacggcgatccgcctcatctggggcgcggggccgccccacgcgtccatgccggggcgggcgatcggcgacacggtggccgtggacgacctcgtcacggagggcccgagcatcgcctccgccgccgtcggccgcgcgcagggcacgtacatgctcagctcccagcgcgaggcggtgctggtggttgccatcaccgaggcgctcacctcggccgggggcccctacaacgggagcaacctcgtcatcgccgggcgcgacagggtgcgcgacgagacgagggagctcgcggtggtcggcggcaccggcgcgctccg

SEQ ID NO: 16420 - DNA, 456 bp, Oryza sativa
  Clone ID: uC-osflcyp154c06b1
gacttagctgcattgtagtgagagagagaggcggccatggctctggcgtcgctgccgaaggtggtgatggggtcggtggcgttcggtgtgttctggatgctggcggtgttcccgtcggtgccgttcctgccgatcgggcggacggcgggggcgctgctgggcgcggtgctgatgatcgtgttccacgtgatcagcgccgacgacgcctacgccttcatcgacctccccatcctgggcctcctcttcgccaccatggtcgtcggcggctacctcaagaacgccggcatgttcaggcacctgggccggctgctggcgtggcggagccagggcgggcgcgacctcatgtgccgcgtctgcgtcgtcaccgcgctcgccagcgcgctcttcaccaacgacacctgctgcgttgtccttaccgagttcgggctcgagcttgccgccgagcgcaacctcccg

SEQ ID NO: 16421 - DNA, 513 bp, Oryza sativa
  unsure (1)..(513): unsure at all n locations
  Clone ID: uC-osflcyp154c07b1
ccctttttggagctccaatgctggaggngcgcaaggagcaacactttcaggttctactggcaatgcaattaaccggtgccactgggggccttggagggttggggtcagctgatctgagcagtttatttggtggtcttgccggtaatacaggaactggtgctactggtggtctaggagggttgggttcagcagatttgggaagtttgcttggtggttctcctgattcttcttccttgagccagattttgcaaaaccctgttatgatgcagatgatgcagaatatcatgtctgatccacagtccatgaaccagatgcttaacttcaacccaaatacacgcaacctcatggaatcaaacactcagttgagggaaatgttccaaaatccagaatttattcgccagcttacatccccagaaactatgcagcaattactatcgttccagcagacattattatcacagcttggtcaaaatcaacctangcaggatggtagccaaggaggcaatgcgacag

SEQ ID NO: 16422 - DNA, 478 bp, Oryza sativa
  unsure (1)..(478): unsure at all n locations
  Clone ID: uC-osflcyp154d10b1
gtcnatcttgctgacggctctgagtacagnggggattatggttaagctggcacgttagaattcctgaaagattttcataagcgaaggctggaggttcttgcggaagcaggtcctgatttgatcgcctttgaaacaattcccaacaaattggaagctcaggcttacgttgaacttcttgacgaatgtaacatcagtatccctgcatggttctcatttaattcaaaagatggagttcacattgtgagtggagactcgttaattgaatgtgctactattgctaatgggtgttcgaaggttggtgcagttggaataaattgcacacctccaagatttatccatggcctgatactcttcattcgaaaggtcacagataagccaattctgatatatcccaacagcggagaaagatatgatgctgagaaaaaagagtgggtggaatcaactggcgtgtcagacggtgattttgttttctacgtaa

SEQ ID NO: 16423 - DNA, 203 bp, Oryza sativa
  unsure (1)..(203): unsure at all n locations
  Clone ID: uC-osflcyp154e01b1
ctcncactgaccgaagctacctagctnaattgcctagcttctttaccgatcatcattctatatctggcggctttgaacggtaaggcggtggcggccgtgatggaggtggcgccggagatggaggcagcggttgctccggagacacgctcacccagtgaatccacagcgcccacagattacacctcggagcacccaaaggggct

SEQ ID NO: 16424 - DNA, 379 bp, Oryza sativa
  Clone ID: uC-osflcyp154e03b1
gggtggtggcacgcggcgaccggcgagaacgaggggggctccgtttaacacctccctcgtttccctcctcctaccctgcctcctctccttgctcctcatccgcctctccacccacctcaaccctgacccgaccgccgccgcgccccgtttcaagaggacccctcccttccccctccggttccgccatgacggcgccttcaagatcctccaggtggcggacatgcacttcggcaacggcgccgccacgcggtgccgggacgtggcgccggaggtgggcggtgcgcgctgctccgacctcaacaccacgcggttcctgctgcgggtcaatcgaggccgagaggcccgacctcatcgacttcaccggtgcgtttttccccct

SEQ ID NO: 16425 - DNA, 543 bp, Oryza sativa
  Clone ID: uC-osflcyp154e04b1
caggatcaactgaaagttcgacgagagcatctttacaactcctttgtggaagtaccaggtgtttttcaattggcaacttcaattacatcaaatgacctcgaggagatacaaaaatttcttgacacagctgtcaactccagttgtgaagggttgattatcaagacattggataaggatgctacatatgagccagcaaaacgatcgaacaattggttgaaattgaagaaagactacatggacagcattggagactctttggatttggtgccaattgctgcctttcatgggagaggaaaacgtacaggtgtatatggatcattcctcctggcatgttacgatgagcagaacgaagaataccaaacaatctgcaacataggcactggattttctgagcaacagcttgaggagcgttctgtgagccttcgaactaaagcaataccaaaaccaaaggcatactataggtttgctgacacaatggacccagatgtgtggtttgagccttcagaggtttgggaggtgaaagctgctgatttgagcattagt

SEQ ID NO: 16426 - DNA, 535 bp, Oryza sativa
  unsure (1)..(535): unsure at all n locations
  Clone ID: uC-osflcyp154e06b1
gccgcctgcacgcgctcgcggaattcctcgggtgcgactccatcgcggcccgagcgtcngctccgatcgactacaccccgccgcgccgagcgcacgcataaaaccatcaccacctgtccctccacctacactccacctgaacttccacactcgagtagcgagcgagaggagcactgacgacgtcgtctcgtcgccgccatggagatggcgctggactggcgctcggtgggctcgctcctcgccaccatcatggagatgcggaccgccatgcgcgacttcctcccgcccgaggccgagatcttacttcggcgcctactnagccgactcgccgccgccttccgtccccacgtcggcaccatcctcatcgacgaggccgacagcgccagctgaggagccaacgacctctacgacgcctcccagctctacctcggcgcccggtgcctcgacaccaggcccaccgtactgctcacaagccccaccaagctcccacgcccgtcgcctncctacccgacgcccacaccacccacgacgtctt

SEQ ID NO: 16427 - DNA, 482 bp, Oryza sativa
  Clone ID: uC-osflcyp154e09b1
atcccattgacgattgtgccgaacagagttggtgtttcttggtcaccaaaaaacacctgctgtttttttggatctgatcttgcaaccttcaaggagatcgccaagaaaaatcatgcttctgcggagtcttgtttaactctgctcttccatgcatcagcctggcaggatgagatttgagttccagggtgcatctttctgatgtgttcatcctttcttgaacagttcccccttcggtagttccttgcatggtagaaaataaaatctccaagggaaaataagagcaaacacatgagagacacttgcaggagccttactaccggcggctatgaagaagctgctgaatgaagggcgacgagggaggcgtaggcgccatccttgatgttcatcaagacaaacggtgagcaacgatcacggttgtccggttgaccatcactctgtccagcgcgtcttggaccaccctttcggattcagcatccagcgca

SEQ ID NO: 16428 - DNA, 464 bp, Oryza sativa
  Clone ID: uC-osflcyp154e12b1
cgtttccccaaataataatagaggaaggggaaaaacacatttgctgccacatcatccatggttctctctccgcaccattccggtgatcttcggcatcctcttctatgtccttgccagcactgccactgccaccgacgcaccggactacgtcgtccaaggccgtgtctactgtgacacgtgccgcgccgggttcgagaccaatgtcaccgagtatatcaagggtgccaaggtcaggctggagtgcaagcactttggcaccgacaaggtcgagcgtgcgattgacggtgtgactgatgagaccgggacatacaagattgagctcaaggacagccatgaggaggacatctgcgaggttgtcctcgtccacagcccccttgcaaactgctctgaaatcgaggccgaaagggatcgtgcccgtgttttgctcaccaggaatgtcggcatctgtgacaacctgcgcttag

SEQ ID NO: 16429 - DNA, 516 bp, Oryza sativa
  unsure (1)..(516): unsure at all n locations
  Clone ID: uC-osflcyp154f08b1
tttggtgacctgagcgactnggnctcgtctcctcgtgttcttgccgccgccgtgagcggaatccccctctctccggctaaacctcgccggcgcggcgaagcaaaagcacctgcctcttcgccgccgcccgccggcaatggcggggctgtcgctgcggtgcggcgactgcggcgtgctgctgcggagcgtggaggaggcgcaggcgcacgccgaggccaccaaccacgccaacttctccgagtccaccgaggccgtactcaacctcgtctgcgccgcctgcggcaagccctgccgctcccagaccgaggtggacctgcacaccaagcgcacgggccacacggagttcactgacaagaccatggaggcggccaagccaattgatctcgaggcggcgccgccgaagccggccggcgaggccatggatgtcgatgcctcggcaagcgccgagccacaagagatggtggccgccgaggttaacaaggagatgctggcggacctcgaggcgatgggttcacg

SEQ ID NO: 16430 - DNA, 487 bp, Oryza sativa
  unsure (1)..(487): unsure at all n locations
  Clone ID: uC-osflcyp154f09b1
cncgctcgatcttccaagaaaccggccggactcgagcgctcgttatgtccgggttccagatcgtgtttgtagagccatggcggcggcggcgcgcgcgatcatatgcgagatggcgccgcagaggggggcggcggcggctccntttgttccttctcaccagaagcccagacgagttcgggccgcagcgcccggagcgcaccctcttcggctccaaggggaaccccgccgccgacgaggaagccgaggccccggccccctctgcgggagaagaggatgcccccgccgacgccgctcgcgttccgatccgaacagggactaggtgccagggacctggtcccacggattaacctccgatatccgtatttgatgcaaaacctggtgaccctgctgccgcaccccaagaaggacaccaaggggcccatggatagcgatgcctggcaatgcgctcaaccagctggcttgagctcaggaactggttcacatggct

SEQ ID NO: 16431 - DNA, 480 bp, Oryza sativa
  Clone ID: uC-osflcyp154f10b1
ggtcattgctgaaagcctgtctgaggaagagattggaggactaaaggagctattcaaaatgattgatactgacgatagtggaactataacttttgatgagctgaaagagggcttgaaaagggtgggttcagaattaacagaacatgaaatccaggctttaatggaagcggctgatatcgacaacagtggaaccatcgactatggtgaattcattgctgctactctccacatgaataagctagagagggaggaaaacttagtatcagcattctcatttttcgacaaagatggaagtggtttcataactattgatgagctgtcacaagcatgccgcgaatttggccttgatgatcttcaccttgaggatatgattaaagatgttgatcaaaacaatgacggacaaattgactacagcgagttcacggcgatgatgaagaagggcaatgcttgtggagctggaaggaagaccatgaggaacag

SEQ ID NO: 16432 - DNA, 451 bp, Oryza sativa
  Clone ID: uC-osflcyp154f11b1
catagatctctttgattcagcttctgaagaaatacagggcaaaattgactataggcacacttatttagatttctcaaaacttgaagttaaagtttctacaagtgcaggcggtcagcagaccgtgaaaacatgcccagcagcaatgggttttgcttttgctgctggaaccacagatggccctggagcttttgatttcagacaaggagatgtcaagggaaaccctttctggaagttagtaaggaacttgttaaagacaccagggaaggaccaagttgaatgtcattctccaaaaccaatattgctagacactggtgaaatgaaggaaccatatgattgggcgcctgcaatacttccagttcaaatgattagaattggtcagctggttatcttgtgtgttcctggagaattcacaacaatggctggcaggcgtctacgtgatgctgtgaaaact

SEQ ID NO: 16433 - DNA, 402 bp, Oryza sativa
  Clone ID: uC-osflcyp154g02b1
tgtactccttatcggcactgccatctcagtctcctaattgtcatcactagcttctagctagcttaattaattaattagccatggcggaggagaagcaccaccaccacctgttccaccacaagaaggacgacgagccggccaccggagtagactcctacggcgagggcgtctacacgtcggagacggtgaccaccgaggtggtcgacggcggccaggacgagtactagaggtacaagaaggaggagaagcagcacaagcacatgcagcacctctgggaggccggagccctcgccgccggcgccttcactctgcttgagaagcacgaggcgaaagaggaccccgagaacgcgcacagggacaagatacatgcggagaacataacttgaatgtaataatgaagcc

SEQ ID NO: 16434 - DNA, 407 bp, Oryza sativa
  Clone ID: uC-osflcyp154g04b1
actcattgggtcactgtgtattaaaagcagagaacccagaaggttaaaaggaacttgcggtgtcactatttcagagcgtggttttgatgtccacaatgacccacaaaaactaagcttcctcgatatcaaggaatcgactgatcttgaggataaagaattgcgaagaacgctgcaatcacttgcatgcggtaaaggtcggcctctccaaaagatgccacaagggcgagacgtagaagataaggacgaatttatatttaatgaagaatttagtgcccctctctatcgcataaaggcgaatgctattcagatgaaggagacggttgaagaaaacacatgcacaactgagacagtattccaggacagacagtatcaggcggatgctaccataggtcggatcatgaagacac

SEQ ID NO: 16435 - DNA, 424 bp, Oryza sativa
  unsure (1)..(424): unsure at all n locations
  Clone ID: uC-osflcyp154h01b1
gcctaagttcccccgaattcttggaaggagaagagaatcccgtaaccaagccgtcgccgccgccgccactatgcaccgaaaccctcgcctccttctccgtgccgccgnnctccttctnacgccctactnctnctncgccgccgncgacccaacgccggcgctccctcctcttctgcggcgcccgcccctcttcttcccggaggggtgcccccaccggcgcgccttctcgacggcgggcttcggcaaggatgtcgacgaggtgaaccgcaagttcgcggaggcgcgggaggagatcgaggccgccatggacagcaaggagaccgtctacttcgacgaggaggccgcctgcgcgcgcgacgccgccggggaggccctcgcgggcttcgagtcgctgattgcgcgccttccgccggccgacgccgac

SEQ ID NO: 16436 - DNA, 353 bp, Oryza sativa
  unsure (1)..(353): unsure at all n locations
  Clone ID: uC-osflcyp154h07b1
gaaggagaagagggggggtttactttgacggggcctgtcgttactctacgcaccgaaactcgtcgttcttgctgcgggccgccggctgcctgctgcggcccttcttctacttcgccgccggcgaccaaacgccggggctccctccttttttgcggcgcccgcccctcttgttcccggaggggtgcccccaccggcgcgccttctcgacggcgggcttcggcaagggatgtcgacgaggtgaaccgcaagttctcggaggcgcgggaggagatctaggccgccatggacagcaaggagaccgtcttactttaccaggaggccgnctgcgcgcgcgacgcccgcggggaggccct

SEQ ID NO: 16437 - DNA, 518 bp, Oryza sativa
  unsure (1)..(518): unsure at all n locations
  Clone ID: uC-osflcyp154h09b1
ggatangttattaaaactaagagaccctctcaaaatataaagtatttggctaaagacgagtcttaacgcaactccatttctgctgttgtccctcctgatgaaattggagtgaaatttgatgatattggggcacttgaggatgttaagaggacgctggatgagcttgttactcttccaatgaggagacctgaacttttctcccatgggaatttgttaaggccctgcaaaggtgttttgctctttgggcctcctggaacaggaaaaacactcctggcaaaggcacttgcaacagaagctggagcaaatttcatcagcataactggttctacactcacatcaaagtggtttggagatgctgagaagttgacaaaggcccttttctcctttgctagccgattagctcccgttatcatatttgtggatgaagttgacagcttattaggtgcaagaagtggtgcatttgagcatgaagcaacagaaagatgcggaacgaatttatggcagcttgggatggtcta

SEQ ID NO: 16438 - DNA, 148 bp, Oryza sativa
  Clone ID: uC-osflcyp084a04a1
gatgcacgcaggcgtacagcaaggctagccatcatttagtttgccgccccaccaaaaattaatggggaaaccaagggacagtataagaaagaggaaactcccgcagaatcaaaagaacagactccatagggacgttcaaaaaaagaaa

SEQ ID NO: 16439 - DNA, 168 bp, Oryza sativa
  Clone ID: uC-osflcyp084a05a1
tgcacgccagcgcttcagtcatggctagccatccttttttgccgccctccttttttttttttaaagctttacaatctcacatccacggtttgctatctgaatggctagttgcccatttttttgtacttatgaatatattggaggtgctcataaacaagccaaccctag

SEQ ID NO: 16440 - DNA, 290 bp, Oryza sativa
  unsure (1)..(290): unsure at all n locations
  Clone ID: uC-osflcyp084a07a1
ctccttgaaaattttgtaatttgatccgcaacgattcagatgcagatgaaacactgctgattcccactcagattacacacaatacaaatacaccgacaaactgcctcaaaaaccaccaaattgattcaaaagtaaaacgggtatgagggatcttacccaccgagactgactaaacctaaccacagacaatttggatccactgggacccagattattcaaaaacagnatggctaatggacggcaatcgttcctggcaaccgaagggaaactttggcagctatggaatatcc

SEQ ID NO: 16441 - DNA, 106 bp, Oryza sativa
  Clone ID: uC-osflcyp084a08a1
gacagtcccgggaatatagattatatgatggtataatatcgaagggagtgcacaatcaacttaacaaggttatacaagcacagttacggtagaatcaaatcccaca

SEQ ID NO: 16442 - DNA, 91 bp, Oryza sativa
  Clone ID: uC-osflcyp084a11a1
ttttatagctttacaattttacattcacggagaaaaaccacgaaacacctttatacaattttttgaagcccataaagtataggtggacagt

SEQ ID NO: 16443 - DNA, 102 bp, Oryza sativa
  Clone ID: uC-osflcyp084a12a1
attatgtcgctactccatgttcagaaaaattgttttgataacaatattcacaacaagtcaacaacactttttttggattctttaaccattctaaaaggagca

SEQ ID NO: 16444 - DNA, 172 bp, Oryza sativa
  Clone ID: uC-osflcyp084b03a1
tagtttggcggcctttctttttttttttttttttttttgaggcagggagcaacttttacatgacggggagttcttttctctgttttttaccttgtggaaagtaaaaaaagggtctatgggggaaaagttaaaaattggaattgcaaacttaaccaaacagaccaaacgggtg

SEQ ID NO: 16445 - DNA, 299 bp, Oryza sativa
  Clone ID: uC-osflcyp084b04a1
ttagttggccgcccgcccttttttttttttttggtgaaatcaaactggtgtttatcatagtaaatcttcccggagaatcagatgctcaaaattcataggggtcttcaacatcttacaacttacaagatggcgcagatatacaagcgcaactatcttaaagcaagctgcaggaggaaatggaaccatttttaacaacgggtaaaatataggttatagaaggaaaccatttgaacaaattaatagggaaataaattaggaggatcgatttccgttccgaactcaataagaaccggacgttt

SEQ ID NO: 16446 - DNA, 169 bp, Oryza sativa
  Clone ID: uC-osflcyp084b05a1
gttgaggcaatgagatccataaggcattatatcatgaataccattacgactttaggagggcaataattaaccatacacttgacacatccattgtttcgaaacaatcaatgaccataagcaaagcgaccagcatggctgaaaagtcaaagaagcgcacgaacaacatgta

SEQ ID NO: 16447 - DNA, 279 bp, Oryza sativa
  unsure (1)..(279): unsure at all n locations
  Clone ID: uC-osflcyp084b06a1
ccgcccttctttttttttttttggagcacaaatttacatgttacacccacaccctacacccatgcataataatacatcctatatacgtacgtacatacatacccctctcgatcacacgcaccatcgatcgtacaaagttgcgtacatacatacgtacacacatatacggcataacgcacgttacattacatacattaattaaaaacttcgtaatttaatttaaaataccgtagntttgatggccattcttcttaatgggaaccttgagggcttggtgag

SEQ ID NO: 16448 - DNA, 126 bp, Oryza sativa
  Clone ID: uC-osflcyp084b11a1
aacaatacattcattcagactgttcctaattatgatgaggctaaatttaccacttacatagctaattacatgtgacgaaacacttggagcactcatcttcaaattcaaccctgttcagatctgaac

SEQ ID NO: 16449 - DNA, 210 bp, Oryza sativa
  Clone ID: uC-osflcyp084b12a1
tttttgggaactgaaagctcacaacacagcattgttcaactttccgataatgtcaggtaagcggaagggggaagaattataaaagaattagaaaaccaagtgtacaatggtcagcgagaagatggacgactatgaggctgaggcctgcctctctcaacattcaatttgcccgggcaaggcagtaatatccattcctgaaagtaaccaaaa

SEQ ID NO: 16450 - DNA, 90 bp, Oryza sativa
  unsure (1)..(90): unsure at all n locations
  Clone ID: uC-osflcyp084c01a1
acgcacgtaagctggacccttatggccccttntttttttttttaattaatttttattttttttttttttttttcttttatttttttgttc

SEQ ID NO: 16451 - DNA, 149 bp, Oryza sativa
  unsure (1)..(149): unsure at all n locations
  Clone ID: uC-osflcyp084c04a1
agctatcacgccccatgcacgcgctgacgtacagctaggatgcctctatagtttggccgaccctttcttttnnttttttttttgttttttttttttatattttttttttttttatatttttatatttttatattatttttttttttttt

SEQ ID NO: 16452 - DNA, 123 bp, Oryza sativa
  unsure (1)..(123): unsure at all n locations
  Clone ID: uC-osflcyp084c05a1
agctatcacgccgcatgcacgcgctgacgtacagcttggtatgcctctcttagttgtagccgccctatttntatttttttttgttttgtttttttttttattttttctttattttatttcttt

SEQ ID NO: 16453 - DNA, 187 bp, Oryza sativa
  Clone ID: uC-osflcyp084c07a1
ctgaagaaacgaaatggattgatgcatgcatagtagttgcagtacacatttgagcgctatagctggccagagaattaatggtggttgtacgttcgtgcttccctattaagctcgcttttctcggctccgttcgtcggtctcatcctttcctcttggaagttttgaggttacctttgaattggccagg

SEQ ID NO: 16454 - DNA, 322 bp, Oryza sativa
  Clone ID: uC-osflcyp084c08a1
cagacaaaaaatcgtatctctgtatttaaatgtaacaaatgacacaccacatatacttcatctgtagctataattccgggtaaaatctgctacgaatctagatgaatagatacagtaaccccaccaataaaacggaaaacgaaaggtagcaaaatgaattctatgagcctaatcatgaacttgccgttgcttaaagacagttacagccacttcggtccagaattggagagccttcagttctttcaaagtgacgtgactgaccgattagcaataacaaggacatgggtcaagctagctagttacaccaggtttatcttaacag

SEQ ID NO: 16455 - DNA, 251 bp, Oryza sativa
  Clone ID: uC-osflcyp084c09a1
atccatgaaccaaaattataaatactgttagtcttggtaacactcaacatttcaacagatcagcaggcaattctaacactgacagtgctattcgccgatcaacatgagccaggctaattttcttggcagcaacattttcttaccgcggttctctaggaaaacccacatggaggagaaaaaaccagggcagccccaactttcaaggatttttgggtccattctttccaaaggggagcatggttctggtccct

SEQ ID NO: 16456 - DNA, 99 bp, Oryza sativa
  Clone ID: uC-osflcyp084c10a1
ttttttttttttttttttttttttttttttttttttttttttttttttttttttttttttttttttttttttttttttttatttttttttttttttttt

SEQ ID NO: 16457 - DNA, 210 bp, Oryza sativa
  unsure (1)..(210): unsure at all n locations
  Clone ID: uC-osflcyp084c11a1
actacaccaattaagccaacactttattacagtacacacaccattattatcaccaggcatgcatgtatacattacatagtccgatgtcatattcacatgttagctccatagttaatttaactagtcaggtaaaaaaaagtaaaaactcaagaaaacatgggaaaagaactcaagaatccggnagtcgataccttcaccacaaaaacaagc

SEQ ID NO: 16458 - DNA, 197 bp, Oryza sativa
  Clone ID: uC-osflcyp084c12a1
actagaccaacacgataacattgtcaggcaaagatatgcatgatgtacaaagatatactactattatagcagtttgctgttcgagtaaacaaattcatgacaaaaaagactagcacataagggaacagtacaacgataataagggcatagggtcgattattagaaaagggtctagggtgccaacaccatttaaacaa

SEQ ID NO: 16459 - DNA, 138 bp, Oryza sativa
  Clone ID: uC-osflcyp084d01a1
ataggtatgcctcttttagtcggccgccctcctttttttttttccattatcaggttaaagcccggcgcaaaagaacgacaagactgaacctgctatgcgccgcgacctctcgctcaccattccactcgctcaacgagg

SEQ ID NO: 16460 - DNA, 184 bp, Oryza sativa
  unsure (1)..(184): unsure at all n locations
  Clone ID: uC-osflcyp084d03a1
caagaaacaaaagcatccagacaggaacaaagccccaggggccaacgggtacagatttgcccaccggaagtctaactgtaaaacacagtgcacaagtctaaccatcctgattggaaaaccgccaaaattgccattatcccagttatccaagccctaaagtattannaaaataacccattagttg

SEQ ID NO: 16461 - DNA, 165 bp, Oryza sativa
  Clone ID: uC-osflcyp084d04a1
ggaaaggtgaacacatctttgttgaatccaaaatgtcagtgaattttggcaggtgtaaaaatgggctggataaccaaaatgtaatgggattctgtacagtcaaactgaagaaaagcatcacttgcctcactggaattttgccggcccccttggtcttctagaagg

SEQ ID NO: 16462 - DNA, 59 bp, Oryza sativa
  unsure (1)..(59): unsure at all n locations
  Clone ID: uC-osflcyp084d05a1
ttagttgtgccgcaccattttttantatttttttttttagtttgcaagagctgcaacaa

SEQ ID NO: 16463 - DNA, 184 bp, Oryza sativa
  Clone ID: uC-osflcyp084d06a1
catgtaaatttgatttattccaacctgatttggtctacaagatgacagtcaccaccagttcaccacggcagctaatcccgtgcgtaagactgaaaatctggtgaagattcaaccggttctgggtgaatgccatgaatcgcctgtttttttgatttattttttttggcaaccgcttaagaaacag

SEQ ID NO: 16464 - DNA, 323 bp, Oryza sativa
  Clone ID: uC-osflcyp084d09a1
acaccgtcagatcaaatatactggtagtatatactagcagtagaatgtaccataaaaaaactcagcatcaaacccttcaccgagcgtacagcaagtaatgaaacctctgacactgatagtagtcatgagccaaaatctgactggcttgacacagtaagggggactgctacatctatctattcctgtacagcaagaaactagtcatgcccaagacattaaaccaaacaaaatcccctgggatacattcaagcaagatgggcatatcacacaaatccatatcaagtgtctccctgcggccctgctgtatctggatcttggggtca

SEQ ID NO: 16465 - DNA, 347 bp, Oryza sativa
  Clone ID: uC-osflcyp084d11a1
gttgttgacgaacccttctttgagggttgccgcttgttccgtttctttgatttctctttcttctgtttcttccactggctgtctgggtcgacgaaatcgtcatcgctgtcatcttcaacaggcatagagccatcatcctcatctgattccatattcttgtccctcaatcttcgttcttcctcgtcttgaactcaaagatcaaatccttcaacaattattcctccctccgttagccgaacattcgtcgtgatttatggggcttcgctttcttgcctctttctccttttggagtttttggttttttcttctttttcaggtcaacaagtttctttacctgaaatgcaatg

SEQ ID NO: 16466 - DNA, 133 bp, Oryza sativa
  Clone ID: uC-osflcyp084e01a1
acttttatggccggcctacctttttttttttttggagataaacgcttccaccaaaaaacgaatgtcggggagtgttcttcccctacaagaatgattaggggatttcaatgttaaaaagagcaaaattccacca

SEQ ID NO: 16467 - DNA, 130 bp, Oryza sativa
  Clone ID: uC-osflcyp084e02a1
aatgctatataaactttattttctaatatagaaagataggagatataaatgccacatacaaaagccaaacagcacaaacctattaatttctgttcccttttttcctccatgaaatggcccaatttcctag

SEQ ID NO: 16468 - DNA, 170 bp, Oryza sativa
  unsure (1)..(170): unsure at all n locations
  Clone ID: uC-osflcyp084e03a1
gttatcgtaaatgtattccattgaagttcataggtgttaaatgtcgggctacaatatctgtagctctgaaatgataattgtcactaattaacatnggctaagttacataaagattgcgaaggcttactgcttccacgtaaaagatagccaccttgccctatttaaattac

SEQ ID NO: 16469 - DNA, 161 bp, Oryza sativa
  Clone ID: uC-osflcyp084e04a1
aaacacgcaggagcacgcaacgtaagctaggaccatttagtgggcgcctccttatttatgtttgttagggaaaaaaaattttcataaattaaaaaaaaatagtggggagagcaaaatacaaaagaaaaaaccgattaaaaaaaaaaaaccaggaacaaaaa

SEQ ID NO: 16470 - DNA, 100 bp, Oryza sativa
  Clone ID: uC-osflcyp084e05a1
catgcctcttttagtcggccggcccgttctcttttttttttttttgtttttattacctggaaacacggttgatacctgtttgctgcatgcaataatattg

SEQ ID NO: 16471 - DNA, 152 bp, Oryza sativa
  Clone ID: uC-osflcyp084e07a1
gaataaaacccactgctgaatttcataccgctatcatctatattcttgttttctgatctccaacataggatcatcccagggagaaatttagtaccacaataatgcgcccgagctaattatccatagaaaacctacccccttgtccaagctga

SEQ ID NO: 16472 - DNA, 179 bp, Oryza sativa
  Clone ID: uC-osflcyp084e09a1
gagcacaagaaagcaccagtttggtcgatctgatatccgtttataccttccctacctaagtaaaaggggtaacagacagaggaaaaaaaaagagaggaagagtgtacatggattagttacacgcaacattttactggtattttgacccaaggcgggcctccgctggggcacgttccttg

SEQ ID NO: 16473 - DNA, 330 bp, Oryza sativa
  Clone ID: uC-osflcyp084e10a1
cacgggaaacataatttgccactaaatcacataaataagtagtatttcagcaacaaaatctagctaacccctttttgttgtcactgggcaggacattaaatcatttgacatctcaggcaaattaccatgtgagttctatgcaatctgggttctgagaaatcttcctagttctggagcttgcattgtttcccagctcatatcagtgtttcccacacgtgtcagattacttccaaaattttgttcccagttttgcttacttctgctcctatctgaaggttagtcttcaaagtccttgtaaaatcagaaagctgaaaattggctttcagatgg

SEQ ID NO: 16474 - DNA, 159 bp, Oryza sativa
  Clone ID: uC-osflcyp084e11a1
aatcgaacgaaacttatttgttcctcatcttattctctgatgaaatttcaaaaggagagcgaaacagtggacactgtacgcttgcgaaataaaaaaggttggcgaccagaaaaactccggcgagaactacccggcgacggagaacgctccgaagcgaca

SEQ ID NO: 16475 - DNA, 266 bp, Oryza sativa
  Clone ID: uC-osflcyp084f01a1
gatatcttacagagatctgagctagtaaataaaatcatagcaatccaatcccccttttgtaagagtatggccatcacacaagttgtacatttgcagactcagcttctgagagaaagaacctgtgtctgtaatatctggttatcttccaataacccggtcatattcaagcaggagctcctcagattgcttctgtagggccattgacatgtggcttcgggcctccaattctctgcctttccatggctcctcccggatttctgatttta

SEQ ID NO: 16476 - DNA, 208 bp, Oryza sativa
  Clone ID: uC-osflcyp084f03a1
acgcacgatgcacgcacacgtacgtcataggatgcctctttttttgagccgctctccttttttttttttttggactccaacagactacaaacatacagtaaatcaatgcttgaggttacacatgagacaaaatcgaagggaaagcggggccttaagactgcgggtcgccttgcaaacaaagtgaattctccttggccgtttttacaag

SEQ ID NO: 16477 - DNA, 113 bp, Oryza sativa
  Clone ID: uC-osflcyp084f04a1
tatttttttttgtgttttttttattttttatgttttttttttttatttttattttttatttttatattttttttttattttaatttttttattttatttatattattttattt

SEQ ID NO: 16478 - DNA, 113 bp, Oryza sativa
  Clone ID: uC-osflcyp084f05a1
gaccccaggataatacacataaatttcataataattagggtttttattacaagggaccgggcagccattattataagttccattcaaaaagggcaaaccatggccttttattt

SEQ ID NO: 16479 - DNA, 299 bp, Oryza sativa
  unsure (1)..(299): unsure at all n locations
  Clone ID: uC-osflcyp084f06a1
gaacaactccaaatccacaggtcagcatcatcacccatcatctggagttccaaacatgtggaaagaaaaatctcagatggagacaattagtaggtgtcgtccagcaacaccagaggcactccgaagcttcaccaaaatgaccaaaatgtgttgtcgcagtcagggtacatgacaatccattcgccgagctacacataacgcccggatgggcctcttccaacatggtgttcaacttcgaaacaagncttctaaacatcattcactggggtccaaattaaaaggggggagcccagtgaccg

SEQ ID NO: 16480 - DNA, 126 bp, Oryza sativa
  unsure (1)..(126): unsure at all n locations
  Clone ID: uC-osflcyp084f07a1
ggcgacactattgaagagctatcacgtacgcatgcaccgcgttacggtaaggctatggatctcttttagagcgggccgtccctttttttnntttttttttatttattttatttattttgtttcttt

SEQ ID NO: 16481 - DNA, 109 bp, Oryza sativa
  Clone ID: uC-osflcyp084f08a1
gaaagcataagcacatactgattcccaaatcatcaggtacggcataaatgacaagtgatgacaaagcattacaagttgaaatctgtttacatggcaaagaagggaacaa

SEQ ID NO: 16482 - DNA, 176 bp, Oryza sativa
  unsure (1)..(176): unsure at all n locations
  Clone ID: uC-osflcyp084f11a1
atactactccagtacttaagtatactaaaagcattgtctcaaatttcaatgctgggtgagcagagcaccaaatgtattccggcaaagctcacttccagttagttagcaaattcaaatcaaattcacttacagggtanngaggggaatccccaagttttttgaccccagcttttgac

SEQ ID NO: 16483 - DNA, 135 bp, Oryza sativa
  Clone ID: uC-osflcyp084g03a1
ctctccctatcttattctactcatgaaattatgtaaccggccatttatatcaaatgaaatggctataaggtagagctggcatctaccttatcatgacaaaaaagcgcagaccccaaagtcttggcacacagaagg

SEQ ID NO: 16484 - DNA, 309 bp, Oryza sativa
  unsure (1)..(309): unsure at all n locations
  Clone ID: uC-osflcyp084g04a1
acaccgtataatgtacacacagtatatatttatacgtatttcaacaaagcggaattgtacacatacgacgtacatacacagcgtactttcacagtacaaacaacacgcagacacggtccgtactggagaacgtccatcacacattcacactcatcacacgnacagtaacatttttttttccttttatttgcgctcggctaggctcattcttattatttcaggaaaggtgacgtggacgggccgtccgaccggacgggcgcaagacacatggtgaggctggatgttggtcgagcctcaaatgctggccgg

SEQ ID NO: 16485 - DNA, 185 bp, Oryza sativa
  unsure (1)..(185): unsure at all n locations
  Clone ID: uC-osflcyp084g07a1
gggcgtaatgcagatttactcttgttttactagataaataaataaagcaaaaattggagtagttttctggtagaaattatccttgttgcgaatccttatgaatcaggttcaaattaaaaacctttagnnattcattacttaggaggccacggatgatttgagttcttcaagccttaaanacaaaa

SEQ ID NO: 16486 - DNA, 102 bp, Oryza sativa
  Clone ID: uC-osflcyp084g08a1
gaaaatcaatccttgcatgcaggggaaatcgatggatcgacctctctaccttaacttgtttcttaattctcatgtacaatcaaaagaaacacacacggcaca

SEQ ID NO: 16487 - DNA, 365 bp, Oryza sativa
  unsure (1)..(365): unsure at all n locations
  Clone ID: uC-osflcyp084g11a1
agctgtaagcagcaaatatgatattaatccaccagcgaatagtacttccaacttccacgtacaattattgaagtttaaatatggtacgcttgcaaatggatgctgcaagcaagatatanttaggccctaccacaccacangtagaaatngcttaagccagctaggtggaaatcattttctagaggttaattttgtaaatggccctgttgccaacgccgctttccgttcgtttgcctcgcgcccgatgtacgttcggncctaaccaccttttgtcaccctgcaccagccgtttgcaagagggccgacaaccaaggcccgggcaagtttgggagccattcttctttaatcgtttttcttccattcgc

SEQ ID NO: 16488 - DNA, 201 bp, Oryza sativa
  Clone ID: uC-osflcyp084h01a1
aatagaaggcagaactgtgttgttcatgctaaacacatcactgtcgggtcagctggatcaacagcaacccttgcttacacaacggtagacaggaaggatgcaagcccaagtagaaaacaggtctacccggactgtgttttgccagtaacagattaaacagagttcaggctggggcgcacaacaaaccacctggattccaca

SEQ ID NO: 16489 - DNA, 135 bp, Oryza sativa
  Clone ID: uC-osflcyp084h04a1
caggaagagccatttttcacgacgtcaggcagattacatacctaagcaatgtgcataatgattctatagcacccgtatgtggcactaaatatatatctacttatgaacaaccctctttgaaaatttcaaaataca

SEQ ID NO: 16490 - DNA, 189 bp, Oryza sativa
  Clone ID: uC-osflcyp084h05a1
gaaaattaaaagcctagagcctggggggcacaggttcttggcactatttagcaaagatttgaactataatctatacagacctttcaaaaagtatctggtcaagggaaatgccaaaatcaaatgcaagccagtatatacattgacaagccaaactttatgagggacataaaacctttttattcccttact

SEQ ID NO: 16491 - DNA, 128 bp, Oryza sativa
  Clone ID: uC-osflcyp084h06a1
aataaaaagaaagatgccactagctaaagctgataataatgctctccacagataataataaattttatacaaaagggaattaaaattaaatagagatttgcgggaaggaacaaacacaaacaagcccc

SEQ ID NO: 16492 - DNA, 433 bp, Oryza sativa
  Clone ID: uC-osflcyp085a01a1
gttctgtaacattcaaggtcacccttgatcactaatgcgtgtatataagcatgtcgattaacggaaaaatggaaaacatgatcagaaaccttcatattgggagatcatttgagcaatttttactaggaggctgtttgcagtttcatccttcgcatgtggagctaccagttcctggtaacggtgcagggatccagtgaaatcagtgaacaatccatcgacccccatgctgtttatccagaaatcatactcagcataagggtcctgatggaagttgaggtgcaggaattgattctcgttcctgtatgtggacgggtgtacctgaagattatgagcatgtgcttttgcaacaagatcagtcggtgccatcgtatagtttttggctgctggaacaaccgtatttttccatggaccaaggccaacaacattgttactt

SEQ ID NO: 16493 - DNA, 440 bp, Oryza sativa
  Clone ID: uC-osflcyp087a02a1
agtcatgcgatacgatcccgcaggatttgcaaaataacaggagcagcatcacaaattaacaaaaaaaaaagcttaatctcccaaaatgctctcataatacacgagtttggcagtagctttagctccttcctcgagcaagcaaggtagctggttcactagtggatcaatatttcaaaacaaaagaagatgttaagcaagttgggcaggagcttgttcagggacaagacttactgcaaagactgacacttcttggtgcaaatgctttcaggcagcgtaaggtaatttcactggctccaagtttcagtttacagactaatccattgcaacttttcagtttgctcttcattgttttcagtgtcccaaccgttaaacgcagctattttttttttgctaaaatgaaggttttcaatcagctatatctctttggctaaacgagagct

SEQ ID NO: 16494 - DNA, 466 bp, Oryza sativa
  Clone ID: uC-osflcyp087a03a1
gcagatgcatttcatttatacaagtagaaggcactcaaatcagccaccacatgaacacacacatgttccatcatcgatcgatctacacatgcatcacccggtcatgcacttacaaacaaaagatctacttgaagaagtacgggaggtcgagcacgtagaggaggaagtaggcccagaggatcgccggtagatgccgccgaagaagaagccgccggtgaacttggccccagccgtcggcggttctgcagcttgtcggcctccttctttgcggccggtgagcgtcagcgttccggcgccgtggaacggctcgccctcgccgaaggaggcgacgccgtacatggtgaggcagacgctgaggatggcgactaggccggcggcgccgagggcgccggcctggccgtgcaccggcgtgtttcggagcgggccgttgagcgcgaaaggcccgaccaggaggtagccgtggtcg

SEQ ID NO: 16495 - DNA, 163 bp, Oryza sativa
  Clone ID: uC-osflcyp087a04a1
cacagattattttttactcagaaagactgaaacattcagaatttacataattcatttcttagttccatattatatatacacataattacatagacagtatcagatcatcttggaatgcatatctggagaaccaacaataaacatgcttacattaacaaccatt

SEQ ID NO: 16496 - DNA, 387 bp, Oryza sativa
  Clone ID: uC-osflcyp087a05a1
aaacgcttcataaaagaagaacgtgacaaatatacaagagagagacgcaagaaggaaactcaaggaaaactaaaaaacaggcgtatagcaaaaactttgaccatcgagatcaaccttaactgtgactacacactatgtacatatccctcgaggtactagcaacatagcaaaagctgcagtacacctcaggacaaggagaaataagagctgcttgatcggattggatacggattaatatacttagttcttgccttacataccatccttatcatcctccgctttttcttgcaatgccattatttccgaacaggagcagcaagaagcagggcacccccttgaacaccaggcacaaaatggacaaggcgaaagaagggtccacggaggaac

SEQ ID NO: 16497 - DNA, 423 bp, Oryza sativa
  Clone ID: uC-osflcyp087a07a1
atgcaagagtagtatgacctatgaaatatggtcatatatacactactctgtttcatagaaacttccctatatatacacaatgttaaagtgtacatatatttgcagatactgcaatactttgtacattgcaagacttgaatacaagataaattgtaacaacaataccacaagctgatcatgatgatgttaggctagagcagtgcctcactgaagaggggagcatgagtgatctgtagtaagctttaggcagagccacaatcttctttgcctttgggacgtaggcccttttggtgaagttgttgtaatcgttggccttgatctcgtcaaggatttgtcggtacagaagtagagaagcccaaaccggccattggcttttctgattgagctcgctggcgcctttttcggcctgtctgaaaaacgccc

SEQ ID NO: 16498 - DNA, 461 bp, Oryza sativa
  Clone ID: uC-osflcyp087a08a1
caaaaaaaagtttaaaaagatgcttcatgtaagcaagtggaatgttctgttcatactgaaacatatatcgagtttccaataaagattacatgtataacaccatatggcttctatgagcaagaccaaaaaagacagtagcttacagtagtgcctatgatagattgatagtattagtagcatccccatgtgtccaaagaactagctatgtattcagccatggccattttgtccgtgaggtatgaagcaaccaaagaaccaaggcaccaatttcctttccaagtatttctacccgatttaacttctccacatgtagttactataaagtacaagttataggattttaatgagttgtgtgccgttgtcatgttgaaatttaatacatgccaccagctgctgcagattaggcttcctggtcgccaaagatgcgtttgcggaagtcggtaaccatgaagggaaggccc

SEQ ID NO: 16499 - DNA, 260 bp, Oryza sativa
  unsure (1)..(260): unsure at all n locations
  Clone ID: uC-osflcyp087a09a1
ggggggaaacttttattttttattaattggccgccaaaatatttttgggaaacagcaagagttttataaacggggggggacttttattccccgggttgccccccaaactttggtttttttttaaagacccccctgggccccctttttttcccgggggggttttttttttttccccttttgttgttcactttttcgncccccacaaaggggttttttgaaaacccccttcccagggaggaggggtttttcttttacccccc

SEQ ID NO: 16500 - DNA, 380 bp, Oryza sativa
  Clone ID: uC-osflcyp087a10a1
actggcaaacagtatcaattccaggatctagtaatttaagtccacagttaaagctagtatcacaattcgcatcgacaacacaccattaatcaacacaaggaaaaaaaagagtaactagagcatcaaatcacctaaaataaacatcttacgacccagatcgacagttgcaatacagtactaggtaataataacacaagggagcacatcctcaatcatcatctacgatggatgacgagagcgagaggaatggcaggcaggtaggtggcttaggcagcaacctcgtcttcctcctcgtcgccgtagtcctcttcctcgtcgtcggctgtcgcgtcctggtactgctggtactcggccaccaggtcgttcatgttgctctcggc

SEQ ID NO: 16501 - DNA, 397 bp, Oryza sativa
  unsure (1)..(397): unsure at all n locations
  Clone ID: uC-osflcyp087a11a1
ggaagaacgtgtcatcatgaattgaggggaagaaggaaaataaaaaagacgaagaagcaagcaagcagcaaaaataagcagaagtgagaaaagaagagaggaaaagaaaaaagtgattgagcctattgtgccaatatcttactacatccacaagtggacagtcacacctnaggacaaggaggaaatcagagctccccacgcaccctgacaccgtctttttcttcttctttctccccttcttcatcatcttcatcatcctcctcttcttcttgcaatgccatagcttccgaacagcagcagcagcaagcagggcacctccttgtacgcttggcacaaaatggagaaggagaaagaagtggccagggtgggacaatgcatagggggcaagggtggtggt

SEQ ID NO: 16502 - DNA, 75 bp, Oryza sativa
  Clone ID: uC-osflcyp087b01a1
cactgaagttttaaccaccctgtgtcagtttgatcagacttggagtgaaattttttctcaggatttttttaacat

SEQ ID NO: 16503 - DNA, 447 bp, Oryza sativa
  unsure (1)..(447): unsure at all n locations
  Clone ID: uC-osflcyp087b03a1
caccataaaaacagcatgctccattgatcaatccaaatgttcaaacataggttaaattaccatcatccatgcattaaaatgctatagacataacaaggggaccaccctaacacggttttattattggggttttgattttttaaaaagncttttacataacaagtatcatcagcaacagccgcaagcaaagattcttaaggtttctcgaatgcgccatcttggaagtgtgacttgacgccattcttgttggaaaaatttaatttctcaaaagctttgtacaaaaatcgtactttggcgcgataaatgaaggtagccacttgaacttcccaggtcagaaaagacaacatccatttagccagatttttaacctgtggaaacaagaaaacctttgggccattgttggagatcagcaggctgtacgccagaattattgtcatgcaaagttaa

SEQ ID NO: 16504 - DNA, 428 bp, Oryza sativa
  Clone ID: uC-osflcyp087b04a1
atgcaacaacaacagaccatcattcatattcagccacggtttagctttaccgtggaaggagtacacacttacataatccataatgacttggaccaaagctactgatgctactggtcacactgctgattcagcttttagacaagcaagcaaaagcagaactacttaactggctggctagtttgcagtagtggtagtgggattaattcacgcaaacctgaagcaaactcagttgagctgagcggctttagcccattagcaataaactatagctagggacttcacttaatgcgtgcgcttccgtttttatttatttagctaatcacttttgataagtatcgcttgattttttttatatgggattaatttagggaagctttttgcgccttgagttcttgatgtcttttgagttcgttcttagatggccagga

SEQ ID NO: 16505 - DNA, 97 bp, Oryza sativa
  Clone ID: uC-osflcyp087b05a1
gggaaaaacctgttcttttttttttatttttttaggggccccaacaccaacttgatacttttactccctgcacttaacctctttttccccaatccca

SEQ ID NO: 16506 - DNA, 312 bp, Oryza sativa
  Clone ID: uC-osflcyp087b06a1
ataataatctcattgattgaaacccgtttaggaaaatttaagcggcaattaaggaagtaatagtttagttgtagcagtagaagagtacaggaacccacgttaattaatcacccgagagccatggatggatcggccggtaagggctcggtcttagaccttacacgaggcggcggccagatggggatgccctcgggcaatggggagctggcaaacgtcaatgcccggttcggggggcccgccctggatttgagggccccttatggcgacgcgaaaacctccggttccaggttccgacaggggggtgtccggggg

SEQ ID NO: 16507 - DNA, 466 bp, Oryza sativa
  Clone ID: uC-osflcyp087b07a1
aacagaaataaatagttatatttgaattgcaatgtcatatatttattatcacaaattcaaataagtgcattctccaatagaaaagcaaatcacaccaaaagaatatctatgtactggtatttctggcacagaccgtgccttcttataacacgaacatataatatccttctgattgtaatcggtctgatgaaaatgctcaatctgcatccatttgcaaggacccctatgcactgaaggcttatcttcatttggttcacttctgagttctgaattctaatgcttcgtgacttccttcttgatcttgagtgtacaggtcaaaaaatgcatcactgacaaatcgatatataaacggaaccaatcgatacaagattacagcatcttttttcctctgtatttgatggtcttttcagaatttagactcagaacactcataagaatgaaccctaagttgatgcggatggtgcag

SEQ ID NO: 16508 - DNA, 76 bp, Oryza sativa
  Clone ID: uC-osflcyp087b08a1
cactacacaggcccctttgatgttttgccattatagtatttgcaccctacgtgtgggtccttacacttatagattg

SEQ ID NO: 16509 - DNA, 97 bp, Oryza sativa
  Clone ID: uC-osflcyp087b09a1
ggggggtcaaaaaattcccctttattctttagcaattctagggaccagaccctttggggcccaaaacctaaaggcttaaaaaaggattaccctaaag

SEQ ID NO: 16510 - DNA, 384 bp, Oryza sativa
  Clone ID: uC-osflcyp087b11a1
attaattattattattattgcttctaggagtactaatttacatgcaaagatctgaccgatacatatatatactacaggacccgttccaacattgctgttacattctgaatcctgaacttccacggaacaccctcctctttttttcttggaacgtattggtggcccggccaattctgaattcccacctgatgatcacctgcccggccagggatggacatggatggatggatggttgctcgttctgagcgattcgccggagtcgggagagacagtaggtgtggcctacgcggtcaccgatgtctcgatggcgacgcggtcggagtagatgagcacgttctccgcctttttggccttctcccacagtttcggcagcgcctccctgat

SEQ ID NO: 16511 - DNA, 402 bp, Oryza sativa
  Clone ID: uC-osflcyp087b12a1
cacctaaaacccttattttttttcaggggcccaaaatttttttaccactcccttgtattaaaaagctggaccaggggggccaaattttccagcatttcggttcaggtccccgtaggtgattgcaaaattgcagccaagttaaagcgaaccaggaaaatcgggaaaaaaattattccccttttttctttctttatggacgggctggaatcacacggggtaagactgctggatggcctaaaggccggggcctttgagcttaacacccgtttttacatgccctttgagcgtttggggctcccttagcctggcattttccgccctccttttcgccttttcagccatctgattgacctcattgtacccagccttttccgaaaccatttgggcttcaggcggttgcag

SEQ ID NO: 16512 - DNA, 238 bp, Oryza sativa
  Clone ID: uC-osflcyp087c01a1
gggggttgatttgagttgaaaaacatatgaacatccaagacaaagtataccctgcaaaactatgaataaacgaattacaattgtgtatgataccgatacgagggcacaaactgctgcaaaatggtgctcaattaaaaaagaaaaacttattccttcctatttgttttacaacagttcacattctcatcccaattgacacctagaaagaaaataatggcagaaagagcacattattcac

SEQ ID NO: 16513 - DNA, 460 bp, Oryza sativa
  Clone ID: uC-osflcyp087c02a1
caaggaaaacatctaatggaatcataataattaaaggtctatgtgacagcaacccacagcatgtaaacagcagatctagcaaccaatacagttcggaattacagctttagttgggatgacgagagtgtaaattaggaggagctgctacttttggagtatttagaccctggtatgtccccaacttgcgctcaaagaggcggcgcaatagatagacttgaatgacgctagctgcaatcagcgctgctgactccaatagagccttgtggacagccctcctgctcatgttttcgttcaatatagcttgtcggtcagtttgggcctctagccagtgctgctccaactgaatgttgtaaagcgcttcatctaattttgctatttgttcaaacaaaggagcaaaatgttcatctttcgcatgctgatcaaagtacgaaaaatggccaacatgcacattaaaatctac

SEQ ID NO: 16514 - DNA, 433 bp, Oryza sativa
  Clone ID: uC-osflcyp087c03a1
ggtgcaagaaaatattcagaatttagattacatcatagaagttcagtaacttcagacatattacaaacataaatttcagacaaagagataaataaatcacattcaagtagaaccaaagcacgaggaatcagtccagagaccgattcagtagacatgcaagatataatccatccaaattttaagcagttcttgatcaattaaatgcgaatttccggcacatggcgcagcttcgtttcccagttctccctcttccactccagcttgaaatcgtctgactgcccccacacaacgagcttcctgagcgacccaacgagctccaagcctgtcggaaccgctgtcatagccgtcagagacaccaagtacagtgcctccaagctctcaaccgctgacggctcgatgacaacagtgtgcacctgcttcatgtcaccaagga

SEQ ID NO: 16515 - DNA, 340 bp, Oryza sativa
  Clone ID: uC-osflcyp087c04a1
attggtcttcttattctttgctcaggggagcggacgagactactgagcccaccgcggacggcgcggcggcagagcgcggcgacagcgcggacagccgagaggaccacgagctcaaccacagctaaaggggagcagcatgacacaccgcggggcactcacgccgacgagtgggagcaccacactccccgcaccattggctgtgtgatcaccgcaacaccgacggcgctgccgttcaccaactcagaattcacttgcacggcgacctgcacaagcctcctacgaagacgacaacaccgggtcctgggcgttcgcttacgcacgactgagacacacgccgacg

SEQ ID NO: 16516 - DNA, 382 bp, Oryza sativa
  Clone ID: uC-osflcyp087c05a1
gaaaacattcttaccataaaaaaaaaattttttagcttgttattttacaacacttttgtgaaggataacaaaagggggaaaaaagttttggcccaattttgtttcaagggtttcagagcaagaacatgaacccataacatgggaccaaaggtttacccattgtttggaatggggaagaatttaacaaagctttttaattccttaaacaacatttgcatggtccaaaattgggaagacgtgttgcccatgaatatggtgggaattcctgaagacgatttgtcaatagactaggtggtcccaccaggttcagggtttggaacattccaaccagggaggttttcgatggcctttttccttctcgcaagaagggacttgggatggt

SEQ ID NO: 16517 - DNA, 426 bp, Oryza sativa
  Clone ID: uC-osflcyp087c07a1
cgagacaaatgaggcattcataattcattcattaggcatacgaaaagtagagagtacaggggaaagcaagatgagttgcatcagattctgaatcatatggcccctcctcctgcacttacatcacccactgtttcatctcatagcaatcactggctcgcaaaaggacacacactgacacaaactcgaggcacggacggacaccattgactgccatactccgatcgatcgaacgaacgaacacggtccttatttcggtagcagatcgatcaaattattagctagagtcagaagcagagcagacgcgacgacgatggcaatgcaatgcaggtccccctccccggaatctaccaggggaggatcttccagcgctggttgtcacccttgcaccaattccacagcacgatctcggtgccatcggggatgccg

SEQ ID NO: 16518 - DNA, 366 bp, Oryza sativa
  Clone ID: uC-osflcyp087c08a1
acgtaataccatccattttttttattggcgaccaatttatcaaaattgctctaaaaacatattttgggggaatatagccggggctttgttttaaaatattcttacccaacgaaaattggagaacttttacaataaaaccggtcggaaagggagggaaaagatttttacatatgggtctaagagcagaggcccttgaaatggtccaaaaccaaattggaaaataaaaatttatggcatattaaatattgggttatcatcaaaatagccccaaaacaaaggtggatactataattaaagggagaaatccaccaacgcgaagcttgatcttaggttaagtgcccccaaaattcttgaaacctgggggct

SEQ ID NO: 16519 - DNA, 379 bp, Oryza sativa
  unsure (1)..(379): unsure at all n locations
  Clone ID: uC-osflcyp087c09a1
aaacaaaggtcccccaaatttttttttttccaaaccctcttttttaacccccttttttcaaaattgggttcccattttggcccccaaaaattttttggggggccccctttttccctttttttcccccggggtttttcccccaaaaatccccccaaaaaattattggttggtttgccccccggtggggggatctttcccaaaaaaaattttttaaggggtaaatatttttggggcccttaatggaaaggtcccccgggtttttaaaaaacccttttacccccttttgggttcaagggccccccaaaaagttttggggaataacccttnaaaaacccgtgttcccccctttttttaaagggacccccccaaaaaggggccc

SEQ ID NO: 16520 - DNA, 439 bp, Oryza sativa
  Clone ID: uC-osflcyp087c10a1
cctgcaaaattcttatgttccaagaaacccttacagcccacaggaaatgaccggtttgcatttttcaggctgacgttacaacgcgcttacttaaatataaacatacggaaagctaccgaaaaggaatgaagtgccatccaagaagaaaggcacaaaaatgctgcccaggaaggcaacggggcgataaactggaaaggatattgggggatggctgcacagcaacaggattacgttaacaatacagcttttgcccaagacagagttaattactacaacattttgtggtcgagttcagacggttcaaaagtacaggccaccgtaagcctttcgattaaaaaccaaactgtaaacacgtcacgattttttaacacccgacgaaaaacaatgtgatacctagctcctttggaggtggaacctaaagagctttatcttcccaaaa

SEQ ID NO: 16521 - DNA, 181 bp, Oryza sativa
  Clone ID: uC-osflcyp087c11a1
ttttttttttttttttttttttttttttttttttttttttttttttttttttttttttttttttttttttttttttttttttttttttttttttttttttttttttttttttttttttttttttttttttttttttttttattttttttttgttttttttttttatattttttttttattt

SEQ ID NO: 16522 - DNA, 172 bp, Oryza sativa
  Clone ID: uC-osflcyp087c12a1
ccttcccctttttggttcgcttttccaactccactcgaatcgtatccaatgaactccgccttaatccaatccaaaccattgggcgattcttcatcttaaccaatcacgaacactgaacctcataaaaaaggacttatacacctaccatccacccttccttccttattttagg

SEQ ID NO: 16523 - DNA, 457 bp, Oryza sativa
  Clone ID: uC-osflcyp087d01a1
ggaagcacaatcaatatttctggtatttcggagtagtttggagtgcattggtttttacaagacaccggaaatcacactgtttgtttacaccaagtgtaatagagctgcaaacaacaagccaaatgaattgggtgtgattttccatctcagtatgaggtccaaaaaggaactagtctacttctgtgcagttagcaactgttagctttctgaaacgtaataagcctttgccaagggaaaccatcacatgaacatcatcaattttcatagtcaacagtacaaattgcaactgcccactttattaccaagtctctgccagcatcaactaatcttgataattctcatgtgatgtgcacattttctggcgtggcgaataactattaagcaggcaactcaagcttcacattgttcttccaacttaagaaatagtagtagaagaaatccgcataaagagctgttt

SEQ ID NO: 16524 - DNA, 402 bp, Oryza sativa
  Clone ID: uC-osflcyp087d04a1
gtaagattcttagaattattgcaggcaattgcatcacattaccagtcagtagcttttcccatgtattacaggttccaacgaaatagcggtaaatactgatgagcgtcgctcaaggccaagttagggctgaaatattttggatcaattgatgaccaaatggagttgcttttacttgaattttagagctatccctcccaggttccaacaccaatgtagttggactggaacaccaacaagctcttctatcctctcgacatagccgttgggcagctagggggaagtttcactgtaactccggtacagacgaaatgtcactttgccacccaggcaacacctaatatttgacctgtacttgctccagagtattaagatcccctgggaaggatttgtagcttctgccca

SEQ ID NO: 16525 - DNA, 369 bp, Oryza sativa
  Clone ID: uC-osflcyp087d05a1
gaacttatgtcaccaaaaaatactttcagaaccatgatctttacaacgctaagccagccacctgtatttttttttaccagcaaacaaatgctacgttaagggtcaaccttgtacatctcgtaccaaaacgaatattttctccagaagagacaatgataacggatactcgtttcaaaaggaagcaccataaataaattgatgcggggaagttttcctcaggtttggatgccaaagcggctcaaggtagggcgtcagcactttcacaagtggggaggcagggtaagtatgcctttgaaactttagccaatggttgtggcccccttttaggcccggatgcggtcctcttcaaaatccattattcctccaggt

SEQ ID NO: 16526 - DNA, 461 bp, Oryza sativa
  unsure (1)..(461): unsure at all n locations
  Clone ID: uC-osflcyp087d06a1
gacgatctgttaatcagtgtactaatttagattcttcaacggcatatttcctgtaatgttgctgaaaattacacattcagcatgatatcagataaacataccagtaggggacctaccagattgatcaatagatctaacagtttcttaatccatcatcgcaatcacagattgagaaccttaaaacagaatggtattccttattgaacttcctcaaggacttagcagagtcaaaatgtagcctgcaaagtttagctgcaatttgcaaaaagattgccggttgccaaaagttgagtcactcgtcgagttctgtatcacagatgatcactagtgcaactacagagaggaccaagtgttcctcacattgtctggtagactgacatntgctaataacctagaacatggtgcgagaatgacttcatttcttcgacttgtttgccacggtgagctgctggagattgagc

SEQ ID NO: 16527 - DNA, 454 bp, Oryza sativa
  Clone ID: uC-osflcyp087d09a1
gggggaaacaacgtaaggtattgataattatgtttcctgaggtaaggtatatccaacaaacacaaaatgctgggaagttattcaaacgatttccagcatctctataaaacattggtctcttacatttcgagtggttgaagaggtgcgagaaaggagtagaatatagcaagtttagaatggtacatgaagaagatgcaacaaaatgaaacttagcctcattacggccacagtgacagcttcatcaagtgcaatgactccaggaagttcctttccttccaacagctccaagctagcaccacctcccgttgaaatgtggctcataacatctgcaactcccaccttctcaacagcggcaacagaatcacctcctccaataatggttgtaacacccttgccgctaaggtctgcccacttctttgcaataacctcagttcctactgcaaacttgtcaaat

SEQ ID NO: 16528 - DNA, 466 bp, Oryza sativa
  Clone ID: uC-osflcyp087d11a1
aggaaaaaaaacattttcaaatacaatatttatttcttaccgatacaaattgataatctcggggttacagatttgattagaatatatacttgctataaacaagtaggaactttcttacacctcaagtgataaccttacaagactaacaataaaataaaaatttgatcgcaaaacacagaaatcgcaaaagatgtgctcttcaggtattctacgctagacatggcttcctgcatctatcctcaagcagcagaatctacaacttctgccggtggggactagggagaaaggaatgcatcgaatagcctaggtatttcagtatctgatcccttttgcaacctcaaagaaatgggcaacattttcctcaggagtgcctaccttaatgccatgaccaaggttcaatacatgcccactattaccagctttctgcacagtgtcaaaaatccgcttgcttatgaactcttttgac

SEQ ID NO: 16529 - DNA, 426 bp, Oryza sativa
  unsure (1)..(426): unsure at all n locations
  Clone ID: uC-osflcyp087d12a1
cagggaataaaacagcaaagggaaggttccgaatgaaatgaatgtgctttacagtatacaattttttgttaaatacaacaatactgaaacaggattacaaagacttcacgggggcccatttgtttcacagggacaataaaattcccaaacattagaggtctagtttaatgggcccaattacataaagaactaatcaaattttttcccaaagaaccaaatgattgggctggttgcatttgggggaccccatttttataaaggcttggggacaaaattaaatagcaatcttaaacagaaccgccctgtttaaagccctgaggggaaagnttttaaacagccccctgaagcactgaggaatcgaacccccaaagggaaacaaatcctggctgcccaggtagtaatcaccaacaacagattccaggaaac

SEQ ID NO: 16530 - DNA, 438 bp, Oryza sativa
  Clone ID: uC-osflcyp087e01a1
cctcataatgagagtaacatatttttaaattgatagcttatggtccactaatggcagaatgccgaaggttacattattctttctgacttctgaacgtttggaacttttgcgatgtgaaatcccacaatgtatttacttacaattagtacatccgaaacttctccttagggtctctcgaagacttgttcagcaatcagggctccattgccatctgcccgccttatctccaagttggccttctggtagtaagcagttcccctcaaagcatcagcaatgaagtcatcgaatccaatggcaatagcagtttctgccttggctccatacaccagcctcttaatccgtgatagatgcacagcgcctaaacacattgggcaaggttcacatgatgcatacatttcacagtctgacaactcaatttttccaagctttttgcaagcc

SEQ ID NO: 16531 - DNA, 463 bp, Oryza sativa
  unsure (1)..(463): unsure at all n locations
  Clone ID: uC-osflcyp087e02a1
caaggaaaacatctaatggaatcataataattaaaggtctatgtgacagcaacccacagcatgtaaacagcagatctagcaaccaatacagttcggaattacagctttagttgggatgacgagagtgtaaattaggaggagctgctacttttggagtatttagaccctggattgtccccaacttgcgctcaaagaggcggcgcaatagatagacttgaatgacgctagctgcaatcagcgctgctgactccaatagagccttgtggacagccctcctgctcatgttttcgttcaatatagcttgtcgggtcagtttggggctttagncagtgctgctcgaactgaatgttgtaaagcgctttatctaattttgctatttgttcaaacaaaggagcaaaatgtttatctttcgcatgctgatcaaagtacgaaaaatggcccaacatgcacattaaaatctaca

SEQ ID NO: 16532 - DNA, 439 bp, Oryza sativa
  Clone ID: uC-osflcyp087e03a1
aaagggaactcaattcatgggaacatcacggacgaaaaacacctaacactggatggatggattgggggcttttcgactcgggagagccactggacacgataacgactcgactcgatgataagatgattctgacccggatagctaaggataactggccacgatggtgccccaccaatcagtgtcctccagttcccgccgggattcgccgcccgtaggccgcccgccacgggttgccaccgtatgccgccgtccgtccgcccgccacggtccgctccgccgtagaccgcccgtccgccaccgttagccggcccttacggggccccgttatgccgccgccgaccaccttcttcgtaagccgccgttctccacaaccgccgccgttagccgccaccgtcgccgccgtatcccccgtcttcgccgtcggaacggcggaactggg

SEQ ID NO: 16533 - DNA, 453 bp, Oryza sativa
  Clone ID: uC-osflcyp087e04a1
ggataaaagtcgtaatttcaatactaattaatagccaaggttattctaagtaactacggtttcttaattttacagacagaacgcaattttctttcagacatctttgattctaatactacagtgctaaatgtcaatgtgcaatatgccccctcataaatcaatagcacaaaccttatcccaactagtacacgagcatcattttgaaccattcagcagcacaagcattgcccgactattttgtttgtcatctctttaaatccaaatccacaagcaccaaatttcagattacaatgcttttatctttctctacaatttctcaaaatcaaccatagatcaatgggtatcatcatttgataagctcccattatgcatgctgcatgcgatgctcaaaattgttgcgcccttttacaggttgcgtttagaaataccactattatgagttggagggagctc

SEQ ID NO: 16534 - DNA, 92 bp, Oryza sativa
  Clone ID: uC-osflcyp087e07a1
atatccctggtgcatactccacactacctttctacctcctaagaactcgtcatcagcctttttcattccacatttgttactggttttccatt

SEQ ID NO: 16535 - DNA, 438 bp, Oryza sativa
  Clone ID: uC-osflcyp087e08a1
gattcatggtatgtatgcttttaaggaacacaaagatgtgagtattcctcagtacaggtgatgccaaaacctgagctctaacagccttgctgtccaaaaatttattatgtatcaagcatcaaactttcccgggggcaaaaaagacctacttcacctgattaatgagtttcctctcatcaaaaggatgacacatgaattatccactaaaattaagatttaggtgctaaacttcaagctaattgaatacaatttccagcccacaacaaaagatggaaccttcaggaatacatcggccattatcttttgcataagaatcaagcactggcttgcaatgctttctctgctgcaccgggcgcgggccgtaacaccacccgttgttggaagttcaaccatgactttaaaagcatcataaataccccattgagcaccaacaagagt

SEQ ID NO: 16536 - DNA, 460 bp, Oryza sativa
  Clone ID: uC-osflcyp087e10a1
gactcttcaaaccgatcattgaataaataagggcaaaatcccacatttgtctcactctagaagtacactttctgccaatagctataacaaggttaaaaatcccatttggagaaaaataaaattttataaaatcgactgcagtatgtagcgagacaaaaaggagatgtttctctctagttccgcttttttcacgattttggcatttcccatgcacttgacatgtgaaaaaagattatgctacctgcttccctttccttagtctatctagttctgactcggcctcttgcagtgctgattttagtagtgatactctctgttccacctcctccactgtacctcttttcagagcagccttgtatggtgtaaggaaatgccgtgaaaagttctgcagagcctggacgccgcatacctcttctggaagcaagggcaacttggttatgttgaagtcatcatataacat

SEQ ID NO: 16537 - DNA, 417 bp, Oryza sativa
  unsure (1)..(417): unsure at all n locations
  Clone ID: uC-osflcyp087e12a1
aaaaattgctgtcagcagattttttcaaaggggtcccctcatacattttcttcaaaaaagaacaaatgcccaaaaacccaaacattaaattttcaaacaacttttttcccaacaatcaaatccttagatcacaatttaaactgaccgccatgttctaacaggaggttttggggggacttagccattcccagattttttactcaaaatcacttttttcaccatcattatggattggcccttcattttcactggcattttggctcacagtttcgtcagcatcattttaaaagccatttttttaaacttccaattccctttccctttggatctgatcaactagggaagcctgtccccaaatcccatnttaataattgctaggctgctcgttgattgaagctttttcaagatctggaacct

SEQ ID NO: 16538 - DNA, 367 bp, Oryza sativa
  Clone ID: uC-osflcyp087f01a1
acaaataaaggacatgcaatgcctggcctgtattctaaatcataaccagcccatggaaaacgctaatacagggatactaataatgggctgcaaatacaggaaggggttgaaagttgctaattaactagtaaataagccacggaagcaatgtagtgcacataaactgtgtccactgggtacttaagctcgacacattttgacatacgcagccctaatcttatgattccacatagcaattgatcctagtacatcttatgaaccagtaatacagcaggtagctgagtaaatggactcaaaaatagacttcaggacagattaggggccctttccttaaggcttcgctgcttccttgatcttggcaccacca

SEQ ID NO: 16539 - DNA, 424 bp, Oryza sativa
  unsure (1)..(424): unsure at all n locations
  Clone ID: uC-osflcyp087f03a1
aggcaaactaaaggaggaattctctcccaattaccacctttaccaggtattcaaaaggagggaacctccaccaggtattcaaaaggagggagttccttcctcaattccgcattcccaccaaaattctcatatctcccaaccaaataaaacaactccccaacgattaatagcatcatccctctaaacttctaatccctccaaaaacctccaaccaaacaggccgtaaatggcatcctgggaagcatcaagagaaaaccaaaatacgtctgttccaacaaatatatatacagataccccatccaaaccggaagctcttgggctacttttcttaaaacaccagacacacatacagngcatggaagcttcgtgtgatatcatgcactaccaaagacaaagcaacaggaagcgtgtttggaattacaca

SEQ ID NO: 16540 - DNA, 321 bp, Oryza sativa
  Clone ID: uC-osflcyp087f04a1
gaaaggaaacacaactcattttttattgatatatgttggatgaatccaataaaaccgatacaagtcacgaaaaatcagactagatgaatccttcgagatcacatgagcaaaagctttcgacgaaagctgtcctatagtcgtggaagcaataacacttgataaagataggaattcagacacgagaggttgcagactataagatgtcatcaaatctccttgaacgccgcgaagagatcaccgttgatgtagtcgttgtccacaagactaaccaagaagtagctcttctggaccttgtctagtatctccctagatgagtcgccc

SEQ ID NO: 16541 - DNA, 447 bp, Oryza sativa
  Clone ID: uC-osflcyp087f05a1
catggaccattaggtccggttgatgtacgtcattaatacgcagtataaaagaccaaaagtagtatcacatcatcatatgcctaacatggaaaacttgatagtattatcgcccctagagcggaaagaaacaatttgtcgccgccgtcaaagccgtgcagatatgtatgcacggacgctgcttgctgcttactgctgcgcgcactgcacgcgctgggcgccgacgtcgtgcatggtcctcgtcctcgtcgtatgcctcctgctgctgctgttgcttgccgactcctcatctcctcctcgatgttcacgtcgtacggcatggttctcctagcactcgtcgagctccatgtcggtgtactgcgacaccggccttggcgggaggacggtctccaggggccttgcactggtcagggttcaaagagtcggggatatccacggagaagtggatgt

SEQ ID NO: 16542 - DNA, 113 bp, Oryza sativa
  Clone ID: uC-osflcyp087f06a1
attcatattcctggttcctattttacattacctaaagtaataccaaatacttttatgcattacttgtaaatcttgataggttaattgtccctcgttccgttagaaagatttta

SEQ ID NO: 16543 - DNA, 83 bp, Oryza sativa
  Clone ID: uC-osflcyp087f07a1
aaatcaaattcacttccattcatacccattacccttttacctttcctgttaatctgtttcacttaattagccaatataacatt

SEQ ID NO: 16544 - DNA, 246 bp, Oryza sativa
  Clone ID: uC-osflcyp087f09a1
caacaatattttgggtttcattttaaaaaacattccccgcccccatgaccaaggggcccgtttaaaaacggccctttttgggaacctcctgaatttcaaggggcccttttgcgcgggtggggttttccccaattcccccatttgtgccgcctttaaaactccccatttggcaccccaaaacccaagaatttccacacccaggtattgccatttttgggccccccctaattttggcatttctttttt

SEQ ID NO: 16545 - DNA, 462 bp, Oryza sativa
  Clone ID: uC-osflcyp087f11a1
aaaatcatagatctacatggaattgtactcatgaacaatagtaggttcataaattggtgaatacaatctaccaataaacgctctctctctctctctctctctctctctctctcttcactttagcacaaaaataaaatcaagaaaccaacttatatttatcacatttaatgaatcaagtagatgttctattgacttacataacattttctatggaagaagctccatttagtcaggtcaaattgagtactttgcaatgagcttatcaacgtggatgatgatatcatcaatgtggggacgaactgcaggatgaggctgcagcatccaagttacaaactggcggagagaatcaggatacgaggggccagcttcagtaggccatttaatttgagcactctttgtaactgactgtaagctctcaccagcagcttcatcaagttcataatcaaatggagattttccgta

SEQ ID NO: 16546 - DNA, 335 bp, Oryza sativa
  Clone ID: uC-osflcyp087g01a1
agaaataagatcttttacgaacagggggcagcttatgctgcaatctcggttcacaaccctttgaaacttttttgaagatactgtcacattgggaaactgtcgctggctgggaaatgctacatgggtaccggactaatcatttgctgatcggattggcttcatcatacaatacagggctcaataataggaatcccacaaacctgtgcatggtttcctttacatgagagccgagagcctttgcctcactcggtcgaggctcaagaccaaagggcaacagagcttttccgccaccgttttaaaaagtctgcgatgcagtgttctgaaagatcaacttc

SEQ ID NO: 16547 - DNA, 449 bp, Oryza sativa
  unsure (1)..(449): unsure at all n locations
  Clone ID: uC-osflcyp087g02a1
cagcccatcatattatattcatttatattagtatcaaataacaagtgtgctaagcccatataggcccaacattcaaacacattaacaacccatatagcacaacccgacaaacatccaatacaacacaaatcttacaaccaaactaggttcagtcgggtgagcaaaacataacagtaccaccatatncctagatagcaaaacaaagttctacatcactgaccatatctacaaagttccaatcatatcttgcccttcttgtgcaggattatcaatgaacttccatctcagcaataacattctttacaggctcattaaaactcgtattgctgttgcaatggcacatcttgaaaagatcaaatgcagtgggtggagcatccttatacttagtttgcttctttttttttttagcatcagcagatacagtttctttcatctggctagctgtttct

SEQ ID NO: 16548 - DNA, 378 bp, Oryza sativa
  Clone ID: uC-osflcyp087g03a1
ccaatgaaaaaccccaaatgttacatttcttccttttttttttcctttttgggaaatattgcactaaggctgacccaaaatttagcaccttaatacaatgggagaaatttcctagcacgataaattcgaacctgaaaactacccaaatttggccctatttatactagttggctttatttgggtccagagatggtaagaaatatttaaacgagcacacgtgcccctaacgttcaaattatccgttaaacggtctgtacaccttgaaagcgtcaatgacgtaagaaagggagcccgaaagggcggcaaaggaaaccacggggcagcacgcgctgaacgttttgggcgaaacccaccttgggctgccacgtggcacgccgg

SEQ ID NO: 16549 - DNA, 455 bp, Oryza sativa
  Clone ID: uC-osflcyp087g04a1
agtattaattatacatgtatgttgaattaatctctgattaagataaacacacatgctgatgtaaccttgctactcaagacctctgtttgtgctttgcatgacaagtatctgaagtccgaactgaatggcatgaatgatggaccaaatgtacctcaaatgtgtaaatttttatcgtccctctctttaaaaccacccaaagaattgatcatcatcacattggaacggtgtacaagttagatcgtcctcgacgaaaacctatctacgacgggcggtcatcgacacagagaccatagttcatttgatctgaatgtctgaatatttcttggacatccacattggatgtgcgaatattgagccttcaagacaggagctccctgacgcatatctgcaaagtggtattggcgaacaaccgggtcaccttctttgtcggatggaaggagtcccacatgaagtac

SEQ ID NO: 16550 - DNA, 467 bp, Oryza sativa
  Clone ID: uC-osflcyp087g05a1
gatgtggttccaaatcaatcaaaaattgttatatgccttgttttcaaatgatggggtgcgagtgcaacaacacatgtatccaacggaaaaccaagcttacatgtactatcatcatagaattaatcaaattccgttgagctttccatggcgtgaaagccaaaaacaaaaaggtcaaaaaaggggtgaccctcttcatcagatttagccatttgcaacgatttcatggatcttgtcactgatctcaggatcatctgatctgactgctagcttcatggccacttccttcggtccgctaagtccgaatgacagcctcacttaaacttttacattgcctataaacacaccagatagcaggcaagtgtgtgacctctaatagcttgggaccacatcagttccctcgcagggctgcatgccaaggatgcctatgacagcactcacagcctcagccaggctttccctggcgccaa

SEQ ID NO: 16551 - DNA, 281 bp, Oryza sativa
  Clone ID: uC-osflcyp087g07a1
aatgaaaggaactttttgatccattactctcatttttgattatatattggcacaaatcccagccgcttgctcaacacacgatacatcgatcaatatttggccaacccatgccaaacaagggtttttacaaattcaaatttcacctcttatcaatagctaagaaaggaaatcaagcatttgcttcaaaggttaactactacaaacagttcatgggaagaaatcaagtaaatttatgaaacacacgcgaattatggatcatcgagatatggctagctagcgaa

SEQ ID NO: 16552 - DNA, 275 bp, Oryza sativa
  Clone ID: uC-osflcyp087g08a1
atagtaagtagctacgacgacgcatgcaggccgccgtcggctgggagcctccagagcttgtctgccctccttttttttttttttttggtcagcccatgatattatattcatttatattagattcaaataacaagtgtgctaagcccatataggcccaacaatcaaacacaataacaacccatatagcacaacccgacaaacatccaatacaacacaaatcttacaaccgaacggggtgtcaggcgggtgagcaaaaccataacagacaccaccat

SEQ ID NO: 16553 - DNA, 442 bp, Oryza sativa
  Clone ID: uC-osflcyp087g09a1
gaaagggacatgatattcatggttcaccaatgtgatcgagtctagcacagcagaggacacgaaattgataggtcccggtatcctcagaactggaacatggcatacaagcaggttgtaaaacagagggcttccgaattttcgccctcaagcctcactggagatatggtacattcaggaggaatctgcagcggccggtggtggtgccggctgtgcttcggcgcgcttgactgatgcgcatttgatcagatggttgtagctccctttctccttgaaaagttgggagaaatggtgcttgcagtataggataccttccaaagctgcataattggatggcgaaatggcacagccaccgtgagaacatttgaagcaggacttgtggtaggcctgtccttcaactgtcaccttctttagaggatacgctgttttactgcaagtggcacac

SEQ ID NO: 16554 - DNA, 458 bp, Oryza sativa
  Clone ID: uC-osflcyp087g10a1
acattctctcctttttttaccactccaaaagtttcatatattattcaacatcaaataaagcagtacccaagccacaatatataacaaacaagcctcttacaaactttaacacacctttaccaagcatacccatcagagttacacggctactagggtatgtgtgcacaatggaacacgcaagcttgtgcacaaccaaacatactgcccccgaaaccatagtttttccaaggagtctggcagttgcacttaaaccatgaatccaggggtgcaacttctttaacagacccatctgaacaccaaaccgtgaatcgattttcctccggtcaccctgcagctgcatcacctggccaagacctgggacctggacaaaaggcccattgcaacaaaactgctggttgagaactttgaggatcctagatgcaagtgaatcacttcataaatccctatacaaccatcag

SEQ ID NO: 16555 - DNA, 404 bp, Oryza sativa
  Clone ID: uC-osflcyp087g11a1
gattgatataacttcatctattttttattgcatgtcctagtcaaatccttgatttttaaaggaattgatgatggggttccaaatcaatcaaaaattgttatatgccttgttttcaaatgatggggggcgagtgcaacaacccatgtatccaacggaaaaccaagcttacatggcctttcatcatagaattaatcaaattccgttgggctttccatggcgtgaaagccaaaaccaaaaggggcaaaaaagggggtgaccctttttataaaatttagccttttgcaccgatttcatggatcttgccactgacctcaggaccatctgatctgactgctagcttaatggccacttccttcgggccgctaagtccgaatgacagcctcactaaaactttcacattgccg

SEQ ID NO: 16556 - DNA, 458 bp, Oryza sativa
  unsure (1)..(458): unsure at all n locations
  Clone ID: uC-osflcyp087h01a1
gtctagtataggatttttattccatgatcaggaaaaaaaggtttagtgcaactaaagggtaattagcatttcacggtcgttttacagaagtgattttacatgtatatgagcccggcgaaaattttacatgtatatgagcactatatataggacactctttacatgtatgcataactttgtcccttcatacacctnacttgttcatgaaatcgatgcccttctgaatgctctccatcagctctttctttgccatctccaagccagctctctcaaaatcattcaacggccccagagggagaacctcttcggctccagcacgacctaacctcacttttgttgcaaagaacggcaactcggtcaccgcagatgcaacatatgaacattccacaacgccagcattaccacgcattgctcgcaagcatgcatcaccaaattttgctgcagcaaaagccattgac

SEQ ID NO: 16557 - DNA, 426 bp, Oryza sativa
  Clone ID: uC-osflcyp087h03a1
acttaataaatcgcacataatagtaactatgatcttcaaattcacaaattctccatatgaatattacatacatgcagaatgtgaaggaaaattaaccaaacttggaagcaccagcgggaagcaacatatggcggacatagttcaaaggaatggagaccatatgcatggatacatagtacataatagtgcagtagaatctatccacgaggcgaaatgcaggatgcgaaggctgaattcgttgatctagtgctggaccgaggcggccatcttgtacgcgtatctacacttcagcgccacctcgcgcgcgccgccgccgccgatctcaggcgttgctccggtaggacccgagcttggcggcgctggccctcagcacgtactggtggtaggcggcggcgatggcggcgccgatcagggggctcacccaga

SEQ ID NO: 16558 - DNA, 72 bp, Oryza sativa
  Clone ID: uC-osflcyp087h04a1
caacatacagccatttcgctctatacacatggttggcacgtctcattgccacgtttgcaccttctttttgca

SEQ ID NO: 16559 - DNA, 473 bp, Oryza sativa
  Clone ID: uC-osflcyp087h05a1
agtacagtgaaaatattttttttaacgactcgcacgagacaatacgattgatagagcaggaaaatattacaggactataaccctggagggtcataaccaggaaaaaggaaaaaatataccaccacccacacactgactagcgccaacacacaagtaccgggagaaggctaacaccggtaccgtgccgccgctaagcatgactgatcaccgtctatgaccgacaaaggaacgctagacgatgatcacctaaaagaacactcctcacaaccaacgcaaagtccaactcctagagtgtgcttgcaccaatcgatcgagaggcttcggctaggggatgccaaaacgacgtcttcaagaagagaagcgatagaaaaccgtcgtcaccgtccgtcggggctcaaagaagccaagactggctttcgcccggcaaccacccttgagggatgagacagcacgacaacgccctcaggagggag

SEQ ID NO: 16560 - DNA, 429 bp, Oryza sativa
  Clone ID: uC-osflcyp087h06a1
acaacaaattatctcacttcattcaacaaattgtcattgtgtttgcaaactataatgtacacgagaaagacttcaagctgctagagcacttacaaatgctacgaaaatcctacaaccttgacctgagttctcacagttagctgcacataaaacagaatgatattctaaaattcttcatcgggtgaaaactcatcgtcgggcgaatttactgtcaagagtgagtatttcacccgcagcgatatcttgcccctctcaagatgcagctttgcacctgaaaccacccagtaacctggcaggtcctgcggtccacgcaacatctccgttgtatccacaaacctgagcaactttggggtctgcactggaacaggcgggccaccagggtacaccgccgaattgatgttcactttggcagggccaggcacgggcttt

SEQ ID NO: 16561 - DNA, 291 bp, Oryza sativa
  Clone ID: uC-osflcyp087h07a1
acgcaccatgagctcacctatttacctgaacaagcacatctcagcacacacattgacatggcacatatttccatcatgttgcaacatactttaaaccattatcctcaccattcagaaaacatagactaaacattgccctatagagttcacctgatagctggtcgtattactgttgcatgacttgggaggcatgcccgtacgaaacatagcctgacatcgaccagggtctttatctgtggcgcataccacattggaacatggagttgctagctgatcagaccacactgttcc

SEQ ID NO: 16562 - DNA, 74 bp, Oryza sativa
  Clone ID: uC-osflcyp087h08a1
aacttacatgatgatggggatttaaatttatttaaacttggacggagaagtgggttttttttttgggttttcat

SEQ ID NO: 16563 - DNA, 325 bp, Oryza sativa
  Clone ID: uC-osflcyp087h09a1
cccccccaaaaaaaatggggccccaaaaaaaatttttttttgggggtctaaaaaccccccggtctttttggggggggaatttttaataggggcgcccttaacccaccgggggttcgccccaagggcatcttttcaacggggggccccccttgggtccaaatattaaaccccttgggaaaccattttttcccccaaaaattttaaaaaaaaccccccaaccccttttttgggggggaatttttgagaaacctaatttggggggcccccgttgaaaaaagggtttttgggggaaaacacaggtgggtccccccccggggaaattttt

SEQ ID NO: 16564 - DNA, 446 bp, Oryza sativa
  unsure (1)..(446): unsure at all n locations
  Clone ID: uC-osflcyp087h11a1
aggtagaaaggatccttcaaaatatctttcagaaatgacacaattaagttttgctagtctcagtagagaagtgactactaattactgtcgattgctcaaacagaacggtcgcacaatgccgatcgcaacacttgcaaacaggagctgacttagaccttgaatccacggctgttcctcctgccacggngccttctcgaacttccttcccttggagcgcacatatggcttcgtgtggctgtgcggcacaccaggagccttaccaaagtgcctgacggcctcacgggcattcttgggacccctcaagaggaccgtgttctccccaagcggagcacggagagcaagctggtcgaaggtgaggcactcgccgccagcattgacaatccttgccctagccgtctccgtgaacctcagggcagtaaccttcattttcggaatctcttggatcc

SEQ ID NO: 16565 - DNA, 463 bp, Oryza sativa
  Clone ID: uC-osflcyp087h12a1
cacaactatttgcatcaaatttgaaaggtaaaggtacacgagagggtatcccatcgtcgatgggaatagaatccactcccgaacagaagaacaaatatactcttaatttaactagagaaaaagccagccgtatgtttctcttaagcaatacagagatagctaatccaatttaaaagaaacaagggaaaaaactcactgccaatgctacagttcgagtgccctagcgtaagaaacaagacaaataccaacgtagtccaaaaccagctgaaacggatcatcaaaagctaccaccaattgaggtgaggtctgaacaaaaaaggaaaaccaactttcccaccattacgtggtacgagtcccatgcaaattgaggacaaggcatctggagatgaggtgagacagtcggcatatggaagtgctcgtttgcaaattgcaactgcagatagcaaaagctttatgttgttgc

SEQ ID NO: 16566 - DNA, 447 bp, Oryza sativa
  Clone ID: uC-osflcyp088a01a1
gataagcaaaaaaaacatcgatatatcgcttatataaagtaccctcttcagtttcagaactgacaacattatcgccgcacactttaccggacctgcagcagaaacgcagtattggcaagaaaacgagaacagttgatacatacacgtttattcggggagagatgtaaaaaggctatcaaacaggaggccataaagaaagttcatgggtagcctcaaaagcattctagaatggctcttgaaaagtttatgtgatgacggtgggagcagatcggccagtgtactcttgcatctttgacagcttcagtgcaacatcaaccagaggagcaagggcatcctgcgaatccctgccggtcttggaagaatccttctcatactgctcgatgtagacacggatagtagcaccaacagagccagttccagagaggcggaacaccagtccgggaacca

SEQ ID NO: 16567 - DNA, 199 bp, Oryza sativa
  Clone ID: uC-osflcyp089a01b1
gattagtttcaggctgcaggagcgtgctgagaagaggaaggagttctaccaataacttgaagagaagatccatgcaaaggagcttgaacaaacataattgcaggctatatttaaagagagccaagaggctgatatcaaattacttaggaagagcctcgtattttaagagatatccatgccaagcttttatatggagcta

SEQ ID NO: 16568 - DNA, 294 bp, Oryza sativa
  Clone ID: uC-osflcyp089a06b1
atcgtcgcggttctccacgctccactgcggtggactgcgccgtatgtagcgccggggagttccacagtccaccccggcccgcgctcgcgttctgtggagtttctacacgagctctgtcggctacggattttgaggcaggtaggcaggcagtgccgtcgatctttggatgactccgcgaggagcgtcccttggaagtacattacttgcctcacccggtttgatcccgattagttcctttgtcatgatctcttatatccttaatgttcaagttactgatgtgaagaattgctatct

SEQ ID NO: 16569 - DNA, 278 bp, Oryza sativa
  Clone ID: uC-osflcyp089a09b1
tcgtacgggaatggcccggcgtttgggtgcgtcatgatgaaggagttcttatctgagctggctaagcgcgtcaacaagaacaccactgcttatgagaactacaagaggatcttcgtgcctgagggccagccgctggagagcgagccgaatgagccgctgcgcgttaatgtgctcttcaagcacgtccagaagatgctgaacagtgacagtgctgtgattgccgagactggtgacttctggttcaattgccagaagctgaagctttcttgagggctgcg

SEQ ID NO: 16570 - DNA, 111 bp, Oryza sativa
  Clone ID: uC-osflcyp089a11b1
actgaaagggggggaaaaaggaactcgaagtcgccgccggatttgggatttggagagcgcgcgaggtaaaccaaagttctttttcctatggctcgtactattcaaactgtt

SEQ ID NO: 16571 - DNA, 332 bp, Oryza sativa
  Clone ID: uC-osflcyp089b02b1
ctttgcttggctctgcacggaccaacgccgacgacgaccgccggagccgccgcatctagctcgccgccccgccatgcagccgctgctcaaggtgtacgccgaccgccggtcgcagcccagccgggccataatcatcttctgcagagtgaaccggatcgatttcgaggaggtcacggtggatctgttcaagcgcgagcacctgtcccctgaattcaagaagataaacccaatgggacaggtgccagcaatcgttgatgggcgattcagaatgtttgagagccatgccattctgaggtatcttgcaaccggtgctccctggagttgcagatcac

SEQ ID NO: 16572 - DNA, 213 bp, Oryza sativa
  Clone ID: uC-osflcyp089b06b1
aatactgggaagaaaaatcaccgtgtacgatccatgctagaccttggcgagtctactgaagcacgaggaggacttgccatggagatgacatatggcggcatgaaacagatgcctagctttcatggcataatcttctgtactataagaaaaccatcacaatgattctgctctagtgtggccaccgacctgtctcaatcgcttctctaatcaaac

SEQ ID NO: 16573 - DNA, 540 bp, Oryza sativa
  Clone ID: uC-osflcyp089b12b1
tcgttcacgcgtccgcaacgccgccgccccgctccgcgccgtcgtgcacctgctccgcctcgcctcatcgtgtccgcggccggcgagcagatcggcggcgcggtgagcacggtcccctcttcttcctgaactcgccctagcctgcttcaggcttccaccccgtgcggtctcctcgcgcgcacggccggcctccatcgctgctcgaatcgaactaaggaactggtatcaggctgttggtgagaatggaaccaaagcattcagctgaaatgtccaagcatttggacaagcaaaatcaagccctaatggaaacttaccgagcaatgtcccacgagttgcataaagttcaggtggaagaagaaacaatcatgcgcaagttatatgagctgatgtctgcagaaggacttcttccgaagcgcaagatagaaagtcaagcacagaaaactggggaatcaactcaggaaaacaaagagcttgaaccgtaggatgtaaactgtgaatatcgatacgatactcaatttgatgcaattaaacgagttgagc

SEQ ID NO: 16574 - DNA, 538 bp, Oryza sativa
  Clone ID: uC-osflcyp089c03b1
atatagcaagcaaaaggataggaaggagccaagaacaccaagaacttgttggagctgagacagcagcaccaagcaagaaaccggatccaatccatccatccatccatagtttccaatggctggcaagtacatcgccgctggtcttgttggttcctttgccatctcatatgtttgtgatcattttatcgctgagaagaagatatttggaggcaccacaccacataccgtgtccgacaaggaatggtggcaagcaactgacaagaagtttcaagcctggcctcgcactgctgggccaccggttgtcatgaaccccatcagtcgccagaacttcatcgtcaaggatctcgagtcctaagattgtagtgggagcatatatgctgaaggttgcgccgtgactaagatggcgatggctgtggctacaaactaccttcctatgccgtacttccgaaccagtacgtgagtacttggtcttaattaaaccagaccattttgcctagtgccgccttaacagaaccttgaagcatatctgctttagaca

SEQ ID NO: 16575 - DNA, 210 bp, Oryza sativa
  Clone ID: uC-osflcyp089c07b1
tcgttgtaatcgagccgtattcggcatcatgggttattgtgtgaccactgcaaagggtgctgcagagaccctcaaattcaacatggctttggtcctactttctgtctgcagaaatacaatcacatggatacggtcaaagacacaggttggagctgttgtacccttcaacgacaatataaactttcataacgccatagtcacaggtgttgc

SEQ ID NO: 16576 - DNA, 476 bp, Oryza sativa
  Clone ID: uC-osflcyp089c08b1
gcatattaaagcctcccatcaacttcttgcacacaccctccctttggctttcatctgcatctattcagttgcagattgagagccaaagacattatcttgattctatcaggagggttgtgctagcgaattcttgttagcaacaaattgacatattgctcggcacatccccaccgagaataccaagatgacgttctctggtacacaggacaagtgcaatgcttgtgacaagaccgtgcatttcattgatctccttaccgcggacagtattccctaccacaagtcttgcttcagatgcagccactgcaaaggcacactttcgatgtgcagctattcgtccatggatggggttctttactgcaagacccattttgagcagctattcaaggaaacaggcacctttaagaagaacttcccttcaggtacaaaggcaaacagtgaacaggcttagattcccagcagctgtcctctgtgttctg

SEQ ID NO: 16577 - DNA, 417 bp, Oryza sativa
  Clone ID: uC-osflcyp089c10b1
tatgtgagagagctaagaaggaaagaaaggttgacacacgtcaatcggcaggtgcttatcacggaactactgtgcgtcaagaggatcatggacacggtactatcgcagatcgaagtggcagtcgtgaaagagagataattggctttatatgagatgactatgaagaactttgcagtagtgaggaaaataatcaatcatccaatatgctaataccagagttcagcgataacttcagtgctgaagagccccagaaccaagattctgttgcaaaagaatcgtcccttgatgacatatgcaacgcattcagtgggatgcaccttaaaggagatgcatatcttgatcctactgagtccatgacttgtccggggaatagattgatcattgctaggaggaggagaacaccggaagaggaggaat

SEQ ID NO: 16578 - DNA, 548 bp, Oryza sativa
  Clone ID: uC-osflcyp089d02b1
ttataattctaccatgcatgttgatctatcttgaacctcaaatctactttatgaagatgctccttcggtttctgtattataatgagagtggttcttcaagccaagtgtacgatgcactaggcaatagaggatcactgcatgattactggcctaagaagatggtagagttatgctactttgatatgcctaataagtatcggagttgcatgctgtatctatctattttcccacctggctacaaaatcaggaggaccagcttagtaagacgatggattgttgaaggcctcatcactgacggacaagaaatgaatgcactagaacaagctgataactgttttgattcccttgttggcaggctgcttctctgtccaagcgacattgatgctttaggcaaggtcaagacctgcacggtacttgacttggttcatgatgtcattactgatctggtatccggaggatatgatactacttttgttgcaccggtttggcaccacgagaacctgctcgccatctttaaatccgtttcagcacaaagttgcatatatttt

SEQ ID NO: 16579 - DNA, 90 bp, Oryza sativa
  Clone ID: uC-osflcyp089d08b1
ttgtaaaaattaagcatgctatggaattattgggaatagcatatacagggtatagatagaaattttaataagggcaggcaggaaatctat

SEQ ID NO: 16580 - DNA, 381 bp, Oryza sativa
  Clone ID: uC-osflcyp089d12b1
tttaagatcttgttttagctgcagagagcggagtgtttgtaaacatagacagtgaatttgatttggagaatattgtcactgctgcgagagttgctgggaagaaagtccctgttttgctcaggataaacccagatgtggatccacaggtccatccttatgttgcgactggaaacaaaacctccaaatttggtatccgtaatgagaaactacaatggttcttagactctatcaagtcatactcaaatgatatcacactggtgggtgttcattgtcatccgggatctaccattacaaagggccatatatttagagatgctgccggctctattgtgatttaatgcttcttacattctatcctactgttttcacttcctcattttt

SEQ ID NO: 16581 - DNA, 250 bp, Oryza sativa
  Clone ID: uC-osflcyp089e01b1
tttttctccataaacctcaccattggtgttcttttaatcggtgagaaagcaagtgctccaagaattgcaaaggggagaggagagatgagagagtgaagaacaactccataacttacgcatctttctctctcttctctctctctctctagaacacatgaacattttagcgattactcgctagtgtccatcaaaacttaacttgtacaatgaaatctacctaatagtccgtatttcacgattagtctttttt

SEQ ID NO: 16582 - DNA, 95 bp, Oryza sativa
  Clone ID: uC-osflcyp089e02b1
agtgaaaaaaaaaacgaggaaaaaaaaaagcaacgaaccaacttttctcccaaggaaacttctccacttttctcctcgcttccgccgcctacttc

SEQ ID NO: 16583 - DNA, 117 bp, Oryza sativa
  Clone ID: uC-osflcyp089e08b1
taaatatttagcatgcctttgaattattggggatagcacttacagcgtattgaaagttatattcactgagacagaaatgatgtcatactacggtagtttcctttcttcttgacgcca

SEQ ID NO: 16584 - DNA, 178 bp, Oryza sativa
  Clone ID: uC-osflcyp089e10b1
tcttattaatcagcggtgagcagcttgatgctctcaggtatgatccactatccagttttgttgctgatgctcaccagagcaacgttgccccactttcttttttacagtcctctcatgttagagaggttgaagtgatagattactttttctattgcattcctcttgataaattgcaata

SEQ ID NO: 16585 - DNA, 209 bp, Oryza sativa
  Clone ID: uC-osflcyp089e12b1
tcagatgtgaccagcacgctctgccgagcgcacgccatcgtcgtcatggggaggagacctgcaaggtgctatcgtcagatcaagaacaagccgtaccccaagtcaaggtactgccgtggtgtccctgaccccaagatcaggatctacgatgtcgggatgaataagaagggtgtggatgagttcttccactgagtgcatctctttttctt

SEQ ID NO: 16586 - DNA, 444 bp, Oryza sativa
  Clone ID: uC-osflcyp089f01b1
agatttcaggcttgtactatgtaaccaacacgaccaccttcaagtgggttcagctaccacgccacagttgtgatcatggagaaccagcagttgtcatcacattcgaggaacccctgacatcctgcttcgacggtgctgttgagcattatcatgtcgtcgctgccttccacctcaagggcagcgtctggacatctgagtcatactcctccaggactgggaggtggactattgctaaagatgcccctcctgctgtggaggtgaaggcggagtctggtgttggtacactgggctgcgccttctggcgcacttcccttgggtctatcctctgttatgactccgggagggaccttctttaaggtattctctgcccttgagtggtaaaccaagatcccgcatgggagcttggggaaatggagggagattttactgtgtccctggttcaag

SEQ ID NO: 16587 - DNA, 177 bp, Oryza sativa
  Clone ID: uC-osflcyp089f04b1
gtttcatattatgaaggagatgacaatcaaaatgttcttgtgctacgggatatcctgttgacgtattccttctataatttcgaccttggctattgccaaggaatgagtgattttctggcacctatactttatgtgatggaggatgagcccgattcattcttttgttcttcacttttt

SEQ ID NO: 16588 - DNA, 94 bp, Oryza sativa
  Clone ID: uC-osflcyp089f06b1
tgttatagagagaaagcgttgagattattggatacagatcgtacagcgaaattttgggtagtttaacattgagatgcacggaagctaccaatgg

SEQ ID NO: 16589 - DNA, 256 bp, Oryza sativa
  Clone ID: uC-osflcyp089f12b1
tcgtcatatcttccggtcgagttcttggtcgatctcttccctcctccacctcctcctcacaggttcttggtgtagcttgccactttcaccagcaaagtttcatgtctgatctcgacattcagatcccaactgccttcgatccctttgctgaggccaatgctggagactctggtgcggttgaaggatcaaaggactacgtttattgacgcatccagcaacgtattggtcgtaagagcctgaccactgtccagggatt

SEQ ID NO: 16590 - DNA, 135 bp, Oryza sativa
  Clone ID: uC-osflcyp089g02b1
ttatttccacctccacctcctcccccctcgctggcggacgacgagcttctaccccctccccctacgccgccgacgtgccggaagaagatggctgacgccttggatatccagtccctcgtctgcgataatggaact

SEQ ID NO: 16591 - DNA, 562 bp, Oryza sativa
  Clone ID: uC-osflcyp089g10b1
ttttaaagccgccaactgcttctctcgccgccgccgtcgtcgtcgccgccgtttaccgtcgtctgagaagagggcaggaggaggaggagtgattattatttttattctttttgaatttttatatatttttattattttttttttttttttatttttttattttttttttttttttatttttttatttatttttttatactttttttttttttttttttttttttttttctattttttttttttttttttattttttttttatttatttattttttttttttttattttattattttattttattttatttttttttttttatttattttttttttttattatttattttttttatttatattttttcttttattttatttattttttttatttttttttatttttattttttcttttatttttttatttattaattaatttttttttttattatatttattattatctttttttttaattattttattatttatcatttttttttatatattttatatttttttttttcatttatatttttcttttttttttttttattttt

SEQ ID NO: 16592 - DNA, 297 bp, Oryza sativa
  Clone ID: uC-osflcyp089g11b1
tcgttctgcctcatatgatgctatcaagagtgctatcaagtctgcatcagagggaaagctcaagggaatcataggatatgttgaggaagacctggtttctactgactttgttggtgacagcaggtcgagcattttctacgccaaggctggaattgttcttatcgataactttgtcaagcttgtcccctggttctacaactagtggtgtttctcgctcccttgtcctctacttgatccgtcacatgccctattcccagtagtcttctctctgtttctccttggttttctttgtctctt

SEQ ID NO: 16593 - DNA, 281 bp, Oryza sativa
  Clone ID: uC-osflcyp089h01b1
aggatgtacctgactataagtataccattgccatgttgggctatgctgatgaggataagacaactgttattgagttgacatacaactatggtgttacagaatataccaagggcaacgcatatgctcaggttgctattggcactgaagatgtctacaagtgtgctgaggctgttgagttggttacaaaagaactagggggaaagattgtgtgtcagccaggctcactttcatggttcaacacattgattgctttctttttttgaccctgtttgcttgaaaag

SEQ ID NO: 16594 - DNA, 419 bp, Oryza sativa
  Clone ID: uC-osflcyp089h04b1
gtgagttctgttgatgagactagtcctgagcattcccaggatggcatgcccagttttcttcctggatcaggcaatccattggaacagctgggactcttcatgaaagcagatgaggaggaagaggaagaagatcctagcagtgtccccagcactaaagatgcataggaaggagagatcaactagtcccagtgcttgtgggctagttgctgaattagctgtgcatatggtagacgctccttccttctgcttccaaactagctcgaacaaggccctcaattttgatgctgctggatgtcgtaaattatgcgcctggagtatcgcggttacctgccctacaaatcatcatatgtgcttggaggatggcacagccataatggccgcgacttgcggtactccgagctgttgtccggtgtatgtat

SEQ ID NO: 16595 - DNA, 379 bp, Oryza sativa
  Clone ID: uC-osflcyp089h08b1
gtcgcctccttgccccgccgccgcggagtctaatcaccagacccgcgatcaccgcggacctatgcaatctaccgtaccgacatcgccgctccctctctctacccgcgtgacgccaacccccaatgcggcgccggacccacaccgagccggcggccatcgactgttcaccacgccggtgtcctctgcgagcgctgaccacgattcgccgccgccgctcacaactagtagtcgccggctactagcattttcgacgtcgagacaccgatgcccgccgctctaccctcactatcgttcgcgacgccaccgatctttgtatgcccgactccgtgccgtcagatcgtcgacgcctggagtcttcggggaacagtctcaacgaaaa

SEQ ID NO: 16596 - DNA, 542 bp, Oryza sativa
  Clone ID: uC-osflcyp089h09b1
tcggttgggatatctagcgaatcaaagccgattttatcttattgacaaggaattcaatgtcatggggtacacattacttcttagtttgattgagtacaagacacttgtgatgcgtggggatattgaacgtgcaaattgatattttaccatccataccaaatggcgcagataataatgttgctcatttcttggagtctagaggtattgttgtggatgcttctgaatttgctatttattttttttactgattttcttttctcgtctattttcgttctcttttcttcatctgcttttcattttattcatatttctttttatatttctattttttctttttcttatattattttattattttctcttttcctttatattcttctttattcttattttctttttctttatatttttcttcttatctttttcttatttttctttactttcttataatttttaatttttttctttctcttacttttaattccttttatctttttactcttctttttttcttttttatttcatttctaatttctcttttt

SEQ ID NO: 16597 - DNA, 282 bp, Oryza sativa
  Clone ID: uC-osflcyp089h12b1
tcgtgaaccatctctcgacctcacctcacgctccctaactaacaatggctcactaccaggaggtggactactgctcggaggaggtgaggtttacttttcctctctcttttttttcctcctttccctccttcttttctctttttttttttcttttctttttccttctcttctctatttcttttttttattcctcttttcttaatccctttttctttcttatctttttctttctttactctttcttcttctattttttactcttttctttctttcttctttttt

SEQ ID NO: 16598 - DNA, 175 bp, Oryza sativa
  Clone ID: uC-osflcyp095a01b1
gtttctgatgaagtgcgaggaaataaggtcttagaggtgctagattgtccttggatcatgcgttgttttctccacatattttttaactctttttttttcttatttattcattgtttatacttttctctttttattttttcttttctttatacttactttttttcttattcttttt

SEQ ID NO: 16599 - DNA, 319 bp, Oryza sativa
  Clone ID: uC-osflcyp095a02b1
aaaattacctcaccatcatcgacccacttgttcctagcgatctagaacgagagacttggcaatggcgggaagcggcgagctgaagctgctgggcgtttggagcagcccgtacgcgatcagggtccgcgtcgtcctcaacctcaagtcgctgccgtacgagtacgtggaggagaacctgggcgacaagagcgacctcctcctcgcctccaacccggtgcacaagagcgtccccgtcctgctccacgccggccggccggtgaacgagtcgcaggtcatcgtgcaggacattgacgaggtctggccgggcggtgccggggga

SEQ ID NO: 16600 - DNA, 285 bp, Oryza sativa
  Clone ID: uC-osflcyp095a03b1
gcgccggttcctccagtccggatttggcctctctggcgagggaggccggatcccctccggtggctcctcagctgtggacgacgcgacaagggcagcggtcagagggcagcaggaggcgtgggtggccgcggcaggagggcgagtgctgcggctggtctggcgatctgccagagctgtgggtgatggcctaggactgattgctaaagggacgatgcagccgaccggcgacgatcattcttgcgcgaattgggtgtgtgggtttggacggtaaatctttggtaaaag

SEQ ID NO: 16601 - DNA, 488 bp, Oryza sativa
  Clone ID: uC-osflcyp095a04b1
gtgtgttgtgtccctgtctcccctctccttcctgctgtcctttcccctcctctcttcccccctctcacaagagagagagcgccagactctccccaggattcagccatgaagggggccaaatccaagggcgccgccaagcccgacgccaagttggctgtgaagagtaagggcgcggagaagcccgccgccaagggcaggaaggggaaggccggcaaggaccccaacaagcccaagagggctccctccgctttcttcgtttttatggaggagttccgtaaggagttcaaggagaagaaccccaagaataaatctgtcgctgctgtaggaaaagcagccggtgataggtggaaatccctgaccgaagcggacaaggctccctatgtagccaaggccaacaagctcaaggccgagtacaacaaggccattgctgcctacaacaagggcgagagcactgccaagaggcacccgccaggaggaagaggaggacc

SEQ ID NO: 16602 - DNA, 219 bp, Oryza sativa
  Clone ID: uC-osflcyp095a09b1
gtagtaatgaacttgcacgaactgctgcaaatcaattcctccaagatttgcagaatgggagtttagacattggtccaggattaacaagttctgcaacaaacaaatctgggaatagcgtagatgatacggatgctaatggaaaaaaggggaaacttggaaagagccaagatgatttatattatgctgcttctaaggctcatccagttagctcttagcccc

SEQ ID NO: 16603 - DNA, 121 bp, Oryza sativa
  Clone ID: uC-osflcyp095a11b1
tagtcttcctgcctggacatctacatccgccgagtagcctactacaccctgggtggcacctacacagccctgcacctgtaacgtaacccaactactcgctaaacattagtcaacctcaact

SEQ ID NO: 16604 - DNA, 100 bp, Oryza sativa
  Clone ID: uC-osflcyp095b09b1
gttgtgtttaaggggggaaggaggcggcctaggaagagttgctaaaatgctcaccttcctaataactacagtagtaaatggggaaaaacacttgctaatg

SEQ ID NO: 16605 - DNA, 385 bp, Oryza sativa
  Clone ID: uC-osflcyp095b12b1
tgatgataagcaaagcggcattcgcacgtgaagcagtggatataggccagattctttgctcattcacaaacgatctcgcatgccgtgttgtgtcaaggaagttagtcggggatgacaggcagaaaaagctcctccaagagttggttaataagacaataaagctgctttctatcttcaacgtggaggagtacttttcaattttagctcggattggcgtgattgggaaggtgatgtgcgcaagagctgagaggttgaaaaagaagtgggacatgctgctgaaaaagctgatcgccgaccatgagagcaagtgcgattcatacttagtatgtgcccgtatcagagatgactttgtggccattcgactgagtggtactatggagcctgg

SEQ ID NO: 16606 - DNA, 543 bp, Oryza sativa
  Clone ID: uC-osflcyp095c02b1
gaatgaccgtgatacccttaccccgcagcccgcactgcagtgccctagcttgtacaggggcattttagtcttttcgggtgccccaaaaccctaatcctcggatctataagtagcgactcaagccaagccctagcaatcggatcccaccccagccgccaccatgtcgaagcgagggaggggagggtcggcggggaacaagttccggatgtcgctgggtctgcctgtggcggcgacggtgaactgcgcggacaacaccggggccaagaacctctacatcatctccgtgaagggcatcaagggccgcctcaaccgcctcccgtccgcctgcgtcggcgacatggtcatggccaccgtcaagaagggcaagcccgatcttcgtaagaaggtcatgcccgccgtcatcgtccgccagcgcaagccgtggcgccgcatggactgtgtctacatgtacttcaaaaatatgctggagtgattgtgaatcctaagggtgagatgaaagggtctgtattactggacccattcggaaggaatgtgcttgccttt

SEQ ID NO: 16607 - DNA, 96 bp, Oryza sativa
  Clone ID: uC-osflcyp095c04b1
atccggctaagacacagcttatgaggtggcgcataattctcagcgtggtcagatcaacaaccggcggcgggacaaagcacgccctgagggatgaat

SEQ ID NO: 16608 - DNA, 121 bp, Oryza sativa
  Clone ID: uC-osflcyp095c09b1
tttgtgtcctctggggcaaggagacggattatgtggtgctgcataactgtcggctggggcatacaccgatcatagtatggttaatgacttgctcggcttgatgatctttcttgacgtgtct

SEQ ID NO: 16609 - DNA, 97 bp, Oryza sativa
  Clone ID: uC-osflcyp095c10b1
tttctcgtctgctggggcgatcagacggacgaggaagacttgcacatttgtcgcgttggttataacacaatacgtcagcggggcatgacacgagctt

SEQ ID NO: 16610 - DNA, 272 bp, Oryza sativa
  Clone ID: uC-osflcyp095c11b1
tggctgtgcggcggggcagttcggcgacacgacgctgactaaggtgttcgtggggggactcgcgtgggagacgcagaatgaggtgatgcggtgatactttgagcagttcggcgatatcctcgaggccgtcgtcataaccgacaagaacaccggtcgatgcaagggctacggatttgactctttcctctagtcgtatgccttgttttttgcttgtctatctcatatttcgttgttcttggttctcagtttatatttcattcttttttcctttt

SEQ ID NO: 16611 - DNA, 55 bp, Oryza sativa
  Clone ID: uC-osflcyp095d07b1
tttgtgcccaacccggctaggacacggcttaggggggccttcataaaggacggcg

SEQ ID NO: 16612 - DNA, 59 bp, Oryza sativa
  Clone ID: uC-osflcyp095d08b1
catgcgtctaacgtggctatgacacccctaggggggtctttaaataataatggcgtccc

SEQ ID NO: 16613 - DNA, 497 bp, Oryza sativa
  Clone ID: uC-osflcyp095e01b1
gggtaggatgatgagcacgttagatgccacgcgagcagagctcggccttgttgttctgtacttgaacaaagccgaggccagggacaagatatgcagggcgatccaatacggctcgaagtttatcagtaacgggcagcctggcacggcacaggatgtcgacaggtccaccacccttgctcgcaaagttttccggcttctcaagtgggtcaatgatctgcatggtcttatcagccctcctgctaaggggactcctcttacactggtcttgcttgggaagtccaaaaatgcgctgctctcgactttcttgttcctggaccaatttgtatggttgggaagaacagggatatacaagaacaaggagcgcacagaccggattgtaaggatatccctctactgctggatggcctcttcagtctgtgcagggcttgttgagcttggagagcttaagaggctttcaaaataaatgagggagctggcgagagagcctgagggatact

SEQ ID NO: 16614 - DNA, 100 bp, Oryza sativa
  Clone ID: uC-osflcyp095e03b1
ggtgtgttttatccggctaggagacagattacgaggtcctgcataattgtcgcattcctcagaaacagaaccgacaacggggcaagacaccacctgaggg

SEQ ID NO: 16615 - DNA, 101 bp, Oryza sativa
  Clone ID: uC-osflcyp095e05b1
gtctttctttaaacggcaaggagacggctaatgaggggcggcaaaatggacggcgtgcgcagatccaaagccgtccgcggggcaagacacgacacgagagg

SEQ ID NO: 16616 - DNA, 107 bp, Oryza sativa
  Clone ID: uC-osflcyp095f12b1
tactagtaccgctgcttcgtcggcggtctcgggtgggctacctgacgaccgctccctcgaagccgccttgtccacctacggagagatcctcgagtgcaagatcatta

SEQ ID NO: 16617 - DNA, 121 bp, Oryza sativa
  Clone ID: uC-osflcyp095g02b1
gtcttctcttagtagcctgtgaccttgcctctttatggttcgatcatgcgcgccaccggaaggcaccagccggtcacattggcgtgagaactcccagggcgcgattgcgatcgatgacttc

SEQ ID NO: 16618 - DNA, 111 bp, Oryza sativa
  Clone ID: uC-osflcyp095g10b1
ttttgccccaaggtgctaggagacagcagagggagagttgcagagcagacgcgttccccatataccgaaccttaggtcgggcaatgtctctccttgtatttgttactttca

SEQ ID NO: 16619 - DNA, 156 bp, Oryza sativa
  Clone ID: uC-osflcyp095g11b1
tttattgctccatggcggacggcgacagcgcggcggtgtctgctgttgaggggagttttattcaccacctttctcagtttatatattaccatcatacttcattttcttattctttataacattttttatttaattactaactatcttttatctttt

SEQ ID NO: 16620 - DNA, 181 bp, Oryza sativa
  Clone ID: uC-osflcyp095g12b1
ttgattaatccccaaaatacggggcaaaaatagaacaagaacatgaattacttgaagaactcgcgctccgtcctctccaggctcctccgccacaagcccaccggctgcccgcggctgccaccgtcgccgccgttgccgcagggtgcccccgctggagtctccttcacctccccgagtctcc

SEQ ID NO: 16621 - DNA, 105 bp, Oryza sativa
  Clone ID: uC-osflcyp095h02b1
cccttttcttatagaatacaaactcacccctcgaagcgaagcgttgattagccttgtcaggatgcacacctttgagaagaccctgaccggccagaccatcaccct

SEQ ID NO: 16622 - DNA, 366 bp, Oryza sativa
  Clone ID: uC-osflcyp095h05b1
gtcctggtgtttctacatcgtcacctacggcctcgggatctacctcctcaacctcctcatcggcttcctctcccccatggtcgaccccgaggcccacgccgctgcctcctccgacggccccgccctccccacccgcggctccgacgagttcaagcccttcatcaggcgcctccccgagttcaagttctggtatgcaatcacaaaagcttttcttatagcttttgtgatgactctcttctctgtatttgatgttcctgtcttctggccgatacttctctgctactggggttgctcttctctgcctgaccatgaagcgcccgattgtgcacacgttaatccacaaatttactttccctctctaccgtc

SEQ ID NO: 16623 - DNA, 79 bp, Oryza sativa
  Clone ID: uC-osflcyp095h07b1
ttcgtcgatagagtgaacgatcgattggtcgagctcgccctcgattgacgggtcgccaatggcgccgcggactctaccg

SEQ ID NO: 16624 - DNA, 105 bp, Oryza sativa
  Clone ID: uC-osflcyp095h12b1
tgttgattacaggggaatcgcctacacagccatgggggattttaaccagaaggcggccgatatcaacctcagaccaattatataattattagaattataaaattc

SEQ ID NO: 16625 - DNA, 455 bp, Oryza sativa
  unsure (1)..(455): unsure at all n locations
  Clone ID: uC-osflcyp100a03a1
cacaagcaaaaaagtagactcaggtccatatcatcagcatcgttacaacttacaagtaggtagattggaaaacaaaatgcaactcattatcccaactagcattaacagagggtggtgggttcctgatgaacaccgtccacgttttattctcagcatagtacaaagcataccggtattctccggctcggtcggtccatgngaataccatggtcaagtcaatataggattnctacttgggtcttggcccatgttggcggattcaggttcgaattgacacggtttgcttgtaaccccactcgtttgtcgttacccaggcgacaaggcttgacaaagtttatcgttaagagccaattccagccttggcgtccgaagtatgcttgacctgctgtcaccaacaaagtcagtagaaaccaggtcttcctcaacatatcctatgattcccttgagctttccct

SEQ ID NO: 16626 - DNA, 125 bp, Oryza sativa
  Clone ID: uC-osflcyp100a05a1
acatactaaatatttattattttttcagtttttacacaattccgttttaaatgaatttgttcaggatacaacgaacggcatccttacacaacaaatggacccgtaaaacgcctacgcttcccata

SEQ ID NO: 16627 - DNA, 265 bp, Oryza sativa
  Clone ID: uC-osflcyp100a06a1
ggagaaagtcaaggttagataaatattgcttcacttgtacaaagtacagataaaaatacattgatacatgacacggagagagccatgcacaccaattatttggacacacagagggcaaggctgcagagaaaatcaagccaacacaagctgaactcacgtgacccacctgtttagtgcttttactggttcgaggaccggtagacttcttggtgaaaaacagccaacacacatcgcatgccagaagtaagcacaagatttatttaca

SEQ ID NO: 16628 - DNA, 184 bp, Oryza sativa
  Clone ID: uC-osflcyp100a07a1
gacggaacagtttgcattcaacagcattgcaacccaaatccttttatccgaagaacacaacgacgacagcaaccagccgagtgcagaggcaaaagaggagctcacatcctgctttttcttgacggggtccgagcctccttggaccttggctcctcagtctcgtgctgtcttgattcttctcccg

SEQ ID NO: 16629 - DNA, 162 bp, Oryza sativa
  Clone ID: uC-osflcyp100a08a1
aaacgaataaaatcattattgcaaaaacatgattttcttcttaatctttttagagtccacaacaccaactggatcattatctcggcccactaaacccatgtttcccccaactccaaagacaaacgtaacttggccttggccactaaattccattccaactca

SEQ ID NO: 16630 - DNA, 243 bp, Oryza sativa
  Clone ID: uC-osflcyp100a09a1
gctgtatcaatcatatttatcacgattatgattgctattatgtcaccaaatccattatttataccggtaaaaacttgtccctgatttttttccctttttacatagatgaagcagaacaaatgcggacatcctaaggtaatacctacgggctgtagccctctttatcaaaccaatacatacaaaatcttgtcatctccgatttttcttggagggtgactttatgtcaattgcttgaggatgcac

SEQ ID NO: 16631 - DNA, 130 bp, Oryza sativa
  Clone ID: uC-osflcyp100a11a1
aaataatgtaatgctcctgagatgaatttattaagttcaaaacgttgatttgaactacaggagaaaggaaagaatgatgagcaacatcccgagcctgactatataatacatacgaatacctatcaattac

SEQ ID NO: 16632 - DNA, 433 bp, Oryza sativa
  unsure (1)..(433): unsure at all n locations
  Clone ID: uC-osflcyp100b02a1
gatatgttccagatctgaataactgttctcatcaccatcatagttcacaacatataatttctcatcacaaggttcggtgtcatcatgcagcaatgtgctaccaatatctggagcatttacatcggtttaaagcatgggtttcgacgaactacagctgaaacaaaaccagtatagtacgtctaagttcagatgaccttatagttatattgaagctcagnaaattgcaatgaccacgtagctcctagnatttcccagcatggtatattcatctctggaagcacttgtaggtcacaagtgatcagagattctccaatgtgaaatcacgccacacatccccttgtgctggttggctttcctgattggcgggtgcttggatcctccgcctcctccgtcttcacggccatggcgggcggcacggggacatcgtcggctg

SEQ ID NO: 16633 - DNA, 156 bp, Oryza sativa
  unsure (1)..(156): unsure at all n locations
  Clone ID: uC-osflcyp100b03a1
gactgaatatccaggttgaatagaccaaaaggcccctacctacactggtttccaaacatggggngaattatacaagaagacaaagccaataaggggaacactttttctgatacatgccaccagggaggtagccaccacccaagatcgcccgaggtc

SEQ ID NO: 16634 - DNA, 63 bp, Oryza sativa
  Clone ID: uC-osflcyp100b05a1
attgataggtaaaaagaaaaaaaaacaataaagtataaatggttaaaggcctaaaccaagggg

SEQ ID NO: 16635 - DNA, 72 bp, Oryza sativa
  Clone ID: uC-osflcyp100b06a1
gtacaaagtactgataaaaatacagtgaaacatgacacggagagaggcatgcacaccaattatttggacaca

SEQ ID NO: 16636 - DNA, 210 bp, Oryza sativa
  Clone ID: uC-osflcyp100b10a1
caacagttcaccattcatatattcatgcaggcagcctgtttgtgcccttgtgcagatgcatttcatttatacaagtagaaggcactcaaatcagccaccacatgaacacacacattgttccatcattcgatcgatctacaccatgcatgcaccccggatcatgcaccttaacaaacataagagatcttacctttgaagaaagtacgtgga

SEQ ID NO: 16637 - DNA, 78 bp, Oryza sativa
  Clone ID: uC-osflcyp100c01a1
agggacccttatgggggaagtttttattggatggcaaactttggaaaaaacctcttaagtggacccaatggtgttggg

SEQ ID NO: 16638 - DNA, 172 bp, Oryza sativa
  Clone ID: uC-osflcyp100c02a1
ttttttttttttttttttttttttttttttttttttttttttttttttttttttttttttttttttttttttttttttttttttttttttttttttttttttttttttttttttttttttttaccctgaaaaaaaggcttttaaaaataatttttagggggaactataatac

SEQ ID NO: 16639 - DNA, 434 bp, Oryza sativa
  unsure (1)..(434): unsure at all n locations
  Clone ID: uC-osflcyp100c03a1
agactaattccccttcataaatattacattataaaatacaccaaaagagatatatggtacaggaatcagtcaaagctctgtaacagataatgcagctcaattagcagtgaaagaatcgaatcagctggttgggctaaatgtcacatatcctacaacaaatgctgaaagaaaaataatacactcaaagtaaggagataaatgatattacccacagtgcaagtgggaatatcttcaggccaacngattgaacaatgcaaagaaatatttatcctaaggcttcgaccatgtttcgttgtgaccctgccaatccatgcgttgacctgcaacgatctcggatcatcgtttcgatacatagaatgttccaaggagccccacaggccaactcaaggcttgaagcatggtcagtggaagtggccgttgcccttatgcttggc

SEQ ID NO: 16640 - DNA, 93 bp, Oryza sativa
  Clone ID: uC-osflcyp100c05a1
atgttatatatttaaaatgctaaaaatttaacaaatacatgacatacaaaaagcattaaaacatataaactttttgacctcgacttttttgct

SEQ ID NO: 16641 - DNA, 57 bp, Oryza sativa
  Clone ID: uC-osflcyp100c06a1
aaatagcacaaaatttataactatatcaaaactattttaacaatatagtttgaaaat

SEQ ID NO: 16642 - DNA, 392 bp, Oryza sativa
  unsure (1)..(392): unsure at all n locations
  Clone ID: uC-osflcyp100c11a1
agtaatgcttacctttacttcaatcacagaattttatatgtcaatcacactttcaggttacagacacatttcaataatcacatggatagtacataatgtatgttccaaccgggaaaccttatttccattgttttttcagatggacaaacatgatgtggctatangctatagtccacacaacaacacacacaagcaatcaagcacattcccaggtgcccggtgacgatgaaattaggaggctacttctgcttctcatgtgcctcccttctctgctgggcaattcgactcgaataggcctcccatcgaagcagcggcgaacagcctccttcctgaggaatccttcctcatctttcgcaagcacgtagagcaatatccactcccccttactcgcg

SEQ ID NO: 16643 - DNA, 66 bp, Oryza sativa
  Clone ID: uC-osflcyp100c12a1
gggaagggaaaaattcccaacattattttaccccagagcctcataggaaaaggtcaaggggtaaaa

SEQ ID NO: 16644 - DNA, 431 bp, Oryza sativa
  Clone ID: uC-osflcyp100d01a1
gtaattcaagacatgccgcattttattccaccacaccatcaattggcaaaaaatccacatgattccatatggctacagcggaattcaggttatttaaagctccgacttgtttgatcctcctaagaagatgcataataataagttaaagacatacaacaaatttatcctcaacatcaagcataaaacatgacgtgtctaaacttacaagataaatatcatatgagcaccaatacataataataatagtataaggaatggaggatataaacacaaagggcgcaacaggtattagtccagcactcattgaaaccgtcatacagatcggtgaattagttttgggctgaggctgcttggttcccgacaggaaatgccggcaaagttgcactattttcttggcccggagcatctgcacttgcgtgccgcataaattc

SEQ ID NO: 16645 - DNA, 88 bp, Oryza sativa
  Clone ID: uC-osflcyp100d02a1
aaacacaataagaaaggtattattgcaaaattgaaaaaaatgggtactcatgtccgtagaaagatatcataaaccaaggggcaaaaag

SEQ ID NO: 16646 - DNA, 52 bp, Oryza sativa
  Clone ID: uC-osflcyp100d09a1
gtcaaaataagtaaccataacgtaggtttgaagacaatataggtgtcgaata

SEQ ID NO: 16647 - DNA, 251 bp, Oryza sativa
  Clone ID: uC-osflcyp100d10a1
gggcatacatgcttcaatgagtttaaatttggcagccatgttggagtacaaagtagaagacatgcatgaacacataaaccatgttcattacagttcaggagggtattgtgtgaagccataaaccatacgtacaactgaaagtagttctatactgattattcatagcacggattaatctcacaatcccatgctttaaggaattacgttctgcagtatttccaggtgatggacttccctttgggcctacaacg

SEQ ID NO: 16648 - DNA, 151 bp, Oryza sativa
  Clone ID: uC-osflcyp100d11a1
atatgttaattacacttttaggttacagacacattttaataaccacatggatagaacatagggtaaggtccaaccggagaaacccttattttccattgtctttttcagatggtacaaacagtgatagtggactataagctatagtttcaca

SEQ ID NO: 16649 - DNA, 78 bp, Oryza sativa
  Clone ID: uC-osflcyp100e01a1
aattgatactccacatgagcagataattcaaagatagcttcaaagtaaaggttaaaaccaccgttgataatacatggc

SEQ ID NO: 16650 - DNA, 402 bp, Oryza sativa
  Clone ID: uC-osflcyp100e02a1
agaaaaaaagacgccccacattacggttgcagacaaagttgcagattccagcaatgacgcaattaaaaccgaaaattatctctcaaccatccattcgatccatcaactcatgcggttgatcgatcgatcagactggagagaaaaggttccaggtgacaggtttcatcaaaattaagcccggcagggcaaggcctgaaagctaccggttaacgcattttattttttttcaggaacaacctgacaccggcccgggttatttactccacttaatagaagcacctttgatcaggctgggtgatcttctccgtcagctttttacatcatatctactccgccaagttgcatccacggatgtaagggtgatcatactttatataccttgtccaatatgggctgtacttg

SEQ ID NO: 16651 - DNA, 103 bp, Oryza sativa
  Clone ID: uC-osflcyp100e09a1
ttttgttatttatgtttttttttttttttttttcaccacaccatcaattggcaaataatccacatgatttccatatggctacagcggaattcatgttgtttaa

SEQ ID NO: 16652 - DNA, 80 bp, Oryza sativa
  Clone ID: uC-osflcyp100e11a1
tttttttttttttttttttttttttttttttttttttttttttttttttttttttttttttttttctttttttcttattt

SEQ ID NO: 16653 - DNA, 178 bp, Oryza sativa
  Clone ID: uC-osflcyp100e12a1
atcagaagaaaacaatggcactttctttacatatctgcaaactttattggaagggacataaaggaggagcagcactcgctttaagtttagttatttgagagcaaattacaaggggcatacgaaaggaaaaggagaatttacatttggcctgccggtccaaaaaatggaaaagaaaatg

SEQ ID NO: 16654 - DNA, 85 bp, Oryza sativa
  Clone ID: uC-osflcyp100f01a1
ttttttttttttttttttttttttttttttttttttttttttttttttttttttttttttttttaaacaaaatttattcattttt

SEQ ID NO: 16655 - DNA, 280 bp, Oryza sativa
  unsure (1)..(280): unsure at all n locations
  Clone ID: uC-osflcyp100f02a1
aggatcaaaacatttctattaccacaactttttaaggatggaattgagtagcaatactttcaccccaaaatacagtttagcgacaatatcttagaaaagccgcttgctttgccgccatggtctggtcaagtcttgagcagagcagcttacacaaagaacacgagnatcactataaagccaaacggccaacgtaaacgatagaaaattacagggttctttttttggtcttgaagattacaccgaagccggttttcgttttttctttttattttttttagtc

SEQ ID NO: 16656 - DNA, 424 bp, Oryza sativa
  unsure (1)..(424): unsure at all n locations
  Clone ID: uC-osflcyp100f03a1
aaaggaactggcaatgagacctgactgttatatttacatgataatcatatatacaaagtttctaaaccgaaccaatcatatgaacaacagactgtttaattgatggtaactattttcacaagngattagctgcagagcaggtatgaggctgatgaacangccaacaagtctaaagggtcgtcgcaatgcaattcaattttgaaagtttaacgttagaatgagtgcatcttggagtagaaaaggtagatgaaagtggcgtttgcaatttgggaccttaactgaggtccaattttcaacacgcctccggtgttccccctctcgncttttcctgcgcgacgagtttcggtacctagctgccctttggtcccctgcaccaaacgcatagagtttttcctgaatctgtcagtgcaaatgtatgggcatt

SEQ ID NO: 16657 - DNA, 54 bp, Oryza sativa
  Clone ID: uC-osflcyp100f05a1
gtctgttatattattgtcaaaatacagttcaaaatcatagccataaaaacaata

SEQ ID NO: 16658 - DNA, 58 bp, Oryza sativa
  Clone ID: uC-osflcyp100f06a1
cttattgtgctcatttgctcattacatctgcattgctccatccaagatccatattctg

SEQ ID NO: 16659 - DNA, 89 bp, Oryza sativa
  Clone ID: uC-osflcyp100f07a1
aggttcaatttatttttattaccacaactttttaaggatggaattgggttacaagtacttttcaccccaaaagtacagtgctagcgaca

SEQ ID NO: 16660 - DNA, 399 bp, Oryza sativa
  unsure (1)..(399): unsure at all n locations
  Clone ID: uC-osflcyp100f11a1
atccaaaatctgtgacattgcacaaaaatcaaccagttcaaaaggtataccaggtcaaataaacagcaagtaacaaaactccaccaaaaaggcaactgttttaactccgaattcaagttcctaaatagttacttgttgcaactgattgattttgctttctaaacatttgtgctgctcacctttgaagccattttgccatcccaggcaaagtccttcgcccttcgaaccggctccctggtccttcaatccatggccatgtgacaaccgcttcttttctggggccctcattcagnaggaggttcaaccctttgggtccacttcattagaggcctccattgtccgtaggaccctcatcccatgaacggaactttggggggatgtccctgaaccaccggaaga

SEQ ID NO: 16661 - DNA, 122 bp, Oryza sativa
  Clone ID: uC-osflcyp100g01a1
acattctgggaaactaataaaattattttggcaaaaacatcatttaattctttatctttatacagcccacaacacccacttgatcaaaatttagtcctactaaacccatttttccccaaccc

SEQ ID NO: 16662 - DNA, 346 bp, Oryza sativa
  Clone ID: uC-osflcyp100g02a1
aataaaaatggcagtagatacataagaaataatttaattacactagctagcagtggcacatttgaaaaaacaacgtgaaataaaagggaaaaaaagcaagcagaaagctagctcatcactttattccagaaacggtacagtgtagtgactcgctcgctcctccctctggcgaaataatgtcgtcaatgcctcaatcgtgcagcagcaagtgcttggtcttccggtgaatcgctcgttcacttggtcggttcgcttggcggttaatgtgccggcggttttgtgctttttttcggaggtgctttcaggtttttgggctcaggcttaggctttagggtttcggtttcag

SEQ ID NO: 16663 - DNA, 382 bp, Oryza sativa
  Clone ID: uC-osflcyp100g03a1
aacttggttcttcaagcacaacaaaggtccaacaagatttaggttcccacaaacacaacgatacaagtaccagacttgcgttgttcacgctctgcagcgtcacaaacacaaatacaaaacaagtagtactacaatacccagaatagttccaacaggcttatggtagcatacccgtttttaacgggatcaacgacagagttgcaagttgctaaaattaacattaacatagttacttacatttccttggccgcatacgggggtacagctccaagctttttagcagttaaaacatggacaccgctttcacgtttttccttgagagcaggttagagggcctgacgggctacattttccagcaaccctggcgctgcgcacacctggt

SEQ ID NO: 16664 - DNA, 97 bp, Oryza sativa
  Clone ID: uC-osflcyp100g05a1
ggagtgaattttatttattatttcctgtgtattacactatacagtaagtgcttcaagatacatggcacatatatggactgcatttctggaaattcgc

SEQ ID NO: 16665 - DNA, 60 bp, Oryza sativa
  Clone ID: uC-osflcyp100g10a1
cattacatgccttatttttttctacaagataaaaagaccccgggcgattttggctgtaaa

SEQ ID NO: 16666 - DNA, 188 bp, Oryza sativa
  Clone ID: uC-osflcyp100g11a1
aaaaaatcattcttttgttcacataagttagattctttttttttcttttcgagaaaagaagatagatggttacacttgctgagcaactgaaatcctcagtccccttgaacgaagcagcattatttcccaagtcaagcaaattgaaaatgtcaaccattgcgctggtcttggaatagtctccgatcagt

SEQ ID NO: 16667 - DNA, 441 bp, Oryza sativa
  Clone ID: uC-osflcyp100g12a1
atggaattgcatacgagctttgaaaacgcgtatggttgttacaactttatatatatacccacactgccctgcagcaacgggggaaggaacccctagtaattaactattcgacactaacaatcaacaaagattaacacaataacatcaatcaatcaaacggtaacaaattagctgaactcaggtacaaaatgattaaacgtcaaaaggccctacttacttccactgttaaaagtacctacacaacaaacgtcaggttcgggatccgtgataatttaacagaatttagcacacctgtcaaagaaaataaaacacaaaattagtaaaatgaattttctgttaaaagaagggaaaaaaccaaacccagggtcctccccaaatccgtggacatcctgatcgaatgacgtgacatctcatattctcatcgattcagtccttcatgag

SEQ ID NO: 16668 - DNA, 116 bp, Oryza sativa
  Clone ID: uC-osflcyp100h01a1
gaaggttacacagctttagcattatttaaaaaacgatgttgcgcttgtgtaaagttaagcgcctatgaatagatcaagacttttttacacaccagggtacaacgcataagttacac

SEQ ID NO: 16669 - DNA, 392 bp, Oryza sativa
  unsure (1)..(392): unsure at all n locations
  Clone ID: uC-osflcyp100h03a1
acatgataaaattattattgtcttgaattatgtaaacgatgataacaaatccttttccagctacaaaagaaccagcataacaacaaagaattataaagttgcttaagtaatctctcccttcatctcaaaaagagctatatctagggggtcctaggtccacagcaacactttcacttaaagggtacttttccatctctgcgacacacaagncttcccaggattcaatctacttggcccttgccgtttctcgacagcaagcagttcgaggggtttcagcttcatcccaggcccttgattccaggtgtaccatgngcattggcaagccttgacgaagttaggggttcgatcttgccgagccttcttccctgacctgcttggcgagggagaggtag

SEQ ID NO: 16670 - DNA, 310 bp, Oryza sativa
  Clone ID: uC-osflcyp100h07a1
acagaagaattttttgaggaaaatccattttggtgatctttcaaaaatcatacaaggcactcttgtaggcatacataaatttctctcaccatatagtgagtctcaaactatgaagcataaatatggctttgtcatcttgaatacgtatcaaccattcattgtggacaagcaaatggttggacattcgacgaataaatattacccaaatcaatatagttctacaaacatttttcctgataaaatatattttttagagaggtgcgaagggagaaagatttttagttgacggggtattcctctgttagattaa

SEQ ID NO: 16671 - DNA, 163 bp, Oryza sativa
  Clone ID: uC-osflcyp100h08a1
acagaacatgcatttcagatcctgaaaatagctgcacttaaggatcaactaccgttttcgatgtttattgacatgaaaattccagtggttatcacttccagcaacgaacagaaatgaaaatgaaagatggatgaagtctaccaaataccaagtaggcccaata

SEQ ID NO: 16672 - DNA, 89 bp, Oryza sativa
  Clone ID: uC-osflcyp100h09a1
ccttaaattgtacgtgctttattttaatctactggataaaaagaaaatgggccactaaaaatcaagtaagtaaaaaatttcaagaaagg

SEQ ID NO: 16673 - DNA, 82 bp, Oryza sativa
  Clone ID: uC-osflcyp100h10a1
atatacattacattctttttttttttatacgagataaaaagatagcgggtgacagtggtttaggaaactgaaatactaagaa

SEQ ID NO: 16674 - DNA, 128 bp, Oryza sativa
  Clone ID: uC-osflcyp100h11a1
gagaaatgaagatagatggttacacttgctgggcaactgaaatcctaagcccgctgaacgaagcagtcagattttcccacagcaagccaaatgaaaatgctaacccactgcggctggtcttggcaatt

SEQ ID NO: 16675 - DNA, 143 bp, Oryza sativa
  Clone ID: uC-osflcyp101a02b1
ttttcagtaccaagctgcctgagccacaacaaacgacgccttcattcatcgcctccgggcgatggcaactgcaaccgaggaagcagcccgaaaacagtgatgtctccaggggaggcggcgcatgatgaggggacagggctaaa

SEQ ID NO: 16676 - DNA, 449 bp, Oryza sativa
  Clone ID: uC-osflcyp101a04b1
atttttgtatgtggattttgctgaatactaccgggggggaaaattatttcagcagacccaagaaatggttgatatcctgagcagaccaagaagagaatcaaaagaacttacttttgccaccaagtattcccaaccattctttgctcaatatgctgcttgcttatggaagcagaacctgtcgtactggagaaatcctcaatacactgcggtccgattcttctacaccgtcatcatttccttgatgttcgggacaatctgctggaaattttgggtctcgaagggagacccaacatgacatattcaatgccatgggtgccatgtacgcagcagtactcttcataggaatcactaacgccacctctggtaacctgggatttccatcgaaagagtttgcttgtacagaaagagggcagctgggatgtcctcggcactgccttttgaattttccc

SEQ ID NO: 16677 - DNA, 120 bp, Oryza sativa
  Clone ID: uC-osflcyp101a09b1
tcttaaaaagaaagaaattaaaaagaaaatcacggcgggtgagcttgcagagacagcgagagtggtgagagttgctgccgccgcggcggtgctcgtgctggcggcggcggctgcggcggc

SEQ ID NO: 16678 - DNA, 209 bp, Oryza sativa
  Clone ID: uC-osflcyp101a10b1
ttgtttttatgcaaacgagcaccacacaccagcggcggggagtagtcgatcgatcgtgagcacacacgaccaagatcgagatggcccgtgcacagctggtgttggtcggcctcgtggcagcggctctgctcctggcgggcccacacaccaccatggccgccatcagctgcggccaggtcaactccgccgtgtcgccctgcctcagctac

SEQ ID NO: 16679 - DNA, 150 bp, Oryza sativa
  Clone ID: uC-osflcyp101a11b1
tcactaacaagggtgagatctgcgtcgccgggtcgggaatctatgtccaggaggggatctactatgcgttctagaagaaggcgaccgagatggccaagaaatcgggggtcggagatcctttcaacccttgagatcatcaaggtccctcaa

SEQ ID NO: 16680 - DNA, 364 bp, Oryza sativa
  Clone ID: uC-osflcyp101a12b1
ctctcctctccgctgtggtttcttgctggttcttggaggcatccacttggttaaatgatgggtgtaggtggttctaaattttatatataatttattttttttttatattttttatatttttatttttttatttttattattttttatttttttattttattttttttttattatttatttttttttttatctattttatttttttttaattttattatatttacatttctttttttttatttattattttttaattttatttcttttttaatttcatatatctaatttttttatttattttttattttaatttctttatttattttttatattatatatttattatctttttttatttaatatt

SEQ ID NO: 16681 - DNA, 336 bp, Oryza sativa
  Clone ID: uC-osflcyp101b01b1
cgtacgtttggggagagtcatgttggcctccactggctgctccgccccgccgccctcctcctcctccccgtcaatcccgacccacctcgccactctctgctgctgcttcaggcctcccgctcgcccaccttggcctcgctctcttcttcttcttggtgccttcccaccgacgacccgccccctcccccgcgccttcgttttgtcatcgaccgccccagcgaaagactacgagtttacctgatggtggcggagaggtggagctgaggctggacatatgaaagctcggcattgacaatatacagagacgcatttgtcgaccgcgctcgatactctctc

SEQ ID NO: 16682 - DNA, 370 bp, Oryza sativa
  Clone ID: uC-osflcyp101b06b1
cagtttttataacgaaagcaaacggaatccagatctcacccaccccaccccacccacacgacgagagaccaaaacacgcgggaaaacgctcccgcgccgcgccaaacctggcctcgcgtgaaccggcggcgggcccaccgccggcgtgcgcacacgtgccaccgccaccggcgtccagccggaccgacgacgacgagggcgacgacgacgtcacggtgttggttcagtgtcagccgacgctgaccagccgggtccacttactatctgcccccaccatcgtgctgtttgcctgcctttctcttgctttgcttttttgagctcgttttctcgtgctctttttttctcctttggtgctactcttggctttcta

SEQ ID NO: 16683 - DNA, 159 bp, Oryza sativa
  Clone ID: uC-osflcyp101b12b1
ttgttatgttcggacccttggacccaacctatggtacggttataatgacgccgggatcggtgacaccattgtagaccccctcaaggacacattaggcccgttgcttaacattcttattatagcttatggccgtcaagtcccttgtgtttgcccctttct

SEQ ID NO: 16684 - DNA, 308 bp, Oryza sativa
  Clone ID: uC-osflcyp101c02b1
gctttcttttgacgctttgtcttctcctcgccggcgacgagcggtttgcccctcgagctttgttgccgtccatcacgcgagggtggacggggtaattgaaaaggatcaacacgttctatgacataattactatgcacatagcatacaatttcaatctctactgaattccgcggtaagaaaagccttaattttacaacatcaatctggctatattgtaatccttgactttcttggatacgacttatttatcactggcttcttgggtctttttttatccaaacatatctactcttactccaccgtaaaaa

SEQ ID NO: 16685 - DNA, 375 bp, Oryza sativa
  Clone ID: uC-osflcyp101c04b1
attttgatttggctcctaaccgtcttacttctttcaagaaccagtttcaggatcaagggtctgctcggcacttctctgacccatactactatgtatctgcacagacttccctaactgttgaatcaagcacacagatgctcacagacagaaaggagttacatttctggaatggccatagaactgtgtttggtgattcgagagaccaaccacagaattatcagattcgaacataacccatcagcgtttacctaaatgagctacttgaccgacccgtacacccacgagcgaatagacctgccacatcaatagcttctatgcgaattggaaaaatgatccagctgagaatggaagaataacctgtatgaatgatttcct

SEQ ID NO: 16686 - DNA, 134 bp, Oryza sativa
  Clone ID: uC-osflcyp101c09b1
tatcttacttaagtgttgcggcacccagctctttcgttgttgctattctgcatctacttatcttgggattcctatcaggctagccacgtgagcaaaaacttttctgaaaatactgatgattgaggactgaatct

SEQ ID NO: 16687 - DNA, 498 bp, Oryza sativa
  Clone ID: uC-osflcyp101c10b1
gctctctcctctctctccctcttccgccgccgcgcttggggaaggaaggagaaagcaagccatcggcccccgtctacgcctccgaagggacattgttgctagttggtgatggctgagcaggctaatcaaccgactgtccttcagaagttcggtggccagttccaccttggctccagcttttctgaaggtgtacgggctcgcaacatctgcccatctgtctcatcctatgacaggcgctttaccacaaggagctacatgacccagggccttgtcaatggtggcatcaacgtcccaatgatgtcgtcctctccaatttttgctaatgctccagctgagaaaggtggcaaaaacttcatgattgatttcctcatgggtgggagtgtcagcccgcagtttcaaagactgctgctgctccgattgagcgtgtgaagctgcttattcagaaccaggatgaaatgatcaaggctggtaggctctcagagccatacaagggtattg

SEQ ID NO: 16688 - DNA, 168 bp, Oryza sativa
  unsure (1)..(168): unsure at all n locations
  Clone ID: uC-osflcyp101d06b1
cttanaatattccaatggtggtggcattgaatgggccacctcacccactccttttgtagattttacatattaccccttgaacttttaatgttacataacaactttattcttgtgggattgccacatatacaactaaattaatgtgggtatttttctataacattttga

SEQ ID NO: 16689 - DNA, 357 bp, Oryza sativa
  Clone ID: uC-osflcyp101d09b1
tgtttttcgttgaattcgccatatatattaatcaccttaaaaattaagatagcatactacatttttgttctccagccttttttttatatttttttttcacaagtgcgagatacgccaccacttctgtgatctgttgatcgatcttacacatatgcatgcgtgcgtacacacataacgcgcggacgcatgcatgagctaggtgtaattttatagttgatcaatcattcatatcgattgatgatcagttggctaattatagcttgagcttggcggcgatggctagggcgccggtgacgactcggttgacgttgttcttggagtccttgaccctctctggctctacttcagttccctctc

SEQ ID NO: 16690 - DNA, 81 bp, Oryza sativa
  Clone ID: uC-osflcyp101d11b1
acgcctccccttaccgtaccggaactcccgtctcgacccaacccatccccctaattttattccaccaaaaatgccaaccta

SEQ ID NO: 16691 - DNA, 139 bp, Oryza sativa
  Clone ID: uC-osflcyp101e04b1
cactaactcagatggtcaagcctcgtgagaggaagtccaggtatgatgatgctggcatgactgaacccaagggaaccttgttccccatgtgtggcatgaaccttgtttttacccttatctaattgtcctgcaaattact

SEQ ID NO: 16692 - DNA, 108 bp, Oryza sativa
  Clone ID: uC-osflcyp101e05b1
tctatttttacgataggatcaagccatatgacagggaggccaagtgaactacattcagctgatcattgctcgaaaaatccttgatttagccttcttcaaaacttttct

SEQ ID NO: 16693 - DNA, 101 bp, Oryza sativa
  Clone ID: uC-osflcyp101e10b1
gaccgacccacgcgtatatttactgtatagagtaagcctcggagagggagggcaggtatgtgtgctgccatgactgttccaagggaaccttgttcctatgt

SEQ ID NO: 16694 - DNA, 403 bp, Oryza sativa
  Clone ID: uC-osflcyp101e11b1
tcgtgctgcggtctgacaggcgcccatatgacccggagggcaagtgaactacactgagttgctcattgacggcaaactgccgtgattcagcagtctggcagagactttcccaactttggactatcacaaagctgagctgatagcgcatgcggctgcaggcgaatcgagagacattcactgcgagcgtcatgcggaccgcaggggtttcaatgtaaggccttgagcaaagatcacatgcctgatgagagatgcccagaggactcgtggcggcgggctcccttgattgagaggcacacctaagaaattgccagcattggagacactgatgacaggcggagagccatatgcagacgatgcctacattgaagcgacaacggaggcaccgcgctgatcgcggcaccta

SEQ ID NO: 16695 - DNA, 249 bp, Oryza sativa
  Clone ID: uC-osflcyp101f07b1
tcgttgttcgcgtggggcgcgattgcggctaggggtgtattcctttcctcacaaacacaccctctcccccctcactacggctctgtcctctctctatccgccgccgacgccgccgccgactcttgcctttcccacgccctcgatcttggcggctggagagccatggcgatgcagtccggcaggcgagcctcgtagccaggaggggccagttcctctagtcacccaccccacacacgaagatagcgagct

SEQ ID NO: 16696 - DNA, 96 bp, Oryza sativa
  Clone ID: uC-osflcyp101g02b1
tattattttgctgttttagggtcaggatttctcaagctggatgcttgtgcaaggaaggacactaaaaaaattgcccacactgtgaaggaatgggca

SEQ ID NO: 16697 - DNA, 151 bp, Oryza sativa
  Clone ID: uC-osflcyp101g03b1
tgttgttttaagtactatatggcagtgaaactatctatggggttactgcaatatgaggctggaacatgttacttatcttctaccttatctgtacttgctatagtggctgtgaaccttgtggatctgaactctgaagccaatgttactatat

SEQ ID NO: 16698 - DNA, 174 bp, Oryza sativa
  Clone ID: uC-osflcyp101g07b1
aattccctctcactcccactaccatggatccttgcaagttccggccgtcgagctcgttcgacacgaagacgacgacgacgaacgcgggagctccggtgtggaacgacaacgaggcgctgactgtggggctcagggggccgattctccttgtggacttctcattctgttcgagaa

SEQ ID NO: 16699 - DNA, 177 bp, Oryza sativa
  Clone ID: uC-osflcyp101g10b1
tcctgtcagtcctagctccagctagaatccctccttgttcatccaccaccaccatccacatgattgcatttgtgcagattcctggagaattaagctgtcctctcatgccgatctgacacaccttgttgttgctgctgctgctggtagccgcacaatctcatggggggattttttctc

SEQ ID NO: 16700 - DNA, 176 bp, Oryza sativa
  Clone ID: uC-osflcyp101g11b1
accatatcgtgcggcggcggcggcggggatggcggcggcgttgcgcgggatcggagcgaagctggggaaggtgaaccacgagaaggtgacgagcgcgctgctgctgggctcattcgaggggctggggcggcggtcgtgggagcagcactaaaagatcgattagctggagggctgga

SEQ ID NO: 16701 - DNA, 373 bp, Oryza sativa
  Clone ID: uC-osflcyp101h01b1
gcgttatgtgcgacggcggcgtgtcgtgcctggtggtccgcatcctggatgatcagggacgaaaccatttactggagatcacgctgcccatgaactacccttcaagtcctccttgccttgtggcagatgttccttatctaccagaattacagtggtcaaaaggctcaagactaaaagatgttgtctgccagttccaagagcacctgaagatattgcaagattactggtctataatggatgacattgataagggcctttgggttgttgatccaacaaagccaacctttgctatgtctcatcgccggatagctttaggtgatgacttgtttcttttactacatggtaaatgtgcgaaagcccaaatcattaccag

SEQ ID NO: 16702 - DNA, 315 bp, Oryza sativa
  Clone ID: uC-osflcyp101h02b1
attttagtcgccgccgccgccgctcacccgcgcgggggggagctccagcccgtagacgtggccggatctccccgatggccgggaccttcaccgacctccacaccgccgacgggctcaaagccctcgagcagcaacctctccggcaagacctacgtctccggaaacgcgatcagcaaggacgacatcaaggtgttcgccgccgtgccatcaaagcctggagctgagttcccgaacgctgctcgctggtatgataccgtcgctggcggcctcgcttcaagggtccctggcaagggcagtggagtgaatctggctgga

SEQ ID NO: 16703 - DNA, 319 bp, Oryza sativa
  Clone ID: uC-osflcyp101h05b1
tactcttcctgatatgatgacctattgtagtgggagggacgtaactagtccctgggatgtggtagaccttgctgtgcttcactgcataggtgtatattgcccagctaccgatggaacagtacctgccattggcacagctgctggccacttcagccgtagaggcccatgggttgctactgcattcgcttaaacactctgggaggctaccgggaacactctgtctgctgctgaaggattgcattaaccatggacgtcgggaacggttagctcaggttatttggctaacatccgtccgctgtatccgccttagctcactgca

SEQ ID NO: 16704 - DNA, 496 bp, Oryza sativa
  Clone ID: uC-osflcyp101h10b1
gtgttcctggatgtgatagcctattttggttagaggaatgacactggggttggtatttggcataccttgcatgtctactgcacctatgtatatattggcgagctagccatggaagagtacatgccattggcacagttggtgggcacttcagctgttgaggccgatgggttgctactgaacttgcttaattactttgggaggctacatgctacactctgtcatgctgtgaaggatttcattaaccttggacgtcgggcacgattagctcaggttattcggctaagattcgtccgccgtatccgccttagttcactgcatcatataggtcgtctggttgcttgtcaatgtcacagttcatcacaagtgggaagaatgggatagctttgtaacgcagggaatatctttgttggcatactaaatatgagcagcgccatattcgtcttcaggctgatgccaattgcgtagatgtggacagattaccataacccagtgacat

SEQ ID NO: 16705 - DNA, 124 bp, Oryza sativa
  Clone ID: uC-osflcyp103a02a1
gaggtggttatttttttatttatttatatatgtatgcatgacaagaaaactgagagaaatgcagtagtggttagtacacccacagaaacactatgtcatggttgacaagacctcaaggaggatg

SEQ ID NO: 16706 - DNA, 63 bp, Oryza sativa
  Clone ID: uC-osflcyp103a03a1
gaaacgtgtgtgtttttcaatactggctagtacaccaacagaaacactatgtggatgtttgcc

SEQ ID NO: 16707 - DNA, 247 bp, Oryza sativa
  Clone ID: uC-osflcyp103a04a1
agtcaaactaaaatattgattttttaagcttggttaaataacggttacataagcaacaagtgtcaaataagtgaatgatagaaaaactcaaagattatttaactaggaacctaaattgggaaacaaacactaactacacatctgaatagcaatgcaacaggttagtgccatacaggatacattgaaagtaagctttaaacagaaatacgccaattgtcaggggtcatcactatacactgtgactcag

SEQ ID NO: 16708 - DNA, 211 bp, Oryza sativa
  Clone ID: uC-osflcyp103a05a1
aggtgagaacttgcatttttattgaaaaatactagctgttactgtacaagacgggcgttggtgatccaccccaacccatcggtcaaacatggcacataattacattgaatatacatatatatcctctttattggtgtttctgttggtcttcgtttatccctttctggcacgaaactacttgggagactggcagtgaatgtcttgaaaccac

SEQ ID NO: 16709 - DNA, 180 bp, Oryza sativa
  Clone ID: uC-osflcyp103a06a1
ctaggtgagaactcgcatttttattgaaaaatactagctgctactgtacaagacgggcgttggtgatccaccccaacccattcggccaaacatggcacataattacattgaatatacatatatatctttttatatttgtttttctttgtcttctttattccttatggcacggactacttg

SEQ ID NO: 16710 - DNA, 135 bp, Oryza sativa
  Clone ID: uC-osflcyp103a08a1
gggccaaaacatccttaaaccaattttaaaagtttgttggggaatcccacagttgggccccatttgaaaaaaatcaaacttgccctaacttgggttccacaccacacaaagagaacctggggggctcccaaaggg

SEQ ID NO: 16711 - DNA, 74 bp, Oryza sativa
  unsure (1)..(74): unsure at all n locations
  Clone ID: uC-osflcyp103a10a1
tagttgtgcccgcccttcttttntnntttttttttttgttgttttttattttctttatttttttttttttattt

SEQ ID NO: 16712 - DNA, 72 bp, Oryza sativa
  Clone ID: uC-osflcyp103a12a1
gagcaaagtttcataacagggtattaatgttaaggggtgcatcaacccaaatccaacacatttgcaggttga

SEQ ID NO: 16713 - DNA, 83 bp, Oryza sativa
  Clone ID: uC-osflcyp103b01a1
aattggcaatgttttgtttttataaatttacaccagtcctctatgctcgtaagatgtaccagacgtacacccaaattaccttg

SEQ ID NO: 16714 - DNA, 205 bp, Oryza sativa
  Clone ID: uC-osflcyp103b03a1
gaagaaacttaaaagtgttcctgatgtgtttcatcatccgttctgtcactcacaaatggactcaaaatacagacccagatcaagtgtggtgttcaaccaaaatgttaactggtcgaatggcaaggatggccgtggttttttctagcaacactgcagtatttttgtaccagaccaattcctcctagacagtaaggaaattccggac

SEQ ID NO: 16715 - DNA, 74 bp, Oryza sativa
  Clone ID: uC-osflcyp103b04a1
gtcagatataaatttggagatttattaactcccggggcttgttacaaggatgagcaacggtgggtgacagctca

SEQ ID NO: 16716 - DNA, 183 bp, Oryza sativa
  Clone ID: uC-osflcyp103b06a1
acgtcaaaccacgaacttggatattaaagattccacaaataaggttcacataaacaacacaggtcacagcagcgaaagctacaagaaaaccctgcataatccacaaatgcacatgacttgtcaaaaccagtacacacaaatcttgactagaatagaagacccactacggtacaagatgcatag

SEQ ID NO: 16717 - DNA, 362 bp, Oryza sativa
  unsure (1)..(362): unsure at all n locations
  Clone ID: uC-osflcyp103b09a1
ggtggacaatacatttgcaagcttcattgaacatttatgtagcgaacaaacagttcattgacaacattttgcaaagtaggtaggggtgctcaatcatagcagtagcacatggtgttccaaaccatttacacgaatagcattaacacacgttcaaagacttttgggcacaatcaaatagagttttatgttccctaggagtatttggccgaagcctaacataaacaagaacacccttttttttttaaacttttcacaattagccaaaccattgttagtacagaaccataaggncagaacctccatccttaaaaactggttagactttctttggttttttcagaaaatttcccttacagttcatt

SEQ ID NO: 16718 - DNA, 429 bp, Oryza sativa
  Clone ID: uC-osflcyp103b10a1
ctagtaccaagcttttaactttggtatagattgaaatatcctgtacaaatgaaaataactataatttcaccttgctaaaataattacaaattacaaagatacaccaggcctgacttcgaacaaaatacaaataattttgctaaccaaattcaaaattggggcaactgattttacagcgggggtttacaagtgcattgtgcatatcattgttgttcgggtattcctctctttcgtaacctttcattcttttttgggcaatgcattgatcttgctcctcgagctgagtgttttttgagctttaattctctgaacttcctcagcaagtttcggtgaccctttgctgcaagttggcgatgtacgactgcagtttcttctttctgaaatgcacttcagatggctgagatgaaccaggtgtacttgcatcagcag

SEQ ID NO: 16719 - DNA, 293 bp, Oryza sativa
  Clone ID: uC-osflcyp103b11a1
gataacttaagaattaagatctccatcacataaaaacatacagtgactgagtactggattacacgattgagttgttcagggttcagataggaaaaacatcttggggtactatgagatagaggtgaatcgacagtattgcgcagcagtagccgcgcgggtaaatcaggacattcacgtattgcgtttgccatgttcgtccggcctgcagcagcggtcggacgcggggcctttaagaccctgcctctttgaaatgggattcgcccctggatgaatcacctggttggttatgatgg

SEQ ID NO: 16720 - DNA, 258 bp, Oryza sativa
  Clone ID: uC-osflcyp103b12a1
agcagtaatttttggtttttatttaccaaccaacccatcggtatacacaaagctgcatgggattcatttattacacagaattccacacgtgatatatatgattaccgcgcacagtgaaacccaacatatatacgtgaaaacccaacgtacggagatgtctacttaacgtaccttgattcaccttcaataatttttcttggaatagatcctcctttagtggcaaaatccataaagtgagcaattcgtgggaatggttta

SEQ ID NO: 16721 - DNA, 317 bp, Oryza sativa
  Clone ID: uC-osflcyp103c04a1
gtcattccattcgacgtttagttattccgccatgaacaccacaagcgttttacaacagcaagcaacggacggagccaactcaatgacagacaaaccgcacaagacacgtacgtccacacggtacgccgaccatgacaacaccctaaaccgaacaatggtcgtgagggtaaaaaaagcgatcggaaattaaacacgacagggtaccaaggtcttgcgaacgaccggtaggctcaagcatgctgtacacataacattagtactacaaattccacagggcattgacaccacgcctgaatccgacctaactttggcacttg

SEQ ID NO: 16722 - DNA, 73 bp, Oryza sativa
  Clone ID: uC-osflcyp103c05a1
gggggtcctggttgggtgcaggattagagttcgccacttgatatagcgtgcctgaagtttgggcagcagtcct

SEQ ID NO: 16723 - DNA, 167 bp, Oryza sativa
  Clone ID: uC-osflcyp103c06a1
aattgtcgaatctaatattggcaaattgttaaatttcccggccgaatttaaggtcgatccattttgctttaatgattacagtcagccactgtgctaccctacaaaatcaagttgtgtcctacaatggacatatacattgggtatccgtttggagctctaatgcaaaa

SEQ ID NO: 16724 - DNA, 170 bp, Oryza sativa
  Clone ID: uC-osflcyp103c07a1
gatcgagtcatttacataaaaagctttatacattatagactcgtatacaattaccctgccacggtaatatctgaacaagaaaacatatgccaggttagaccctggctcccctggattctcaatgcttgtcgttcgaagggattggtccggtttgaattgtttgttacagg

SEQ ID NO: 16725 - DNA, 226 bp, Oryza sativa
  Clone ID: uC-osflcyp103c08a1
aaaatggagaatgtgcaagacgcaaattcgtagcaatagacagagttattccatgtaaacagaccacatgcatataatacagaccattcaaaagattggttaatagtaaaaaatacaagtttcgttgaatgggcgataatactttaaaggctaccctccaaattagccgtgtagccatttgggttagccaaaaccaagccatattaacctttagggaccaaaccat

SEQ ID NO: 16726 - DNA, 232 bp, Oryza sativa
  Clone ID: uC-osflcyp103d04a1
aagctccaagcaagagcagctgcaggctgcatctccattattcatataacatattgaactagcaaaggttccattacagcatatgcactctcttagttgaacataagggccaaaccgacccacggggttcaactttaagcccagcagggagatagtttcatagaaaaaaggtgcacactttgcaacaatccatattcaaggggacttcaacggtattgtagggtacatttat

SEQ ID NO: 16727 - DNA, 107 bp, Oryza sativa
  Clone ID: uC-osflcyp103d06a1
gtcattccattctacgtttaattgttgcgatatgaaccccacaggcgtttttcaacactgagccatggtccggagcccacttaatgtcagccaagccgcaccagaca

SEQ ID NO: 16728 - DNA, 204 bp, Oryza sativa
  unsure (1)..(204): unsure at all n locations
  Clone ID: uC-osflcyp103d09a1
atatatatatgaacaaatagcctgtgcaagttgcacggtgtaacgtatgggttattgactagtattacataantccatgacctgtaatacgctaacactacaacaattggtcaaaacagacattgccataccaggcacatgngccttaaaaagaagtcaaggtaaaggggagncttttacatttcaatggttgttggttttcgc

SEQ ID NO: 16729 - DNA, 133 bp, Oryza sativa
  Clone ID: uC-osflcyp103d10a1
gggttactaaattgtaaaccttttcattagagagctgaacagttcctggtgaataaacagttcccccaatgaatgcaaactgcaaaattagttgcatttgcccattgatacaactctgttataagcttgaaag

SEQ ID NO: 16730 - DNA, 170 bp, Oryza sativa
  Clone ID: uC-osflcyp103d12a1
gagctagtctcggtacgtatgcaatccctgacgtacagctggtagcctcttttttggccgccctcctttttttttttttttttttgttattccattcgacatttaattattccgacatgaacaccaaaggcgtttttcaacactgaggcattgtcggaagcccacttaat

SEQ ID NO: 16731 - DNA, 202 bp, Oryza sativa
  unsure (1)..(202): unsure at all n locations
  Clone ID: uC-osflcyp001d09b2
gacgccaggataatacacatcaatttcatcataattagcgttcttattacaaggcaccgtgcagccattattatcagtacatcacaaaaggcaaaccatgcctttttttttttcttgcaaatcaaagcacagnaatacccatgcagtgagaacagaatcacctgccattcacgttatttggcaccaaggattactaaattaa

SEQ ID NO: 16732 - DNA, 111 bp, Oryza sativa
  Clone ID: uC-osflcyp001d10b2
ataatgaatgatttacaagaaaggattacagtttttagttacagtcaaagacttcagtatgcacatattttcgtctaaagctacattaaatggacataatttagggttaca

SEQ ID NO: 16733 - DNA, 59 bp, Oryza sativa
  Clone ID: uC-osflcyp001d12b2
aatctcaaattggggatctccaaaatttggattgattgagctgaaagcctttgaaacgg

SEQ ID NO: 16734 - DNA, 156 bp, Oryza sativa
  Clone ID: uC-osflcyp001e02b2
atcatggacacccagcttttataattactaataatcaggtataatcacaaaggtcattcgcggtaaattacccattccgaacactaatgcgtacaaggcaacgtattattgatttccctactgcatacgaattcgttggactggtcggacgacacg

SEQ ID NO: 16735 - DNA, 160 bp, Oryza sativa
  Clone ID: uC-osflcyp001c12b2
ggttcaaaatgtccgagaatgcatacctgaatttcatgcgtgcaatttcaccaaggttttctacaaaactggcatggaaaaagcacatggcaagggtgaaacaacggtaatgtagttgttaatacattgttatttgtccgggtcaaggctagatgactag

SEQ ID NO: 16736 - DNA, 109 bp, Oryza sativa
  Clone ID: uC-osflcyp001d04b2
gaatattcaacttggatagtcgatagcaagatcttttgagctatggtggaatacgtttattacaatacatgtttgattatttttagatgaaagtacaatattattgtag

SEQ ID NO: 16737 - DNA, 152 bp, Oryza sativa
  unsure (1)..(152): unsure at all n locations
  Clone ID: uC-osflcyp001d05b2
caaacatgtcagtcacatagatttattagaacatgactatcacaggacaaattttggaggtgacagcagaccttcagtacaaggacctgggaaattcagcattctaaatgtgtaacncttttcccccttttttattttaatctccaccacag

SEQ ID NO: 16738 - DNA, 156 bp, Oryza sativa
  unsure (1)..(156): unsure at all n locations
  Clone ID: uC-osflcyp001d08b2
aacagcaaatatacaacttgttttaaaatcttttttacaattaggttctcggatgcgcacagctaagncaaacatcacacgtaagaacggtcagctagnattaaatccaagcacacagnaaaggcacttggaaagaacacaggnnagcagccagca

SEQ ID NO: 16739 - DNA, 301 bp, Oryza sativa
  unsure (1)..(301): unsure at all n locations
  Clone ID: uC-osflcyp001c10b2
ggcaccaaaattagggatatatacgacagngcgaacatgaagcgagtctttagtaccaggctacggccattgtagggtaccatatgcaagcacgggaaatatccaagcttgaaagttaaaaacgaccgtacaaacaatgtattaacnaaaacaacaaagntggaatcaaagcttttaatcgccttgttttggttgaaggaaatcaaaccgtccattccttgtncnactgttgaaaattttcaacgacaatnntgcatgtgcattatttgttcaaccaactcccttcgggtaaaaaaatgca

SEQ ID NO: 16740 - DNA, 86 bp, Oryza sativa
  Clone ID: uC-osflcyp001e07b2
gatactaaataaaaggggactatcattcacgtccaaggaaatacagatccaacatatcaacctcaacgttcctaaaactcaaatga

SEQ ID NO: 16741 - DNA, 132 bp, Oryza sativa
  Clone ID: uC-osflcyp001e08b2
actcaatcacagctttgatttaccaggccatgtctcagattacagctatacaatagtaacatgcaattcccaggtaacgtcaaatttttttttcgcttttaaattggatagtttcgaaagttacaattccta

SEQ ID NO: 16742 - DNA, 394 bp, Oryza sativa
  unsure (1)..(394): unsure at all n locations
  Clone ID: uC-osflcyp001e09b2
aaaaaaaaactagatatgtagcaattctgatatcgtttgccctgaagatggcatcagtgtacatgatcttattcctggtagattcatgctacgtgacataacacgtattataatctaacattcaatgcnnactccaaatatccatgnngtttaatttggcttaaaattcaaagccgtgaatcaagccaaagtgccatgnnngcttcacttcaagccagcttcttggccattagttnntgagctcattcagggtttgggcaagcaatctatgggatggttgagcccaacgtggcaattcctggaaaaccgcgcacacttgcccgaggccttgccaagcgttcttcgccgaacgtcttcgggggctccagggaagtctatggcgttccacgaccgg

SEQ ID NO: 16743 - DNA, 309 bp, Oryza sativa
  unsure (1)..(309): unsure at all n locations
  Clone ID: uC-osflcyp001e10b2
agcgtcagaaggtatttaattaattattagcaagccatattgtcactgagccacatactagagtaccaaatcatagaggaaggtatggtgagcaagcaactgagncaaaagctccaatccgtgctttagnaatacatttcgagtagggcttttttttttagggcttttttaaaccagngccaagccgcaagngcactttcagttttaaaagccttaaaacagggagtttccagccattgattcaagaatcaattgcgcaattagctttccaactttcttgaaactttgccacccaaccgaaacattgcc

SEQ ID NO: 16744 - DNA, 275 bp, Oryza sativa
  unsure (1)..(275): unsure at all n locations
  Clone ID: uC-osflcyp001f01b2
aaataagataaccgatagctcaaggttgagaatcaaaaaccgaaagaaataggttctttgagcacgagtgcagaaacataaacaaaaaatgcctgttgcaaattgcaagnactacagggtaaacttaaaatgccanntaaggagtttttgtttttggcaagcataaaagaatgaaacttactgttgaattaaaggcttactcnctctccactttcgtcaatcctcctttccttcgttcattcaatcaaatcagccaccagtctttgaggtagttg

SEQ ID NO: 16745 - DNA, 82 bp, Oryza sativa
  Clone ID: uC-osflcyp001f02b2
ttttttttttttttttttttttttttttttttttttttttttttttttttttttttttttttattttttttttgttattttt

SEQ ID NO: 16746 - DNA, 206 bp, Oryza sativa
  unsure (1)..(206): unsure at all n locations
  Clone ID: uC-osflcyp001f03b2
agaaacaatttaatctaacatacgcaaactgatattatcacaatgttagccgatgacaatggtaaagagtaatctaggtacaagcggatcattgacggttgggagacaacgacatttggctggcacnncacaaacaccccaccagtttggccgccaaacaaggggaagcgctttatccgtttaataggcacgtagtagtcaaaaag

SEQ ID NO: 16747 - DNA, 343 bp, Oryza sativa
  Clone ID: uC-osflcyp001f09b2
caatatcgatcgtttaaattaattgttcgtcacacatacaccatcttgttcagtaatgatggctcacattgtccgtaatccctgcttaactacatattgactccctcattttatactcaacaagtacacaccagactcccacaactccattttcacagtgactttattttagggcgcaccgtcaagctgcaccagcacaactcctcatgccaaggtagaagcaaataagaataattgctccaatgctgccttcctcgagcaatcaggggaatcgcccttagtgcgctcgccgggtgccaagtgccaaatggtccttagaagactataatttttgtgcagctcc

SEQ ID NO: 16748 - DNA, 97 bp, Oryza sativa
  Clone ID: uC-osflcyp001f10b2
aacaaaaacatgtgggatctttttatttcgaataattcctatctaatgaatatatccttttcagaatgcagattcgaatacatataccattcgacgt

SEQ ID NO: 16749 - DNA, 336 bp, Oryza sativa
  Clone ID: uC-osflcyp001f11b2
atcagcatccacatacaattcacaacaggtactttatcagcatccacatacaattcacaactggtacttcacaggcatcctcgtgatccaaatgctaaagccaaaaaaaggacaagagaataaaactcacggaactagctatgatagtttaaccatggataacacatcaccacttcatcttaacagccagctttcagaactcagaactgatgccacagatagctaaatttagagggcggcattcactggccacagcatcgaccttcaccatgtcaacagaaaactagggagaagagcactgttactcaatcttcacagacaactagggtagaagag

SEQ ID NO: 16750 - DNA, 403 bp, Oryza sativa
  unsure (1)..(403): unsure at all n locations
  Clone ID: uC-osflcyp001f12b2
attataaatctagctgcattaacaacattgatttcgcaaggtaaacaatatagcatggcaaaaaaagtctcacatggtaccactttaangcatgacaaaagtttacttcttgagncaagaggcnnagaacaaagaacagnatncnnaagcttccaaattctcgtgcacnnntgcaccaggnannaccattctaggnttagaaaaaaacnntacttcagncnnagcctcacaataacnaaaccaccccaaaatgccaaaaccttgcnttaaagctgnannggggatnnnctcganccttcgnnccgttcggagaatnnctccttgccttgcaggttcccttgggggttccttggccgttccacggttgtcaagccgaacgcctttgacgcagggtgcccgaggg

SEQ ID NO: 16751 - DNA, 122 bp, Oryza sativa
  Clone ID: uC-osflcyp001g01b2
atcggaaaacaatcaatcatatttattaacgtgaaacggagataaacccataaaccgtaaaacagaaaatttttaagggtgaaccatttaaaaaatgaagaggtgccatcacaaggcaaatt

SEQ ID NO: 16752 - DNA, 118 bp, Oryza sativa
  Clone ID: uC-osflcyp001g02b2
caaaagcaatgtgatacaggagaaatcaatccagagaaaggggaaaaagaaacagcttgtccaaataaacaacacgcacgcacatagagagtgactctccagtttctcgttacgagca

SEQ ID NO: 16753 - DNA, 278 bp, Oryza sativa
  unsure (1)..(278): unsure at all n locations
  Clone ID: uC-osflcyp001g04b2
gaaactgaaatatactgtctttattccgacaaattgatatttgatacaagcaatcaactaaccacaaatataacccaacctttcagcctgtatatatagaaatgtttatttttttttccaactggttaattaaattctttccttgtggctgttttcatccattcagaattcattagcccaaaggggttcgttgctagaagcagggnggttgacccaaccgtcctttggttgttgtgagggtactttacttcaagggggcgtgccattgcccatgttcc

SEQ ID NO: 16754 - DNA, 290 bp, Oryza sativa
  unsure (1)..(290): unsure at all n locations
  Clone ID: uC-osflcyp001g05b2
acatccactataaacagcatatatttgaaatcgtgttcacatatagctccacaacaatgttttggaaggacacatgtatgccttattttgccactggcttattacannacaaaataaccanncaagaaatttaatttgtctttgctttgcttcacgcataagccaatgaatcctcttttcaaggaccaanaaattaattttagaaggtttttaataaattattccattgcaacccccaaaatgcaagaaatactcattgttctatttaatgttagacgtttgtataacca

SEQ ID NO: 16755 - DNA, 110 bp, Oryza sativa
  Clone ID: uC-osflcyp001g06b2
acaggaaaaaatgtccaaggtaaaacttaacattcttggaaaaatcccacaaaatcgaaacaagggcaaacaccattgaatgattataagcaaaaaggctgtggaaaact

SEQ ID NO: 16756 - DNA, 79 bp, Oryza sativa
  Clone ID: uC-osflcyp001g07b2
gtgattatgtgaaagaaaacacatatgcacgcaattgaagtacaaggatatcagcattgaacaacaaccactaccaaca

SEQ ID NO: 16757 - DNA, 428 bp, Oryza sativa
  unsure (1)..(428): unsure at all n locations
  Clone ID: uC-osflcyp001g08b2
gaacacatcaacaagagagtaaaattcaggacgaaatgtcgacaagatattggaatcttggccacgcacgcaccaatgtcttgggtgactgcggaccgggaattcgaaacggcacaacccgtaacccaaacccaaacccaaacccaaacccaagcgaaacttaaaaacggagttcaaatccattcctgatgaaaccnntaaaaaaaaagggtaaaaacaanatttcttgccaaaaattttatttgggtnnttttcttttcccgttttgcctttcctcctcctttctttctgccttgtncttctcctttttcattcactttagaaaggcgttgttggcaacgtttctcgttacaaccggccggcgacccggtcaccctgggcgcgaactggcgcccgggttaggggcgctgaacgcgcgttcctcccgt

SEQ ID NO: 16758 - DNA, 100 bp, Oryza sativa
  unsure (1)..(100): unsure at all n locations
  Clone ID: uC-osflcyp001g10b2
gtcgcatgccacgtcgtacgataagacttggcatcctatttagtatgcggcnncgcccttatatattttttctttgtgtttcttgtttattattatttgt

SEQ ID NO: 16759 - DNA, 89 bp, Oryza sativa
  Clone ID: uC-osflcyp001g12b2
tttttttttttttttttttttttttttttttattttttttttttttttttttattttattttttttttaaaatttttttatattataac

SEQ ID NO: 16760 - DNA, 200 bp, Oryza sativa
  Clone ID: uC-osflcyp001h01b2
gtaggtacaagcataatttcataaagtttcaagtaatccagtgttacggcatttcaaaagtgctttgtcaggtctgcccttgcacaacacaggagtttcaagatagttagatagcaaccaatgcaacaggttttcaagaactaaaatagggcatttggataataaaattaccttaataatttttattatattctgggcgc

SEQ ID NO: 16761 - DNA, 91 bp, Oryza sativa
  Clone ID: uC-osflcyp001h02b2
gttggttctttttttgagcgcgattaaactgtggtaaatagtactggacgcaaccatagtgtcatcctgaacagtatgtataagtacttcc

SEQ ID NO: 16762 - DNA, 73 bp, Oryza sativa
  Clone ID: uC-osflcyp001h03b2
gggtaaaaaatatttgtttggtagattcatttattttttacatttcacaggaagccttatcgaaaacctaaca

SEQ ID NO: 16763 - DNA, 134 bp, Oryza sativa
  Clone ID: uC-osflcyp001h05b2
cgcgtaagaaagaattgcattacttttggggtctgcgatactataagcaacagagttttgtaccagtctaaaagcaggccttcttttactccttgccacataaacatatttcacgttttaactaacacttttta

SEQ ID NO: 16764 - DNA, 162 bp, Oryza sativa
  Clone ID: uC-osflcyp001h09b2
ggaataagtccactttgacttactaacccgaatctaatgccatgaccttaaaccgcaaaaccggatattctctgacttgccgaactatttgtaaatcggttgcaattttgacttccccttggattggtttttaggatggccaattttttgcttgaatgttgg

SEQ ID NO: 16765 - DNA, 76 bp, Oryza sativa
  Clone ID: uC-osflcyp001h11b2
gcgcggccgctccttttttttttttggggggaaatcacgaaaaaaaattgcgataaacctatgcggaagttatgtc

SEQ ID NO: 16766 - DNA, 508 bp, Oryza sativa
  Clone ID: uC-osflcyp002a01b2
cttggtcctataacccccttgtccctcacttctttttttttttttttttttttttttttttttttttttttttttttttttttttttttttttaaaaaccccccttcaaaaatttcttccaccccccccccctcccccaaaaccaattaagggtttaaaaaccctatttccaaacccccccaatctctaatcccacccccttttttttccaatccttttaaccctaattcccattaaccttacaaaaacaaattccaacccccccccccccttttcccatttccccatttttattccccaggtttcttttttccccccccccaattttttaacccccctttttaccccaatttaaacatttttaaattccccccaccccctttttttttaggtttcaatttatttaccccccccccccccctttttgttttaaaaccccccccccaaaatttttaaatttaaaaaaccttcctttcccccttaaacacccccccctctcccctccaat

SEQ ID NO: 16767 - DNA, 412 bp, Oryza sativa
  Clone ID: uC-osflcyp002a02b2
tttggttttttaaaaattggtgcttttaatataaaccgccaataatccaataaaccatttaattaggtacaggtgatcaatcactcgacaattaacaaaagtacatgacgcagcatcatccaaaattatagaacttcgcatcttccaatcttttcttcggcagctactaccttcttcttcattcccggccgatcatccttcggccggcaaagcgtgtcgcggcggccggcctgtgatcgatcgacggcgacaagttcgccgtcgttgttgtttacaagcgagactgcatgactcctagcttgtcggcctcggtgatgacttggttgcgggtgatctccgcgagggaggtgcagcctctgagcgccatggtgagctcgaactcgtcgcggagcatctgcagcacgttccggac

SEQ ID NO: 16768 - DNA, 275 bp, Oryza sativa
  Clone ID: uC-osflcyp002a04b2
tttgtttttttttttttttttttttgattatcgaaatttgactgccattaattggaactagagtgtaacaaactacatacatagacaaactccccgaatcatggccctaaacattttcaaatggaaaaatggacgccccttgaaaccatgacatttttaaacaacctaacacaggggctcgattaaaaaacaccagaaggtggcgacccatgactacagctagtccttatcatacgactacggttccgccttctttttgaggctggatgattcct

SEQ ID NO: 16769 - DNA, 364 bp, Oryza sativa
  Clone ID: uC-osflcyp002a05b2
gatgatcgaaattagacggccattaatttgaactagagtatcacaaactacgtacatcgacaaaatccccgtatcatggtactaagcattttcgcatggaaaaatggacgtccctcgaaaccatcacatttttaaacaacctaacacaagagctagataaaaaaacaacagttggtggcgacacatcactacagctcgtccttatcatacgacgacggctccgcctcctccttgatgttggatgattccttctcttcaacctcggcctcctcgacctcctcttccttttccacggccgcgtcggggctcaagtcaagggtcttctgcaccgacctgtaaatgctggaggcgaagtccttgggat

SEQ ID NO: 16770 - DNA, 404 bp, Oryza sativa
  Clone ID: uC-osflcyp002a06b2
tttttgttttttaaattttggggaaactgaaccttgttatcaacaacactccaacagtcatgctgatacaggtagcaatgcatagcggatttacagccaaacccagacagtactagcataagcacaacgcatgtgccagaatttattcttgttcatagagcggaaaccgcttctttattacattgcactggcattactacataaggtttgcgctttgcctcctagcacagaacttgggccatctctcatcttcactggagttccttcaggaagtcggcgttatcaaccaaaaccactttccagccatcagggtcaaggaaagaggcaatctttgtgttgagccctggtagtggacctggctgccccaaaatctttccccctaggtcttttggaaccaacttaac

SEQ ID NO: 16771 - DNA, 501 bp, Oryza sativa
  Clone ID: uC-osflcyp002a07b2
actacattgtgttgttttaaacaaaaggggtgataaacgtaagaatataaagactcacgagagaagaccttacaaccgaacctacagactgagcaccgaaagagaaactacaggtcgcgagagacaaagcacaacaacgggcatgaccatcatctttcactagggaccatactaaatggcaacacgaagcacgttgcacggcgaactcaaaccaatttatcgtcaggcacaaagcaccataccatccatcacttgggaagaacattcacagtattcagcacagaaccatcttgaacggtgaactcaaccaatttatcagcgtcaggcacgacatccaccacggttgggtgcgcgcagaagcaatccgcccaaacagccaggatcggaagcttggttctcgtgaggagctcgacgccggcgatcttctccaccggcttgatccatccgaggaacgaacccagagcgatatccaggtagcctatgctgtccccccccaagtat

SEQ ID NO: 16772 - DNA, 354 bp, Oryza sativa
  Clone ID: uC-osflcyp002a09b2
ttgggttactatataacggacgattgctgattactattactggttgcaatgtaacacttcggatacaatagtacattacagagctagctaaatgcgaagccacaataccgtcagcgcaagacgatcataaataaagcttacacaacatagccaacatgcaaaccattcggactgaccagagatgagggttcttgaagctgccgtggtgtgccatgcatcacaaatgccgaacaactagattgtagcaaccaacatgaaaggaaaaggcatggataatgcagcaaagatggatgatgaagaccgcagattgtgaccctttgtttaccaaccattttgaaaccccttaaaattttt

SEQ ID NO: 16773 - DNA, 310 bp, Oryza sativa
  Clone ID: uC-osflcyp002a10b2
ttgtttttttacaggcagggcgttataccagagactagagtagagtcttaaacatttcaatcacatccatttcacaatgtcaaaaaggcaaggtcagggctaagttttaaaagactaaacttgaagtaatgcgtagctaatagatgtaacaagccaagtagctccattgatagggggaaagagaacccctccaatcggccggcagtctcacggacactttgacctgccggcccggccaccacttttgctccaccctgggcgcacaggagtgcgctacggcaaaattcctgcctctttgacctctcactac

SEQ ID NO: 16774 - DNA, 215 bp, Oryza sativa
  unsure (1)..(215): unsure at all n locations
  Clone ID: uC-osflcyp002a12b2
tgtgttttcttaaaatggggtgtgttaacgataatttggactatcaccaggtcaaaattgttttgcctaaaacatatgattttataacaaagcattcatactctgggaaaagggtanagcactgcacatctaacaacaacagtatccaatcaacaagacgcttaaaacaaacacccatcctctggagtgaggcggggagggaatataatagaact

SEQ ID NO: 16775 - DNA, 359 bp, Oryza sativa
  Clone ID: uC-osflcyp002b01b2
gaaaaaaaatataaaaatattacccccccaatctttttggcccccccccctagttaacaaaattgaaagggcccctttaataataaaaaaagggaggggcccccaaaaaaaaatccaaattaatgtataaccctttttttttttataaaaaacaaaaaaaaaattggcggaaaaaaaaaaaaaaactgggcccgggggccttttaaacatggccagggaaaatccaaaatctctatcggaaaaaaaaaggaaaaaaaaaaaaagaccccccaaaaaaaattccccaatttaccctttttaccacccaaatgtgacctaacccgttctaccctaaaaaggcacccctgggccaaaccccc

SEQ ID NO: 16776 - DNA, 446 bp, Oryza sativa
  unsure (1)..(446): unsure at all n locations
  Clone ID: uC-osflcyp002b02b2
tttgtttttttaagggacatggactcttggttttcccttaaaaaagtttactctgttgtctgattgtccatgatacacaggtatgatcctggcacagatgaggataccacaaataaacgtaaaccatgacccaccacccacgtatgacatgcaacacatttagattggcctaatacgttggtgacaaacagtaagcattttatcagcgagcacaaggcaaacatcttgtacagtttgatatatgcatggcttcccaggactcaatacgtgatcagagtgttcacagtaagcatgcctttgaagggctttctcgcagtgcagcgttcattccacaattcctttccacataaatacttagagtttgttgaaatctttttctcatnccggcttcccaatggtttagcttgggcattccctccaaaccatagagtgcacacncctggaat

SEQ ID NO: 16777 - DNA, 280 bp, Oryza sativa
  Clone ID: uC-osflcyp002b03b2
atttttgtttttttaatttttttggtttttattttttttttttttttttttttttttttttttttttttttttttttttatttatattaaaaaaaaaaaaaaaaataaaaaaaaaaaaaaaaaaaaaaaaaaaaaaaaaaaaaaaaaaaaaaaaaaaaaaaaaaaaaaaaaaaaaaaaaaaaaaaaaaaaaaaaaaaaaaaaaaaaaaaaaaaaaacacctccaaaaaaaaaaaaaaaaaaaaaaaacccccaacaaaaaaaaaaaaccccaaaaccccc

SEQ ID NO: 16778 - DNA, 500 bp, Oryza sativa
  Clone ID: uC-osflcyp002b04b2
tttggtgggaaggtaacaaggggatccaactcaaccgttgacttgtctttgtacttcggtgcagtttttattacaaaaagcaagaataacattcattggtatgcttacagcgccggctgtcactggaaaagaaaaccattatggagtgtccgagcatttcaaaatgccttgagagatttatggcctacaggaagtttctgatgtccaacttcttgacatcaggcatctcctcgtctttgaactcctccctctttagttgaacctccattgcttcaacacattccttcttaagctccgtcagctcacttttggcaatttccaattcaagctcttcctcaatcttgggaagatcctccttgcggattccaagctttttgtttatcttctcaaactctgccaagaggagacccatattcttcttgtcactcctcagaagtggcttcttaatctccttctcaactttctcaagggcttccatcatcatagcctcagcacccata

SEQ ID NO: 16779 - DNA, 464 bp, Oryza sativa
  Clone ID: uC-osflcyp002b05b2
tttgtgtgtttggtaacaaggggttcaacttaaccgttgactttgtttttgtactttggtgcattttttattacaaaaagcaagaataacattcattggtatgcttacagcgccggctgtcactggaaaagaaaaccattatggagtgtccgagcatttcaaaatgccttgagagatttatggcctacaggaagtttctgatgtccaacttcttgacatcaggcatctcctcgtctttgaactcctccctctttagttgaacctccattgcttcaacacattccttcttaagctccgtcagctcacttttggcaatttccaattcaagctcttcctcaatcttgggaagatcctccttgcggattccaagctttttgtttatcttctcaaactctgccaagaggagacccatattcttcttgtcactcctcagaagtggcttcttaatctccttctcaactttc

SEQ ID NO: 16780 - DNA, 427 bp, Oryza sativa
  Clone ID: uC-osflcyp002b06b2
tcctaagcggcgcctttttttttgggggttttaataaaagactgggagaagtatataaaagactcagagagaagtcttacaagcaaaattacagactcagacggaaagggaaactacagttccgaagaaacgaaacaaaacaacgtaaatgaccatcatctttcactagtgaccatactaaatggcaacacgaagcacgttgcacggtgaactcaaaccaatttatcgtcaggcacaaagcagcataccatccatcacttgggaagaacattcacagtattcagcacagaaccatattgaacggtgaactcaaccaatttatcagcgtcaggcacgacctccaccacggttgggtgcgcgcaaagcgatccgtccaaacagccaggatcggaagcttgggtttgtgaggagctcgacgccgcgatct

SEQ ID NO: 16781 - DNA, 376 bp, Oryza sativa
  Clone ID: uC-osflcyp002b08b2
tttgcctttttaaattttttggtttggacattaaaggttatttactaagcctaaaccaggaccgcatcaaatacattactttaaacaacatacaacatacatgctcatgttttccttacaagtgatgcataaaagaggaatgcacctatgccactcacctggatccctttttttagaccagaaaatacatttacaaccccaactattgtgattagaaagctttaagacaataatccaagcctgggcattaagccccctggatctttatttaagaagaaagcttaaacaatatccaagcatggaccttattagttctgtaacattgacactgctggcttgttacagaaccaaatgaatttccccatcctgaagtaca

SEQ ID NO: 16782 - DNA, 470 bp, Oryza sativa
  Clone ID: uC-osflcyp002b10b2
tggtgtttttaaccctttgtggcctttttttttttttttttttttttttttttttttttttttttttttttaacactggaaaaacccccattccacaacaccccaaaggcaacaataggacccaaaacacccaaatttttaacccaaaaaaaaaaaaccagttttaaaccaccaacaaagggcccattgcgagcaaaaataaacggcccctccaaccaggcccatggcccggggcaaaacttaaccaaccctaaaaaatctcaaaagccgccaggaaaaccccccctttaacgatgctcatttttttttggggggaaccttggacaccccggcacccggtggggcccccttctccacgttcttgaagacccccaccaccaccctttgccccatggcacccccgggaaaacaccccaaagggggggccccaaagaagggccccaccaccacgggcctggggggaaaaattt

SEQ ID NO: 16783 - DNA, 412 bp, Oryza sativa
  Clone ID: uC-osflcyp002b11b2
ttgggtttttaatttttttgggtttttttttttttttttttttttttttttttttttttggcaacagctagaggtgacaatcatcacttcatacggggggggttccatatacccatcacaagcaacaaaaatcgctcatagccaaaatgcaatcctggggctggagagagccccttgcccctcagggggaaaaaaaaaagggaatttggggggggtttggttttcctgccacacctttaaaggctccattttcaggctttttcgcttggaaaatttctcagcatttcaccagggacccaatttccaaagggtctaatggagcctaagattgttccatggaggacactggcaaatcactagcagcagcgtcaggcccccgggactccatcttcggggagatctcccccatgac

SEQ ID NO: 16784 - DNA, 250 bp, Oryza sativa
  Clone ID: uC-osflcyp002b12b2
tgtgttttttaaattttgggggttttttttttttttttttaaaaacaaactttttttcctaataccaaccaacttttttattggcaaccaatctatcaaattttctctaaatacctaacttgagtgtatatagccccaacctttttttcacatatccccacccaaccataattgaaatactctcacaaaaaaacctgtcggaaagggagggaaaaaaccatcccatatgggggaagagcggacccctttt

SEQ ID NO: 16785 - DNA, 369 bp, Oryza sativa
  Clone ID: uC-osflcyp002c01b2
attatatgtttttttaaattttttgggtttttaattttttttttttttttttttttttttttttattttttttttttaaaattttaaaaatataaaaaaaaaaaaaaaaaaaataaaaaaaaaaaaaaaaaaaaaaaaaaaataaaaaaaaaaaaaaaaaaaaaaaaaaaaataaacaaaaaattaaataaacaaaaaaaaaaaaatgcatacaaaaaaaacaaaattggggagaaaaataaaaaaaacaaaccaaaaaaaaaaaaaaacataaaaaaaaaaaaacaacccaaaaaaaaaaacaccttaaaaaatttaaaaaaaaaaaaaaatacccatctgaggaatacacaaaaaaaataaaaattc

SEQ ID NO: 16786 - DNA, 378 bp, Oryza sativa
  Clone ID: uC-osflcyp002c02b2
ttggtttatggagattctttttattgaaaggaattatgtcgtagttcgctgccacaaaatagtaggcagcaagaatgctcatagttttgcttgtcactaagcctaacaatctttcttgctaaatagtatatagttataaaatttcatataagtagggcgataaatttctctaaattttacgaatgggctgatcaagaaatagggctgcctgcctgcctatgaaggccagagtttttctcctttttctttaccaaaaaatccattcttctaaagtttccattcgacatccttatttcatgggaacttcccaatcttcaaacttttttgtctaatctgtaaaaggtggcaagccccattcaccaggtttgaaatccagca

SEQ ID NO: 16787 - DNA, 460 bp, Oryza sativa
  Clone ID: uC-osflcyp002c04b2
agctcatggaatccctttattatttagtgtgtcaaaggaaacagcagcacaccagtctcggctctagtattagcaaaatgaaagttacagcattgccgcagcggttgcgaaagaaaatcagcacattctggttccccagtgtgccagggagctcgaagcagactgttaaactcgttcaatccagcgtcaagagtgagtaggtcagaggagatctcatctcttccaccgccgagcttgctatcttgagtccacaacagtgccctcaggaagcgcagacaggtgtacgagagcgtgagatttttgtgggctatcggagccagtgatcttctccttcggccggctcaacaccttcctgacctcgttagctagctcgatgattgaatcatcttcatggcatatgttggacaatgccttctccattgagaacaggtaatccctgttattcccattggggccattg

SEQ ID NO: 16788 - DNA, 482 bp, Oryza sativa
  Clone ID: uC-osflcyp002c05b2
tttgggtttttttttttttttggtttttttttttttttttttattttaggattgggtgttctgatcctgggacattaaatcaacaaagaatttaaacatcggtacaagaagcagggagggcaacttgcacgttttcagtgtacaggcagatgaaacaaggaatgagggggggtaagttgaattccaatgatggacttggcaaccaaagaatctcagctcaaggcttcacaattgagggttcccaaaatggcgaactctgggggcatcaatttaaaaggaatttgtccagaaaggcattgggaccctagcttcataaactcaagttttgttgcaacggaagcagcactgtcaacttcttggacatctactgaaggttgaacctttttggtatcggtcccaccattactatcatgctgaatagagggggcagcacccacataacctttatatataacgccgtaccctggaaacattggaacgga

SEQ ID NO: 16789 - DNA, 427 bp, Oryza sativa
  Clone ID: uC-osflcyp002c07b2
ttggttttttgaaaaaagggggaagcgacttataatataaaatggaaggagtattatacattgcaattcatcggagttattcaagtacatatttttaccatggtacaaaatgaagagggaactcgtcacaaacacacatagtgcgcgcggctgatcgattcagagcgcagacttgatcatggcgaacatgtcggccggctgctgccgcgtcgcggcggtggcggcggcggcgggtttcatcagcttgcccatctcctcgacgaacttgtccatggcggggccaggcaggcacatgggcacgacgatgccgtcctcccccttggcgttcttgaacgggatgaggaagctcgccacgccggggatggcgccgacgccgcccttcgccggcccgccgtacgccggcttcccccacccgaagttgaggtcg

SEQ ID NO: 16790 - DNA, 432 bp, Oryza sativa
  unsure (1)..(432): unsure at all n locations
  Clone ID: uC-osflcyp002c08b2
ttggtttaagcaccaagtatgggctgggtatatattcgattctgttaatctgttatgaacttaaggtcactggttacaactgaccaagggtatacactctcatagcgaaaactaaagctatgccataaagannnttctaccttttggaagatgacgaaaacagctacatatgatcaaaccatgtatcctgaaggtaaccgagactatatatataagcggccactacagttctcagaagtatccagcattttgggctgtcctgatgatctgaaagagagatgaaccaacaaccacaaagacgaaaaatccaagcacaatgggtccaacaggataatcatttcctttcttgactgtctcaggaacagaacccctcttggtgacgttcttctcaaaccgtgccactttcctatctgaaagacgccttgaggtagt

SEQ ID NO: 16791 - DNA, 397 bp, Oryza sativa
  Clone ID: uC-osflcyp002c09b2
tttggtttttcaccaattttgtttttttatatatttatcttttattttttttacttaatgtactttacaactacaaggtaacatcataacaaactagctatgccataagattctccttttggagtgaccaacagctacatatatcaaccatgtacctgaaagtaaccaagactatatatataagcggccactacagttctcagaagtatccaacattttgggctgacctgatgacctgaaagagagatgaaccaacaaccacaaagacgaaaaatccaagcacaatgggtccaacaggataatcatttcctttcttgactggctcaagaacagaacccctcttggtgacgcccctctcaaaccctgccactttcctatctgaaaaaccccttgaggt

SEQ ID NO: 16792 - DNA, 197 bp, Oryza sativa
  Clone ID: uC-osflcyp002c10b2
tgggtttttttaatttttgtgtatggaaagaaattttcaaatgatcataacatcatcagcatttgctggttatgtcagaccttgactaacccaattctaataccagttgctatacttcatatggctagacgctcattcatacaaattactatcctccagtaataagtgaaaatttgtgaactaaactagcatgcttc

SEQ ID NO: 16793 - DNA, 374 bp, Oryza sativa
  Clone ID: uC-osflcyp002c12b2
tgtgtttttttttttttgggggacaaaaccaacagaaatcatgaatggtaatagcagaacaatgttactctttatcatctacaataaatatcaaatggatcataattacatataataggaaactttattggtcactgtaatgaatgaatcatacttaaaattctcactttcttcataatgccctcattactgctacccaccatgtcaaatatcctacttctattagactgtttatatcataacttttacacaaatggatgttcaacggtccatcaaaactgaaactggttggcatcaagttaggactttcgagagcttcctacaggaaccacattttgacaggagggtgggatttctggaaaactagcctgagt

SEQ ID NO: 16794 - DNA, 412 bp, Oryza sativa
  Clone ID: uC-osflcyp002d02b2
tttgttttaatgctacaacatgagaatttgagacacccaaggccatggatatggacaaaaaattacatcgctacatttttacagcaagaggccaatagttacagtgggccctcaatgtctaacctagagtttgtgtacattccaactcccaactcccaataccaacaagaggcaaaatagttggaattggggatcccaggtataccatagccagagcctaaaatgaaaaattctacaggtgctcttcccccctcctacaggtcagcattacagcatctaagttagaatatagcaagatctaaatgccatatctggttagtgtgcactagtcctcgatcgcgtattccgcatcatctagcacatccgcgctttcctcaagaagataatcacacaactccaagagctcatcagc

SEQ ID NO: 16795 - DNA, 475 bp, Oryza sativa
  Clone ID: uC-osflcyp002d03b2
tttggtttagtagatcaatcacatgccatgcttaaatactttcctatttcctttccggtcctcttcccttgcgtgccacaataatgcattcaaatttgatacaaatatcttagccaagctaattctccgttttggggttttgcatctgcctcatgcttcagtgatataggtggagggctggaggtagtttgctttgctcttgctccacttgtacaagatgttcccagaaacatcataaaatatgaagtcagcttggtcctggtttatctggagggacatgaacccttgtccatcgtaaaagaactggagcttatcagaatttggctgcaagactcctctccatgcttttgaaccacctccacttgtgaagtattggataggactgtctctgctgctaatgtgttccaggcagtggtcgtgcccattgatgtagaagtcgatgccattgaccttcagaactggaagtagaagttgc

SEQ ID NO: 16796 - DNA, 84 bp, Oryza sativa
  Clone ID: uC-osflcyp002d04b2
tttggtttttttaatttttttggttttttttttttttttttttttttttttttttttttttttttttttttttttttttttttt

SEQ ID NO: 16797 - DNA, 380 bp, Oryza sativa
  Clone ID: uC-osflcyp002d05b2
tttttgtatgacaataatgatgacacaacttttattgaatgcaccaacctagatgctctaccaagagtaatctagtattgccgtataacaacacgcctcgagtacaatatcctgaacaatgtatacatagcactagccaatgctattccctcgcctcaatcctctacttgtgtatagaagcatagttccagtccccgcatagataaataataatacatagaacgaaagtggcaaggaaaaatttcatgcgcaacatgcaaagctaattttcttgcgtacttagaacacctgcaaaaacctgaagcttgtcaatttacagcctaccgagctcagatgtgggcctttaagggcgttaagccttcttttctgacgcttccatg

SEQ ID NO: 16798 - DNA, 240 bp, Oryza sativa
  Clone ID: uC-osflcyp002d06b2
gaaaccgggggggaaaacacaccaaaactaaaaactgttataatttaacacggtccaaccttagggtcccacggtgaaataatcccagtgcattatagtggcacctcctaggatgaggcgaactctacacattaggtcacccctggctcgtgaaaggtaacctgcaactatgttttaaaatgcggccacccctgtcctggcaagtacactggcctataggcttacctgatcctaggaccc

SEQ ID NO: 16799 - DNA, 231 bp, Oryza sativa
  Clone ID: uC-osflcyp002d08b2
tttggttttttaataattttggttttttatttattttttttttattttttttactattttatcttttcaacttctttgttacctcaaaaataactacctatacaataagattcaactataccaaagaccaacaaatacatttattaaccctttacataaaagaaaccaacactatttttaaaagcgacaactacagaccagagaagtatcctaaaatttgggctgacctta

SEQ ID NO: 16800 - DNA, 399 bp, Oryza sativa
  Clone ID: uC-osflcyp002d09b2
gcgggcttgacgggggcttgaaacgtcctgggcctccttgctatccttgaggtcgctgggcggcaggaagcagtccatggagagtccccagatgttgaagtcgacctcctcgatgttccacacctcctccattcgcgtccgcgtgttgccgtcgctgctgtccccgaagcggacgagcgagacggcggtgcggccggcgtgcgcgatgttgacgccgtcgacggcgcggtagtcgtggaggtgcgactccatggtggtctcccagaagacgctgccgtgtccgctcgacttgatctgcagcaggtgcgagtcctccagctgcaccagcaggcccgtccgctggctgaagtacccccacaccgtgtgccggatgatctccacgctgctgctgtgcgcgcc

SEQ ID NO: 16801 - DNA, 277 bp, Oryza sativa
  Clone ID: uC-osflcyp002d10b2
tggggtttttttactcagctgagccactgtacagcttacacacctactcttagagagcaatcacattcacacgccacacttgtgcttactgaagggcatccgtacaaaccaaccagtacagtcatcatacacagggaactgtatccttatattaggggggagctgtgaagcttattatatcctacagaaacttgtcctgtgaaaaatctacaactggaattcctagtatattacagttttgtgccctcagtagtgattaggtttgctccaaggtcgt

SEQ ID NO: 16802 - DNA, 424 bp, Oryza sativa
  Clone ID: uC-osflcyp002d11b2
tgggtttttgacaccataagggcaatgtattggtcataggaaaaatgtctgaacttttagctcccaaagctcaagtcacaatgcagtgaaggactgaaggcacaaaaatgccgagagattgtagaatttgacaccgattgggtgcagttcaacactcccaactacttggagtagaattcccagcctacagtacaatgagtccatgttttggtcgtcaaatcgtcagttctgcactatccgttcctattcattcattcttgggtttgaacagttttatgagataaccaatcaaggacacgagccactgccagaagcgaacgatggaatttgacgccttcggtttgggttcgggccttggaccaaagaggcctttgtacagctccttctgtttttggtacagagctttatcctgttccgcgagaga

SEQ ID NO: 16803 - DNA, 402 bp, Oryza sativa
  unsure (1)..(402): unsure at all n locations
  Clone ID: uC-osflcyp002e01b2
tttgttttttttttttttttggtttttttttttttttttttttttttttaaaattaaagacgtttccgtcgttcgtaataaccaaaaagggggaaaaaacctgaaaacaaaaaaagaaaagtcagattcagtctatctatcttccgagggcatcataaggcaaataaagcgatttttatgttgattcccggatgagaatcaagcgattgagaaaaagaaccggaagaaaaataaaaacatcaccgggaagccaccaacgccgtcgccaccaccggatccgtccacggggcgctcgtcagatccccttggtcgtcgccaccgccgccagatccatccgggggcgtngccgacgccaccaccgccaccggagggattgagaaaagaggcggtggagggagcccc

SEQ ID NO: 16804 - DNA, 244 bp, Oryza sativa
  unsure (1)..(244): unsure at all n locations
  Clone ID: uC-osflcyp002e02b2
tttgtttttttatttttttgggtttttttttttttttttttttttttttttttttttttttttttttttttttttttttttttttttttttttttttttttttttttttttttttttttttttttttttttttttttttttttttttttttattttttttttttttttttttttttttttnaaaaaaaaaaatttttttaaaaaaaataatattttaaaaaaaaaaaaatttccccaatttttt

SEQ ID NO: 16805 - DNA, 240 bp, Oryza sativa
  Clone ID: uC-osflcyp002e04b2
ttgtgtacaatgcggagcttaaactgaaccctcccagtatacaaaattcactgtataacagttatgcatgatatgatccgacattgatatcttcaggatccaacacataaccttcgcacccaatattgtcgcacgctacaacttgtgctaacggggggagcatgaaatatagtaccgctagcaagggaagcagccatccacgttcagttgcgagatccacatatgctccaaacttctcct

SEQ ID NO: 16806 - DNA, 524 bp, Oryza sativa
  Clone ID: uC-osflcyp002e05b2
tttgtgttactgaattcactggaatagcacttctcatcatgaactagtacaacaacataactgtccagtggaaatgtgaaatgcatacaccaagtaatggtccataacatgaactatatggatacaacaacgttcttatttcgctcatatatacatgaaataagtcttgcacgtcttggttacttaataggtgcgataatcgccgtaggcttttagaagaagaaaaaaaagtgagcctgcaaagttcctggggacagttgaagatcatcgggcactcattgctgcaacaacttcagggtggtagtggagcatctcgtgccacatcatttccctgatcatatctgcactgatgttctcgtctatgtccagatcgataggcacttgcgcgggaggatttgcacttggatcatacagaggggacatgtaagggtgctcaagagcctcggtgacactgattcttttggtaggatcaaatatgagcatcttctgtaaaagatcaatggccagagggtgtgcatgcggat

SEQ ID NO: 16807 - DNA, 370 bp, Oryza sativa
  Clone ID: uC-osflcyp002e06b2
tttggttttttttatttttgggttttttttaaccaaggatctgattttttggataaatttccagagtaactggaacagagaaaaagatggctcattggctgagacctgatacaaaatactttcagaatgcagttggacttgcaccaatagatccaacctcaggggagacattgggcgagagaggacactgaatggctggactggtactcctgggcaaaagcttggctcttagttgagggtcctctgtacaatggcaacaggaccccaagaagaaaatagaaaattaagttccatataaaggcaagaggagtatacatgcggcgaactactacttaggaggcccttcaatctgaagggcaccaatatacag

SEQ ID NO: 16808 - DNA, 447 bp, Oryza sativa
  Clone ID: uC-osflcyp002e07b2
ttgtttttttaaaccccttgggtttaaaataacccattttcttttttttaatataaacaaacaaaccaacctaaccaaaaaaaaaaaacccaccaaaccaaaaacccaacccaaacccctttccaaaatccctatgcccaccaccaataaaacacaccccccactaaaccacaggaccaaagaggaaacaaaccccaacaacttatacccctgaaaaaaagcaaaaaaaataatctccctcccttcctacaaagacaacaacccccctaaaccaaaaaagaacaacaagccccctttaaagccaaacaggcctatccgaccggcgaaccccccacccaaaacgcccccttaaacctcaaccaccccccacccttcaaagacctcttaacaaaaccccccaacggttatcacacccccccccctcggccccctgtaaacccccccccc

SEQ ID NO: 16809 - DNA, 436 bp, Oryza sativa
  Clone ID: uC-osflcyp002e08b2
tttgttttttttttttttagggatatttacaacatcagcatagtttcattaaatttataattgattatattttcataatatatttgttttggaccaaaaaatattactatttttttctataaagctagtcaaacttagagtaaaaagtcagaacgtctcccaaccaagttggagtaacaaaaaaaaaatgtacggtactctttcacactttgagatatcacagaagcgggacatgtccaaagctagctatgccggcggcggagtgctcgacgccgacgtttgctccggggagctcgcatacggtttcgaacaacgccctcaccggccgggggtcggagatccggtagccgccgcagcgctcggagctcgcctgccttatccccttccctcgccacagtatcctgtgacaccatgccggcccgcgctgctgctgttt

SEQ ID NO: 16810 - DNA, 348 bp, Oryza sativa
  Clone ID: uC-osflcyp002e09b2
ttggtttttttaaaagttggtaattaacaaaaaaataagttacggaagcaaaatatataacataaactgtgtccactggatacttgagctggacacaataagacatacacagccttaaattaatgattccaaatataaattgaaactagaacatgttatgaaccaaaaatacagcaagaaactaaaaaaatggactaataaataaactttaggacaaataaagggccctgtcattcacgatgctatgtttccttgatctggagagcaccatcctcagcattgttagaggtacatagaggaagattgtcaacaacaacttgaatgatcaaggggctgacattcgaagac

SEQ ID NO: 16811 - DNA, 238 bp, Oryza sativa
  Clone ID: uC-osflcyp002e10b2
tgtgtttttttttttttttgttttttttttttttttttttttttttttttttttttttttttttttttttttttttgggaggaaaaggcaagaagccccccttttacccaagacattaaaaagattatccttacctcgccccaagactggcaaagaaaaaaacaagggggggcccaaaccacaaagaaaacatttaaacccatggaaccccctaattaaaaccggccccggggggccc

SEQ ID NO: 16812 - DNA, 411 bp, Oryza sativa
  Clone ID: uC-osflcyp002f01b2
tttgtttttttaattttttggggagcaaaaggcaaaggaaatttcccgcaaatacttattcatatgttttgacaacatttctcccgacgcatgctcattgtggcagacgcagctgaccacctagagcttttaggtcaccattattatttagaccaagcatacgtcccaagatcagaacacatgcttacaagcgaaaatactaatagcctggctggctgcttcacagaataaccaaacgacaacctcaacagataaaaatgccacggaatgaaaacaaagcagcgaatcgtcaccagaagtcccatcttactcatcaaacactccatcattctcctccaacgcatcctctccccaggggagaagattgcccagtttaccttccttaacaggagcagggttcaccatattctc

SEQ ID NO: 16813 - DNA, 391 bp, Oryza sativa
  Clone ID: uC-osflcyp002f02b2
ttggtttgaatgtcagagaacgagtgtttttccttcgaagcttcaatagctcatgtgcaaagagtttatgtacccagcaataacaaccgctattccaaccttttcgtgttgatctaagagtaactagtgaagtaactactaaaacgtcgacgcacacacaaacatagcaagggaaagcgtggaaatacaacacataatctcttcaaacttacaaaaatgtttcatatctagagtttatcctttttcgtgtagttagttttttcaggtatgtcttgtatgtttgtatgtatgactaatcttgtgattcttaattaattggctatcatcaatcgcgtgcctctgtgctgtaagagcgatttgcatactcctgaaccattgctcgaaaaagtga

SEQ ID NO: 16814 - DNA, 375 bp, Oryza sativa
  Clone ID: uC-osflcyp002f03b2
tttgtttttttaattttttgtgttttttttttttttttttttttttttttttttttttttttttttttttttccaaacatactgaattaaaaaacttcacacaaaagggaaaaaaaaacttaaaaaaaaagaatttgacccaaaaaaaaaaaaaaaaaccccaaaaaggaaacaaaagcacaaaaccaaaaatgaaaagttaaaaaaaaaaaacaaacccccttctaacaaatgaaatgaaacaacccgggcccaagagcaatcctgggcctacaaaaccaccaccataaccaccaaaggtcacccaggaccagaaaagcaagaccaaaattcggcccggggaaacccttggcagcagggggggggggcccccca

SEQ ID NO: 16815 - DNA, 429 bp, Oryza sativa
  Clone ID: uC-osflcyp002f04b2
tttgtttttttttttttttgggttttttttttttttttttttttttttttttttttttttttttttttttttaaaaggccccccttaaaaacaatatttatttcaaaaacctggcttatttatgcccccccaccaatttttgggaaaaccccatttatccctaatttggccccgggcctttccccccaaaaaaatcaggggaaataaatgggtggcccccccccccccgggaggatttcttcaaaaccaaaattttttaggggttaataatccccaggccccccaccaaaagagcccgtttgtttataaataagggggggggcccatttttgttttcagggccagctgaaaagctttaagggaagccgttgccaaaaacaagggacccgcccttcttgacaaggaaccggccggaaaaggaccccttgg

SEQ ID NO: 16816 - DNA, 477 bp, Oryza sativa
  Clone ID: uC-osflcyp002f05b2
tttgtgtttttttttttttttgttttttttttttttttgacacaagcacaagcacacagggtattattattgattaagatatggggattcttctccgatacaagcattacttagtctagtagttgacatatattaaagattaattctttgagcaagcatgcatattcccatacaagctagtatcagcatacttaggtagattgctggcatttgtaacagggaggagcagagccagagtacaatacttaagtcttcttcatccagctgttatacatgatgatataatccatcatcatccatgggggttttacttgaggatgtacttgagcacaccgggtatatggatcctgtagaagtagccctcccaatcgatggtctttgggtcgaagttgaacatttcatcgtcttgagggttcctgctcttccccatcctctgcctaagccttttcaagtttatgtcggcgaagcatcctttga

SEQ ID NO: 16817 - DNA, 207 bp, Oryza sativa
  Clone ID: uC-osflcyp002f06b2
tttgggtttttttttttttttgtttttttttttttttttttttttttttttttttttttttttttttttttttttttttttttttttttttttttttttttttttttttttttttttttttttttttttttttttttttttttttaaaaaaaaaaccaattattttcttcgcaaaaaaaaaaacataaattatttttattttttttt

SEQ ID NO: 16818 - DNA, 396 bp, Oryza sativa
  Clone ID: uC-osflcyp002f08b2
tttgtttttaaccaaaacatgggaggtttcatttcttcttctcaaagtagtgtagcatctttccttctttcaccattacataagcttaagcaataacagataacaaatcctcctcctcctctaggtaaaatattcaaacacaatacccttataagtacttattattaggaaagtagcgtgcatgggcataaatggcagcggggggcaggttaagaatcacaatgctgagcagcgaggaaacaaaacaccataatgggacagagcaaaagcctccgaaagggagcttttaggcagaaggcttctcccacttgaggggcttcaccacctcccaggtgaagtctgggtcgtcccttccgaagtgaccgtaagccgccctcttgaggtagcgtccgttgc

SEQ ID NO: 16819 - DNA, 519 bp, Oryza sativa
  Clone ID: uC-osflcyp002f09b2
tttgtattttataattttttggttttttattttttttttttttttttttttatttttttttttttttttttattttaatttatttttttttttttttttttaaaaaaacaaaaacaaaaaaaaacaaaaaaaaaaaaaaaaaaaataaaaaaacaaacaaaaaaaaaaataaaaaacaaaaaaaaaaaaaaaaaaaaaaaaaaaaaaaaaaaaaaaaaaaaaaaaaaaatttcataaaaaaaccaaaaaaaaaaaaattttccctaaccaaaaaaagaacaaaatattcgccccctgtattttataaaaaaaaaaaaacccccctaaaaacaacccccaccctggaaaattccctaaaaaacaacaaaaaaaggtctaaaaaggggggaaactacccccccaaccaaaattgtacaaaacaccccccttggccaaaccccccctcccccctgtaaaaaaaaaacccccataaaaaaccacctaaaaaaaaaaaaaaatccaaaaaaaacaccctcccca

SEQ ID NO: 16820 - DNA, 354 bp, Oryza sativa
  Clone ID: uC-osflcyp002f10b2
tgtgtttgacactaatatagtactcatatttagcaatataattaacgtacgcagttcgagaacccatagcacaatctagccccatgcattgcaggctaggtaaaggtaaagcaaatcgcacaaaataaccgaaccgacccaacaacgcgatgttcaaaaggtaaaacagataagctagctccaatgctccatggtgtactttcgctgcgaaggatttgacgaggggaaaaaaaaaggaaacccgcttagtcgacctcctccatcttgctctcgccggcgtcgtcctcgagcggcggcatgtcggtgtcggcctccgccgtctcgtcctcgtcgatgctcaggccgagcttgagc

SEQ ID NO: 16821 - DNA, 80 bp, Oryza sativa
  Clone ID: uC-osflcyp002f11b2
tgggttttttatttttttggggtttttttttttttttttttttttttttttttttttttttttttttttttttttttttt

SEQ ID NO: 16822 - DNA, 318 bp, Oryza sativa
  Clone ID: uC-osflcyp002f12b2
ccactataaaagctctatggcctcatacgcacgcacacaaaagcttggcccctttagcgcgcgccccctttttttttggggtttattcaacggacggggatacatcacaagccacagtatcacacacacacagacttgacatgttcatattcggaccgggaccaaattgtatggatcaacaacacacattccaaacaatgagatggctggattattacagagctggaccaaacaaaacaaaacacttagctagggccaaacaagcgaccacacctgccggcccctccatcgatcagaggcgccttttaccattccata

SEQ ID NO: 16823 - DNA, 424 bp, Oryza sativa
  Clone ID: uC-osflcyp002g02b2
ttttgttgtccaatcgctgggaggtagcttcataagtagcttgtgagaaaattgtgagagcagcacaaactgtagcattatcccaaacaagcgatatatatttcataatgaacataaatctgcttctacaatatactccatcagtaacatgagcaccaaccacaaggtttattagagacaatgccagccccatgctaggacaagcttatttcagctgttcttcctcttcatcttcttcatcatcgtcctcctcttatcgccataatttatcgccattttcgcatacgtccataagattatacctatttctttccccagttctgaaatgtccaaacatctatgtgtttacaaccacgcggcgttcttgatcggcgtgacgacggccttgacctgcaggtagttcttcaggctgtcgatgcccttc

SEQ ID NO: 16824 - DNA, 432 bp, Oryza sativa
  Clone ID: uC-osflcyp002g04b2
tttgttttttttttttttatcacaatgcaattttcatttacattcaaaatctttaacacgaagtcacgaacacagttggatataaagtattcctgatggaacccacgaacaacttgatttctctccaatcaggcttcaacaaaaatagaaaatacaaaagcttaaaagccttaaagagaaccatttcatctgtgactacaaggccgcacagatgataaggttttaggaaaatacataacatacagcaacaggagacaacactggtattgtgttgctgcctggttttgcatgcagcatctcaccacaatccagttcagtagtattcatctcaccacaatccacttcagtagtattccttttcaccacaatccacttcagtagtattcgttaccagcgctgtccgaaaccatgtccattgaggtgtcattggag

SEQ ID NO: 16825 - DNA, 482 bp, Oryza sativa
  Clone ID: uC-osflcyp002g05b2
ttggtttttttttttttttggggtttttttttttttttttttttttttttttttacggaaaaccatccattttttttattggcgacgaatttatcagatatgctctaaaaacaaatcttggggggatatagccggggctttggtttcacatatcctcacccaacgataattggaggactcttacaaaaaaaccggtcggagggggggggaagagattattacatatgggttaagagcagaggccattgggatgggccataaccaaattggaaaataaaaatatatagcatattatatattggtatatcatcaacatagcccaaaacaaaggtggatactattattataggcaggaatccaccagcgcgaggcttgatcttagcttaggtgccaccagactcctcgcaacctggggggttggaggcgatgaaactaaacaactgcacctgcctgacgttggccaagcccatgataccgacaaa

SEQ ID NO: 16826 - DNA, 455 bp, Oryza sativa
  Clone ID: uC-osflcyp002g06b2
tttgtttttttaatttttttggtttttatttttttttttttttttttttttttttttttttttttttttttttttttttaaccgaaaggaaatttattgacataaaaactttacagggcccaaggacaaaaaaaattcagggggcagggggattagggcaaaagcaccctgggaaggccatgtccccaatttataaaaacaaccctcagggctaaaaacagggcaaaagggcggggtgctttacaaacccccacctttagggtaaaaagcccccaaacagctttttgaaatccctccaaaaacaaaaaggggggggggggggcgcataggaaaccaccacgcgaccctttttggaaaccaaaaatttggagaaattccacttggtgctataaccaaaaagcccacctttgttaaacataaaatccttggccgggggggcaaattttgtaccgcgg

SEQ ID NO: 16827 - DNA, 356 bp, Oryza sativa
  Clone ID: uC-osflcyp002g07b2
agtaacaatattgggtagaacaacagaccagatcgatcacatagaagttatgaacaccaaataatgaaacaattgaagaggcaaaaggaacaacaggacaatgtaatacaaggccgaccgctgggtgggaaccattaatgggtatcgtccctcgatcatggatgaaggaacagatgtgcagctcgacacaatcatgcacgtgcgggaacactagaagcgccacctttcgctaagtgtccattgagttccttagcatcgacgatgcaactgtctacgcacttcttgttggtggcaggatcctccttaaattctttgctacacccctcattgcacaaagcgctgaattgctccatcga

SEQ ID NO: 16828 - DNA, 371 bp, Oryza sativa
  Clone ID: uC-osflcyp002g08b2
tgggtttttttttttcaagcggattcaaggctacgtcaacaactatggagagaaggtaaggtacatggccaaacgcatggtaaatacaacagtacacaaactagataaatctaaccaatggggactatagttagttttgttgggtatcctttggaggcagagaggccattcggtagcctaaaccagagttgtcacctgcagctgatgagctcctggggatgcatctacatacaaacaacagtagccttggatgaacatgcgggtctaggtggtcattttgccgtgacacaattccacagcaaaatggtacacgttatgggagaactcctgttcctctgaatatattagattggaggatgctgctgctgctg

SEQ ID NO: 16829 - DNA, 340 bp, Oryza sativa
  unsure (1)..(340): unsure at all n locations
  Clone ID: uC-osflcyp002g09b2
gcgccccccctttttttttggtcttttgaaaccccgggttttaaaaatttatatatatctcccccatctagaggagctcttattgccaggtaattaattaacttgtacaagatacaagcacaccacacgataatcatacgngacggacgagcataagttactcttagctacgtatataccgagtaggtgggtagctagcagagaataattattctgcaccaaactcgntgatatcaacttgagccttgctagagagctccttcgatgtatcaatcacctcagtagtagggctggatcttccagcgctggttgtagccctcgtaccacttccaaagcacta

SEQ ID NO: 16830 - DNA, 275 bp, Oryza sativa
  Clone ID: uC-osflcyp004a02b1
catgcttctcgtcgacaagctcatggagaacgagaagcacgtggtcattgtcgcagacaactttttcactggttcaaaagacaacctgaagaagtggatcggtcacccaagatttgagcttatctcgtttgatgtcactcatctcttgtttgtggaggtttgttcttatttttaattcttgcttgttctgttatatctatttttttatatcattattcttttaagttcattttgtcatacatttttttgtacctttaatcttgctttgacttttt

SEQ ID NO: 16831 - DNA, 107 bp, Oryza sativa
  Clone ID: uC-osflcyp004a03b1
tatgtttttagggacataacacacaaagggaagggagattagttttacgtggcacgtgcgtttctttagaatgtacaataagttgcattaggcgatgcacatctaac

SEQ ID NO: 16832 - DNA, 119 bp, Oryza sativa
  Clone ID: uC-osflcyp004a06b1
tagttttttgggccaaagaatggcgatggtaggaaagggattataacggataaaagagacccatgacagtgggagcgaggtgaaaagttacgtgagccggcacggaaagcgggacaagc

SEQ ID NO: 16833 - DNA, 229 bp, Oryza sativa
  Clone ID: uC-osflcyp004a07b1
tttttccataggtaaaacaatgataatgtgagtagatacttatatcacgtgagttgcatctaatgagcgagtgtgcaaactgcaactttaggtgatgctcaacgaataattcgtcatggaccatgttgtatggatggctgagctaatagtctgccttatgaacagtgcgcaaaacacatgtaaaattttatggttcatcttatgcagaatgaaaacgtttgcatctttg

SEQ ID NO: 16834 - DNA, 73 bp, Oryza sativa
  Clone ID: uC-osflcyp004a08b1
ttcggtttagcacaggctaaacatataaggaagtgaggagtaacatatataatcttactagactaaaattatg

SEQ ID NO: 16835 - DNA, 243 bp, Oryza sativa
  Clone ID: uC-osflcyp004a09b1
tcggtttaccataggctaatgtatggcaaagtgaggtgttacacacgtcacgttggtgggtacaaatgagcgagtgtgcaaactgtgactgtaggtgatacacaacgaataatatgacgtggaccatgtaatatggttgttcgtgcaaatatgccggctgttgaatattgtgcaaaaaacaggaagatctttaggtatcatcaagtactgaaagagaacgttggaatctttggctcaatcggg

SEQ ID NO: 16836 - DNA, 237 bp, Oryza sativa
  Clone ID: uC-osflcyp004b01b1
gtttgtttcaagggaataatgcggaaagctgtcaccaagattattgagacatgcacagaaggagagaagatgatgactgttcatgagtttctagatcctaaaaggaaaaattagattcatacttccgtggattagttggtcgataggcattgccatatgaaacggcctaccaattcataacctgcataagcttatctgggaagccgctacatgtggagggagcatattgcattcatt

SEQ ID NO: 16837 - DNA, 51 bp, Oryza sativa
  Clone ID: uC-osflcyp004b03b1
acgctttattaaacaaaaacaactcaaaaagcgagagaggacgtaaagaaa

SEQ ID NO: 16838 - DNA, 179 bp, Oryza sativa
  Clone ID: uC-osflcyp004b09b1
tctgtttaccatggtttaaaccaagatagagtgcgcagttacattttctaccttagttgtcaattgcgaccgtgactgtgcacaatatcgtatagcttgactagtagactttaactacatgaaacgtgcattagtgtaaagatagaaagtagccaggccatagagaagtacacaaatta

SEQ ID NO: 16839 - DNA, 243 bp, Oryza sativa
  Clone ID: uC-osflcyp004b11b1
tttgtttgccataggcaaaactatgctaatgtgagttctcacttatgtgacgagagtgccagacaatgagcgagagtgcaaactgagaccatcgctgaggctcaacgaataatactacacgaaccaccggatatggatgatcccgcaactaggctacacgttgtatattgcagacatatgaggcagaaatttggggatcatttaaaactgagtgagcacggtggaatctctggctcaatggga

SEQ ID NO: 16840 - DNA, 109 bp, Oryza sativa
  Clone ID: uC-osflcyp004c01b1
tatgtttatatggagatgaaccagaaagctaatgggtaacaagatgagatggactctaaagtataaaatatgactcccgtagaactgatagtagaagcacaaagaaaat

SEQ ID NO: 16841 - DNA, 299 bp, Oryza sativa
  Clone ID: uC-osflcyp004c02b1
gtaaggtaatcttccagtgagcttatactgtccatattcaaatcctcacttattttcttgtggctacctacagcatatgagtattgacagcttcatactgccaactcaacttaaacatcctttgaagttgtagttcctgttatttaatcttttaatcgttcaaaggggaagatctgcccaaaatatttctttggctatccactttacaaggggtgattatcctttaaattcttaacttctttccataaataattcctggtgaggattctatcaataatatatttttgaacctcttcata

SEQ ID NO: 16842 - DNA, 66 bp, Oryza sativa
  Clone ID: uC-osflcyp004c03b1
tttgttttgcagagcgacatggaggaatatacgagtgtacacttatcccacctggagaaacgtttc

SEQ ID NO: 16843 - DNA, 136 bp, Oryza sativa
  Clone ID: uC-osflcyp004c08b1
tttgttcgtaaaaatactaaaaccgcgggaatcaatcaaaagccgaacgcgtttagccaaaagatatattcccccaagaaaagaagagagtgagggatgaatgcaaaggctaaattaaaagcagaacatcaaacac

SEQ ID NO: 16844 - DNA, 139 bp, Oryza sativa
  Clone ID: uC-osflcyp004d01b1
tctgtttacccccaggttaaaccatcgttgcgggggggaatacacattcgcgggtgtgccgaatttaccggacgaaggggcaatagctgaacacgtcgacatactgccgacaaacaactaagcaccaattatattacct

SEQ ID NO: 16845 - DNA, 190 bp, Oryza sativa
  Clone ID: uC-osflcyp004d07b1
cactcactataaggaaagaaggcacgccagcacggacccgaccggaaagcccggaccgacccacgcgattctgtaagaacatagaataaacaaacggaaagacgaaggaaaagaataagagaaaggacaacgaaaacaaaaatagcaaaaagacaaaacaggaaaaaaagggcgagagacataaggacaa

SEQ ID NO: 16846 - DNA, 314 bp, Oryza sativa
  Clone ID: uC-osflcyp004e02b1
attatacccacacgagcgctagctaacgaaggcacagtgcgcttcgcgcgaaagatcggatgaaatgcccaggccggacaggagcgacgcgcacctgtccccggtgggggaggccgctattgaggccgaggtgttgtagtactactacgaggcggagcccaagcgccactccaagccctaccgaattgagccctccgccgtttacaccgacactgctcgttctcgtctactcccaccccgagcttgacaggttccagcagttcgaagcccacaccttgaaaatatgtgcgcgagggtggcaaaggcagggtatg

SEQ ID NO: 16847 - DNA, 85 bp, Oryza sativa
  Clone ID: uC-osflcyp004e04b1
gttgatgtcacggaagagagaaaggttactgaggcaggacatgtggacatgaccaaggattgtactcaaaatggagaagaacaac

SEQ ID NO: 16848 - DNA, 114 bp, Oryza sativa
  Clone ID: uC-osflcyp004e11b1
ttgtttacccacaggaaaatatctgcgctggggaggccatggataggaaccaacagaccttagcttatcctaccttagctcaacccaaagcttgaagcttccattataagaact

SEQ ID NO: 16849 - DNA, 280 bp, Oryza sativa
  Clone ID: uC-osflcyp004e12b1
ttgttttttttttgtacagccagggcaccagccaggcaaaaagttttgcatgcaaggaatccagtattacaacagtagagtactctacttcttactgtatgtgtaggagtatttacagagcgtacacggataggagcgcctgttgagaacatcttgacgagttaatcatgcaatgtaagcaagctcaaggatagaaatgtgcaaatgaacaacaggtcggtccgcgtggttgcttttgcatagcttagattgcttttgattaccccgagatacccactac

SEQ ID NO: 16850 - DNA, 80 bp, Oryza sativa
  Clone ID: uC-osflcyp004f04b1
tttgtttttgcgataaacacacacgaagtagaaggaggaattgactacaagaagccatatcttgaacgcctgcgcacaaa

SEQ ID NO: 16851 - DNA, 319 bp, Oryza sativa
  Clone ID: uC-osflcyp004f05b1
gacttatccgtatcttcggaggcgtgcgtaactatgggagcttctaagatcgtcttcctcagcacctttgtatgacagttctaatatctgggaaggatcatcacatctttacttgaataatatcgcggaagactcactggcagtggagctgaatgggataagggaaatggaagacctgtttcagattcattcactggatccaattttccaagatgaatctgtacatatgcttgcgttaaaatggacacaacatttctgtgaggattacaaaacccgtatatatataggtgtccatttatttaccccagcagtgccattt

SEQ ID NO: 16852 - DNA, 228 bp, Oryza sativa
  Clone ID: uC-osflcyp004f06b1
acgatttatatttgactgtaaggataggaagaagatcaagaaccgtttccgtctccgttaggttatttatttatatatctactcgaactgattcctaggaggagcgaatcgaacaagggcaagatgcattttacaaatctgctgctgtaggagcccatcatgatggctatcatcctggtgccatccaagctcagattcttcctggtgatgactaagatcgtggggacg

SEQ ID NO: 16853 - DNA, 186 bp, Oryza sativa
  Clone ID: uC-osflcyp004f07b1
ccttccctctccttctcctgcacatgcaccggccagcgtgtgggagtcggaccttgcccgagcgatgtccaagatggcggcggagaaggtgctgtctgtgccggccactgtctacggtgggatgcagtcctccggtgacctgcaggctttgatggcggctgcggctcgtgtgcggtccgtctagac

SEQ ID NO: 16854 - DNA, 131 bp, Oryza sativa
  Clone ID: uC-osflcyp004f11b1
attaaacaaatacacctttcttacttctttttgggggggtgtataatggtgtgcgccgtcgcgcagcagccagcagcagacgtgcacagacagcagagacgcgctgcgcgcgtgacggccggatgagcgag

SEQ ID NO: 16855 - DNA, 458 bp, Oryza sativa
  Clone ID: uC-osflcyp004f12b1
ttcgaaacctcgaaaccctagatcgccatatggcctcctccgccgccgccgccttctaccgcgacagggaggacgcggcgccgccgtcgtccggccccgggggaggcggcgccatggcggcgtacgacccgagctacgtgccggactcggtgaagacgttcgtgtcgcacctctaccgccacatccgcgaccgcaacgtgtacgagacgcaccagatgtacgagggcgggttcacccgcctctccgaccgccacttccgcgacacgccgtggccgccggcggaggccgtggcggcgcactgcgacggcgaccacgtttttctccttctctaccgggagctctggttccgccacgcccacgcccgcgttcagtgcctcacccccgcgcaacgcgccgagtcgtgggacaactactgcttcctcttcagcgtcgtacctcagggcgtcgtcaacatgcag

SEQ ID NO: 16856 - DNA, 549 bp, Oryza sativa
  Clone ID: uC-osflcyp004g03b1
gtttgttttaagcagccggtgacggtgtacatcacggacatgaactacgagcccatctcggcgtaccacttcgacttctccggcaaggcgttcggcgccatggcttgccctgtgaaggagaccgagctccgcaaggacggcatcatcgacatgcatgtttaggagggtgcgctgcaagtaccccggcggccagaaggtcacctcccacgtcgagaagggcttcaaccccaactacctcgccgtgctcgtaaagttcgtcgccgacgacggtgacgtttatccagatggacctccaggaggccggattgccagcgtggaggcccatgaagctggcgtggtgcgccatctggaggaaggacacccgtcacgccactcaaggtacccttcttcattcgcgttaccaccgagttcggcaagagccttatcggcaaagacgttattccggtcaactggatgccagacgccatctactttcaaacgtcccgtctattgagtacggccggaaccatcctcctaattatttccctataattggacaaagggttcctt

SEQ ID NO: 16857 - DNA, 287 bp, Oryza sativa
  Clone ID: uC-osflcyp004g07b1
ttgctggctttccgcggtatctccgcgcttgatggccgccgtcgacgtggtcgtctgtgttcttggctacgacctcgctctccctttctgcttggcggtgccgtccatcacaactcatggcatcgacggcggcggcggcagctacgtgtcggcggtcggggaccccggcatgcggcgcgacggtctacacgttctctgggaggcatggaacttctgtaacgaggttggccaggaggccctcggcatgggcagtccccgcggcgcctactgctatgaccttgagaatg

SEQ ID NO: 16858 - DNA, 205 bp, Oryza sativa
  Clone ID: uC-osflcyp004g08b1
ttgtttacgcgtgggtcaccggccactctgcctagagcattattatagatcgtcgtctacctagctagcttcacttgtgctccactgcaaccagttcaccatattaacttaattcacacctagcttagctcactttatagcttagcttctcttaagcttaagctgatcttggataagacgtacatgatggtggtggtgatgaggc

SEQ ID NO: 16859 - DNA, 177 bp, Oryza sativa
  Clone ID: uC-osflcyp004g09b1
ttcggtttggcaaagtgcctatcccccttatgtcattgggaatgttggagggattacaggcatagtatctgctagtgcgctgactaatgctatgtttaaggctacactgatagagttacgggacctacttggaggcgcgtgtgcatactgactattcttttggctgcccaaattgac

SEQ ID NO: 16860 - DNA, 389 bp, Oryza sativa
  Clone ID: uC-osflcyp004h03b1
atttatttatcgggtaaaaccatatacactacctgacagctggaagctggctgagaaatctacaactggagttgtcctcggtggatacttggacatgatgacagtagtcttcttttgggctgcatataagacagactttttcccgataagatttcccgttgaaagccttgaaaagacagctcaagatgatccccaaaaacttgactatgctgtttacctccaagttagaaccatcagacaagctcttattgttgtcacaagggtccgaagatggacattagttgagcgcccatggaatctgctggtctttgctttcttggctgcacagctgagtgctacactaattgctatgtatgctgactgggccttcacctcaaataaaggcattg

SEQ ID NO: 16861 - DNA, 412 bp, Oryza sativa
  Clone ID: uC-osflcyp004h09b1
ttgttgtcctctatgtggtctttgcagtcgccactgcccttattcaggttgtttacatgggaatagtggggtcatttcctttcaactctttcctttctggcgtcctctcatgcataggaactgcagtcctcgctgtttgccttcgtattcaagttaacaaagataacaaggaattcaaggatcttcctcctgaaagggctgtagcagattttgttctgtgcaatctggtgctccacttggtgatcatgaactttcttggttgatgtcctgcccctacaactgatcaaggttttgtagccccagtttatggtcactggtcagaacaccctgatgtttgggagtgtcatagtatgagatattcatatgatctttcacacttcaccgatgtaattcgacaattttttgggaaact

SEQ ID NO: 16862 - DNA, 243 bp, Oryza sativa
  Clone ID: uC-osflcyp005a01b2
tttgtatttttaaattttgttgttttaaattttttttttcatttatttttctttttgctttccaattttttccttttaaaatggcatacattaaatcaaaagggggtacatgtcatatttgcgtgggtcgctaggcctacaaaataattaagtacatttgcttctgctcgcttcctagcacagaagaccaaatttccctctgacatgggcaaaccttcatcttttgctccactgaacgatccc

SEQ ID NO: 16863 - DNA, 400 bp, Oryza sativa
  Clone ID: uC-osflcyp005a02b2
ttttgttttttttatttttggggggtttttttttttttttttggacaacatgcaattcataaaacgtataggattacacgtagtacacacagatcgggtacatactggagaaaattaagatagaacatgcccacagggggggggcaacataaaggatacagctgatacaaagagagaatggggcgctgcatgtttgccccagggggtattttaattactttggtcatatatgctggagcaaataccggcttaattactaggtgatcaactcccatcgagctagcgggttaagctcgatcgatccatccaaggaggattaattgatctagctgaccttgttgcaatccggggagaagcttatggggaaaccccccttgaccccccacttggcggggacccc

SEQ ID NO: 16864 - DNA, 458 bp, Oryza sativa
  Clone ID: uC-osflcyp005a03b2
ttttgttttttttaattttgggtggttttattttttttttttttttttttttttgggcccaagcaacatggtgaaattttataccaaaacctggcaaccgggggccggggggatatacgggtttacacatgaacatttcacaggattgggatttccaattgccggaaggcgataaaaaacccggcccgacagggaaaaggcaaatgagggggggaagaaaagcaaagaaagaaaccagaaactgggttgggggcttgaaacttcaaaatttttattacaaagggtccagaggaaaaaggaaaaaatctggggaaaatttttggggcgagggggggttacaaagggaggagcaggagcaggttttaccttctcacttccactggggggggaccatttcggggagggccaccaccctttgggggggtccccacttggggggggacccggggaagacccta

SEQ ID NO: 16865 - DNA, 330 bp, Oryza sativa
  Clone ID: uC-osflcyp005a04b2
tttggtggttttataccaaggggggctgtctatataatgtataatccacaacgtacacgcacgtagtacaagtagtactgcatgtacatgcagaagttcatatgcatatgcatgggacaaaaactgatgtctagctctcaggtacgtacgtagtcgatcgacgaataaattaaggaaacagatagcgtagtgaccgggcgatcaaccatatgcatgcatcgatctagcagcaatgctagctagtctcgtcatgcatggcgatcgatcgatcgacctagctagctagctctcattttattcagcataaacacagataacacaagatacaaa

SEQ ID NO: 16866 - DNA, 302 bp, Oryza sativa
  Clone ID: uC-osflcyp005a06b2
ccacacttaaagagctgggggatgaggcgccgcagcttgatcctctttgcggcgcctctttttttgtgtttttaaaaaaggggggaaaatataattttcaaaaatatcttcacttacaaacagcttataactaactggataggccggtaccactgcagacaatctgactatagagcagtcggatagtccgactgcatcagaacaatccaatcagagcatcgccagagaaaaactataagggacctggaaggggaacaaggttattccccaaaaaaaaacccaaggggaagggcccatttttt

SEQ ID NO: 16867 - DNA, 442 bp, Oryza sativa
  Clone ID: uC-osflcyp005a07b2
aatttttggtaattaaaaaattggggggttaaaattttttttttttttttttttttttttcttttttttttttttttttcttttttttttctcttttttttttctttttttttttttttttttttttttttgcaaacaaaaaaaaaggggccccaaggggccccctttttagggggaaaaaaaaaaaaaaaacccccccccaaagggggggaaaacccccaaaaaccaaaaggaaaaaggaaaaaaattttcccccccaggggggggggggccaaaacaccaaaaacaaaaacccccctttttgaaaaaaaaccccgcagaaaaaaaacccccccccgggttccaaaaaaaaacccgggaaacggggggatccacaaaaaaaaaccacccccaaaaaaaaaagcccgaaggataaaaaaaaaaaacgcccgggggggaaccc

SEQ ID NO: 16868 - DNA, 387 bp, Oryza sativa
  Clone ID: uC-osflcyp005a08b2
tgtgtttttttaattttgggtggttttttttttttttttttttttttttttttttttttttttttgcaccccgcataacaaaattccccctgccctgggcgggttatttttttcacaagcaaaaaaggggacccggggccatattataaggatgggtcccacttacaaggggggggaggggaaaacaaaaggcaacccattttcccaactagcattaacaggggggggggggcctgaaaaaccccccccccgttttatttttagcataaacaaagcataccgggttttccgggtcgggggccatggaataccctgggaaggaaaagggttttcctggggcttggccctgggggggatcagggggaagacaccggtggtggaaccccc

SEQ ID NO: 16869 - DNA, 448 bp, Oryza sativa
  Clone ID: uC-osflcyp005a09b2
tgtgtttttttttttttttgtgttttttttttttttttttttttttttttttttttttttttttttttttttttttttttttgaaaaaaaaaaaatttttttttaatttttttagggggcccaaaaccaacttggttattttttggggggaataaaaccatttttcccaacccaaaaaaaacgaatttggtgggcccaaattcctcccaccccaattaacccctggtaaggtgcggggccccattttattttgcggggaaaaaattgggggggtaccccccacccttttttttaaccgggtccgggaggggggccccaagggtttttagggggccctttccggggaaaagggcttggaaaaaaaacccacttggggaaaatgggggggggggccctttttatcttttttaacttggggttcccgaaacccctggggggattggggggg

SEQ ID NO: 16870 - DNA, 379 bp, Oryza sativa
  Clone ID: uC-osflcyp005a10b2
ttgttttttaaaacaaaggggggttttttttttattgtttaatctacaccttgcatcccattgaacaagatgcccatggagagcaaccagaagttcatacaccttagccaaggggaactacatgtaatggtaccatcagggacgaaaaacacctaacactgattagatggataaagggattttggactggagagagccactgagctcgacaaccattgaactagaagataagatgattctgacacggatggctaaggataactgggaacgatgggccccaccaactattattttacttttcccgacggacagagccgcccaagccccccagcgtgttgccaccaaaggcgcctgcaccgtcctcaagggcacaccctta

SEQ ID NO: 16871 - DNA, 315 bp, Oryza sativa
  Clone ID: uC-osflcyp005a11b2
atgacgcgccgtaagctttatcctctttttcggccgcccttctttttttggtgtttttataaaaaagggggggtacaatataatgtataatccacaacctacacccacttaccacattgtagctcactgggtaggcccagacctccttatacaaattgactggacaaaaactgatgtctatctctcaattaccaacatacacttacagcatacttccgggaagaactataagggaccttgtggaggggaaaataggaattgctgaaacaaaaggggtggggggcccccttttttcgaagaatcactctctttaaa

SEQ ID NO: 16872 - DNA, 284 bp, Oryza sativa
  Clone ID: uC-osflcyp005a12b2
tttgtggttttataacaaagggggggtaaaaatataaatttttcaaaacattcttacacttacaaacatcttataactaactgggtagtccggtaccactgcagacaatctgactatagagcagtcggatagtccgactgcatcagaacaatccaatcagagcatcgccagagaaaaactataagggacctggaagggggacaagggtactccccaaaaaaaaaccccgggggaaggggccatttttgtttcattcccaatccctatcattggagggcagcagc

SEQ ID NO: 16873 - DNA, 447 bp, Oryza sativa
  Clone ID: uC-osflcyp005b02b2
tttgtgtttttttatttgacgggggaaaggcatccaactttgtaatgctacaagcaatacatcgggcaactacatgacctaaatcaaaaatggaatggttttgctcatattaacgactgtatctttaacaatctccaggactacaactatgccgagtctacttggctcacaacagtacaagaaattgggatgtcaattcttatcagaaagcgagaagaaaaaagatacaaaatggtaaagggcctccagttctgaaccctcccagttatgaccaccaccaccgcttggatgccttccacgacagactgcaaggctggctgccaactacgggttccctcgttcgccttgctgggtagaactcaatacggcgtagtggaactaaagcaaaattgttccagcattagacaacatccaactaaattcaggttgaggcaactttctttcgga

SEQ ID NO: 16874 - DNA, 446 bp, Oryza sativa
  Clone ID: uC-osflcyp005b03b2
ttgttttatatattttttttttttatttttttttttttttttttttttttttttttttttttttttttttttttttttttttttttttttttttttttttttttttttttttttttttttaaaaaaaaagggggaaaaaacccccggggccttttccccacaaaaaaaattaacctttcccccaaaaaagaaaaaatccccccaaaaagggcccttttcaaaaaaaaccccttcccccctttttcccccccgggaaaagccgccccccccccctcttttacgaaaaaaaaaaaaaaacacaccgtgggtcgacgggtttttcccccccctcccaccaaaaataaccccccccccgcaaaccctctgagccccccctcaaaacaaaaaaagggcctctttccaacaaaaaaaaacccccccaaaaaaatcaaaaaccctcccccccc

SEQ ID NO: 16875 - DNA, 388 bp, Oryza sativa
  Clone ID: uC-osflcyp005b04b2
tttgtgttttttgacaagaggggggggcaaattatagcacacactatatcattgggatgatacattaacggggagccataacgttcattaacgatacagaccctggcataatcatgatgatgaccgggcttcatacacagtacacgtacggacacgtacacacggttccctggtttggcacaatgtgagggacaggggaccacgcacgcgagcaggcactcttaccttggttacaatttgtactagcggaaacccgcccagtcccctgcacggctgcacccgtcgtaccgtgtactacacggtcacgtgccccgtgcgcgaaaaaacaccaaacacgtgtaccggtacccaccccggggttcaccttaacggggaggattagcttggc

SEQ ID NO: 16876 - DNA, 298 bp, Oryza sativa
  Clone ID: uC-osflcyp005b05b2
ttttgtttttttgaaaacagggggattctgacacagcatgcattgcattgcgtgggtttacttttcttattctttttacagcagtgagccaatgatgcatcaagcagcaccagcagttgcgaaaagcatacaggttaactgcaaatgcaggatcaatttattctaaaatctaaacaggtttcaatgaaaatttacaacgatcgtgttcgaagtttcgattccaccctaggagcagtaagaaaacacagttgatttgccgaaacatgtttctgggctccatctgattgcaagaattatg

SEQ ID NO: 16877 - DNA, 241 bp, Oryza sativa
  Clone ID: uC-osflcyp005b06b2
tttgtgtttttttatttgacgggggagaggcatccaactttgtaatgctacaagcaatacatggggcaactccatgacctaaatcaaaaatggaatggttttgctcatattaacgactggatctttaacaatctccaggactacaactatgccgagtctacttggctcacaacagtacaagaaattgggatgtcaattcttatcagaaagcgagaagaaaaaagataccaaatggtaaagg

SEQ ID NO: 16878 - DNA, 415 bp, Oryza sativa
  Clone ID: uC-osflcyp005b07b2
ttggtttttttattttttgggggtttttttttttttttttttttttttttagagcccccaacccagtttttcaattcaaaaagactgcccaaacagaccaaggggttcattatagcagcaaagttttttaaccccccacatcaaagagacccttatgccataagataacttggagcgcggatcactaacaaattttccgcttaggcaaccccctcgatcttggggccagaaccctttgcccctgccgggggaggattttccttgtccatgcccccgggcatggtcccgccagggccctgggacattttggggaatatgggggtgcaaattccctccagctcctttattttgtgataaaacttataaaccttggggagctgggtgccctcccgccaccggggggcccgatccaagg

SEQ ID NO: 16879 - DNA, 418 bp, Oryza sativa
  Clone ID: uC-osflcyp005b08b2
tgtgtttttttttttttttggggcgctctcaaagtagcatatattattcaatcttgatgaaagagggacacaagccatcatctatagggatggggcctcttacaaacttcaacacacgggtaacaagcatacactcaagagtcaagagggggctaggttttgtgtgtacaatggaacacgcaggcatgtacacaaccaagtatactccaccccaaactatagtctttgcaatggttttggcagttgctcaaaaaccatgaatcttgatgtgttccttcttcacaatgccggcctgaacaagaaaatttgatacgttcttcctctgatcaccctgaagttgaatgacctggccaagctctgggtcctggacaacagtaccattgcagcaaaactctttcttgagatctttgaggatctt

SEQ ID NO: 16880 - DNA, 337 bp, Oryza sativa
  Clone ID: uC-osflcyp005b10b2
tgtgtttttttattttttgggggtcacacagaatgtacatggaacaggcaggtatcagatattcacattggaccgtctcctctcgaaagcatatgtacatggcgcacgcatgcaggtgcccgggtgtctgcacaaatatttttcacgcccacataccgtacttcaccggcgtgccggtcggcttgatccatggctcggcgtgcaagaagttctgcagggtgaacttggtggcctccttcttgctgatcaccttcttgtaccccggccagctgacgcggccggcggtggcggcgccggcgcccttgttcccgtactccgcgtaccagagcgtcttgag

SEQ ID NO: 16881 - DNA, 319 bp, Oryza sativa
  Clone ID: uC-osflcyp005b11b2
caacaccccctccccccaggggggttccaaaatggcccccggaaaaaattttttttccaaaaagattcccccagatttgcccaaaaggaccttttttggggctaaataccccccccttccaggggattaaacagggaccccccccatgaattctaaagggggcctattcccttgattattccaggggaaaaggggtttaaaaactaagtttttttacaggaaacccagggcccgaacagggggttttttggaaatcccccccaaaaagggggggccgccttgtaaaaaaagacaggggccaggggggaaattgtgcccc

SEQ ID NO: 16882 - DNA, 290 bp, Oryza sativa
  Clone ID: uC-osflcyp005b12b2
tgtgttttttgaattttgggtgtttttttttttttttttttttttttttttttttttttgaaaaacatcccatcaccttttatggggcaggtggggggccaaccctgccctatgccgggtcctaaaaaaaaaccaaaaaaacagtttcccagcttttatgttttttaacatcgcaacccaaaaagggtttatacaatttggacaacaaactcctttttttgacatagggaactaacccaggggagggtcattgggctccattttactggggaaacaactaaaccatttgg

SEQ ID NO: 16883 - DNA, 396 bp, Oryza sativa
  Clone ID: uC-osflcyp005c01b2
tttggggttttaaataggttggggttttttttttttttttttttttttttttttttttttttttttttttttggggtttttttttttttttttgaaagaaaggacaaaaaacaagtcaaacaaccaacagggggttgggggggtgccaaaccccccacccacccagggggggggggggaaaaaacaagaatcgggggggccctccaaaacttcaaaaaggagtttcaacaaaaaaaaaaacctgggacaacctttaaaaccaaaccaaggggcgggccaaccccaaaagggcccgaaaataggccccaaaatccccggaagagacccccgggggggggaaaaaagcccccctttgaaaccggggggggaccttttggggaaaaaatgtttcccccc

SEQ ID NO: 16884 - DNA, 424 bp, Oryza sativa
  Clone ID: uC-osflcyp005c02b2
ttttggtttaaccaaagcgaggggaattcatggtaacatcacggacgaagaacacctaacactggatggatggatagagggcttctcgactcgagagagccactggacacgataacgactcgactcgatgataagatgattctgacacggatagctaaggataactggccacgatgggccccaccaatcaggtcctccagttcccgccggagtcgccgccgtagccgccgccacgggtgccaccgtaggcgtcgccggcgccggcacgggcgccgtcgtagccggcggcgacaccgtaggcgccctcacggggcccgtaggcggcggcggcaccttcttcgtaggcggcgcctccacgaccgcggcggaggcggcacccgcggcggcgtagcccccggctcccgtcgcggagcggggggactgg

SEQ ID NO: 16885 - DNA, 204 bp, Oryza sativa
  Clone ID: uC-osflcyp005c03b2
tttgggttttttatattttttgggggttttaattttgtttattcccccttttttgaggttctgttttcaagacttaagttcaaaaggggacaacctatcttacaaaaccccaagagtggggggctttaattcacggaccccacacaaccgggctacacaaaaagaagggcgcccttgagggggggcaaccaaccacccccgggg

SEQ ID NO: 16886 - DNA, 342 bp, Oryza sativa
  Clone ID: uC-osflcyp005c04b2
tttgttgtttttttatatatgggggataacaaactgaaactgcatcagaacacccgcaagcttattaacggatacacaattaaccacctatagctgttggatcccccctgttacataaaactatatagcttcccaggacaacactaccagcaccgatgctagattgctaacaaacacattgtatttttgacttgatttataactctttaacaatagtagaacagctgttagaacaggtaaattaatggcaaaaacatatgcgagaccaaaagggtttttttttagagcttgtccttgaaatccgagagaggggtcatctggtgcttgagacccttccttttg

SEQ ID NO: 16887 - DNA, 315 bp, Oryza sativa
  Clone ID: uC-osflcyp005c06b2
ttttgttttttataattttttgtgtttttttttttttttttttctcaaaacgatttttccttttttttatttggaacatttttaattacaattgttgttgtaaaaaattttttaataaccaaatttaaaaactgcccaaaaaaaaagtcccccatgtctaaaccccaaagaaaaaaagttgggaggccaaaaaggccaacaagggatggcccctcattggtaaccccacccgcaaaaaccaccccataaagggttcgacaacaaaaaaaaaatccccccacggtttttcccccccttttttaaagaggccgcaaa

SEQ ID NO: 16888 - DNA, 447 bp, Oryza sativa
  Clone ID: uC-osflcyp005c07b2
ttgggtttgtcgtaaccatgggtggttgatctcggtgttaaatattcacatttaaattttcacctgtcaatcagtcaatctagctaacacgtgtgaatatgtacatcatgttaacttgcacaaattaaaaaatggatatgaacaagcaggaatggctgcagaataaagaatgagaacaaaccgctactatcagggtgtaggcctgcactagatgatcaatgtacacgcacaaggcattgccaaggtaggtaggtagatagaaataagatgttgctttgctgtatatgaagtccccagatttcttttgatccatgcgtccggtgcctgcctagccagtctaggactgtcagtaagctcaacggaatgtagagctgtcgtcacagagatctcatgtaaacagacataactggtttccatagaaatatgctgggagcatgtgaaaatttt

SEQ ID NO: 16889 - DNA, 379 bp, Oryza sativa
  Clone ID: uC-osflcyp005c08b2
tttgtttttttttggtctcaagaatcttaagatggtaaatacacacaagagagaggtacggtatacaagacttagtttttcttaagtacaacagatcttccattcctccatgatcctatcagcttctacacccaaaccacacaaatcaccatgcacgagccctcttcctccactgccaaatcaactcacctggggcttgagtagccaagcatccatgtggtgatcagtagccgatgtcagcgtcgtcgacgacgaggttgccggtgatgagctcacggtaggcggcgacgggccagatgaaccccctcgggaggagcttgacggcgagctcgacgtcgatgatgatctccctcatggccggcttcttctcgccgctgat

SEQ ID NO: 16890 - DNA, 439 bp, Oryza sativa
  Clone ID: uC-osflcyp005c09b2
tgtgtttttttttttttttgggtttttttttttttttttttttttttttttttttttttttttttaaaaaggcaaacagttcctgcctacattcccttttttgataaataaaaaaacttacaaaacccaactgaaatccaaaattccccagggaaaccgggccccaggggggggccctacccatcccggaggggtttatataaattactagcaccttttcttgggggaaaacccaaaaaagcaaggggatccccgattaaccaaggaaaaaaagagggtttgtttttacctgtttaagctggggggatctcgccccccccccgggaaattccctggtggaggtccttgggggccttgccccccacggggcaaccccccttgacccaggggccgggggtcttcttgggggggccggccattttcttggccatggacctgg

SEQ ID NO: 16891 - DNA, 361 bp, Oryza sativa
  Clone ID: uC-osflcyp005c10b2
tttgtttttcccgcaaatactgattcatatgttttgacaacatttctcccgacgcatgctcattgtggcagacgcagctgaccacctagagcttttagttcaccattattatttagaccaagcatacgtcccaagatcagaacacatgcttacaagcgaaaatactaatagcctggctggctgcttcacagaataaccaaacgacaacctcaacagataaaaatgccacggaatgaaaacaaagcagcgaatcgtcaccagaagtcccatcttactcatcaaacactccatcattctcctccaacgcatgctgtccccaggggagaagattgcccagtttaccttccttaacaggagcagg

SEQ ID NO: 16892 - DNA, 332 bp, Oryza sativa
  Clone ID: uC-osflcyp005c11b2
tgtgttttttgatttttgggggggcgcggcaataaaacattgcattgaattctgaacgataaacaccaggaaccggcgtttatttgaggcaagcactgcccaaaatctcgcaaaaggactgaaaccttagacatagtacacatccatggcaaacatggatgccaaatgacaactacagaaaattatcaaattcgaatgcagctgacggcttctcctgctgaagatgcatattttcccctccattacttggatgtgctctctccatggacagccaatgggacggcgctggccaggctgcggtatttcagagcatagaacatctcaatgtaacg

SEQ ID NO: 16893 - DNA, 301 bp, Oryza sativa
  Clone ID: uC-osflcyp005c12b2
tgtgtttttttattttttgggggtttttttttttttttttctcataacgaatcataccatatttcatgggaacagcttaatacaatgggggggcagaaatatcttatgaactaatttaagaatttcttattaaaaatgtacaccatgtctcaaccccaaagcatgaaagtggggagcccaaataggccaacgggggatgggcactcatggctatacttaccttgttataccactccatcaagatctttactacaaatccaaatatagcccgatgttttctgtcggcattttttaaagatgc

SEQ ID NO: 16894 - DNA, 393 bp, Oryza sativa
  Clone ID: uC-osflcyp005d02b2
tttgtttttttttttttaacaccaaacaagcgtcagttttattgccactacagaaacttacagtatatatgttcatatataggagtatatgcaactactggaaagatatactgggtctagctagggattgatcatggagatccaggcgcaatatgtgcacacgatcttctgagagatgtagacgtagacggcgaaggagaagctcatgagcgtgacgtccttccagtcccccttctgcttggggcttaggcttttccgcaccggcctgccgggcttcgccgggtggccgaacaccctttggggcatggcgggggcccaccacgcgcttttgttgcctgcttcttcttcttcttctccggccgcggccgcggccgccgcaccgggcggggatcc

SEQ ID NO: 16895 - DNA, 414 bp, Oryza sativa
  Clone ID: uC-osflcyp005d03b2
tttgtttttttttttttttttgggacaagcaagaagtatatatattcatccatttctcaaactactacaagaggtcgagaggaacacataatcaggagggattgcgacaatttacagcaacaggagtctggagatcgaggcaagaacaagacaggcagcagcagagctaccctcttcatttccactgaatttttacacatttggaatccatggaaaccgagccttccctcccgtcgtcgtggtgtcaccggagtccgatgagaaaaatggtcatggcgtgctcataatccggatcgctcgccggcgtcggtgaaggaggcggggcgattgttcgggcggctgttgaggagtgggttcaaagccttgacgaccatgctcatggtgggcctgaaggcccccttgtactggacgcac

SEQ ID NO: 16896 - DNA, 395 bp, Oryza sativa
  Clone ID: uC-osflcyp005d04b2
tttgtgttttttttttttttggggttttttttttttttttttttttttttttttttttttagggaaaagctcaaggaatcccttttttttttagggggtaaaaggaaacaggggcccccccggctggggttttggtttagcaaaaagaaagttcccgcattgccccagggggtgggaaaaaaaatcagcccattttggttccccagggggccagggggctcgaagcaaactggtaaactcggtcaatccaacggaaaaaggggggagggcaaaggggatcttattttttccacccccgagcttggttttttggggccacaacagggcccttaggaagcccaaacaggggtcccagagcgggagaattttgggggctttcggggcccggggttttt

SEQ ID NO: 16897 - DNA, 393 bp, Oryza sativa
  Clone ID: uC-osflcyp005d05b2
tttttgtaaattgaaaatgtggggggtattatacatgaatagaaaaagtgtattcttgttgccaacaaattgcgtcagctacaaagatcaaattacactaatgaacatttctaaatataagcagaagaaaaatagaatgaaatgaataaattatatataataggataataatacttggacgacatcaatgtcgtataacaacgtataaatagtcgatcaaaacggtatatatatatgtatgtgtttttttttgcgaggatcaaaacgtacgtagggtaaatttaagcggacataaaccccataattgatgatatatttacccatgggcatatatatatgcatggatctggggttgaataatgcgatccaccttgggaatgaattaattaatct

SEQ ID NO: 16898 - DNA, 458 bp, Oryza sativa
  unsure (1)..(458): unsure at all n locations
  Clone ID: uC-osflcyp005d06b2
tttttgttttttcctaattttaggccaaaactaagccatagtcttccgtagatggttatagaggtaatgtgtacattcctagttagaatacaaagaaagactgaacaataatactgtctccgttttttaatatatgacattggttatcagagtaacctctaacttaataacactagtaattaactgcagtgagtaagtgagtaatcaatcagggaagagctcctccatgacagctggagcgatccactggatctggatgtgggtgatctcccacagctcgtctccttccatggcgaccagcacccccttgtccttcatctccacgatcatccgcttcagcatcctcggcaccagctcctgcatcacgccggggcctnnncgccgncgcaggtgcgacttgatgcacgtgtccaggcgcgcgagcacccccaggcagaaccgtcttgaaccccgcccct

SEQ ID NO: 16899 - DNA, 439 bp, Oryza sativa
  Clone ID: uC-osflcyp005d07b2
tttgtttcaagtaacccaacggtagtaaacaataaccagtaccgcacgaggacgttgcctcaatagtcaaaataacactggacaaaccattctccaagtcgaagctaaacttggaacacatatcctacgctgttggataagtatatttggccattcgtgtgacatgttccacctccaatcaatgaaaattgacttatgtcaatcaagcagtcgagggaatctcaaaggaaatttcccaaagaatgcatttaatacctatcggtatacagtaaaagttttaatctttttgccgccctcagtatggccttcttcctcttatgggaatgctatttgagccagatctgttaccaaacccaccacgcccccttgaccggaaattgcctcctcccatagaactggcagatttagccatagattctagcgctggattcacaacctg

SEQ ID NO: 16900 - DNA, 384 bp, Oryza sativa
  Clone ID: uC-osflcyp005d08b2
ttgttttttttttttttttgggatttcgaagaaacaactgatagtaggtttgatacagtttttgcactacgctgttactgcacatgggagcagaacatattctcgtagagatatacaaacatcacacagaggaagcagcagcaagcactctagagagtcagcccccaaaacttccccggacaaatgcagctgcttaattactccgttccagcgatcttctttttcaaggtctcgatgtcggtcgccaactttttcctgctctccttgaagaggaggtagcggtagacgaaccacccggtgtagccgaggccgacgagctccaggatcttggggagcagcggcacggagttgatggcgccgacgacgacggtggtgagccagagg

SEQ ID NO: 16901 - DNA, 390 bp, Oryza sativa
  Clone ID: uC-osflcyp005d10b2
tttgttttttttattttttgggttttttttttttttttttttttttttttttttttttttttggggcggggaattccccatatatattaatccccttaaaaataaagaaggcatcccccattttgggtccccagcctttttttaaaattttttttacacaggggggagaacccccccccctttggggaccgggggaccgaccttacccataggcgggggggggaccacacaaaacggggggacccatgcatgagctggggggaattttatgggggaccaatcattcatatggaggggggaccagggggctaattatagctggggcttggcggcaatgggaagggcccccgggaccacccggttgaccttgtttttgggggccttgagccc

SEQ ID NO: 16902 - DNA, 416 bp, Oryza sativa
  Clone ID: uC-osflcyp005d11b2
tttgtttgattgattatgttggatttcagttgctagtaatatgtcatagttgtagtttgacataaagaaggaagcaaaaaagataaattagcctataaaaacataactaacaaatgtagacaaatcattcattcccattacattaaaaatgatctagtctacatatggacggatgtaagcagagttcagctcccaaatctttagcgatttggcagtgactctaacatttgtggcattgttgaaaagaaagattttggccgactcgtagatggctttggtgggatacacacgcgaggtaatgcatgtcctccctccttgagcgaagccctcaactatggagtgatcaaccaaaatccttattgacaggttttcgccatctagcacaggtaccaagctgccatagactctttaactag

SEQ ID NO: 16903 - DNA, 455 bp, Oryza sativa
  Clone ID: uC-osflcyp005d12b2
gttgttttttgaattttttgggtttttatttttttttttttttttaagagggaatagaaaattaatctccattcatataagaagatttgatttttcatttagccattagcctccaactcatggttttcctttcccccttggtatatatcactcaaaattttttggtagataagagagggccccagcaatctggtgagctttttggtacccaggcaaaaacctgtgaagatattggcagcctattgaagggcatatacaaggaaagcccctactccgggaatgcccattatcaaactggccacccctggaataggggggggcgcacccccaatcgccctcccgggttttggatcatattttgggaacccgttttttggggccttgcattgggggccgccctattcatcaaggtggtctttaaaagggttgggaaggaagtttatttatcccccatc

SEQ ID NO: 16904 - DNA, 432 bp, Oryza sativa
  Clone ID: uC-osflcyp005e01b2
tttttgtttttttttttgttttggttttttttttttttttttttttttttttttttttttttttggaacaaaataataaaacattttacttatcccggaaaaaacggggggggtattcttgggatcgggggggcccccaccaaaagggggttcccaaataaaagggggcccggatttccccgaaaggccccaaaggtaagctactggcggggccccaaacccccaggcaactttgaggcccgaagaccccccccccttttattgctccaagggtttttttttttgaaggaatgaaggctttgatgacttcatacaatttaccccatgattttggggctgaattgggctccctcttgaaccaaaaacccctttctggctcaaaaaaggctgggtgaaaatgcctggtgcttttacgggaccaaacaaaccctt

SEQ ID NO: 16905 - DNA, 381 bp, Oryza sativa
  Clone ID: uC-osflcyp005e03b2
tttgtgttttttttttttttttgttttttttttttttttttttggggccagcaacgctatactagattttttttgatgggacaattgcatggaacacacaatttacagggggaacataagaccctttttttgggaaacatttcgcttttgttgcaacctcacacagctaagcagagactagttatttacatgctccataaaaggaagagattattttgcaagggttttttttaaaaacattttaaacaacaagggaagacccaaatgcccaatggtcagaggccactaattagggtgctggttgactttttttgaagcaattttggccaaagcattgcatatctcccttttttttttcgcattttaatcaagcctgccaaa

SEQ ID NO: 16906 - DNA, 104 bp, Oryza sativa
  Clone ID: uC-osflcyp005e04b2
tttgtggttttttaattttttggggtttttttttttttttttttttttttttggacgcttgggtttacccttgtaatttttggaccggtaccggcaggggggcc

SEQ ID NO: 16907 - DNA, 226 bp, Oryza sativa
  Clone ID: uC-osflcyp005e06b2
tttttgttttttttattttttgggtttttttttttgaaaaatcaaaggggggaaaactcagggatttactacgggacaccggacaacagggttaacaactggcaccatatgacgccacggcctttactgatttagcataccagcatgggggaaggactcatgagaaaagtatccaagtctcaaaacgaaagcatgttttagtttacagcagtaacacgactatggg

SEQ ID NO: 16908 - DNA, 357 bp, Oryza sativa
  Clone ID: uC-osflcyp005e07b2
tttgttttttttcttgtaatcgttctatgcattctaaggtaaattcttgtgatccttcttgtattcgaagggttttggtacattcttttacattctaaaggctttgttattcaaaccagaaaacgaacaaatggaacactccattcttttacattctaaaggcttacattccaagggttttgctatttaaaccagaaaagaacaaatggaacattctaagggcgtaatactcaacaagaaggcaagattgatcactcaagaacaggccttggcctcaaacattggaagaactacaaaggcgatcgatgtcggtgccaggtacaccggcgagttgacagcaacgagcgcagggctcat

SEQ ID NO: 16909 - DNA, 393 bp, Oryza sativa
  Clone ID: uC-osflcyp005e08b2
tttgtttttttttttttttttttttttttttttttttttttttttttttttttttttttttttgggcccccaggggggggaatagggttttccaaaaattttttaaacttacaaacaggttaaaactaacggggtgggccgggccccctggagacaatttgacttttgagcagtcggataggcccactggtttaaaacaatccaatcagagcattgcccgggaaaaactttaagggccccggaaaatagaaattgaaatgaaaaaataatgggggggggggcaagaagtaacgggggttgaaccttttaaaacaccaaagcctcttggggaaaccggggggagggcccttgggttttttggaaaccgccatgggtttgggggttttgcccaaa

SEQ ID NO: 16910 - DNA, 427 bp, Oryza sativa
  Clone ID: uC-osflcyp005e10b2
tttgtttgaagtacacaaagtggcattacatcgagttttaataaaacatcatgcgaaaagccagcaaaaacaaaaggcagcatacagctaatgaagctctactggagtagctcgcaaaaggtccgacttattttcagtagcactctactccatttcttccgaaagagtgaccatcttctactgggtgttgtacatgtgacggatcaggtcaacaacgcgagagctgtatccccattcgttggcataccaagacacaagcttaacaaagttgtcattgagagcaataccggcctttgcatcaaagatgcttgacctgttgtcaccctggaagtctgtggaaacaaggtcctcctcaacgtaacccagaatacccttgagtttcccctcagactcctccttgatagctgccttaatctgatcataggat

SEQ ID NO: 16911 - DNA, 364 bp, Oryza sativa
  Clone ID: uC-osflcyp005e11b2
tttgtttttttttttttttgtgttttttttttttttttttttttttttttttttttttttttttttttttttttttttttttttttttttttaaaaacctaaaagaaaaaaacccttttggggggggttcccccccccccgggggggaataaaacccccccccccttaattaaggccccccttgcccggccccattgggggtcctttaaaaaaaccgcataacaaaatttttgaacccctgcaaaaaacccctgggaaaaaacgccccaaaaaaaaaaaagggggggcccccaaaaaagggcccaccccccccaaaaaaggccggcaaaaaaaatgggggggccctattggggggggcgccccc

SEQ ID NO: 16912 - DNA, 356 bp, Oryza sativa
  Clone ID: uC-osflcyp005e12b2
gttgttttttttttttttggggtttagatcaaatatactggtagtatatacttcaagaagaatgtacccgaaaagttctctttttttccctgggttaatccaaccaaattaagttccaagttttaggatcaattcaaacccaaaagcatattcgagcataaaggggtctactacttgctgacatcttctcctctattgaccctctccactagcagggctacctggccctcttgtgctcacagggggattcttcagtatctggctgagcatctggttctcattctgtagggaggagaatctttctttcaactctgagttgttcttctccaaggccttgaccttgaccttaagatcat

SEQ ID NO: 16913 - DNA, 393 bp, Oryza sativa
  Clone ID: uC-osflcyp005f02b2
tttgggtttttaactttgtttgggtaggatttcagcagatgcaatatatcatgtaaacagtaagaggcatatcaacatcgatgtctccctttcgcccttggagcagagcaatccaacagcaaacagggcgatgagacccaaagcaaaagaaatgaaaacgctaacaatttcagctgaatcttcacagcaactatctaaatgttgcaaaactgcaatatgatatacatttctgggttctgaagctatgcttggtgagcaacatctattccagcctcggtaatgagctgttctgtcaacgaaaagagcccggcaatttccttttcagcatcaagaatcatatccatttccttggttggtttgggcttggaaacaattttagtactggttacactt

SEQ ID NO: 16914 - DNA, 382 bp, Oryza sativa
  Clone ID: uC-osflcyp005f03b2
ttttggtgagaaacaggcaaaggcatgccatctggcccatcatctctaagtaacatctgcgattatattacacgtgaagtagacgagagaaatggcagaagcctgcagggatacaaatagtggctttgccggtggcgagctcagaagtccatgggatcctatcaggctgcctgtcacctaaacaagccagcaagctaggcaccgtcatggagaatttcagggagtggccacgttttccttggcaagtggcgccagctcctcaccctcgatgcctggctggctcccctcaacgcccaacccaagaagaacctcctcccacttctttgcaggtcccttccaagataggtcttgagccatgcagttctgaaccatttcttggaat

SEQ ID NO: 16915 - DNA, 386 bp, Oryza sativa
  Clone ID: uC-osflcyp005f04b2
tttttgttttttttttttttttgggagagaactcaattcttccttgaagggcagtaagccaaacaaataggtcactgcaaatccttatttggaaaaaaggggaggggaaaaacatcgatcagcagggccgggcctcctgcatgtaagtacatgtcctggctaacaaacataaaaggcacaacatgttgacctccaaatgttaaaaattgcatcgcttatgaagcggactccttggcaatcttctctgccttggcaatgacctcatcgattcctccaaccatgtagaatgactgctcaggaaggtcatcatacttcccgtccaatacaccctggaaactttgaacgctctccttcagctcaacatactttccaggtgcacccctgcc

SEQ ID NO: 16916 - DNA, 420 bp, Oryza sativa
  Clone ID: uC-osflcyp005f05b2
tttttgggaaataagaatagggggttctgtcgcataaataggaatttacagccatgtaatgagtactctgaaaccccaattgctggattacctacacaaccatacaggagaagattacatgcactgggctaattcatgtccttatgatcttatattcacaagaaagtttcagtttctgtatacccatcttcatccttggacagaaaaatatattattgaggccaactaaattgacacaatggaactaatccgtgggcacctcatgcaacaatagggtaggatgcgcaagtagcaataccgcacatgttcttgcccatttccatcttgaagtaaccattgtcaccccagtctgcaccccatgagtttttgatgagccagtagggaacgccattttcgacaccatagccaacggccagaaca

SEQ ID NO: 16917 - DNA, 373 bp, Oryza sativa
  Clone ID: uC-osflcyp005f06b2
tttttgtttttttaattttttgtgtttttaaaaaaatagcgcagtgcaatttgacgtgaagaaaaggatacacaacatggttactgcttctcatgataatctcacgcaaaatcagagaatgaatttagcagaaaatattgggggcaaaaacaaatgaccccattgtcacagggccagttcgatgggagagcaaaccccattatagggctggcgtgtatatgctccacaatcctagctcaaaaatttatagattatttcgtttaaaaaatatttctctggatatatatgggcatgcatgcaagcatgccgcaacacatatattggttataatatatatatatatatatatatatattttatatatatatatata

SEQ ID NO: 16918 - DNA, 390 bp, Oryza sativa
  Clone ID: uC-osflcyp005f07b2
tgtgttggtttatattgtttgggttttatttttttttttttttttttttttttgccccctaacaaaataaaatttaccgctcacccagtttccaggtttaggaaaaagaattcaccctaaacactttttgaacggggcaaaaccttctggaagatccaacggtttttccttttgacaatgaaccatggaatctctggggccaacataataaaagggggaagaaaaaaccccctagcttggacacttggggcctcggtttctgaaatccataaaactggaaaatcgggggaaggaaacaggaataccctgtcttttgccgctaaaggggcaaaaagggggaaacttccgcctggctcacgggcggggggggggaaccgggaaattgggccc

SEQ ID NO: 16919 - DNA, 419 bp, Oryza sativa
  Clone ID: uC-osflcyp005f08b2
ttggttgttaaacaggttttggtttaaaaacaagaactcaatgatcctatgcttcatggatctgcattataaaggacacatgctttcgaagttccgagtacttttgtgcagcacaataaatgtcactgcggttccttattaggggtaaaaggagaaaaagaagacaaaaaaacatcgctcatcagaagatgtcacccctgcttgtaatcacgtcctggctacagaacgggcatatagaaaccagaatccaaaaatttaacttgtacagaacttaacaatgaagagatcttatgaagcccactccttggcgatcttctcagctttagcaatgacttcctcaatgcctcccaccatgtagaatgactgctcgggaaggtcatcatatttcccatccaaaacaccctggaaactggtgacgc

SEQ ID NO: 16920 - DNA, 394 bp, Oryza sativa
  Clone ID: uC-osflcyp005f10b2
tttgtttttttttttttttgggtttttttttttttttttttttttttttttttttttttttttttttttttgggggaaaaaaactttttttttcaaatttcaacagttttaggaggggcccctttttaagggggggccaggggacagaccccttacaatgagaaaaccaatgggggggggcccctggggaaatggccctcaaaactccaaaaattttattttttggtggggaactgggggccttcctttttgggcccctttatgttggcaacgggcgggtgagttttcgcgaccttggcaagggccttgttctcataaggggaccccccctccagggggggccccaacaccttggcgtgcttggtccaaggggaccccaacttgggctttggaa

SEQ ID NO: 16921 - DNA, 380 bp, Oryza sativa
  Clone ID: uC-osflcyp005f12b2
tttgtttttttatttttttgagacaagcgagctaatgtagccataaatgggcaagataataaagcattcctttggtatacaagtttgtccatatgacaggattccagcttatgttggaacactctaagtatgtgccgcaatcaccactgcacatctcattcaaaaaccaagacctaatacatgtaggaattaaactaaaatctgaaaccttcacaaaacgtttggattcgctcctctagcatgggggtgtccataaaccacacctctggttagctagaaacaattaactaacccggatattaacctgatatcaccaattcatagtcatgcacctgaatacctgatataatgcttttttcatctatcccaagtcatatatg

SEQ ID NO: 16922 - DNA, 399 bp, Oryza sativa
  Clone ID: uC-osflcyp005g01b2
tttgttttttttattttggttggtttttttttttttttttttttttttttttttttatttctatctttattagattacaaaattaacgtttcatatctaaaataccatcaccagatgcacagattcagttacaagaagccggaaacaacaacccctcaaattaagtgacagtggatctcattaaaacaatagcagcatcatattccaaaaggaacagactgggcataactaaaatgcttcttaaataaaagcccaaagaacacaatgaggggttgccctaaagaggttgagcataggagaaaggagcctgttgaggagctgctggaggtggagcacaaaccggagggggagcgccagaagatgggcctgcaagaagaagaggacctgaacgatacatgg

SEQ ID NO: 16923 - DNA, 435 bp, Oryza sativa
  Clone ID: uC-osflcyp005g02b2
ttgtttttttttggaggaaacaaattaaaggttaaagacatcaccatcaactttaacaaaaaaatcatctttgcataagcatctactacatccagcagcatgaacatatagtgtttaaggtatcggacatggaagatacttaaatactaagccaaacggttcatatttcaaaattcagctaacacctcaaacggtttcactaatcatgcagatcacacttcatgccagatgttcacttcttatacttctttggtgccgccgcagtttgagcaggcactgctggagcagctggctctcttgggccctgagccaacctctcgtaacgcctggcaatcttcctctcacgactggccttgctcttggcacgcttagcctcaaactggtcagagagtgtcttctctcttgccttctcaggcttagacttggggatacttt

SEQ ID NO: 16924 - DNA, 373 bp, Oryza sativa
  Clone ID: uC-osflcyp005g03b2
ttttggtagtagtacacaacaggggctcttataacaggctcaggtctgcacaacaactcttgatagcttacaagcttcatcaactttgccgcagattgttttcactcacttgttacttacttagtagaacagttcactatcactgttttctgcttgctaatccttcttggtaggttgtacctccagattgggcaactttaagaactcagacgaaacgcacagttattcgcaagtgtaagtgcagagccatctcatttgcagcagagaacatcatgctgctagtaaggacctccaggatatgttcatcaggttcaggtaccagcatgagtagcacacctgaaagagcgtgcaactttatgccacaggtaaatgc

SEQ ID NO: 16925 - DNA, 453 bp, Oryza sativa
  Clone ID: uC-osflcyp005g04b2
tttttgttttttttttttgaaaaaaaaatgatctgctatactcaaatataatcatgatcgagaaaaaaaaatcatgtacagttacataaacacatacgtacagccagtatacaaacgcaaatgaaaactaaggcacacagcacgcgttcaactctgatcaatatctgatcaacaggcgagttcatgcgtacacctcgcaacatttccactcgggtatagggacagccgaaactttttcgccatccaagatatatgcaacgaaacccccctacctgtcctttggacttcctccgatccgttacgggtagctagggtcgttcggattcaagtgaagaagtcgtacttgaccggcgtgccggtgggatcgatccatggctttgcgtgcaggaagttgtccacggtgaacttggtcgcgtccgccttgctgatcaccttgttgtaccccggccacgc

SEQ ID NO: 16926 - DNA, 435 bp, Oryza sativa
  Clone ID: uC-osflcyp005g06b2
tttgtttttttttttttttttgtttttttttttttttttttttttttttgttcggtgttttatccttaaggaaatattaaaaggaatacggggaacaaaacaaaaagggtttaagaaatggaaaacaatcggcctccaagggtattgggaattaacccccacaaattaaccccctcctataaaaaaatgagcttctttgatggcaccctactccaggtgggagaaggggccaaatggcccaaattttaaggtttcccgggcccccggacacgggaacaaccaataggtcaacaatcctgggagcctaaagctattgggcccgggatgtccctccaaaaagggccccggaaaactcttaaaaagggggccccaaataccactggatctggtggaggtagggcccctgggaccggggcccttggccttggggaaccc

SEQ ID NO: 16927 - DNA, 371 bp, Oryza sativa
  Clone ID: uC-osflcyp005g07b2
ttggttttttttttgggaaagacgttaatttctgatcaggcatgaagaaattgaagcaaacaaattataaggttaagatcaccatcaacttttgaaaaaacaactttgcataagcatctactacatccagcagcatgaaacataatgttcaaggtatcagactttggaagatacttaaatactaggccaaacggttcgtatttcaaaattcagctaacacctccactggtttcactaagacgaccacacttcaagccaggtgttcacttctttgccttcttaggtgccgctgcagtttgagcaggagctgccgctgcaggagctgctggctctcttgggccctgagccaacctctgctccctcctaggaat

SEQ ID NO: 16928 - DNA, 357 bp, Oryza sativa
  Clone ID: uC-osflcyp005g08b2
ttgggttgttttttttttttgggttttttttttttttttttttttttttttttatctgttgggtgctctttttttttgttaaacttgttaatattccattacaaaaaaaggctggatatgacttgatctaactggaaaaagaacatgcccacaagagggacacgctgggtggttgctattcattgctgcatggaccgaaggactaatgtaaggggacatcagagggctaatacattaatccaggctggggccctgtggtggcagacagcacaatggggagaagaatatgtgaacacgggtgagcctaagaagatgccacccatttgggggggggtgttgcatacttgcattggccaa

SEQ ID NO: 16929 - DNA, 453 bp, Oryza sativa
  Clone ID: uC-osflcyp005g09b2
ttggtttttttatttttttgggtttttttttttttttttttttttttttttttttttttttttttttttttttttttttttttttttttttttttttttttttggggggccccaaaaggttgttgaaaaaattttaaaaaaaaggggggcaaaaaaaaagggttttaaccccgggaatataccccccaaccctgggggggggggggggaaaaaaaggggtttttgggggggtttcaaaaaaaaaaaaagggggccatttttgtgtcccccccagggggggggggggatttttttaccgggggggagggggggccctcccggggggcccgggagggggggccccttgggaaccaagggggttaaacttgcccccactggggggggtccccccccctctttaaaaacccgcaaatttaacgggggggaaactggggaaaaccccctttttttttc

SEQ ID NO: 16930 - DNA, 403 bp, Oryza sativa
  Clone ID: uC-osflcyp005g10b2
tttgttttttttttttttttgttttttttttttttgcacaaacatacaagtttaaaattataagcaaaagtccttgttcattttagttcgcacatcatttcccaagttttatttatcatccaaacttgggggatgggacaagaagaattatagccaacaccatattgcaatggttgggtagcaagcatgacactagctaggggcttgatggggcatgtttgccccacaggttccatgagcgcccggcaatggcatgccacatgccccacaggttccatgagcgcccggcaatggcatgccaccaccattttggtgtgtgcaacctgaccaacctgaggaccacggatgctcctctttatgcctggtaaggagactggtagttcgcatatccaacccccaaggc

SEQ ID NO: 16931 - DNA, 393 bp, Oryza sativa
  Clone ID: uC-osflcyp005g11b2
tgggtttttttatttttttgggtttttttttttttttttttttttttttttttttttttttttttttttttttttaaaaaaccctccaaagggggaacaaagataattttcccggcggcccctaactggggggggaaaaacaaccttcagcaaggacagaggggtctaaaaaccccttattggggggggcccccctaccggaaaacaaaatttttgggccggttggaaccacaacaatttggccccggggtggaaaggggcattccacccaaaaggggaacccgaagggggagggggaaacacccaaaatggctttaaaagaagggaaaagaaaccccggaggtgggaaaagttttttggaaaaagggcacgggggtgccaaatttggcccgg

SEQ ID NO: 16932 - DNA, 149 bp, Oryza sativa
  Clone ID: uC-osflcyp005g12b2
tgtgtttttttattttttggtggttaacaatatggaaccgccaccttgcttacttatgcaggggtctatttcatgatcgcaccacaacgaggggtgggttgatgatacttaaggtagcatctaacccgcccacttcaaattttacaagt

SEQ ID NO: 16933 - DNA, 355 bp, Oryza sativa
  Clone ID: uC-osflcyp005h02b2
tttttgtttttttttttttttgggttttttttttttttttttttttttttttttttttttttttggaaaacatccacattttaccccctgggtcaaatttgggggtcccttctgtagttaatcccattgatggtcaaaaaaggcatccggaacccccatggcctaaaacagtttacactaaaaatgcttggttggggttcgggggtaataattaccaaattcaacttccaaatcaaaacagttgtttccattggggacagcaacctttttaaaagaattgggggccatcctaaatgggcccttaagaaggccaacatactaaagtgctttagggccccttttttgttctttgaaa

SEQ ID NO: 16934 - DNA, 383 bp, Oryza sativa
  unsure (1)..(383): unsure at all n locations
  Clone ID: uC-osflcyp005h03b2
tttttgtttttttttttttttgttttttacagcataacgataagtctccattttcaggtaacgagttcatcaggttctcagtagccaacaagacacagcaaacaactgaacagcgacaaaagtccaggagttttgccttgctgcatcaaggacaaaagcgtcaggcccgcttctaagaagcgctatgtgcaaggtaaaaaagaaaaagaccaaacccggtaacggtttcccccctccgttgcaagtgtagatacttactaacggtacagtaaaaagaaggccgngccgataaaacaaaagacatatatcggaacttctctttcatatatggctatctctatatataagcaggggcattaggaccttctgtacctacaacacct

SEQ ID NO: 16935 - DNA, 434 bp, Oryza sativa
  Clone ID: uC-osflcyp005h04b2
tttgtgggacaaaaaaaattaggcacgttgtttacctctttataattcttccttccagcagtacccatcacctccttttggtttttcaccgccagaaaaagaattacatgatttaaataaggcgattgttacaacttacaaagtcacaagacaacaaacattggaacgaattacaatacgcgcgtgctacagattaaccttaaaagcaggctcactactcactaggcactaacttcacttgagataaaactgaaagaatgtttggtagttgtattctacagaacatacagaagcttaggagccaagtgagagagcaccagccgcaaataaaagatttcgccgagaaaaccgcagagtataaacaggagttgattttgtaccgagagttttgagcatcctcagccggttagttgaggtatcatctgtcttaagga

SEQ ID NO: 16936 - DNA, 411 bp, Oryza sativa
  Clone ID: uC-osflcyp005h05b2
tttgggtttttttttttttttgggtttttttttttttatgagtttagggagcctctccacgattaattattggacataattatacatatggaacaacataaacaaacaaacaaacaaatttacatgaacatactgtaattaattattatacagcccacacaggacacaacacaaacaccatggattaattacaaacacattgatcagcctcgggtttaatttattccgatttccgaggcaaggaaaggagcataggtagtagcaagcaaggaaattaagcagcagagatgatcgtgatcgacgccgggcgggggccggccattacatgatggaacaggcgttggggctggcctcggtgtagcaccacggggggggggggcaaacgggcgggggtggccacacctggggggg

SEQ ID NO: 16937 - DNA, 381 bp, Oryza sativa
  Clone ID: uC-osflcyp005h06b2
ttttgtttagcgagacacctggtataactttattaatatcaatacatgtcaggtaaagtctatgcagtgtgcatatgtgcattcacagtcacactcacttagtcaaataccaagatcgatcgatcgatgtacaagtggatgcattaattcatcatcttgggtgttcttatattacaaatcaccaccatgcaagtcgccattaaccaccaacccagctttcctaatttaagtagtaatcaacaaaaggatgacctctgctctctccataccctcccagctcgctcgtcatcacaaaactaaacagcgcgcgcgaacgcacaccaacgcatcgatcccgtttgaattgcgcgcgaaagagcttaaattaagaggatgaggaga

SEQ ID NO: 16938 - DNA, 385 bp, Oryza sativa
  Clone ID: uC-osflcyp005h07b2
tttgttttttttttttttttgttttttttttttttttttttttaacaagggcagaaactagtttgcactgaactgttattatgttacatgttttttttacttgcccaccaaacaataaccttccttgcttgaaaagaaaagaaaaaaaaaacttactagatttccacatttgcacagattagttggacattgcatttactagatacatgatgaccaagggtaacaaacaagaaactcaaggggggcccctgggaaggtgctcaattcatatgtaccatcacatcagcagcatcagattccaatatttgcttccaggccccttgggaagaatatatcatcatggcaatgcatcattgatatcaattggcatttgccatggatgaaa

SEQ ID NO: 16939 - DNA, 412 bp, Oryza sativa
  Clone ID: uC-osflcyp005h08b2
tttgtttggtatcaaattatggtaggttttgattgacagcaataaatattttcactttcgctgggacttttgggttacttatacataataaagatttagtatgagccagtacaaacctatctctctaagagtaatatacacaaaaaaaaatgacatatgggcccacccgcatatgaagccttagcggtttcacaacaaacatcacgtgctagcggtggcggatctaccataggggctatgggatctcgagccttcactactgacgttgaaaccatgagagccctcgtaaagcccccactaaaattttctgtcatacatccattagaagagggggctatagctttggataggttggtttatctctcctattagttatttctggatcccgccctgcgtgctagtacaccatcac

SEQ ID NO: 16940 - DNA, 305 bp, Oryza sativa
  Clone ID: uC-osflcyp005h10b2
ttggtttttaaacaaaggggggcaccctaaaggccttaaaattcactgtggattacatgtacactcaattgccatatgcacaaaaagtgtatgactaaagtccactagtacaacctttttctctggccctttcaattagtttagctcggccccttttattgacgttatttatctatgatatgagattgtgggaggaaaccagagaaccttggctacttacatgagtctttttttacttggataatacacccagacggcgatccatggattgagagacagactgcaggaaggcaactttatcacca

SEQ ID NO: 16941 - DNA, 150 bp, Oryza sativa
  Clone ID: uC-osflcyp005h12b2
aaaaaaggggggttaaaaatcttctatactcaaatataatgataagcgacaataaaaaatcatgtaccgttacataaacaccttcctacagccagcatacataacgcaaatgaaaacttaaggcacacaatgcagctaatcacattctga

SEQ ID NO: 16942 - DNA, 345 bp, Oryza sativa
  Clone ID: uC-osflcyp006a01b2
ctttgttatttgaaccaaacgggttccaaactttaaatactggacaagagcatgtttgacgcctcgcattatcgcatatagcggatgaaaaaacgtcaggccagcctgcgcgacaacgtctagttacagataagagcagaactgcaagtcaaatacactcttttctctccatagtagagtttgagcagcgagcgggcaaacataaattattcaattattaaatgatatgatcactcttgatcatctcaacactataggaacaaaacttcgctaccgcgattttactattttagctgtccacaacttctatgagggctggctcgtactcagtacgatcctcaacac

SEQ ID NO: 16943 - DNA, 228 bp, Oryza sativa
  Clone ID: uC-osflcyp006a02b2
atcatcctattacaccccttactaaaacccaaacaacaattcaaacccccacccaaacccctcaaaaataataaaaaccccctcccccctcctcaaaaccaaacaccccccccaccctttccccttaaaaacaaccacacccaaaccaacctacctaaacccacccctaaccctaatacccactacaccaccaacccccacccctcaaaaacaaccccccccctccaa

SEQ ID NO: 16944 - DNA, 432 bp, Oryza sativa
  Clone ID: uC-osflcyp006a03b2
tttggtttttttaaacattggggtaaaaaatttaggcgagtacacaggctacaaacaaaagtataaagagttctccaaaagcggtaatgatacaaatagcccagccccgtatgacgattctagtaacacaatatttcaggtgaacaacaaaggtgtatcagaatttattggaacccaaattccacaatgaactgcgacacaaataatggtgaaacccaactattaagtatgctccagtgacatctttcgccaaatgcgatgcagcagcttaggcctggttcttcttgggcacttggaggcgctcccggaaatcatcttccatgagcaccaagccatcacgcagaacgatcttgggctcccaccccaaaacttcctttgcctttgtaatgtctggcttcctctgacgaggatcatcaggagtgttctcagtca

SEQ ID NO: 16945 - DNA, 271 bp, Oryza sativa
  Clone ID: uC-osflcyp006a04b2
ttttgtctttttacaccttttgtttttaaaatcttctttttttttatatctaatccccatacaaacaaaaataacctcccacttttttttcccccacccatttttctatatatcttttaaaaaaaaacccaaaaccccccccacatctccactcttttacctaactaacaaaaaaaccttcctaaattcacacataaccctccaacccacacaccaaccctccgtctacttctaaatcaacatttatccaaatcatctgaaaaacccctct

SEQ ID NO: 16946 - DNA, 291 bp, Oryza sativa
  unsure (1)..(291): unsure at all n locations
  Clone ID: uC-osflcyp006a06b2
acataaacttggatcccctttagcgcccccctcctttttttatgggcctttaaaacacatgagcttacaaaagctgtcnatttgccatcaaatagaacagtactcctgtgcgtccacacaaaaatccaacacatattaaacggcacaaatcaagaagattacatgtactaaattgatccaaactaagaaaccatcatgtattacctctaacaccaaattcaaaaaaacctactctatgggtaacacaagacaagcaactctacccttaacctacaacaaagtgcacaccaa

SEQ ID NO: 16947 - DNA, 520 bp, Oryza sativa
  Clone ID: uC-osflcyp006a07b2
tggttttttgaacacaggggtgttgtcatcttgggtggtaactcaacagacaatttatttcacatacagacgcatttatgcctacaaaatcatattattcgtgtccaaaattgaatcaacagctcaaccgtatactggggatccgcggagactcactaattacagggtctaacagatgatagtagatcacggaactagcgcgaaacaacgattggcataaagggccatttgtaaacaagcactcagggtaaccggtgttcttgccaactgacgggatcatgaatcatcagacttgcactttcatctggcagaactaacaaatccaatatacactcaccaacaatccgacagggtccacaagctatttgtgcctccaataatagttttggcatcatatgattcaaccaaggaccttcctgatttcttcaacaagttgagctcttctagagggatccatcttatctagtaacatggaaagaccctgtggcagggcttgcaaatctgagctggaatctgaaag

SEQ ID NO: 16948 - DNA, 467 bp, Oryza sativa
  Clone ID: uC-osflcyp006a08b2
ttgtcttttaaaacaaggtggttctaaatacaaccttgccagcatcatcatattataataattgctttaatagtcagcaaactcgtacagaatagccagatccaaatttccacaaactatatatcatcatcaggaattttaaaaagagaactcggaatcgatttcgcatgatattcgaggacacccaagccaaactgacgataacgatgactaacgctaatacctactacaacaccaggtgctggcccttatttgataacttgcgcctgcgagaattcttaggcagaagcatatgcagcagtggcaccgacgtgcttcacgatggtgttctggaggtcatccttcctggcgccaacgaccttgtcagcctcagcaccatccttgatgaataggaaggtcggcattgcctcgacattgtacttttcagcaacttccttcagctcatcaacatcaaccttcaggaagac

SEQ ID NO: 16949 - DNA, 448 bp, Oryza sativa
  unsure (1)..(448): unsure at all n locations
  Clone ID: uC-osflcyp006a09b2
ttgttttataaaattcttttggttttaaatttttttttttttttttttttttttttttttttttttttttttttttttttttcacaataattttttttttttccaaatttaaaaaaattaaaaaaaatccaaaaaaaaaaaaaaaacaacaaaaaatccaaaaaattttaaaaaaaccaaatataaaaaaaaaaaaaccccaaaacctaaatttcaattttaaaaatttccaaacctttcttaaacttaaaaaaaaaaaaaaacccttaaaaaaaatttcccccaatataaccacaatttaaaaaaaacnccctccccaaaacaaaaaaccattaaaaaaccccaaaaccaaaaccttatttttttattttcaacactacttcttaccaaaacaaaccccaaaattaaaaaaatttttttattcccccaaacccatttttcttcctat

SEQ ID NO: 16950 - DNA, 395 bp, Oryza sativa
  Clone ID: uC-osflcyp006a10b2
tttgtttttttatttttttgttttttttttttttttttttttgcaacataaaaccaatacattcattattataccataattcacatttgccatttccaaaatggcaatcatatttatcaaaatccaatttggatacacttattatcaagtttttttgcaaaaaagggacataaaaacctttggaagtaaaagtgtgaagccattcgcgagttctaggcgaaaatctccaacagcctaaacttttgcttaaactttattggcaactctaatggatctttcacttttttgcgtagtcctcattgaacggaatccctttttttgccatgatcactgtcaggaagtcaggatgatcttttttggaatggcttgccttcttgcaatgtaaacactgatct

SEQ ID NO: 16951 - DNA, 340 bp, Oryza sativa
  Clone ID: uC-osflcyp006a11b2
ttgttttttaatatttttttgttttaaaatttttttttttttttttttttttattattttataattatataaataaataaaaaaataataaaaaaaaaacttaaaaaaaaaaaaaaacaaaaaaaaaaaaaaaaaaaaaaaaaaaaaaaaaaaaaaaccaacaaaaaaaaaaaaactaaaataaacaaaaaaaaaaaaataaaaaaaaaaacaactgatcttaaaataaataaaaacggagctcgccacctcaaaagaaacaggaataccatcgggcaaatttcttaaactaccttaaaccccctcaaaagagaacccgacgccaaacaggccaaaaatc

SEQ ID NO: 16952 - DNA, 438 bp, Oryza sativa
  Clone ID: uC-osflcyp006b02b2
tttttgttttttttttttttttggtttttttttttttttttttttttttttttttttttggggaaaaagttttttataacaaacaaatcaactccattcaatcacataccccaaaattgaaaaaaagggatgtcagttgacaacatataagcttcactgggcccgcttggaagacaattccaagataactcctattggtttcagggaacagaacccaacttggaaattaattaacaggagccaagtagcagctcattattttttactagaagggggccaacaaagtagagcaacaaaaaggggaaacgtcaaacccaccgagaatagaagggccctaagattttaaaccctgggggcaatggaatctcaaccggtgagcaatttgttctcttccaaaaatgagaagggcgggacctccagggttgatggggccaggcc

SEQ ID NO: 16953 - DNA, 353 bp, Oryza sativa
  Clone ID: uC-osflcyp006b03b2
tttggttttttttttttttggggtttttttttttttttttttttttttttttttttttttttttggggccgagaaatttttgccaagctaaaaaaaacgggccccatttcaggccttggaaaacaaaaacatgttatggagcatgcatatatccccccatcgccggaaaaaaaccctagttaaaagctacgggctttttttttggggggatgcgtccccctcgttattgggaacgggccaccaccccgtttagggcgactttcggaagccaacccttattttgccggaagcacacacgggatggggggcacccatgaaaacgtcccccaggatccaaaggggaccccgggggg

SEQ ID NO: 16954 - DNA, 468 bp, Oryza sativa
  Clone ID: uC-osflcyp006b04b2
ttttgttttaggatcaaatgcggcttattcataaagcatactgctgtcccacaggaaactgtttcataaaactaacatatcatacggactcgatggtccattaaaccagacacaagtagacatcagcaccacaaatacttgacgaacagaggctcgggatgaccaggcacatcggcagctccaccaaactggctgattactgaccaccacggaggcggagcaccaggtggagggtggactccttctggatgttgtagtcggcgagggtgcgtccatcctccagctgcttgccagcgaagatcagacgctgctggtctgggggaatcccctccttgtcctggatcttggccttcacattatcaatggtgtcggagctctcaacctccaaagtgatggtcttcccagtcaaggtcttcacgaagatctgcataccaccacggagacgaagcaccaggtggagggtagact

SEQ ID NO: 16955 - DNA, 420 bp, Oryza sativa
  Clone ID: uC-osflcyp006b05b2
gagttagcagcccggtgaaaagtatttctgcatatacatccaccgtttaataccacattcacaaaaaagagtagcacctaacaagagaccgtccaacgtgcttttgctcatcacaaaacacttgacaccatattgccaaataacaatttactcataccatcagctcactcaaaacgtttactgggacccattgaatttcgccatcatctttgcaatgatggggcccaccttggggttggcttggtgcctcgcaaagctggcaggattgttcatcacatcttgaagagctgccataacctcagggtcaccaaatgctgccatcagatcagggtcattcagaattttactcatatcgacattcccaggaacacctccaggcatagcacccccagggaagccaccaggcatcccacctgggaa

SEQ ID NO: 16956 - DNA, 298 bp, Oryza sativa
  Clone ID: uC-osflcyp006b06b2
aaaaaaaaaatggggaattaaaaaaaatttgtgtttaaaaattttttttttttttttttttttttttttttttttttttttatattatttattttttggggtaaaactactatttcaatttaacaaaaaacaaaaaaaaaaagacaaaaaaacaaaaaaaaaaaaaagaacccccaaaaaacccccccggcaattttttaaacaaaaaaccccaaaaaaaaaaaaaaaaaacaagcccgggttaaaaacgccaaaaaaacaaaaccccacacaaaaagggaaaaaacactctgctcac

SEQ ID NO: 16957 - DNA, 502 bp, Oryza sativa
  Clone ID: uC-osflcyp006b07b2
agacacaatatggattgtttttaataaggaagatgaattacatccccggcctctgcatctagcatgcacagagccaaagttcttgtaactaaataataatgatccagtaaatagtacaagaatatgagcacattacaaattaaatagaagcaatcactaataccaagctggcatattaagaaaatgagactcaaaacagtacttgacctaaatatgcatcaaaatgaatgttcattgttcttagggaaatcagtcttcagacagcttttgtagcgcctcgtggcattcactctctttgaagctgttgtgcgttgagtacatgggggcatcagcgagtacagctaaaaaagatggatcaaattgtgcggtaaccacctgttgctcttggtggaattcagcaactgaagcatcattttcacaagctggatgatctattctgaaagatgcttgcctcatcaccactgatccagtaatttcatttgtagaagcggttggacaaatg

SEQ ID NO: 16958 - DNA, 474 bp, Oryza sativa
  Clone ID: uC-osflcyp006b08b2
agttggaagaccataacatcaagaactctccttgaaaattttgtaatttgatccgcaacgattcagatgcagatgaaacactgctgattcccactcagattacacacaatacaaatacaccgacaaactgcctcaaaaaccaccaaattgattcaaaagtaaaacgggtatgagggatcttcccaccgagactgactaaacctaaccacagacaattggatccactggacccagattattcaaaaacagatggctatgacggcatcgtcctcgcaaccgaagggaacttgcagctatggatatcctcacttcgcgctggcgagctgggtgcggatgagcttggcggccgaaaccatgttggtaagggcgggcttgacctcgttgtacttgcgggtcttgagaccgcagtcagggttcacccagagaatgttagtgtcgagcaccgcgaggcatcttgttgcgcggtccgcaatc

SEQ ID NO: 16959 - DNA, 360 bp, Oryza sativa
  unsure (1)..(360): unsure at all n locations
  Clone ID: uC-osflcyp006b10b2
ttaattgttgcctctgtgtcttagccttttgttataacgggtttcggttgatcaaaattaagatggacggattcacaagagagcaccctttacttaagctttacattacaaggcacaaccaggcaggctgcccttgccggtccgaactcaactgncgatgaccgcacgctgcgtcgccaattaattcataccaattccacactacagatacgtcaacgctacataaaaaccacccattagccttcacgtacgacccggacgcacgcaccggttcgtgccaagctcaagggtagatggttctcgggatgatgatgtgcgatgttgttggccagggtccaaggggtggcagttcagggccgg

SEQ ID NO: 16960 - DNA, 290 bp, Oryza sativa
  Clone ID: uC-osflcyp006b11b2
aaaaaaatgggtaaaaaaaaaaaatttggtctaaaaatttttttttttttttttttttttttttttttttttttttttttttttttttttttttttttttttaaaccctttttccaccccaaaaaacaaaacaccaaacccaaaacccacccaaaaaacccaaaaaaaaacccaaaaaaaacccccccaaacaaaaaaaaaaacccaaccccaaaaaaaaaaaaaacccacaaaaaatcccacaaaaaaaaacaaccccaaaccaaaaaaaaaaaaacccccacaccccc

SEQ ID NO: 16961 - DNA, 420 bp, Oryza sativa
  Clone ID: uC-osflcyp006c01b2
tttgttttttttttttttttgggtttttttttttttttttttttgaatcacagccaatgacctgaaactttgggagcccttggacccttttagcagtttgattgatttgggagtagtacatggtacaatcaccagctgtttaacaaggctcagcatccaagaagaacagagcacataatgggttttggatgctaagttggtttgatgcatgggctggtgttagtatgcatgtgctgctagggccctcctgctccggctggcttgctgagaaggggctgcagcgccttcaccacgatggtcatgttcggccggaaatctgactcgtattggacgcacaacgccgttaccgccgccattttggcaactgcttttggaggatagtcatccccgagtttcggatccacgcactgcctcaccttg

SEQ ID NO: 16962 - DNA, 461 bp, Oryza sativa
  Clone ID: uC-osflcyp006c02b2
acacgacacaaccaactaaattgaacactattaatacatagtttaagttacatcatgatttattatgactggcaaagacccaaaaaaaaaaactctcacacaatgcaaacaatagtagagtttagatgcagtctatacctgactagaaaggattatgtagtagctgcagaaggtcgacgagcgtgacaaactgtaaccatatacgacgcatacacgacgtatattatgtatcacaaacgacgtagaaaattaacagatacggtacaccatgacttaatcaaagaaagctgattactatgctggttggacacttgctaaccgcagggcaaacttaaggctacagcgacgacatcagttaaatctaggccaacttagacgtaaatggttatcttgcgttttttctcttcccttgaaaaaaaagcattgagaagctttcaccaacatgtcatctaaacttgcat

SEQ ID NO: 16963 - DNA, 495 bp, Oryza sativa
  Clone ID: uC-osflcyp006c03b2
ttttgtttttggctgctgcagtgagccaacagatatgtgaaactaggttttctgttatgaaaagttcattacgacaattatgactaattggcagcattccaaaatattcctcaacgttgacactccatgccacacaatacaatcgaaatttctagaataggcaacatttccgagcatctcggagacaagaccaacatcaccactcgaatgacactgagggggaaatatacaggggaagaagcaaaaatgctatctttaggtagtcgtttgacgacagacagttaagtgtagtgcacctgttgtagcactcgcttactcccccttgtgctccttatctttcagagcatttcctgtgatttacgaacaatgcgtctaacctttttcttgaaatcgtccctcttttctctccaatccttagccgcttcaatatttgctagagactcatcatttggactagagagcatcgaaatgatgctcagaactatacttttcact

SEQ ID NO: 16964 - DNA, 485 bp, Oryza sativa
  Clone ID: uC-osflcyp006c06b2
ttttggtcagttcttgaggtcagggagcagcaggccactggcgttcatctgcttgtacatccactgccagttctccggcctcacctccccgcccagagccctcaccactgacccaccgctgcacgcccctaccttgcagcactcctccaatgccagccctttcaccaacccgtacaggaacccgctcgcaaacagatcccccgcccccgtcgcgtccaccgcattactctccccggttgccgccacttgaaccacctgcttcccatgcttcgctatgcatcccttagaagctagggtcaccacggcccatttacagtacttggccaagaaagcaagtgcctcctctggatcaaatgtcagctctccccctagaagctctctagcttcatcctcattggcaaagcaaaggtcaatgttgccagtttccaaaggtcaagagtggtcctatgtacgaaccattaaactagcaatcatgaactggagac

SEQ ID NO: 16965 - DNA, 493 bp, Oryza sativa
  Clone ID: uC-osflcyp006c07b2
tttgtttgaaccaacacaggctttttcctttattttatcaacgtatatatcacccaactcgagatcatacagtcgaacaagcgaaacattattacattacaaactgtgactaatgcacacttcacacatacaattaagcacgtaattaacacactaattatgcatggcaataagattaagatcgatcgaggagtcctcgatcatggcgagaagtactcaatccttgttcgtcgggaggatgtgcgcgtcggcgacggcgcggcagacggcggcgccgccgggcctgacgccgagcagccggaacgcggcgtggtccgggtcccagcgggacgtgtcggcgtggcacacgacggcggcgatcaccgcgtccccgccgccgccgccggccgcgtccaccgcgtacgccctcgccgggccggtggcggcatcgcggcacccgtacacgccggcgcccgccgtggtctcgccgcggcacacgacgaagctggacccc

SEQ ID NO: 16966 - DNA, 348 bp, Oryza sativa
  Clone ID: uC-osflcyp006c08b2
ttgttttttttttttttttttgttttttttttttttttttttttttttttttttttttttttttttttttttttttttttttttttttttttttatttttaatttttttttaattattttatttttttaaaaaaaaaaaaaaaaaaaaaatgcaaaaaaaaaataaaaaaaggaaaaaaaaaaaaaatatagaaaaaaaaaaaccaaaaaaaaaaaaaaaaaaaagggcttgatgaaaaaaaaaaaccctacaatgtggcagaagatgaacaaaagaaaataaaggaaaaaaaatatgtcccctttttggaaaaacaaaaaaaactttttttaagccaaagaagaaaa

SEQ ID NO: 16967 - DNA, 446 bp, Oryza sativa
  Clone ID: uC-osflcyp006c09b2
tgttttttttaaattttttggttttttttttttttttttttttttttttttttatttttttatattttttaaaaaaaaaaaaaaaaaaacaacaaaaaaacaaaaaaaaaaaaaaaaaaaaaacaaaaaaaaaaccaaaccaagaaaaaaagaaaaaaagaacaaccaaaaaacccaaacaaatttttgaaaaaaaacaaggaaaccgcccaaaatattacatttgaccaaaaagaacaaaacaacggttttgaaaacaacccaccaggaaaaaaaaaagaaggaactgtcatttacactcaaaaaaaaaacaggaaggcaagtctaaaaaccaaaaaaactccccaagcaaaaaggacaaagaaagaaacaatcttttcaaaaaaaaagggcaaggaaacaggcaaccctaaaagagtgcccccccagggggggccgtgaccaac

SEQ ID NO: 16968 - DNA, 448 bp, Oryza sativa
  unsure (1)..(448): unsure at all n locations
  Clone ID: uC-osflcyp006c10b2
ataattctatggcatctaattctcatttaatntggacagatggaatttatttactaatantgaatatacaacggtgtcatctttcgtcagttcacaatgtcaccggtgatacttcgatacagcgaagcttcggtttaatcctgggtttagctaggtagtaaacactgacgaccaaactgggcttgaatggaaggcagtttcacctctttcctacaaggcgaggcaaattgatctttgctttgacttatgcaacaggagggcatgacttggtgtcatctgtggtatcaacatcagaaggcggcatgaactgccacatcggaaatcctgggtagccaatcacaggcatcatcagcttctgcccggcagcttgaccttgaggagcagtgaatgcactggctgggataacccggaggtgtggtacgaagcttggtcgagcattcaggaactt

SEQ ID NO: 16969 - DNA, 446 bp, Oryza sativa
  Clone ID: uC-osflcyp006c11b2
ttgttttttaatgggagaagggaatttatttatttacttatttattacataaaacaatttcaaaaatatgactgatgccacctactagatgataaattaggggctatgacatttgcatttcatgatgtaaagaaaaagagaagttcatttttgcaacataattgttgtactctattgttttgcccagtttagcttcataattcatatcagttcaattttctgctctgccacccaagattggttcggccccagctgtaatgtttcaatctttgcattttcaacacagacaaaatctttgtaacaagcctccatctgcaagtgaggattccacagcactgcatctgaccaattcgcatttgatatcacaattttgtcacccaatccattgtccagggtgagctcactcggtgcaccaaggtaaatgcagtcgacaaatcctggaaaag

SEQ ID NO: 16970 - DNA, 428 bp, Oryza sativa
  Clone ID: uC-osflcyp006c12b2
tgtgttcttgtatataataagggtgctcaatcacaaaataatttttagtttatatcccatcagcatcctcagggagaggaaccagcctcaacattggccgggattcacgaaagcaggtgaaagctctacccaaaactcgttgtgagaatttcttaatttatcaaattgattgctttgttgttgagggccgttcgtgccaacaagccgggacctgagatacctgccagattacactacaaatatagccataaaagctcttccttcttcatcaccattcaaccaccattcaatctgctcatcggaatggaaaagcatagccctccttactaagattggtggtttgggtaggagtagccgcgcccccttcccatatatccataccccctcccatagtaaccacgtccacggggtccaccacggggacccct

SEQ ID NO: 16971 - DNA, 390 bp, Oryza sativa
  Clone ID: uC-osflcyp006d02b2
ttttgttttttttttgttctgggaccagcaacagtaataacagcagctgaaaaaaaggggcagcaatataacaggtgatacagaattacagatggaaacttatcatactaccaacagctatgaacttccatgaatcaaaatatgcccaactcctgatgtcaggattgagactagagatcacctcctcaatcagttctcaccaagggtgtaccgggtgaacctccgtaccttgatgttctccccaagggtggcgatcgtctccttcacaagatccttcaccgtcttgctgtcatccttgatgaaaggctgctccaggagggccagcacgccgagcctcttcgatatccggccttcgacgatcttcttcctgatgttctcaggtttggactg

SEQ ID NO: 16972 - DNA, 404 bp, Oryza sativa
  Clone ID: uC-osflcyp006d03b2
ttttgttttttttttttttttggtttttttttttttttttttttttttggcagcccgtaggaaaccctttgctggtaacagaagggagttcaataacagcctacaaaattttgaaacgtaacaagcaactccgatatacaaattcgactgacatatcggggacttttgaccaaatgcgacaccattatttgtttgatcagatcagcacttgcacagggatttacggatagacaaaattcaaagttgaccgcaaacataacttgatactggaggcagtacatgcatttcacttcccaccaaaaggggggaattgggattggcctttgatttctggagctggtggagctgcaaagcgatggcccttaccatatccacccctgaaaccgccacgatccccgggggcc

SEQ ID NO: 16973 - DNA, 354 bp, Oryza sativa
  unsure (1)..(354): unsure at all n locations
  Clone ID: uC-osflcyp006d04b2
gccgccttctccgtgggactgaaacagtcgggtttcaaatatatttcatcaaatattccaacaactcccccttatcttgtaagacacactcatatacattttaaattctaaaaaaacatttacatatccacacactaccgacttgatttattacaaagaataatatatcctccctcaacattactaactgactgacaatcttacacatctgcaggagctggaatcaatcaaaattacaatctaacttccttaccagaacaaatcatctacaccaactgaagttgacggggaccaatattngttcttctcctcctccatctctggctcaggctccatgccaaactctagagactc

SEQ ID NO: 16974 - DNA, 469 bp, Oryza sativa
  Clone ID: uC-osflcyp006d06b2
ttttgtttttttttttttttgtgtttttttttttaacatgacagtttaaaacatgaaaaattaatgccaaagtccaaggcagtaactatgcccgaagcaaatgccaacgtgtttatttacaacataggaccataaacgagaccagacactaaaactaaacaaatattctgcgctgaggaaagatagaccaggcttttaaaacttaatctggcacctgaaaactgtacacaattctatcgcacaacatttagaatgactacctgcccaaaattggcatcaaaatttggagctagtaataaatatcgactgccaatttttatctgcaaaattaccccttaaatgcaaagaaacgggtattttctactcctgacgtgatcaactgtaagtacccgttttttcaacacctaatctgaagctaatttatgcctcacgccctctttctcatgattggctttcttggctccttttt

SEQ ID NO: 16975 - DNA, 440 bp, Oryza sativa
  Clone ID: uC-osflcyp006d07b2
ttgttttttttttttttttggttttttttttttttttttaacacaatcggcctattacttacgattatttcaaatacagcctacgatacatgcccacgcgaatgcgcgggctaccttcctagttccttggaatttgcaaatattgcacacgaggaccaacgcggaaagggaaaattcatccgaaatatcaacaatcgcagaccagcatcaagtaatacagtacccaaaaagggtcccatagcacagacgaaaaaacaaagcgaagacataggaagcgggcgggggcgtacgaggcggtaatacggggataatgtaagacggaaacaccaagcacacaaaaccctgccctagaaccaccaagcaaaagccaccttacatgtcgtcagcctcctgctgctcctcggcctcgtactcgccctcctcatcgggggtggcatcct

SEQ ID NO: 16976 - DNA, 385 bp, Oryza sativa
  Clone ID: uC-osflcyp006d08b2
gaacgcaataccgcatttcataccaacacatctagaaagaggtttcagtggatgcagcattgcagttgagcataacagcccaccgagacattgacaacgtactgaggatggccataggccgaacaaattttattacagaggcgactcacagtggtagtctgctggttcacactggccctagcctagatgcaaaacaagagtaccacgggcaatgtactagcagtagtagactagaaacctcttaagcatcagcgaaccccagttcggagagcttgaggtgggcctccttgtagtcttcaaagaaagccttctcatctgcagcatatttctcgacgagtgggcggaaggcagggtcactcagcagggctttgtcactaggaagctg

SEQ ID NO: 16977 - DNA, 219 bp, Oryza sativa
  Clone ID: uC-osflcyp006d10b2
ttgtttttttttttttttttgtttttttttttttttttttttttttttttttttttttttttttttttttttttttttttttttaacaaaaaaaagggggctttttttttgcccaaaataaaaatggggggggggggggggggccaatccccttctcccctataaccaatccctgtaaccctaaccaccccctccataattctccttggggggggcgcc

SEQ ID NO: 16978 - DNA, 380 bp, Oryza sativa
  Clone ID: uC-osflcyp006d11b2
aagacctacccaggaggtgacgaaatgatcttctttactgaaaacgggagagacggtgcaaccaaaatccattgacttgtctaatgtaatttagggctaaaatgttcctcgctcgcaaccgaagatgacaatagtactagtagtaaaccaaagcagcaggcgaccggaccgggtcaggttgcaacttgggattactggtatggatctgaagcctccttagccgatggtgtggctcaacatccatgggggcagcccaatgcgaacatgctgtggctgccctgctggtacatcctttatcctttcaccagctgttgcaggggagttactgatattagttgttggaagggcttccctcatcatgaaggaggatgatgaggaac

SEQ ID NO: 16979 - DNA, 361 bp, Oryza sativa
  unsure (1)..(361): unsure at all n locations
  Clone ID: uC-osflcyp006d12b2
ttgttttttggggaataggggtcagactttgattcctttctgcacttctccactttcacgggaaaccacacctttgcacaagctcatgctgtagcacactaataggagaaaacgtttttctaagcgggccaaaatagttttctcaaacccgggaaaggggcccatgttaacaaagacctaccaaaatagatgatttttacagggaggctaacgggccccctgcgaaaataatttaagcgcacaaaaaaaaaaaggcggcaccactcatacccgccgccggcggatggatctatgaggaagggagggagatatggttnnnnnncctcaaacacctccccccctcggggacaagacggccttg

SEQ ID NO: 16980 - DNA, 491 bp, Oryza sativa
  Clone ID: uC-osflcyp006e01b2
ttttgttttttttttttttttttttttttttttttttttttttttggaccccaaatgttctcattgattgatagcgatatcatagaagcagcgacccgaattaagatttaaaaccaaccccaagaaggatcgcagatccaactccaccgaatcgatccaagaactccgcctaatccaaccaaaccatgggcgatctcattttaccaacacgacacgaacttataaaaagactaacaccaccaccacctccttcttatttagggactcgacgactcaagacgactgatactggcgaaaggcgaaggggaacagcacaaatctaggagagctggccgcaatcggcgaagacaaccggtttgggggtgctcccgccgcgggatcccaccttctcgatggccttgacgacgtccatgcccttgacgacccgggcgaacacgaagtgctttccgttcagccagtttgagggcacggggcaaaaaaaaaaccgggac

SEQ ID NO: 16981 - DNA, 347 bp, Oryza sativa
  Clone ID: uC-osflcyp006e02b2
ttttgtttttttttttttttttttttttttttttttttttttttttttttttttttttttttttttttgggcccaaaaaaagctatatggatggggaaaaaaccctagctctttttgggccccccccccctggaaagggggcaaaacgtcccggacgaaccccccaaaagaagaaagcttgcttgggggaccgggccgaccaaccctgggtgcccccccatgcctgcatggggattgatccaaaccttagctagctcattttttattccagaaacccgaaatgaacctcctaggccggggaccagaattcggctccccccatcgacccagggggaatttactagggg

SEQ ID NO: 16982 - DNA, 449 bp, Oryza sativa
  Clone ID: uC-osflcyp006e03b2
ataccacaaagcacgaacttggatattaaagatgcgacagagacggtgcacatagacaacacaggacacagaaatgaacgctacaagcaaaccctgcatagtccaaaagcaaatgttatttaaaaccagacacacaaactgatagatagaagcccacgcggacagaccatatgatagcagctggaatcaagcattgccaaggcaccaggcaggaaccctgaacctgtctagtactcagttaccctaatgaccgtagccaccattgccaaactcggagcctgcctactagaactacttatccagcgcggcgaggacctcgcgggcctttgagaactcccactactgcatgccctagacgacgtaccagaggacgaatgcgctcttggagatcatgaggtcaaacttgatgtcgatgcagaagaacatctccacgacttttgtggagatgg

SEQ ID NO: 16983 - DNA, 436 bp, Oryza sativa
  Clone ID: uC-osflcyp006e04b2
tttggttttttttttttttttggttttttttttttttttttttttttttttttttttttttttttttttttttttttttttttttttttattttttttttttttttttgggaaaaaaaaaacccaaattaatttgggggggaaaaaaaaaaaacccaccaccggggaggaaaaaaaccccaggggggttaaaaaacaaaaaaaaatgttgtaaaaagggaaattaaacccttttttgttggaaaaaaaaaaaagtttgggatttctgggaaaaaaagtttaaaaaaaacgatggggggcactatatgcaaaaccgaaacccccaaaaatttggtttggggggaaactggtattttaaaaaaaggaaaaaaccccctcccctttcaaggggccttggggccttgtaaaaaggccccaaaggggggaaaactttgggg

SEQ ID NO: 16984 - DNA, 493 bp, Oryza sativa
  Clone ID: uC-osflcyp006e06b2
ttttgttaaatcaaactgtgggttatcatagtaaatcttcccggagaatcagatgctcagaattcatagtgttcttcagcatcttacaacttacaagatggcgcagatatacaagcgcaactatcttaaagtaagctgtaggaggaaatggaaccatttctaacaacgggaaaaatataggttatagaaggaaaccatttgaacaaattaatagggaaataaattaggaggatcgtttccgtccgatctcaatagaactggacgtttgatacgtagatggcgtctggcatccagttgaccgggatgacgtctttggcgatgaggctcttgccggactcggtggtgacgcgaatggagaagggtgccttgagtggcgtggcggtgtccatcctccagatggcgccccacgacagcttcatgggcctccacgctggcaatccggcctcctggaggtccatctggatgacgtcaccgtcgtctgcgacgaacttga

SEQ ID NO: 16985 - DNA, 374 bp, Oryza sativa
  Clone ID: uC-osflcyp006e07b2
ggaatcaaaatgcagtaaatcatgcttacccaggcagaatcacacgatttgtcaaaaaggattccaatgagcctttatgtaaaggggtgatttttattagggaaccgttcagcaaactgtcggtttgggcagcaaagagttcagcaaaggggtcaggggcttgggacccgagtatttgacatggcatacatggaaagaaaaggggctgcttcttgtcttaacatgaataggagaaggtatatatccccgaagtactggttttagaccatgtatgttaacatatgtcgcactattgatgagaaactgttcagggaatcatgtagcctctgcagttgatcagctggagatcacttcctcaagctctcaatgatgta

SEQ ID NO: 16986 - DNA, 319 bp, Oryza sativa
  Clone ID: uC-osflcyp006e08b2
gggaaaccggaacaaaagctcccccaattttattggggtacaaaaaagttacttttttttaccaggggaaggcacaactgaacacaaaaggccgaaaaccaacaattggaattttaacgaaaagggggcccgaggatagggcccaaaaaagggaaaggaaaaaagttccaagggggggatgaaactatgaaccctattttattttccatccgacaacaaaacacttacgaaccacaggatggagatttttggaaagggggggccccagcaacaccccctgggttggggaacttgaacgggcgaaccccaaacttggaaa

SEQ ID NO: 16987 - DNA, 509 bp, Oryza sativa
  Clone ID: uC-osflcyp006e09b2
ttgttttgtcaagaaacgaataaaaatatcttcatgcggacagggttccaacaatagtaaaaaaggaaaaaagaatacagacgcataattgccaatcctctactttcatctacatagctgtgcaacaaatgcttctctgagctgcaccacattttaaactcaatacggtattctgtgcaggtttgccaaaacaaaaaatgctaatgatctcgccccatcaaccactcaaaggattctgtcgaggtcgctgataaaattggaggctatagatgtcagcttctttccagtttctccagccatattcttgagggaagacagatcttgagatgcctggaatgatattctgttgatgagatccgcagcacttaaatccagattcgagtcatccatgtcgcggcggccaaaaagatcagcacttgaaatggacgaagaacccgcaaacttttgaagggacatttgagcgtctttctcttctctgctttgattgcccaaaaactgagatgatgaaa

SEQ ID NO: 16988 - DNA, 520 bp, Oryza sativa
  Clone ID: uC-osflcyp006e10b2
ttgtttttttttttttttttgtttttttttttttttttttttttttttttttttttttttttttttttttttttttttggaaaaaaactttaaggggggcttaattcacattccacaaaaagggggcccccatcccccaattcatgggggaaacctagaaaaacaaacccaaaaggggcaaaggctttaaaccccatttcttggaaaaatttgcccccggcggtaaacaaccaaaagggcacccgcgtctcaaagtttcaacaaaaaaccctggcccagaccctggggggggggccttccgggtttccttaaccatagttaaaacggaacatggggttctgcccaaaaaaggtgcccccagggggaagcagctggaacatctgggaaaacctgggggggggctcgccggggcccgggcggggggacccggaaaccaaaaccagcatgcccccctggggcccccacgggtggcaacccacggggttgaagccggggggcactcccccaaggggggggagcc

SEQ ID NO: 16989 - DNA, 461 bp, Oryza sativa
  Clone ID: uC-osflcyp006e11b2
ttggtttttttttttttttttgtttttttttttttttttttttttgacactgacagggattttttattcatatcatcatagaggggttacctaggggttcaaccaaacaattgattgattaaccccgccctttaacccggcctagctaccgttccaaaaaagaccaattcaatcgacaacagacgtgtcgtttttagttcggacacgtaatcacaattcaaaacacgtagccacagctttagctttaactttttttatgcaacttttttagtaataatccaaaacaaagcacgtagtactacataacatttggccttaatatacccagtggctagacacctcatctttatgcaggcttaacgcagtagtacacatcaaccaagcaagctagctaattaagcaagcatgttgccggccggccggagaagtccccggagttgtagtatatatatggattattg

SEQ ID NO: 16990 - DNA, 451 bp, Oryza sativa
  Clone ID: uC-osflcyp006e12b2
ttgttttgttaagaactggggtttgggttatattccatcaaggattcagacaggtcccccttatttgtgagggacaggggatatacaggggaaggtctaaagaaacatttacatatcacaggctacggacggattgattagaaggaatatatgggccttcctgatcattggtattgactgacaatcgtacacatgtgcaggagcggaatcaatcaaatttacaatctggcttccttaccagaacaaatcatctacaccaactgaagttgacggggacgaatcttcgtcctcctcctcctccatctctgggtcaggctccatgccaaactctggagactcaatgtcagcaagggtcttcaggtcaaccacagagagctcatcaagctgcttcaccacaaggtccgcggcattaagctcgtagatcgggtgcttgcttgcaacagccacacac

SEQ ID NO: 16991 - DNA, 424 bp, Oryza sativa
  Clone ID: uC-osflcyp006f02b2
ttttgttatggtagaatgctcgggggtgtgcattattagcattgctcaagctgcaggcagcttcagggaagtgaaggggaggaaaaagagtagctgctccagcacaaaactactagcattacataagcacagaaaaaggtatgatcctcttcagacatcttcccacgccgaaggtgaatggggtgaagatcttaggcggacttcacggtggcggagtcgatgatgtccatgaattcaggcttcaatgaagcaccaccgacgagaaaaccatcaacatcaggctttgctgccagctccttgcaattcgcaccagttacggaacctccatagatgatccttgttgattcagcaacctctgcactgacattagcagcgagccacttcctcaggccatcatgcacttcttgtgcttgatctggtgtag

SEQ ID NO: 16992 - DNA, 344 bp, Oryza sativa
  Clone ID: uC-osflcyp006f03b2
ttttgtttttttttttttttgggtttttttttttttgggatgataacttcgatgttattcatttcatagaataatcgcaactcaaaaacaaccagaacacatgtattttttctggtaccctcatcaggcatctgattaaatttgaataaaccgaacatatgtgtccaaaatcacaagtgagaaccacaggtagcaataggtattacagtctttgaatagaagaaaatgataaccgataggccggttgaaaactttgtccacgctaatgaagaaaccgcaaccaaaagagagaaacaagccggaggacggcgataacagctcctcttggcttagcattcttgggt

SEQ ID NO: 16993 - DNA, 454 bp, Oryza sativa
  Clone ID: uC-osflcyp006f04b2
tttgttttttttttttttttgttactttttccactactaaattatggcagcttatacaaagtcaagtaaggctacaaagagagagaatccttaggcaaagaaagatatcagcacatatgcttgctaagggtggaaggcggaggggatgataaattacatatcggatgtcatctgacatggaaaaaaagggagggaaaacttcttttccgggtaaggagtaacaccgtaccatcaaggatggtggcagatgcaaggcaaggctctaatccttttaactctatctttcagtaagacaactgaagcaggcagcaaaatgccatagttgcacaatacacaagcagctaaacgaacagttacaacatacagttgacagggctcagatgctttgctgtcgcgaatgattcctttttccatgacagcattattgcaaagaccaaatgctttgacacagttc

SEQ ID NO: 16994 - DNA, 234 bp, Oryza sativa
  Clone ID: uC-osflcyp006f05b2
ttttgtttttttatttttttttgtttttttttttttttttttttttttttttttttttttttttttttttttttttttttttttttttggggggaaaaacccaaaaaaaaaaacaaacccccccacatggaaaaaaaaagggggccaaagagcccccccttggccccccccacacccccaaaaaacccgaaccccaaactctttaaatacgggggaaaaaaaccccccagtccc

SEQ ID NO: 16995 - DNA, 231 bp, Oryza sativa
  Clone ID: uC-osflcyp006f06b2
tttgtttttttaaacatattggtttttaattactttttacaaaatttttaaactttacatttaatttttatttacatattttatttacattttttttacctttttaccaaaatccgaaaaaaaaaaattttgatcaaaacaaaactcccacagtgatttacggatagacaaaaataaaaaaaaccggaaacataacttgaaacttcaatcaatacatgcatttcacttccg

SEQ ID NO: 16996 - DNA, 411 bp, Oryza sativa
  Clone ID: uC-osflcyp006f07b2
ttgtttttttttaggccattagagtctgtactctgcattccaaattgtcaaacaacagaatactaaagttaaacaaatgtcatgatcacactttgtcggtaccgatggacactgaccttatcaggtttaaaatttggcacatgaccttgatggctgtatcataaaattatgtgacattgtgtcatggcttttgaagtcagaaatatgattgttgattaacaaattcacaattatctacttcgggcttcttttagttcgtcttgacgctttctcttccattcttctatgacttggcagctctctacacttgcttgtcgagtctttcatgatttaggaggtatcacatggatatcgagctggaattgccctttcgtctcgttcggttcaacactggagtactgtcatgactga

SEQ ID NO: 16997 - DNA, 430 bp, Oryza sativa
  Clone ID: uC-osflcyp006f10b2
ttgttttttttattttttttgttttttttttttttttttttttttttttttttggggaagttcgattgggtatgaaagacctttttactagggaaaccacacgaatacccgattggttaatttcactgggaatagcacgggtccatcacatcacacaaattcatacgttgatacacccataggcgccgaagcgaccagctgcttaattaatcgataacacacgggtttaattcagcaataatcaggacacacacaaaccacacttatatgggggggttttattggggactaattaagggaggggactccccggcggcaagggttcggttgcttcgggacttcacttgccccacttgcagtcggggcaggagcagctggtgccccacttgcagccgccgttctcctcgccgggggggacctcctcgaaggg

SEQ ID NO: 16998 - DNA, 468 bp, Oryza sativa
  Clone ID: uC-osflcyp006f11b2
ttgttttttttttttttttggtttttttttttttttttttttttttttttttttttttttttttaaaaaccgaaagaaaaaggttttttgggcagggggcaaaacaaaaacaaaaaggcctggggcaaatgggaagactccagggaaacttaaatgccaaaggggggttggtgggcagcaaaagaagaaacccctgggaaaggggtactttttcactcggaatccttttcctgggaatcaacatcagccccaggtgggaaggggggggcattcaatttttcgacgggacgggccttcctttggtcggagggtagcttctgggggggggctctctgggggggggccggttcctttttgggcgattgggccatgggaggaccagcggggagggcaacatggccctttttggacagggattccatgccatcaggggcaattcccttttggggggactcactaaagggggct

SEQ ID NO: 16999 - DNA, 487 bp, Oryza sativa
  Clone ID: uC-osflcyp006f12b2
ttgttttggtaacagaagggggttcaataacagcctacaaaattctgaaacgtaacaagcaactccgatatacaaattcgactgacatatcggggactcttgaccaaatgcgacaccattatttgtttgatcagatcagcacttgcacagggatttacggatagacaaaattcaaaggtgaccgcaaacataacttgatactgcaggcagtacatgcatttcacttccgaccaagagtggggaattgggattggtctttgatttctggagctggtggagctgcagagcgatggccctcaccatatccacccctgaaaccgccacgatccccgcgggccctgccacgaccacggccgccatagtacctctctccttcagctggttttaggaactcgttgatgctcacagacttcttagcacgctcatcacgttcagcattttctttcttcttcaaagcatccttgtcagatcccagtttgatgaaaac

SEQ ID NO: 17000 - DNA, 402 bp, Oryza sativa
  Clone ID: uC-osflcyp006g02b2
tggttttgacctgaaactgggttatcctttgggcccacaaaaaaattttttttaattgtgaggggtaacttgaaattggggagatgatggacctgacacattaaccaaaaggggggggaaggctatgccccaatggtgatgggtgggtttaacccaaaacgggggaaaaaaaaagacactttcattgggcccaaagggggagtttgaatgggattaaagcaaaacattccgtttttcccagagggggatgttcggtttgaaaaaaaaaccctttttcctttggaccgtgtgtacttcaggaattttgttacgggatttgggctcatcggcttgcgaaaaccttgggtccgggcaagggcccaccttgatctatttcacttggggatgcacagaggaaacttt

SEQ ID NO: 17001 - DNA, 422 bp, Oryza sativa
  Clone ID: uC-osflcyp006g03b2
aaggggcaaaacagttcatggccttatacatcaggctaaatagcatagagtttacaacgcgctggaagttgcagcattattgttgtaacattctctggttctgtcgtctaacacaatggagaacaaacgaataaatttcaaaccagaaaaccgcccttaagatgatgtcaactaaagccgtgttccgttttgggcagaacaaacaaacacgagaggggagcatgatgattctcaaggtacgttcatgacctggatggactgcagcatgtcggagaggcgatgacaaggtcgccggactggatcatgcccctggccttgagcagcgagaaggtacggttcaggttgctctccatgtcgtccgagaagctgaggcggaaggggatgaggccccattggaggttcaatcgtctcctcacagatgt

SEQ ID NO: 17002 - DNA, 472 bp, Oryza sativa
  Clone ID: uC-osflcyp006g04b2
ctcagtaaatccgcatgaaataaacataaatgatgatttggcctcaggccggtaaatgttacatcggtgctgcacgatacagatatatatgttggtgtctttctttgtagactcgctgtctctgtatatatatcatcactggctctagattaagacttgagcatcttcttgtagtccttgaacgtgcctgcgaaaggcgacaccctgccttccgacaccacccaaagctcatccacgctccccgttatcaggtgctcgtcgtgactcaccattagcactcctccctggaaaacgagtaaaccctggatcagcgcctccacagcatccagatcaagatggttagaaggctcatcgagaagaataatgtgtggcttcttgaaggtgatctttgcaaaggcaaccctacttttctgaccacctgataaagtgtacattggttggagggcaagatttcctgtaacaccgaaagaac

SEQ ID NO: 17003 - DNA, 509 bp, Oryza sativa
  Clone ID: uC-osflcyp006g06b2
tttgttttttccagagaacagggtctgttgatatataattattctgtttttatttgaatacacataaacgatcaaactgtgaaacggtacaggatctgagataattaggaaactacagagcagcagctacaatattaaccatagcagctgcaggataaacacggtgctaaataggcaggctttgttcttctttcacagcctggatatctggaaggggaccatgacttcagtcatctcctccctcatgataatcttcccaacctggaaaaggtcggagatgcctagctgcgtcgacagatgccttcggcaatcctctgcagcaacaatgcctgaagaataagctccatgcacggacccagagtgatcgatgcaggcggcctccccagcgaaaaacaggttgcccaccggagcacagaatctttcatacaagtcagctggcttcccaacaaggtcgcaggaataagaaccaagcgaaattcggtcggttccccaccttgaaaccaaatact

SEQ ID NO: 17004 - DNA, 451 bp, Oryza sativa
  Clone ID: uC-osflcyp006g07b2
tttgttttttttttttttttggttttttttggggtaacaaaaaaaatattataaccttgaagtatttgaatatgatatagcagacagccagtccgttgctttttatttaaggggggggaaaatccaaaaaataaagaaagaagaagaagaagagaagagaagaggagaaaatgaaaggagagaagatcgatcgagggcctgaagtatccatggcatgtatgcaatcgtacacgtagagatgtgatgtgactggatcggagctagacaaggaggggcttgccgcggcccatggtgaagccgcgggtgccgtcgggcatcctggggccctgggcgtgaggaggcggctggcgtgggctggaggggcacttgtggcgggggctcgccggcagcttgtgacgagggctcgccggctcgaagtgccccacactgccggcgggggccgactgcgggc

SEQ ID NO: 17005 - DNA, 482 bp, Oryza sativa
  Clone ID: uC-osflcyp006g08b2
gacctgaaactctgggagcccttggacccttttagcagtttgattgatttgtgagtagtacatggtacaatcaccagctgtttaacaagtctcagcatccaagaagaacagagcacataatgtgttttggatgctaagttggtttgatgcatgggctggtgttagtatgcatgtgctgctagggccctcctgctccggctggcttgctgagaagtggctgcagcgccttcaccacgatggtcatgttcggccggaaatctgactcgtattgcacgcacaacgccggtaccgccgccatcttggcaactgcttttggaggatagtcatccccgagtttcggatccacgcactgcctcaccttgtcctcgctcaaccttggcgtcgcccaggttacaagactctgctgtctcttcggcatggtatggtccactggcttcctgccggtcagtaactccagtaggatgactccgaaactgtacaca

SEQ ID NO: 17006 - DNA, 433 bp, Oryza sativa
  Clone ID: uC-osflcyp006g09b2
tccggtggccatgggcggggcgagggcgtaccacgagcgggtggtggaccactacgagaacccgcggaacgtggggtcgttcgagaacgacgaccccagcgtcgggacggggctggtgggggcgccggcctgcggcgacgtgatgaagctgcagatccgcgtcgacgagagctccggcaagatcgtcgacgcatgcttcaagacctttgggtgcggatccgccatcgcgtcttcctccgtcgctactgaatgggtaaagggcaagcaaatggaggaagtagtgactataaaaaacactgagattgccaagcacttgtcacttccaccagtaaagctccattgtagcatgcttgctgaggatgcaattaaagctgccgtgaaagactatgaagcaaaaaaggcaaagctagcacaaagggtgaagagaagctgc

SEQ ID NO: 17007 - DNA, 179 bp, Oryza sativa
  unsure (1)..(179): unsure at all n locations
  Clone ID: uC-osflcyp006g10b2
ttgttttttttatttttttttgtttttatttttttttttttttttttttttttttttttttttttttttttaaaaaaatacaacaaaattttataccaaaattaacccccccacccattaaacaaaanaacacaaaacaccaaattttnncttttaattttaattaanttacaataaaa

SEQ ID NO: 17008 - DNA, 382 bp, Oryza sativa
  Clone ID: uC-osflcyp006g11b2
tgtgcctctttaaacaaaaaggtttataaacattttaataactttattttcttcccaaaataacacatatttctgctgaacaataaacaacaaatcacaaatgttaccaacttgccttctactatagatgtcccaaacctatggtctatacattccaaattttgcagtgaactaattactaaattccactcttataatgttgaacgaatcgaatacaaaaatcactttactgaaaaagattattaacatcaaaaatgcaacctataaaaaataccaattctgccttcatctgacgccagcaacgccaacctcatcagggatcttgacattctctgcagcaccaaactttctcctgccatcttccactcatcttcgccctcca

SEQ ID NO: 17009 - DNA, 364 bp, Oryza sativa
  Clone ID: uC-osflcyp006g12b2
tggtttttacgtgggcaagggtagaaagtcttatagtatgaaacggagggagtacattattgcaaaccagattttgatcagatgaagagatttaccaccagtaactaacatgcaacaatcatcatctcattgttcaagagttcaaacattatcgtcgtcatcatgggacgaggaaaatttgccagacacgcaccagagatgggagaacatctggactctggtctcttctaagtgaagctaacagtaaggctaaggcaacatctcccaagaggccaaagataagacaacagcaatcctgaaacaacatgagacccaaaaagaaacggtgcgggcgattcccaagcacaacgtacactggcagtcg

SEQ ID NO: 17010 - DNA, 324 bp, Oryza sativa
  unsure (1)..(324): unsure at all n locations
  Clone ID: uC-osflcyp007a01b2
nnnnnnnnngggnctttttaacccctttgttttttttttttttttttttttttttttttttttttttttttttttttttttttttttttttttttttttttttttttttttttttttttttttttttttttttccttttatttttttttttttttatttttttttctttttttctttctttttttttttttttttttcattattccattccaannnccttccccnnnccccttttttttttaaaaaactttttcattttctctcccnncctttgtgtaaatatttcactctttcctttcacttcancactacacttttcataat

SEQ ID NO: 17011 - DNA, 447 bp, Oryza sativa
  unsure (1)..(447): unsure at all n locations
  Clone ID: uC-osflcyp007a02b2
tagcgccccccccccccctggtcccttacccctttgttttaaacactctttttttttttttttttttttttttttttttttttttttttttttaaaggggggaaataattaacaataccttccccccaaaaaacaatttaacccccattttttaaaaaagccccttgctttgcccccctggctggcaagccgggcacagccactccccccaagaaccccnnnnccgtttaaacccaacggcccccacccaaaaaaacaccgggtcttttttggcctaaaaacccccaaaccggttcggtttcctttatttttagccccccctcccccccgaagaaggggggcgggcaatgggacaggccatggggcctcggcttcattgaagggaagggggcccccccccccaccccccggggcccccccccctgggggccaagaccctcccccggg

SEQ ID NO: 17012 - DNA, 392 bp, Oryza sativa
  Clone ID: uC-osflcyp007a03b2
ttttgtttttttaatccccttggttttttatttttttttttttttttttttttttttttttttttttttttttttttttttttaggccaaaaacaaaccgttttttttttggcaaaaaccttaccttcccttattccaaaaagccccccccccaaaaattaaaaaccaaagggggaaaaaacccccccggggataaggtttcccccccaacccaaagccccccccgggtgggggaaaaagccttttaaaaaaccccccccctcgaggggcaaacaaaaaccccaacacaaggcccccttttgcccgggaaaaaaaaaacccccaccccggcccccaaaaaccccattggtccacaattaacgggggaaagacccagggttggggggggtttt

SEQ ID NO: 17013 - DNA, 482 bp, Oryza sativa
  Clone ID: uC-osflcyp007a07b2
ttgtttttttaaaccaaggtaggccttatgtgttattcccacacacacatattcagtgctagtgtctcaagcatacagagaaaacacagctcctgaagtgctcagttctcaacaagaaagtgaaaaaggtaaggcagaacgcaaggtcttccaccagcatcctgcaaaattcctgtcttttcatagtactcaatgctgtctgtgagtgtctcctccaatttccttggcttccagcccaggctcttcaatttctctgacgaaattggtgtaaatatttcagtcttgccattcacttcagcactacactttacataattgtagttggggtaaatgttcttgagaaactccacagtagcctttgggctgatgtgatacggtgcgcaaagatatctgccagatgattctggtttctcgtataccagaatcaaagcttcagccacatcacggacatctactatgtgcaacaacatgttcctcattac

SEQ ID NO: 17014 - DNA, 442 bp, Oryza sativa
  unsure (1)..(442): unsure at all n locations
  Clone ID: uC-osflcyp007a08b2
tcacatgcactcttactaatcttgatccctacacccccccccctttttttttttgccttttaacccccctgtttttaaaaccacccttttcatttatataatattcaaataatttctttaataatcaaaaaccaaaaacacaataaccaaaaccaaatttccacaaacaaaaaatactcaaaccaacccaaaaaaatataacccaccaatccaacacacaaaaattaactcacacccaacccaaactaacnaccccccccactaaccataatacctactacaacaccaaacactcccccttataccacaactctcaccacctaaaaacctcagtcacactcacacccatcatacacaccaacaaactccaccacctctccctccccaacatcccccctaacaccaaccacctttacaaactaaacaccatacctaacaaata

SEQ ID NO: 17015 - DNA, 408 bp, Oryza sativa
  unsure (1)..(408): unsure at all n locations
  Clone ID: uC-osflcyp007a09b2
tttgtttttttaatttttttgttttttaatttttttttttttttttttttaattttattatttttaaattttattttataaattaaatatttaaaattatttttaaaaacaaaaaaaaaaaaaaacaaaaaaaaaaaaaaaaaaaaaacaaaaaaaaatatttaaaaaaaaaaccaaaaaaaaccccccattaaaaaaaacaaaaaaaaaaaaaaaaaacaaaaaaaaaaaaacaccaaaaaaaaaaattttaaaccccaaaaaaaaaaaacaaaaaaaaccataataaaaaaaaaaaaaaagggaccaaccccaaaaaaactaattacaaantaaaacaaaaaccaaaaaaatccccccccagtatttgttttaaaaaaaaacctctatcttccccaacaaaccaaa

SEQ ID NO: 17016 - DNA, 506 bp, Oryza sativa
  Clone ID: uC-osflcyp007a11b2
cttgttcttttaatcttttttgttttatttttggcctttgaaacatttcccctccatgtatttgatttttcatttgcagtgtacatgagtggaactttagttacatcgcggttccaacgttattttcagaattatgcattcagttgatacattgggaaaaagaaagagggtaaaaaaggaaacatgaagcttcaggcactccgtgaaacggcaactcaaactacctattagactatttcagttgtatttttatcacatcgcagcatacattggttgctcaggaagctcggcaagccattcctccttgagtttcccttgagtaaatctcctcagcatttccagggaagctttgggttggtccattggaaccatgtgaccagcattgtggaccttgaggaagctgagtggcccgtggctcttcaaaacaccagcttcggcaccatctactacaaatggcgattcatgagatgatacaaagtctttctggccagaccattccatcgagt

SEQ ID NO: 17017 - DNA, 467 bp, Oryza sativa
  Clone ID: uC-osflcyp007b02b2
ttttgtttttttaatttttttgagagaagccactgacctattggccccttcaatgctaatgatttccattaagcaattttccaaaatgacaatgcacctgacaagctacatcaaccacgatacatcattcgaagaaaccaaaccaataattcaaaagccaaactttcttgttcaagtgatagatgtgcaatgtcataattcctctgcataactaacatgacttgaggtctacatatttcatactacagcatcagaaatttgcaaaaataaacttggcaagtcccaacactccaaaatatgctctatctcaacacggtcaaaggtggataatttcataactctagaaaccgaaggaagaaaccattcatatcctgtgccattgtccaaggattcaccttcatgtatctcgcctgaagggcttaatcttacatcctggatcccatatttctaaaaaaagctagacctaa

SEQ ID NO: 17018 - DNA, 466 bp, Oryza sativa
  Clone ID: uC-osflcyp007b03b2
tttgtttttttatttttttttgttttttttttttttttttttttttttttttttttttttttttttttttttttttttttttttttttttttttttttttttttttttttttttttaaaaaaaaaaaaaggggggggtaaaaaaaaaaaaaaacccccaaaaaaagaaaaaaaaaaaacccccaaaaaaaaaaaaaaataaaaaaggggggggttaaaaaaaaaaggggggggggggggaccccccccccccgggaaaaaaaaaccaaacccccccccccaaaaaaaaacccccccccattttttaaatgggggggggggggaaaaaacccaaaaaccccctttttaattggggcccccggggcccccccaaaaacccgggaaacttttttacctttttaacccccaaaggaacgggggggccccctttttttttaaaacccccaaaaaaaaccgggggtttaggg

SEQ ID NO: 17019 - DNA, 517 bp, Oryza sativa
  unsure (1)..(517): unsure at all n locations
  Clone ID: uC-osflcyp007b05b2
aagcttgggatcctctttttagncnnggccgccctttttttttttggggttttttaaaaaactcggggctgacctttccttcactagggcagctggaccaagatgatcctcagaaacaatgtccactattgataccaacaatataacaaccaagcagtagggaacaaaaaaaaaccagccttacaaaaaataaaccaagaattaaaaatgaaaattaacaaacaaatggaagaaaccccctttggaaaaacaggaaaatctaatgggctgtcctaactcttgttcccacaacctgtacaccaaagggattgaaagttttcgtttcccaacttaacagaaaatatggtaattttaatacccaacttccattttaaaaagaggggtcttcccgaggaacataaccccgaataagctttataaaaacaatctcgttctgaactttcactgggaaaacagcaggtgcctgagctgaataaatactggagaaagtctcgttgcccaccaagttggtcctgaa

SEQ ID NO: 17020 - DNA, 344 bp, Oryza sativa
  unsure (1)..(344): unsure at all n locations
  Clone ID: uC-osflcyp007b06b2
cccccccccttgtcctttagccggttttgttttatacccccccccacnancacacataaaccacaaaaaccccccanaacacaacaacactacaaccaacaaaatccaacanaaaccaatccaaaaaaaanncacaaaccaacccaaaaaanncaaacaaaaaaacaaaccaatcaccaaacaccattattntatatataacaaaatcccctctttaataacattaaacttccttttctacacaacattttctctatcccccccaacacaaaaaacataccctttatcattttcactgccattccctcaaaaataacatacttccaaccactacctttttccaa

SEQ ID NO: 17021 - DNA, 388 bp, Oryza sativa
  Clone ID: uC-osflcyp007b07b2
tgtgttttttaaaacaattgtttttaaaattattaattattattaattacaatccctacaaattcaactatcaaaaacaaaaccaaaccccaaacaactaaacaataaatacccagcaaaaaattcaaaaacacccccacattacataacaaatacaaccaaacactaataccaagccggtatattaacaaaatcaaacccacaccacccctacccctaaataagcatcaaaaccacaaccccatccgttcttaagcaaatcaccaatacacacacccttatgaaacgcctcccaacactcactcacaataaagctactttgccctgaccacattttctcaccacaaaaaacaagtcaaaaaaaaagatcaacttgaacggcaaccac

SEQ ID NO: 17022 - DNA, 317 bp, Oryza sativa
  Clone ID: uC-osflcyp007b08b2
tgtgttttttaatttgttggggtttaacttttttaattttttttataaattatttaattagatccgaaaccatacaaatacatatgaagcactggtgattcccacaaatataacacacaatacaaatacacccataaactgccttataaaccaccaaattgattcaaaagaataaacggccctgagggatcctcccaccgagactgactaagcctaactacagacaattggatccactggacccacattattcaaaaacagatggatatgactgcctcagtcctgaacaaccgaagggaacttgcaaataaggatat

SEQ ID NO: 17023 - DNA, 215 bp, Oryza sativa
  Clone ID: uC-osflcyp007b10b2
ttgtttttttaaacaccagggttttaactttttttttactaaaattaaaatatacaaatttacaaaatatcaccctctacttaaacttcacattacaaacccaaccatcacctcactaccaacctaccactacaaacacacacacccacaaaaatcaaccaatcacacacaatacccacgcacataaaaaccacccatatcctccaaatactccc

SEQ ID NO: 17024 - DNA, 303 bp, Oryza sativa
  Clone ID: uC-osflcyp007b11b2
atatattctttttgtttttaattttttttttttttttttttttttttttttttttttttttttttttttttttttttttttttttttttttttttttttttttttttttttttttttttttttaaaaggaaccccccaaaaaaccccttaaaaaaataaaccaccctctaaataaaaaacccttttttctttcaaaaaaaaaaaaaatttcccccccctcatttcgcctcttttttaaaaaataccccatccccaaacaaatattatataaaaaattttttttccccccaaaaaaaaaaacat

SEQ ID NO: 17025 - DNA, 375 bp, Oryza sativa
  unsure (1)..(375): unsure at all n locations
  Clone ID: uC-osflcyp007b12b2
cccccnnntttttttttttttttttctttttttttttttttttcattaaaattttcttcacaccccacccttccccctccaccccaacccaacccacctcccccccaccaaaaaaacaccccaaaaaaatttttttctctccccccaccccaaaatccacccaaaaattacaaatctaaacacccccccccccactaccaactaaccaccccatttccccccactcccaccacaaaccccccacccccaaccaaacccaaactacccccccctatttataaaaaacataacccccannannaactcacccctccccccccccccccccccttaatttcaaaatacaaataaaaaaannccccccccccccccccc

SEQ ID NO: 17026 - DNA, 480 bp, Oryza sativa
  Clone ID: uC-osflcyp007c01b2
tttgtttttttagtaaacaaggttttgatttattagtatccatccaattaaaactgtgtgttacactcgaaataaaattttctgttcgtaacacctctgaaaacaaaaaatgattcctacacaaggaaaagaatcaacgaaacaatccttagcaaatgctacaggagcaacatctcctggggaaccccctctgtggttggactgctggaaagtagcttgaagtagaaaaaccttcaacctttcatcagctctagtcccatcttattattcagttttatcatggtgaaattgcaccacgatgcatgtaatgttgtcagcgctgcctcgagaataggctatttccgtgagtttcctagccaccgactcaggcaggtcttctgttttcgcaagggaaacagctttctcattttccacgacatcccaaagtccatcgctagcaagaacgaggcattccaagtcttcattgacaagttcttcctg

SEQ ID NO: 17027 - DNA, 481 bp, Oryza sativa
  Clone ID: uC-osflcyp007c02b2
tttgttttaattaactagcatatttaaatttaaaacgtaactgtttgagcaaataccacgaaatgttcaggcgctaagatacggcaataccgatacatccagcatagcaaaaatggcgaagagcacagagtcagataaagctatagagaactagggctccaggagatgggggccgaatgacaaccatggcgcttagtcgacctcctccatcttgctctcgccggcgtcgtcctccagcggcggcatgtcggcgtcagcctcagcagactcgtcctcgtcgatgctcaggccgagcttgagcatccggtggatcctggtgccgaaggtgttggggtcctcaaggctgaagccggaggtcaggagggcagtctcgaagagcagcatcaccaggtccttcacagacttgtcgttcttgtcagcatcggcacgcttgcggagctcgtccatgatggaattctccgggttgatctccatggtcttc

SEQ ID NO: 17028 - DNA, 481 bp, Oryza sativa
  Clone ID: uC-osflcyp007c03b2
tttgttttttttttttttgaggcataactgagcataagttttgcattgaacatcacaataaactgggaatactacatatgaataagcacccgatgaacttttttggtgctaatcttcaaagagggtaattaacaatcctctaacgtcaacctataaaaacagtttgaaattatccccttttattggttcccaattaatcttgatttcaatcgatccttaagatgaataccaagtcgcggcttcaactagtacacatcagatatatgagcatgtatcaaaaattccccccggccactttctgaaagcaaacttacctatatacgctcttcatttctaccacttgccgttgcagcttcagatgttcatggccagaaatgatgttgatgctattcatttcatacttggcttcatcacaggatatataggacgtgtaacaaacaaaacccagcaatttccttcaattcgctcaaaccgttagcca

SEQ ID NO: 17029 - DNA, 119 bp, Oryza sativa
  unsure (1)..(119): unsure at all n locations
  Clone ID: uC-osflcyp007c04b2
cccccacacacacacacacaannaaagnacatacaaacaancactnncancaaccacaaccacaancccccaccccacctactacaaacacacacacncaacccanccaaacaccatct

SEQ ID NO: 17030 - DNA, 258 bp, Oryza sativa
  Clone ID: uC-osflcyp007c08b2
ttggttttttaattttttggggtttaactttttttattattttcataaaaaatacaaataaaaaaaaaacaaaacaaaaacaaaaaaaccagaaaaaccaaacataaactcaacggaaaaaagttcaaaaaacaacaaaaaaaagataactaaggcaccaagagaagggggcgcaaacacaaaagtagcccagacaaccccccctaaaacctacccttgacaaacatttccttcacaagagacaactcagcgacagcc

SEQ ID NO: 17031 - DNA, 276 bp, Oryza sativa
  Clone ID: uC-osflcyp007c09b2
aacccataacacccccccccctttcttttttgtttttttaaacaaatttgttttcccatttttttttttttttataaaaaatctaaataaaaaaaacaaaaaaaaaaaaataaaaaacaaaataaaaaaaaaaaaacccaaacataaaaaaattaacaaacaaaccaataacttcaacctataaaatcaaacacaccaacatcacacccaataaatacccaaaaaaaccttcccccaaacaaaccttaaaaaaaataccaattcccgacatcaact

SEQ ID NO: 17032 - DNA, 186 bp, Oryza sativa
  Clone ID: uC-osflcyp007c10b2
cccccccccccccttcttttcccctaaacccccctagtttcaaacccccccaaaacaaacaaaaaaaacacaaaccaacccaacacaaaaaacaaccaccaacccaccacaaaccaacaccccacccaaacacaaaaccaacacaccaaacccaaccaaaaacaccccaaccccaaaaacccccaa

SEQ ID NO: 17033 - DNA, 436 bp, Oryza sativa
  Clone ID: uC-osflcyp007c11b2
gaacaacaccaatttcctctattcccccattgaatttatcccaatgttcatgaaacaaagcatcttttaaattcaaagaatagaagggagaaggaccccaaaatcagaagaaaaaaattgacttatttggccatttcttttagccatgaactcgctctttctgcacactttgctgtccccgaaaaataaattaaaagaaaaggaagaaaagggccttcacacttgtcaatggcatctcagcaaacggaaacaatggcctcaattaggtcgataagtggagcaagctcaaccttatcgatcaatttgaactcccaggtgaacaatgtgaaatgcttgaagcaggtgttaagggggccttcttccttgaggctcacaatcttctgaaaatgtgtgtggaaaatatgagcataaacccggaaaaggcgcttgaatatcg

SEQ ID NO: 17034 - DNA, 350 bp, Oryza sativa
  unsure (1)..(350): unsure at all n locations
  Clone ID: uC-osflcyp007c12b2
tgtttttttacccttttgttcctacccttttttttttttttttttttttttttttttttttttttttttttttttttttttttttttttttttttttttttttttttttttttttttttttttttttttttttttttttttctttttttttttttccttccttttctccntttttccctttcctttttctctttctttcttttctcttccttttttttcccttttctcttctttccttctcctccctcttcttttttttttcctttcccctttcctctttcctctccctctcttttttctctttcttcttctctttttttctcctttttttccctttttccctctttttt

SEQ ID NO: 17035 - DNA, 399 bp, Oryza sativa
  Clone ID: uC-osflcyp007d01b2
tttgtttttttaaaattttgttggttttatttttttttatatttataatataaatattttatttattttttttttatattattttttttaataaaatcaaccaaaaaaaacaaacaaaaaaaatttaaaaaaaaaaaaaaaaaatataaaaaaaaaaaaataaaaaaatacaccaaaaacaaaaacaccccaacaaccaaaatcacaattacaaaatttaaacaacaaaaccaaaaaaaaaaaaaaccctacaaacaatttattcaactaaaaaaaaaaaaaaaaaaccaaaaaacaaaaatccttcttaacaacccaactaacacaaacaaaaaaaacccaaaaaaaaaaccccaaaaaccaccctcaataccaccaaacctaaccaaaataaacaaa

SEQ ID NO: 17036 - DNA, 484 bp, Oryza sativa
  Clone ID: uC-osflcyp007d02b2
ttttgtttaaacattcacaacatgctgaagcaacaacaattcataatttaggtcaaaaaagtagaagtgacaaagctcagctccagatacaaattttccactagtacagtacaaatggatgccatatttttatacatacaaagtgctaaacacgctaagaaaacaaaccgaagttttctcatgatgctatctagtagttttctgtaattcatccagtctcctcctacagttattaacacctgaaaaaggctgtgaattttcattctacacctgcaacagttttgtagccgagtagagatcatgacaagtctatccaaccatcagcctttctacttggaaggaaacaattctatgttatgcgaggaaggtgtttgaaggtactaatcgagattgaaaataaatacctccataacacccgcataccgataccgcacatactgccccctacacaatctggacgcaggctggtgtgtcggaccttgga

SEQ ID NO: 17037 - DNA, 216 bp, Oryza sativa
  Clone ID: uC-osflcyp007d05b2
ttggtttttttaaatggtgggggtttattccccacaaaaatcggagagaatatccatgtacataaggagtactacaaatgctcaagaacggatagggctatacaggaaccgatctttcaaaagatgttaaacctatacagggacgtcagctcagggctaccggacaccccaatggaacgatagaagcatcccaaacaagctggactggaacatacc

SEQ ID NO: 17038 - DNA, 447 bp, Oryza sativa
  Clone ID: uC-osflcyp007d07b2
ttgtttttttaaattttttggtttttaccctcccttttttttttttttaataactaaattattctttactaacacacattctaaatacaaaccaaccactaatacaacccaaaaataaaaaaattttcaaaacaaacacaacatctctacaccttaaaatcaatactacattactcatgatctatccaaaatactcgccaatcatccagtctcctcctacaattattaacacctgaaaaaggctatcaatattcattctacacctgcaacagttttgtagcccaatacaaatcatgacaaatctatccaaccatcagcctttctacttggaaagaaacaattctatgctatgcgaggaaggtgcttgaaagtactaatccagattgaaaaataatacctccataacaaccacataccgataccgcacatactgccccctacacaatc

SEQ ID NO: 17039 - DNA, 488 bp, Oryza sativa
  Clone ID: uC-osflcyp007d08b2
tttgggttatacattcacagggggctgaagcaacaacaattcataatttagggcaaaaaagtagaagtgacaaagctcagctccagatacaaattttccactagtacagtacaaatggatgccatatttttatacatacaaagtgctaaacacgctaagaaaacaaaccgaagttttctcatgatgctatctagtagttttctgtaattcatccagtctcctcctacagttattaacacctgaaaaaggctgtgaattttcattctacacctgcaacagttttgtagccgagtagagatcatgacaagtctatccaaccatcagcctttctacttggaaggaaacaattctatgttatgcgaggaaggcgtttgaaggtactaatcgagattgaaaataaatacctccataacacccgcataccgataccgcacatactgccccctacacaatctggacgcaggctggtgtgtcggaccttggacctg

SEQ ID NO: 17040 - DNA, 380 bp, Oryza sativa
  Clone ID: uC-osflcyp007d09b2
acatacactcatacataatcttgaaccctttaaaccccccccccttttttttttgtttttttaaaccaattggttttaaccttccttttattttttatataaaacataaataaaaaatataaaaaaaataaccaaaaaaaaaaactcaaaaaaacaaaaaattcaaataaaaaaatccaaaaaaccaacaaataactctacataataaacccaacacaccacattcacacccaaaccacccaaaaaaacatcccctaaaaataaaccatcaaacacattcacacacacccaattaaccttatccaccccacccaataaacatcctcaaataaaatcaccctacacacaacacacaaaaaaaatacctacaatctctcctc

SEQ ID NO: 17041 - DNA, 470 bp, Oryza sativa
  Clone ID: uC-osflcyp007d10b2
tttgttttttaagcgcgggggttaaacattgcattgaattctgaacgataaacaccaggaaccggcgtttatttgaggcaagcactgcccaaaatctcgcaaaagtactgaaaccttagacatagtacacatccatggcaaacatggatgccaaatgacaactacagaaaattatcaaattcgaatgcagctgacggcttctcctgctgaagatgcatattttcccctccattacttggatgtgctctctccatcgacagccaatgggacggcgctggccaggctgcggtatttcagagcatagaacatctcaatgtaacggcgagtctcgcgcctctcaaggatgcttacgtacttccagaatccatatacaccagtcaaggtcatcagcctctcagagtacagcttccaggtgtacttttcgtaaatcctctgcagacctccctgtgaaatatttgcccagtaggttg

SEQ ID NO: 17042 - DNA, 231 bp, Oryza sativa
  Clone ID: uC-osflcyp007e01b2
cacactaagattcattcattcattcatttgatcaaagcaaacgagacgagcttttttcttgcgatcaaaaacacagattggcaaccacacagttaacacaaactatatagttccacacaaaattaacgatgataacgatcggttgatgacgatggtagccccattagatagatagataacttggccattagggccccacctatcaattcctccagttcccgtcggatttgc

SEQ ID NO: 17043 - DNA, 349 bp, Oryza sativa
  Clone ID: uC-osflcyp007e02b2
tttgtttattagaacacagtgcggcgatcttccaagagacaatgtgacacaaagctaaagagtaaataatactactaaacattgaacaaggaacattattacaaaattgtgtgtccgatcctaatcaaaatggagaagtttacatatccgtgctggcaattgagctggctttccagaagtgtacccctaaatatgcaataaaattcttagcccaagatgtataatatgttcctcgaactaacagctatcctgcttttatttgtcatttgttctgtgctcattgctaaacagaataagagcagcaaacttgtagaattctggaaccatatatcggcctttatacttagag

SEQ ID NO: 17044 - DNA, 384 bp, Oryza sativa
  Clone ID: uC-osflcyp007e03b2
tttgtttttttttttttttttgttttttttttttttttttttggggggaaaatccatataatataacccgaaaagcatgcggattaacataatttgatacagggagacaacctaggatcacagaattaacagtacaaaaacagattcagttgctcgggaattacagcgagattcaagctcacatgttctcacatcaacagaccgcaataatttcgggccacaatgttctctccctaaaaactaggtaaaaacaagcagcagcttaccggacaagtttgtcatgactgcttgtgaagtttgaaaccaaaaacttttggaacatactgctgagatggcttttggggcttcaagggtggatatgtcatcaggaagagatgtgggaat

SEQ ID NO: 17045 - DNA, 229 bp, Oryza sativa
  unsure (1)..(229): unsure at all n locations
  Clone ID: uC-osflcyp007e04b2
cccccctccccccccccccctttcctctttaccccccttgtttcccaccccccccttttttttttttttttttttttttttcttttttttttttttttctttttttcttttttttttttctctttttttttttttccaccacctccttcttaacatatcacactaaacccaccatcacactctctcaaatcataatccttcctcctctctccccccctccccncccccc

SEQ ID NO: 17046 - DNA, 464 bp, Oryza sativa
  unsure (1)..(464): unsure at all n locations
  Clone ID: uC-osflcyp007e05b2
ttggggtttttttaagaaaagggagattctggattaattaactagcatatttaaatttaaaacgtaactgtttgagcaaataccacgaaatgttcaggcgctaagatacgggaataccggttcattcagcatatcaaaaatggccacaagcacagagtcagataaagctatagagaacttgggctccaggagatgggggccgaatgacaaccatgtgggcnnnccagacccccccatcttgctctcgtctgcggcgtcctccaacggcggcatgtcggcgtcagccttagcagactcgtcctcgtcgatgctcaggcccagcttgagcattccgtggatcctggagcccaaggtgttggggtcctcaaggctgaagccggaggtcaggagggcagcctcgaagagcagcatcaccagggccttcacagacttggcgctcttgcccacatcggcacacttgcgga

SEQ ID NO: 17047 - DNA, 424 bp, Oryza sativa
  unsure (1)..(424): unsure at all n locations
  Clone ID: uC-osflcyp007e06b2
cccccccccctggccctttgacccccggtgtttcaaaccccccaaattatgaaaacaacatccaaataaatcggatacatacacaagactacagatccatcaaacccctatggaacttgatgaattacaaagtcaattaagtagctaccgactgaggcgcctaaacactatcaggaaagtatcaaggcagagggtgtagacatagaaggcacttattccacaaaattcaccacgagtcaaaactaacccggcccctccaacctgaagcctatcaaagcagcaagcgtnggaaacctttacaccatggccaaaggtaaagcgagccaagctcctctggacatattactgtgctgctgcctcaaatttccggagcatatgccagaagggaagtctcgtaggaaagcccccaacggggacgctgcac

SEQ ID NO: 17048 - DNA, 295 bp, Oryza sativa
  unsure (1)..(295): unsure at all n locations
  Clone ID: uC-osflcyp007e08b2
tggttttttaaatctttggggttataactttctctnnatttcattttgtctattattttttttcatactccctacagctccttaatcttgccctaaacctactaggcctcccagagctgcctgctttcaacccaaatcnnggcatcccttgacagcgaactcgaacttcctattgtcggccaatggcagcacaggacaccatcccgtaaaatcttgacggcgcaacagatgttttctaacaaccttgtcgagcgagaaccccggcttaccgcacaaatttgtgatgaccgcccta

SEQ ID NO: 17049 - DNA, 435 bp, Oryza sativa
  Clone ID: uC-osflcyp007e09b2
aagaatggggggctaatcaggcatttgattcagggtgaatacaccaaacatatgggtccaaagacacaagtgacaaccacaggtagcccttggtttcaccgtctttgaatagaagaaaatgctaacatataggcccgatgtaaactttgtccacgctaatgaataaacagcatcgcaaagagagaaacaagcaggatgactggccataacacctcctcttggcttatcattcttgggttcgaaaaattagaagcattacctgtgcacattggatgggccagactcatcgtactcaggctggacaacccacatctggtggcatgtgctgagagatgccaagatggatcctccaatccagacactggacttcctttcaggaggagcgaccaccttgaacttaatgcctctaggaaccaaggcagagatctccttgct

SEQ ID NO: 17050 - DNA, 197 bp, Oryza sativa
  unsure (1)..(197): unsure at all n locations
  Clone ID: uC-osflcyp007e10b2
tgttttttaaacaaaagggtactaaccttccttactagccagctaaaccaaaaacatcactattaacacaaataccacaaaacaacaatcacaacaatcagaaaaccgatacatccacatacaaacatggccaagagcacacagccagataaagctatctaaaaccagaactctatgagatggtgccctaangacac

SEQ ID NO: 17051 - DNA, 461 bp, Oryza sativa
  unsure (1)..(461): unsure at all n locations
  Clone ID: uC-osflcyp007e11b2
ttggtttttttattttttgggttttaacatagctagcaaaagagagcccgaaacatcttcggatcaagcaaccaactgcaacattgcttaatgcataacatgcttaaaggtagttttgttacatccgcacatagtgaagtaacacagacaggtagctggtttatcatttttcaggcattacagattggtatcagcctcatttcttcccnctttttttcagaccagancctcccagtgcacccttctgtcctgccttggccttaagctccttcagngccttatcctcatctttcttcttctgcagatacgcgagatcactctcgtcgtactccttcttctcggccttgggcgccttgaggggcttggccttccctccttgcttcgacatggctgaccggatcggcgagggcgagtcgagaaaccctagcttgcgcgccgcgacnaccaggaggagatggaag

SEQ ID NO: 17052 - DNA, 481 bp, Oryza sativa
  Clone ID: uC-osflcyp007e12b2
cccctggcccctcgaccgccagtgtttctcacaaaacttgagataaaaacgacatagatatgcttcgtatacatacacatgattgcatattgatcaatcccctatggaacttgatgaattacatatccatttaagtagctaccgtttgaggcgcctcaacactatcaggaaagtatcaaggcagagtgtgtagtcatcgaaggcacttattccacaaaatttaccacgagtcaaaactaatttgtcccctccaatttgaagcctatcaaaggagcaagcgttggaaacctttacaccatggccaaagttcttgtgtgcctagctcctctggacatattactgtgctgttgcctcaaatttccggagcatgtcgcagtgcggcgtctcgtaggaaagcccccagtggcgacgctgcacctcaaccctacaattctgtgagagtattgagaagtaatcccgctcaacatgcccgtcgagtgtt

SEQ ID NO: 17053 - DNA, 407 bp, Oryza sativa
  unsure (1)..(407): unsure at all n locations
  Clone ID: uC-osflcyp007f01b2
cgcatacacatttacttaagttctgatcctnatgaacccccgccctttttttttttgtttttttatcccctttggtttttactttttttttttttttttttttttttttttttttttttttttttttttttttttttttttttttttttttaaaaaaaaaacccttaaaaaaaaaaaaccttaccccatttaaaaaaaataaaatttttttaaaaaaaaattatcccaaaaaaaatccaataaaatttccttaaaaaattaaaaaaaacttaaacaaaaccctttaaaaaattttttaaaaccccctttttaaaaaaaaaaaaaagttaattttttttaactttaaaaaaaaaaaaatttttttaaaaaccaaaacgtttttttaaaaaattttaacccaccccccc

SEQ ID NO: 17054 - DNA, 482 bp, Oryza sativa
  Clone ID: uC-osflcyp007f02b2
tttgtgttttttttaccacaggtttttaaggatggaattgagtagcaatactttcaccccaaaatacagtttagcgacaatatcttagaaaagccgcttgctttgccgccatggctggcaagctgagcagagcagctaacacaaagaacacgagatcactataaaccaaacggcaacgaacgaagaaaatacagggtcttttttgtctgaagatacacgaagcggttcgttttcttttatttttagtctcctctcctcctcgatgatgggtgtatggcaatggcaatggcgatgggatcttggcttagttgatgggaaggggctcgccgttccactccttgaggcagtcgagcatggggtcgatgagcttgccctggctgatgccgaggaacaccttgttgcactcctcgccgggggacttgagcttctcgccggtgaggaatacgcagccgagctcctcgcggacgaagcggtagagcggg

SEQ ID NO: 17055 - DNA, 113 bp, Oryza sativa
  unsure (1)..(113): unsure at all n locations
  Clone ID: uC-osflcyp007f04b2
gcccttccccccccttgtccctgaccccctttgttttctaccccccccncnngcanagaacatcccaataaaacaggcaaaccacacaaacaacagcacccacaaaacccaac

SEQ ID NO: 17056 - DNA, 394 bp, Oryza sativa
  Clone ID: uC-osflcyp007f05b2
tttgggttttttttttttttggggtttttttttttttttttttttttttttgaaaattaatgatttgcaacactttgatttccaaaacttatttgttacaacccttgttgcttttgaaacctgccactcgtagcaagttttgctgttgcatgcttgccgctttgcaacgaaaaatttttttgggtaacccaaagattaggggaaaaataaaattttccccaaataaaaacaacaccgaacgcctccacactccactgttattcaccttatcggcccactcctgcaccaaattggcaggggctcgccgttcccctctcttggggccctccaccaacgggccgatgggcttgccttctctgatagccccaagaaccttgttcagctcctccccagg

SEQ ID NO: 17057 - DNA, 194 bp, Oryza sativa
  unsure (1)..(194): unsure at all n locations
  Clone ID: uC-osflcyp007f06b2
ccacctatcccctataaccaacaccctataacaaccattaacctaataatccccataactactccctatccaaaatatatatccattcacaatcccacacaacataccaccctcaaccataaactccaaaaccccnnccccccaatcacnncccaaacccacactaatcccatncccccccctnccacctttcc

SEQ ID NO: 17058 - DNA, 353 bp, Oryza sativa
  Clone ID: uC-osflcyp007f07b2
acgtcacatacactcgtacctattctcacatccataacacccccccccctttctttttgttcttttaaacccatttgtttaacccccccccaaaaaaaaacaaaaaaaaacaaaataaaaaaaaaaaaacaaaaaaccaaaaaaaccaaaaaaacccaaccaaaccctcacaaaaaaaacaatcaaaacccaaacaaaaacctcaacccatcaaaacaaacaaccaaaacccaactccaaagcatcccaaacaacctacactataaaaaaaccttcaacataaatccttaaaaaaacataaacaaaaactacatcacaaaaatccacaacaatcaaacatatccccccaacca

SEQ ID NO: 17059 - DNA, 72 bp, Oryza sativa
  Clone ID: uC-osflcyp007f08b2
tgggttttttattttttttggtttttaatattttttttttatttttttctttttatttattttcattttttt

SEQ ID NO: 17060 - DNA, 225 bp, Oryza sativa
  Clone ID: uC-osflcyp007f09b2
tggtcctttaactcatgggttttaactttttttttttttttttttttttttttttgttttttttttttttttttctatttactatttttttttttattttaaattttttttataacaataccattttttttttttcccaacccaaaacataaacaaaaaaataaagggaaaacccccttcaaaaaaacaccccccaatatcacccaacaacccccatcacaaccc

SEQ ID NO: 17061 - DNA, 474 bp, Oryza sativa
  Clone ID: uC-osflcyp007f10b2
tttgtttttggacaagcatgggttatatatattcatccatttctcaaactactacaagaggtcgagaggaacacataatcaggagggattgcgacaatttacagcaacaggagtctggagatcgaggcaagaacaagacaggcagcagcagagctaccctcttcatttccactgaatttttacacatttggaatccatggaaaccgagccttccctcccgtcgtcgtggtgtcaccggagtccgatgagaaaaatggtcatggcgtgctcataatccggatcgctcgccggcctcggtgaaggaggcggggcgattgttcgggcggctgttgaggagtgggttcagagccttgacgacgatgctcatgttgggcctgaagtccgcctcgtactgcacgcacagcgcagctacggcagccatcttggcaacagccttgggaggataatccccttcaagccttggatccacgcatt

SEQ ID NO: 17062 - DNA, 403 bp, Oryza sativa
  unsure (1)..(403): unsure at all n locations
  Clone ID: uC-osflcyp007f12b2
taacttttgcctaatcatcatcaaaagtaacccaaaaaaaaacaatgcttgcaaaaaagcgatcagcgagtgcttagtacacgatgttgctcaaaaagtcgaaaaatcaggcccaaactacaagcgagggttactcaacagctcaactcctacactacaaaacctaacactaacagtgagtaaatggtagtccttccgcaccccaccacacccttgntgnnngnngngntatgcttnggctctcccanctntnancacctccatcacnctgcaggggcacctttagcaccagttgtatctgttcgttccctaatatcgtctgcatcatcagccatatcagaattccacagtgctagattatccctcagaaatttcatgaccagngtactatctttgaaattct

SEQ ID NO: 17063 - DNA, 368 bp, Oryza sativa
  unsure (1)..(368): unsure at all n locations
  Clone ID: uC-osflcyp007g01b2
ccttgttctttgattggtttgagttacaactgntttattctggatgaaagcctgaaactttatttttacattaggcttgtgcagctcaggtttaaggccacatcatcactgcttattctttctttaaggcgaactatacataaagttcatatcatagataggtacatagcaactgctaaagaaccacaaccaagtccaaggcaagccaggatctccagattacaagggcaccaacagttgctcctgatcaagaaatctgatgcttcatttgcagtcttcgtcagaagaccgaaacacaaacttcatccctttcttgccacaatcgtccttctcggagcccttccagccaccagagatagtctccccac

SEQ ID NO: 17064 - DNA, 482 bp, Oryza sativa
  Clone ID: uC-osflcyp007g02b2
tttgtttaaagacaaaggaatgagcaatgtatactcgcattccacaacagtcgaagggcaataataagtcttaacatccaaatttaaaccgaacagaaaatagagttttaaacgactgacatagtgcacaaagcgagcagatattaacggtcaatgcaacaactgaaatgaccgtcgacaaaacttaacgagtactaaaagagctagatatctcaaatgcagatatggaaagcaccacttgaacgaggctcatttcttcttggcggcagccttggtcaccttggcaccggttgggtccttcttctccacgttcttgatgacgccaacagccaccgtttgcctcatgtcccgcacggcaaaacgaccaagaggagggtactcagagaaggtctccacaaccatgggcttggtgggaatcatcttaaccataccagcatcaccgttcttgaggaacttgggctccttctccagctccttaccag

SEQ ID NO: 17065 - DNA, 448 bp, Oryza sativa
  Clone ID: uC-osflcyp007g04b2
gcggcggcgtccgggctgttagcccactggggcgcgctccagcagaagttggaggggttgccggcgatggtgcaggcggtgcagtccgacgacagcgccgtgcagctggaggccaccacgcagttccggaagctgctctccatcgagcggagtcctccaattgaggaggtgatcaacacaggggtggtgcctcgctttattgccttcctccaacgtgaggattatccccaactccagtttgaggctgcatgggcactcactaacattgcatcaggcacatcagataacaccaaagtggtagttgagtctggtgctgtgcccatctttgtcaaactgcttagctcccccagtgaggatgtccgtgagcaggctgcatgggctctgggaaatgtggctggtgactcaccaaaatgccgtgacctgctgcttgcagtggtgggttataccc

SEQ ID NO: 17066 - DNA, 461 bp, Oryza sativa
  Clone ID: uC-osflcyp007g05b2
tttggttttttttttttttttggtttccaaaagagcgtgcaaatcccatggaacaagaatcagttgatccatcggacttaaaaatttgagttccattgtaagtcccgctataacacccaccccgtaggacaccaaatctgaaacgtgcccttatatctcgaattgaaagaaaaccccttggcagaaaaattaaaaagggaaagccgattttaacaacacattggtacagtaggatataaacctaaacgtacgttcacccagatgatcctcacgaagtatggggaatcacaaatccatccctagcgaacctctactgaacttcggtgtcggaatctgataacgaatgcagaccgagcagcagcaacttgcaggaaactgaaaaacgtttccgcagctgcagcctaggcagcttcagttccctccggtttgtccgtctccatttgctcgccggtagattcgct

SEQ ID NO: 17067 - DNA, 369 bp, Oryza sativa
  unsure (1)..(369): unsure at all n locations
  Clone ID: uC-osflcyp007g06b2
cccttctcaaagnanggtancatctttccttctttcaccattacataagcttaagcaataacagataacaaatcctcctcctcctctaggtaaaatattcaaacacaatacccttataagtacttattattaggaaagtagcgtgcatgggcataaatggcagcggggggcaggttaagaatcacaatgctgagcagcgaggaaacaaaacaccataatgggacagancaaaagcctcccaaagggagcttttaggcagaaggcttctcccacttgaggggcttcaccacctcccaggtgaagtctgggtcgtcccttccgaagtgaccgtaagccgccgtcttgaggtagcgtccgttgccgcctttc

SEQ ID NO: 17068 - DNA, 311 bp, Oryza sativa
  Clone ID: uC-osflcyp007g09b2
cacactcacacccaatctcacccccataacacccccccccccccccccttgccccttcacccccccctgtttaaacccccccccacaacaaaaataaaaaaaaaccacaaaaaaaaccaaacaaaaaacctaaaaaacccaaacacacccaaccaaaactcacaaaaaaaaacatcaatacccactaaaaaacaaaaacacaccaaaacccaaaacaacaaaacaaccacaacacccacaccacacaaaaaaccaaaaaaaaaccctcccatcaccaaaaaaaaaaactcaccaaaaacccaacactaccc

SEQ ID NO: 17069 - DNA, 474 bp, Oryza sativa
  Clone ID: uC-osflcyp007g10b2
ttgttttttaactacagggtgaatttcatatttgcatctgattaagcattctaggtacatgtgtatgtgtgcaaaaagaatgaaagaaattggtaaggtagtagactaacctcttcacagtgaaaaacctacgagaaaggtgaaaggagatgtatgtgaagatgtacagtggaaaaacatcagaattgtctgcctactgctttcagccccctaccacaaatgtggcccagcaataaaatcaagaatccagccatgaacccatgtcaatgcctctattggaggcccgcagaagaattaaatctgagccatctgttaccagctgaccaaccaacaatttggaaaccttggctggtaggagctttcagcttccagaagttagggatgctgtttgttaacttacgtagtgttagaaccaatggcctagcagtcgccatcgagcatgctggctgcccaagtcattgtcctggaatctac

SEQ ID NO: 17070 - DNA, 420 bp, Oryza sativa
  unsure (1)..(420): unsure at all n locations
  Clone ID: uC-osflcyp007g11b2
tttgtccccttaacccccttggttctcttatttttttttttttttttttttttttttaattgcaatatctccattttatatccatgtcaaaaagccccggcaaaaaacaaacagttcgatcccccaaatattatcccccctatccactgaaaacccccatcgaacccctaaaaagcaatgccaatgcccctttaacgagaggccccagcaaaaggagctaatccattttacccaattcccaaaatcaaccaaaaaaaaccccccccaacaaaccccccacggnggccaaaggccaaacgggggctcaactggccccggcggatccctcctcctccgggtcaaactccgggtcccccccggggggcatctccctccactggtcctcggcccaacactccttgatttggccccacttcttgc

SEQ ID NO: 17071 - DNA, 387 bp, Oryza sativa
  Clone ID: uC-osflcyp008a02b1
tgactcttctctcctcctctaatctcaaggctctgtctcgtcgtcctcgcatctccactcgccatgggcaagattaagatcggaatcaacggtttcggaaggatcgggaggctcgtggccagggtggccctccagagcgaggatgtctagctcgtctccgtcaactacccctttatcaccaccgactacatgagctacatgttcaagttctataccgtgcacatccactggatgcaccagaattttgattctcaggactccaacaccctgtttttgaatgcgtcgccggggtccctccctgagatcaagcacggggacatccctgccgattgtttgggtaccattcacccaggcacttgttctttgagctttaccctcttgagaaag

SEQ ID NO: 17072 - DNA, 380 bp, Oryza sativa
  Clone ID: uC-osflcyp008a04b1
taaggaacgatgtcttgttcgttggatgctctgttcgcttgccggagcccgatgcatgattactcccatatatatatatcatcgttccatcactacataagcctttcttttttaaagcctcgattgttcttaaaaaaaagcctcgatcaatgccacgctgcatctggcatagtggcctgggcccaaatctatataaaaaagaagaccatcgataaggtacataatatgcaggtaatgtaccaactgtatacgcgcgcgtgcgccggcacatgtaaggtatgtataactaaaaaaaatatgtgggcatatgtttacttttttaagaagataaggtggctattccgcgccatcaacgttgcataaaataagggagggaaaaa

SEQ ID NO: 17073 - DNA, 185 bp, Oryza sativa
  Clone ID: uC-osflcyp008a05b1
tttcgaacctcgacgcctgcatccgcatccgcctccgcctccgcctccgcctccgccgcgaactcgccgccgcgccggccatgtcgatcttcgagtacaatggttccgccgtggtggcgatggtggggaagaactgcttcgcgatcgccagcgaccggtggatcggggtgcatctgccgagcgtc

SEQ ID NO: 17074 - DNA, 283 bp, Oryza sativa
  Clone ID: uC-osflcyp008a09b1
atctcctctccctctccgcccatttctcctctccacctgcgatccatccgcgcccgcgaggaggagggagccggacgccgccgcggggagagcaggggagagaaggagaggaggacactctcttcgctattagggattatcagctaacctctccatcaaaaacatcaacttaatatattatcatcacgcggtttcaagcattggcctctcaatcaaagcattgcctcaacaaggaacaacctgtatcaaacattacccgagctcggtggcaggcggggcacca

SEQ ID NO: 17075 - DNA, 484 bp, Oryza sativa
  Clone ID: uC-osflcyp008a10b1
tacgctgcgacgccttccgggagcgaccgccacctgttcggcggattgccgttgaggaggatcaatgacgtcgctgcggcccctcgaaacctcgctctccataggcggcaggccgcgccgtggtctcgtcctcccgccgcccggagtcggtgcgggtgtgctgctccgccgggaagcgatggcgctccctgggcggcgcggcttcgcgtgccgcgggagatccgcggcctcggcggcagagagaacaaaggagaaaaagagaagagattcttcaaagcagccattggtgcatctccaggttttgtctagagcaccaggttaagtttggtgagcatgtaggcattatcggttccacacaggagcttggttcatgggaggagcagggtgaactggaatggactacaaatggttgggtctgccagcttaagcctcctggagaaacacttgtggaagttaaacttgttatactcttggtgggaggaaa

SEQ ID NO: 17076 - DNA, 399 bp, Oryza sativa
  Clone ID: uC-osflcyp008b01b1
ttccaacacctgcagtatctggaacttgagcatactagaatgaagagcaccgaagctttccaacactgtcaaggatcggacatgagacaacttcatcttctctatcatttcagtttcttgttgaccatttttatggacagacaaccgccgtaccttgtagcttggaaatgccgtctgccagtggccaccaataacggtgatgaaattctcatcgctagacttggagacaatgtactgtaggaccatgtcatgaatttgacagctcttcaccttgccgttgctgttgttgttgataggctttaccaaattcctgccaatgagttcattgaggctgtcttctgcaacttcatcggcagtctttccatgctcttcagtaatgaatccttcagcaaaaaataa

SEQ ID NO: 17077 - DNA, 299 bp, Oryza sativa
  Clone ID: uC-osflcyp008b03b1
ctcccctccacagccgtcgaaaccctagccccaaggttcccccacgcctcgcgctcgccgtcgccatgggcaagaagcggaagctcgattccaaatcccccgccgccgctaggtccgcagccgccagggccgcagcagccgcagccgccgccgccgccgccgccgccgtcgccgagccctcctcccagcccgaagccctagccgaggacccggccccctcgtcgcagcccctgggcctatccagcgagggcgcgggggagaggatgatgtcccgtgaggctggcggtggcgaggaagag

SEQ ID NO: 17078 - DNA, 454 bp, Oryza sativa
  Clone ID: uC-osflcyp008b06b1
gtcccgtgtcgcgagttcggccgccgctgccctgcgccgatctccatccccgtcggttgtcctgctgcttccgccgcatcctggagctgccgccatgtccgacatggagtccatgacagcccttatggagtctacaggctccaagctgcagctgcttcagcgtgcatttgccgagcttgagagccagagtgctgcttcattgaacttaaagtggaagcaacttgaggaccatttccatggccttgagcagtcgcttaagaaaaagtttgatgagctgaaagagcaggaaaaggagttcaaggagacagtcacgaaatcggagcagatgcttgagcaacaagaggctgctgtcgtggcaaaggaactgacttctcttgaaagactgcagcagaaaagggatgctgcgttggctttgatcttcggaaggtcaaaagttgaacttgtctatgcctgt

SEQ ID NO: 17079 - DNA, 418 bp, Oryza sativa
  Clone ID: uC-osflcyp008b08b1
aatcgatcgatcgatcgcgtcgccatcggcaacgccaccgcacgcaagcagcaagcagctgatctctcgctcgatcgatcgatctcgggaaacttggatttatacccatggcgcctcgcgcagcgctcttcctcgccgcgctcctcttcgtcgccatggtggtagtgccggtggcgagggcggcggaggagtcatccgccgagtccccctcctccgagtcctcctccgagtcgtcgtcgtcgtcctccgccgacgcgccggcggaggggcgcgacgggccggcggcggcgcccggccccggcgaggggatcgacggcctcttcgacgacaacgacgacgactcctgcaactgagcccggccggccggccggcctcgtcgacctcgcgtcgggaacaatccgttaatttgattgatgat

SEQ ID NO: 17080 - DNA, 399 bp, Oryza sativa
  Clone ID: uC-osflcyp008b10b1
ttgaacttcaatcctagctccttggtctacgatgatttgatcaagaaggtcctggcttgtttctgcccttcagacttttcggtcgctgttaccatcttcggtgggcatggttttgccaaatcatgggcaaaaggtgcagaggttgattcctacatgtgcgatgatcttgttgagcaagagcttcctggtggcggcgtgctgatgtatcagagttttactgctgttactcctggtgctgtgtcaccgaggtcgaccttggatggctggaacagcgatggagcagagatggttgcgaagagcaaagagatgagtgtctgctgggaaggagagaaggcggcgaagaagaaagatgcagatgcctgagaatcggcagttcttaacctcaagttgcagtttgat

SEQ ID NO: 17081 - DNA, 445 bp, Oryza sativa
  Clone ID: uC-osflcyp008c02b1
tatgtggacccacatgtcattgaaataggtatagcaaatagttaattgccacatctaaaagtggcaaatagttaaatgccccgctccctagagccggcggtgcccttcctccgagccggcggctcagccatgctctccctctacctacgaccccgccgtggcgcctcctctctccctctccctctacatgcgacgccatgccaaggctgcctggcgagcagcggtctacgacgggctggggagcagcggccggcaagctactcctcggcgtcggcggcgctccttctgcgagcggcgacgggcggcggcgtctctccgcctctcgccttctctccctcgccatgaggccgtgggagggctcgaccgtagcgggcggcagcgccctcccttccggcggaggggaggccggcggacaggtcctgtgcccttcccttcgccggatcca

SEQ ID NO: 17082 - DNA, 462 bp, Oryza sativa
  Clone ID: uC-osflcyp008c03b1
caagataaaagcagttcattggacgcgctacctgctacaatatactgcaacggagatattctttgacgattcaaatgcacccatatttttaaacttctcatcgcaaaaggatgctaaaaatgcagggtctctcctagtttccctcaggaatgaagccttgttccctaaaggaagtaccaaaggcaaaagtagagtcatttcatttgttgacagacgagttgcacttgaaatggctgagaatgctagggacagatggatcaagagggaaatcagtaactttgagtatctgatgattcttaacactcttgctggacggtcttacaacgatttaattcagtatcctgtatttccatgggtactgactgattatacatcagaaaagcttgattttaacaagtcctctacattagggatctttcaaagccaattggtgctttggatgaaaaacgcttgaggtttttg

SEQ ID NO: 17083 - DNA, 318 bp, Oryza sativa
  Clone ID: uC-osflcyp008c09b1
tcgttcccagcaaagcctcactcactgggctgccgaggaaaaaaaagagagaaaaatctccgatggctctccaggcggtcaccaccacctacttcctaccctccgcgctctccgcccgcaaggagggagcggcgaaggactcggcgttcttgggcgttcggctcggcgacgggctcaagctggagaccagtgctctcggccttcgcaccaagagggtgagcacgtcatcggtgggcatccgcgcgcaggcgtcggcggcggagtcatccccgacggtgacgccgggatcggcgtctgcccacgcaacgctggggatgg

SEQ ID NO: 17084 - DNA, 324 bp, Oryza sativa
  Clone ID: uC-osflcyp008c10b1
gtgggttgagatggcggcgccggatgtcgagtaccgctgcttcgtcggcggcctcgcctgggccaccgacgaccgctccctcgaggccgtcttctccacctacggcgagatcctcgactccaagatcatcaacgacagggagacggggaggtcacgtgggtttggcttcgtcaccttctcctccgagcagtcgatgcgcgacgccatcgagggcatgaacggcaaggagctcgacggccgcaacatcaccgtcaatgaggcccagtcccgccgctccggtggcggaggcgggggctacggcggtggcggtggcggctacggtgg

SEQ ID NO: 17085 - DNA, 442 bp, Oryza sativa
  Clone ID: uC-osflcyp008d01b1
tcgagagacatggatgcctcaaggtgcaaagctgcagcaactagaagatcaaaagggaattgttatccgcttcactatagggcatagtgctacatccaacagtatattggacaaagctatagattcagaggatgctcagcatcgtgactttcttagactagaccatgtagaagggtatcatgaactctcagctaagacaaagattttcttctctacagcagttggtatttgggatgctgacttttatgtgaaggttgatgatgatgtgcatgtgaacttaggaatgcttgccactacccttgctcggcataaatcaaaaccaagaacgtatattggatgcatgaagtcaggcccagttctcgctgacaagaatgtgaagtaccatgaacctgagtactggaaatttggggaggaagggaacaaatactttcgtcatgctact

SEQ ID NO: 17086 - DNA, 455 bp, Oryza sativa
  Clone ID: uC-osflcyp008d05b1
ttaactctctacggccttagtgtgtgggacagattgcggtcacttgtcaatctgttaaagatgatttcagagcagaataattctcctgctaacaccaggaagaaaagccgatgatcagatacggaagagtttagttgagacctctagcgatttgctcttatgatgtacccatcggtgatcgaccctttagaaagctatccccacgctgtgcatcgtggggattaggacaagtgcccggtagcatttgtgcggatgtaaaacgccctttagaattagtttgctgtttgcttaatatatgatagtggaatcggcagtgattctctagattcttaaaaaaccctttgagaatgtcatctttctgttcttctgcttttcactttttatctttttcctttttttctttttagtctttttttttttttcctctttttgttatactcttcttttcttatttt

SEQ ID NO: 17087 - DNA, 452 bp, Oryza sativa
  Clone ID: uC-osflcyp008e01b1
gttgttgagtctttactgctggagatgcaagatttaggactacgaccaaatgcgagatcatacaactttctcatacgtgtttatgggcaacagaagaaaatgagtgaaaaggctgaagatgctttcttaaggatgaagacagatggcattatgccaacgtcttctacatacacttcactgctttgtgcatatgcagttaatggattgcatgaaaaggcttatttgacttatgtggatatgaaaagagaaggacttaagccttccttagaaacatatacagcattgattgacatgtttaggagggctggtgacacggagaagctaatggagacatggagatcaatgatcaatgaaaaggttcctggaactagggtaatattccacatggtgcttgatggtctggcaaaacatgggctgtatgttcaggcaacggatgttatatatgagtttag

SEQ ID NO: 17088 - DNA, 75 bp, Oryza sativa
  Clone ID: uC-osflcyp008e04b1
tatcgcgagcggccgctcctccgattttaaatatactccacaattattaacttgtttatttttgttgttgttgtt

SEQ ID NO: 17089 - DNA, 415 bp, Oryza sativa
  Clone ID: uC-osflcyp008e09b1
ttttaccaatgaatatgacggaaattcttcaaagtcagatgactaccgagatagtgatggtgaagaagaaagtgagacacttgatcggagcaaccgccggaggaggagatctcagagatatacacgggactttgtcgaggctgtctcagatattgacccgaactttgacagtgacgatgaaatcatgggggaggcagtctatgatgaggaatatctgagaactcgaaaacagcagaagacatcaagtgcttctgaagaggatgaagagctccgattagaagaagatgatgatgaagaggaagaggaatattctttgagtaccagtgaggatttagaggagccacaacagcgcaagatactgcaaactccgggccggtgaggggccaagcttagatctgttgatgaaatccaaaca

SEQ ID NO: 17090 - DNA, 328 bp, Oryza sativa
  Clone ID: uC-osflcyp008e10b1
ctcagctcagctagcaaaagtacaatatcccttgtacggacgcctagctaagctaagctaattaagctctaatttctcttttcttttttcttcgatctccggcgaaaaagtaagtacaatggccgaggtgaacggagccaataacggcaacggccaccacggccacggcaacggcagcggcgctgcggcggcggcggggcggtcgacgagtgtgtcgaggaagatcgagtcggagggggcggtgctgatgcccggggtgtacgacgcgctgtcggcggccatcgtccagaataccgtgttttaccccggttttatcttcggttacacc

SEQ ID NO: 17091 - DNA, 431 bp, Oryza sativa
  Clone ID: uC-osflcyp008e12b1
ggagaagtgcctccgcgacgccaagatggacaagagcaccgtccacgacgtcgtgctcgtcggaggctccacccgtatcccccgcgtgcagcagctgctccaggacttcttcaacgggaaggagctctgcaagagcatcaaccccgacgaggccgtcgcgtacggcgccgccgtgcaggccgccatcctcaccggcgagggcaacgagaaggtccaggacctgctcctcctcgacgtcacgccgctgtctcagggcctcgagacggccggaggcgtcatgaccgtgctgatccccaggaacaccaccatccccaccaagaaggagcaggtcttctccacctacttcgacaaccagcccggcgtgctcatccaagtgtacgagggtgagaggacccggaccaaggacaacaacctggtcggcaagttcgagc

SEQ ID NO: 17092 - DNA, 70 bp, Oryza sativa
  Clone ID: uC-osflcyp008f08b1
tccaaatctaaaccacaaaaaatccacctggaatgtgcaccaccaccgagggtaccataaagggaaggca

SEQ ID NO: 17093 - DNA, 284 bp, Oryza sativa
  Clone ID: uC-osflcyp008f09b1
ttcaacttcttcaacgagaacgagcagctggcgttcgggccggggctggtggtgccggggatctactactccgacgacaagatgctgcagtgcagggtgttcgcgtacgccgacacgcagcgctacaggctggggccaaactacctgatgctgccggtgaactcgcccaagtgcgcccaccacaacaaccactacgacggctccattaacttgatgcaccgggacagggaggtggactactacccgttgcgccacgcgccgctccgccacgcgccgtcgacgcc

SEQ ID NO: 17094 - DNA, 455 bp, Oryza sativa
  Clone ID: uC-osflcyp008f11b1
tctgttaaatcttaaggcacagctttttaacatgccatttggatatatcttgacacacccactggaacctttaaaggtttgcttgccatcgatagttgatgagttcctgaggcaggccaaggctgccaggttgttcaatgcatctgtccattcagaatttgaagatgcgcttgaatctgatttgtccaaaactttgggaggaatgaatagacttgacatgttcttcccatttgatccttatctgctaaaagaatccgacagatatatgcgtccaaattttgagtactggtccatggtcaagacgacatacaacaattataacagtgatgttgatgatgagctagtggacctcgatgccacctgaaatgaatgtcggcagtttagatgatcatgttgagatagacctcaacagtgatgatgacttggaatactccatgaacaagatgtccattacg

SEQ ID NO: 17095 - DNA, 389 bp, Oryza sativa
  Clone ID: uC-osflcyp008g01b1
tattttttgggtagccctgttgtcagacctgctgacatcgagacaactgcccttggagctgcgtatgcagctggattagctgttgtagtctggtcgaaggaacaaattttcgctggtttgcacaaggagaacaccacagtcttccgcccgaaattggatgaggcccacaggaggaagagagcatactcctggtacaaggccgtttcaagatcatttgatttggctgacctttctctttagaatgacgagggatttgtgaattacttctggattgtataaggtgcttagcacttgttatgtccatgaataagttggtcaatggaacatccttcaaaagaactagttgattccccgcgttttgctgctggaattattaagtaattttcaat

SEQ ID NO: 17096 - DNA, 442 bp, Oryza sativa
  unsure (1)..(442): unsure at all n locations
  Clone ID: uC-osflcyp008g02b1
tttcgctttcttgcataagaactcccccccctcctcgctccccgcctccaccgccgttttcttggagaggagaaatccgtaggctcaaaggatttttggtagtcttgtttcgtgatattcgtgaagaggggggcagctaaggggggattcgtaagatcagaattggatcacgctggggcgcgctcgggatcgggggttccaaacacancttcttcgttgaatttaagtccatgtactaatggagtcaaagggtggcaaaaagaagtctagcagtagtcgttccttgatgtatgaagctccccttggctacagtattgaggacgttcgaccttgccggaggcgtgaagaagcctcagtctgctgcttacttcaactgcgcgaagaatccttcctgatcgccctttaggctcttcatcctaagcatttaggatcttcttgcatt

SEQ ID NO: 17097 - DNA, 463 bp, Oryza sativa
  Clone ID: uC-osflcyp008g05b1
gtctacaccacatggatgtcaagtccgccttcctcaacggagacctgaaggaggaggtctacgtccaccagccgccgggattcgtcatccacggcaagaacaaggttctccgcctgcgcaaggccctctacggcttgcggcaggcgtcctgagcttggaacgccaagctggactccactctcaagcaaatggggttccagcagagctctcacgaagctgctgtctaccggcggggcaaggacggcaatgccctgttggtaggtgtctacgtcgacgacttggtgatcaccggcaccaaggaggctgaggtggaggcgttcaatgaggagatgaaggcgactttccagatgagcgatttgggccttctctctttctacctggggatcgaggtccaccaggacagctctggcatctcccttcgccagaccgcctacgccaagcgcatcgtcgagttgggcgggct

SEQ ID NO: 17098 - DNA, 461 bp, Oryza sativa
  Clone ID: uC-osflcyp008g10b1
tcttttgggaagggggaggcggatgaggtgttactttttttttctcttacttttttgttctctttcttctatttttttaaactttctttttttttatcttcccctttttatttttctttttttcttttcattttttttcctttttttttttttttcttattttgaattttttccctttctattcctttttttttttctttttttttttcccaacttaacttttccctcttctttcttttttttttcttttttatcttttttccttttttctttttttttatttttttttcttttcacccactttttcctctcttcttttctcttttattctttatctttattccttttcattcagtttctatctcctttcttttctttactaactcttttttttccctttttttttttttttctcataatttttttttttctcccatttcagcttttgtcttttttttttt

SEQ ID NO: 17099 - DNA, 181 bp, Oryza sativa
  Clone ID: uC-osflcyp008g11b1
ttgacgcgtgggcgcgcacacgacacgacgcaccaatggcgctcgtctccgtctcctcctccaccaccgccgttgtggcgctccccggctccgtcagggtttggtgcttcctcggtgtgtccggccggagccgcaggtttccgctgagtcagtcctgagtttgttatcttttttacttttt

SEQ ID NO: 17100 - DNA, 478 bp, Oryza sativa
  Clone ID: uC-osflcyp008h01b1
tttgactcgtgggcgagaggcacaggggttgcaagaagtcgcctaattctcctattgaattaggcacatggttgggccccacattgcctctcattgtaaaatagtatcaactgataatccacaggaactaaacaacaattaaatccaattatggacggattggtaggcctcttgaaaatacgggtggtgcgtgggattaaccttgcctaccgcgacacaagaggcagtgatccatatgtcgtccttcgcctcggcaagcaaaaagtgaagactagtgtaaagaagaaatctgtgaatcctatttggcatgaagagctaactttgtcgatcatgaaccctattgcaccgattaagcttggggtgtttgacaaagacactctcagtagagacgacccaatgggagatgcagaaatagacctggagcccttcatggaagttctgaacatggacccggagaacattcggaatggttccatta

SEQ ID NO: 17101 - DNA, 469 bp, Oryza sativa
  unsure (1)..(469): unsure at all n locations
  Clone ID: uC-osflcyp008h03b1
ttcacttccaccgactcctcctcctcgcgcggcggcggcggcggcgtgagccagcagcagccatggtgctgttctcggtgacgaagaaggccaccacgcccttcgacggccagaagcccggcacctccggcctccgcaagaaggttactgtattccagcagcctcattacctccagaactttgtgcaatccacatttaatgcccttcctgccgacaaagtaaaaggtgcaaccattgttgtgtctggtgatggccgctatttctcgaaggatgctgttcagatcattacaaaaatggctgccgctaatggagtaagacgtgtttgggttggacaaaacagcctcatgtctactccagctgtatctgctggtatccgtgaaagagttggtgcagatggatcaaaggctactggtgccttcattttaacagctagtcacaacnctggtggtcctactgaggacttcggaat

SEQ ID NO: 17102 - DNA, 467 bp, Oryza sativa
  Clone ID: uC-osflcyp008h05b1
tttgatgaggaggaggagctcgagcttggagagagacaacaatggcggctcaggctcttctctctgggaggcagctgctggggaggccattgcaatcttcagtctccaggtcttcttcctccaggaaggcacccttcatggtcagggcagaggccactccccctgccaagcaaggtgctgacaggcagctgtggttcgcatccaagcagtccctgagctacctggatggcacgcttccgggagacttcgggttcgacccgctggggctatcggacccggaggggaccggtgggttcatcgagccacggcggctggcctacggcgaggtgttcaacggccggacggcgatgatgggcgtcctcggcatggtccccccggagctcctcggcaagctgggccttcgtcccgtcgagacggcgaccccgtggtctcagaccggtgtgatcccccccgcgggcacctacacc

SEQ ID NO: 17103 - DNA, 449 bp, Oryza sativa
  Clone ID: uC-osflcyp008h06b1
gcgttggtctgcgtgggcgacgactgcagaaccaatattgacaccttggccgctgatgcgagcactcgatgatatggaaaatgccaacgcacaagttgaagtttctgtggaggaagtaacgaaggctcgcacccaaaagataaagatctttgagaatcgcgctcatgaagttgggagggagaggcaagtgttcgtggatttcttcagcaaccccgagcgactcaagaatcaagtcagagagcttacctcccgtgtgaaagctctccaggaatagatagatagattatccgtcgtctagtttgcatttgtgtgccaggtcgtcccgcgaaatgggaagcaacagccaagcttgatttttttttttttcttttgaaaagagaagcttgatatatgctgttgttgtaaagccttccttcctcaatgcaaaattggtggaaccaatggtttat

SEQ ID NO: 17104 - DNA, 409 bp, Oryza sativa
  Clone ID: uC-osflcyp008h07b1
ttcttctcgcttcgccttctcctctccttgtccttgacctcccctgctccgccgcgccgcagagcgagcgggcatgaccaaggtgcaccccaacgtcgcggtggtggcgccggcggtggtggaggaggagaagggggaggactcttcacaaacattccactacactatacaatctaattaacaccttaaaaaatccttctattctcaaacatcaaaagcacctctctcctaagttctgtagattgattgtgctcctaaattctgttgtttgagcactcaaacattttctttactggtcaatcttagatcacttgttgattattggcattgccatttactggtgaatttattccctcttgttcctctcataaggtccttgttgccttattggtgctgaaggcaagaattt

SEQ ID NO: 17105 - DNA, 473 bp, Oryza sativa
  Clone ID: uC-osflcyp008h08b1
gtaaatttccccacgcttcgcgaaccctcgtcgggtcgatcccgccgccgccgccgacgtccccaaatccaatccgcccatcgcaaggaggcagcatcagttttgctgcaatctgacaaagtggagggtctaaaagttgaagcttcttttatgtctgaacaagacttgctttacttgggatcagttggattacttggagaatattctcggacgagaaaaaggcacaagctcccgcttggaaggccctgctgcatgcatccgaagccttgtcaatttatgcaaacttctggctgctcttggagtgcactggtttctgctgatccacttcaaggatcaagactattgtcacttctggctcttggtgcttctgatattatctcggtgaaagaaaattaatccaagatggctctgcaaaacattggtgcttcacaccgggatgaatgctctctacaggtattagatgcccaggatga

SEQ ID NO: 17106 - DNA, 237 bp, Oryza sativa
  Clone ID: uC-osflcyp008h11b1
tctgtccaatcctcctcccggccaatccgccatccccatccccggccaatccatgcggcctcctcctcccggccgggggcaaggacggcgccggcgtttacaaagacgacggagcaaggggacgacaacattgccgccctccaccatgcctcctgtgctgccctcctctaccatgatggcctcctcgaccttgtggttgcgtccacggggggagggttcttcttctcttccctcttc

SEQ ID NO: 17107 - DNA, 413 bp, Oryza sativa
  Clone ID: uC-osflcyp009a01b2
ttgtggtttttaaaagaaatggggcacattgcaacgattaattaagcacgcacaattgcacaatacatgaacacggatcgcctccttgaaagaaaaaacaacaaggaaaaaaaaactagaaaaaagaaagaaagaagaagaaattaacagcggcttaatcagaagaaacgaaccaatcaatgtacatctctcgcgatccaatccatgtctcgtctctataatctgtgtgtatatagctcatcatccatggcggctaccatggcttgaggtcgttctcgaggccctggtcccagtcgatgcccttctcgccgggctcgaggaagacgcccttggggtgcggcagcttgcgcgcgagcccgttgagtatctggtggaacgcgtcgccgggcctcgccggctggtggaacagcacg

SEQ ID NO: 17108 - DNA, 303 bp, Oryza sativa
  Clone ID: uC-osflcyp009a02b2
ttgtggtttttaaatttaatgttttttatttttttttttttttttttttttttatttatttaaattattataattatttttttacatacctaaaaaatcattatggaataactaaaaagttcaaaagctaaattagcctataccaaaatatgagtagtttccttaaagcaaaaagcaaccccacacaaatttgggagcaaatacaaaaccgaaacctaaattgaaaaccaaatatcgacccagacacttatggaatgcttctaaaaaaccaaacaatggcaagagctctccattgaataaaac

SEQ ID NO: 17109 - DNA, 459 bp, Oryza sativa
  Clone ID: uC-osflcyp009a03b2
ttttgggtttttttttttttgggttttttttttttttttttttttgcagcgaaagctacaagcaaaccctggataatcgaaaagcaaatgtttttcaaaaccagacacacaaactgatagatagaagcccacacggacagatcataggatagcagcagtaatcaagcattgccaaggcaccaggcaagaaccctgaacctttttaggactcggcaccctaatcaccctcgtcaccatcggcgaactcggagccgacctcctcgaagtccttttccagcgcggggaggtcctcgcgggcctcggagaactccccctcctccatgcccttgccgacgtaccaggggaccaaggcccccttggagtacatgagggcgaacttgatgtcgaggcgggagaacacctcaaccaccctggtggagttggagatcatgcacacggccctctgcaccttggccagga

SEQ ID NO: 17110 - DNA, 340 bp, Oryza sativa
  Clone ID: uC-osflcyp009a04b2
ttttgggcttttttatttttttggttttactacaagaagggaagtcatataattcaattgaatttctggttgctataacatacaaaaggtgcaactgtaattatctagtttgcagtaactaagttcaccaaaatgctgtggccagtatatataccaaaaaagaaatacattttggccttcttttaacatacaacacacacacacatatcagctttcctcagcgtgacatcttctcttctatgcaaccgtggaactgaatgaacaaatgattctgttgcagtgcacaccatggaacctgacaacttgaagctcaccgaatttcttggtttcactcatcatg

SEQ ID NO: 17111 - DNA, 479 bp, Oryza sativa
  Clone ID: uC-osflcyp009a05b2
ggctgaccggcgtggggtagctgctggttgtgcattgtcacctatatatacgtaccttaattacagtcgatttgtagctgtgtgtgctgtgtctgcatgggcaaaattacggcgattaatttacgtgctaggaacgaatgatcgctacatgctccacgtatgtaacaatggctagctatacatgcaaagtgtaaacgacgcttgtaggtattgtctgtgagagatcgaaggattgataagcatttctcaatatgtgtgcaaactgcaaaagtaagtagagattaggagacgtactctagagcttcgttgctccacatgtgcgacggatcaaacagatgagaactcgaggctggctataggtggcgaagtgcatgtgtgggggctacttatcttctatccagagatcatatcatgcatgaaaatgaagctaagcgcttgcaaacacacagggtgttcccaaaagagatctggaaggagag

SEQ ID NO: 17112 - DNA, 94 bp, Oryza sativa
  Clone ID: uC-osflcyp009a08b2
tttttgtgtttttaaatagaagggatatcaaacccattctccttctattgatacttttccgatccaaatgtatggatccatgtgctctacatac

SEQ ID NO: 17113 - DNA, 465 bp, Oryza sativa
  Clone ID: uC-osflcyp009a09b2
ggctgaccgggggagggtagctgctggtgggccattgtcacctatatatacgtaccttaattacagtcgatttgtagctgtgtgtgctgtgtctgcatgggcaaaattacggcgattaatttacgtgctaggaacgaatgatcgctacatgctccacgtatgtaacaatggctagctatacatgcaaagtgtaaacgacgcttgtaggtattgtctgtgagagatcgaaggattgataagcatttctcaatatgtgtgcaaactgcaaaagtaagtagagattaggagacgtactctagagcttcgttgctccacatgtgcgacggatcaaacagatgagaactcgaggctggctataggtggcgaagtgcatgtgtgggggctacttatcttctatccagagatcatatcatgcatgaaaatgaagctaagcgcttgcaaacacacagggtgttcccaaaagag

SEQ ID NO: 17114 - DNA, 473 bp, Oryza sativa
  Clone ID: uC-osflcyp009a10b2
ttggggttgcaaatatacaagggtcaagcaaagcatctactacttgagaattcagataatacatcaagcaaaatcacacaccagccatcagtgcttccatctttagcatcacagcctgaaagctcattccaccatcctccacatgcccatccatttgacatagttgcagagggcttaaaaggacgcgaaaacacgacgcagcgatgaactgcgggcttggctgcagactgcagcaagctccatcgcagcccagagcaaacatatgtacatatatgacacagcagacgacaaccttactacacaaaccatacacgactcaacatagtagacggcgagcagcagcaggcgtacttaattactagtagcatctacgttatatcacagtagtagaggtaagataggtagacaacactcgacttccatccgcttcggtctctgatatgtctctcctcctcctctgccttgtgtgtgca

SEQ ID NO: 17115 - DNA, 398 bp, Oryza sativa
  Clone ID: uC-osflcyp009a11b2
cccgtccttaagcttggacccctttaacgggccccccctttttttttgggggttttttacttattggggtttcccccccgcgggccccttccttggagagctgctacacgccaaaagggaaaaactccacatccttttcttttgagacatccatatgccgccaccccacaagggggggcctggggacactacaaatgggggcccctcactatctaaacttgtttggccccccctaatactttttaagcttatgccctgggtttctacttcaccctaaaacgggagaaccctcctatccccggttagcacctaagacggacctccttttttttggcgcgaaacaacagtgtcaccccaaaatccccaaagcataaacccttttgctccccttgaaaggg

SEQ ID NO: 17116 - DNA, 330 bp, Oryza sativa
  Clone ID: uC-osflcyp009a12b2
ttttggggttttttaaaaaattgggttttccgtctcgcgggcctccctttgggaggcctgctacgccaaaagcgagaaaaactccatccgttagcttttgacatcctaatgccgacccaccacacggggggggccatggcacacgtcaaaaaggggatcctatcactgtcaactaatttgatccgacctaggataataagcttatgaggttgcccttacttaaccctaaaccaatgaagtacttccatatctaagtacagcttcagacctagctgcatttttttggcgcgctaatcagagtcatactaaaatgcccaaaaggcctaagcg

SEQ ID NO: 17117 - DNA, 505 bp, Oryza sativa
  Clone ID: uC-osflcyp009b01b2
cactataaaagcactgtcgccgcacgcagcgcgcacgcgagcgcggggcccctatagcgcgcgcccccttttttttttttgttttttttttttttttttttttttttttttttttttttttttttttttttttttttttttggccccccaacccaaggaaaaaaacctttcaagcccctaaggggaaccaaaccaaaccgttttaagggaccccgcccaaggggcataaaggtaaagggttagcccaacataccagggggacgcccgggcaagggaaggggggaatttcattaccccgttatgcctcccaagggcccctggttcttaaagggattacgggccaccctttgggggaccacaactccctggggggggtggatttttcacaacccaggggggctccataatgccaccaaaagaaagcctcttggtggaaaccttccccaaaagcttgcaaaagaaatccttagcctttgccaaacccaaagggcgtggggggaacccc

SEQ ID NO: 17118 - DNA, 428 bp, Oryza sativa
  Clone ID: uC-osflcyp009b02b2
ccttttactcttttgttttttttttttttttgtattatttgaccagatggttctttttgccttttaggttgccttttttgttaccggtctttcgggcagggagaaaacaaagctggatactcgagtgaaagaaaccctaaaaaaatcccaaccgcaaaacaacatatcgagaggggcacacccgagaggtgagccaaagggcgtaaaggagaggggggcaaaattaggcacccatagatgggctaaacacccaccgctcgacttgggcaaggggaaacagccggggagtaatgtaaagagggacctactggggaagagcgcccaaaaaacatatacctgaattaggaggctttggcaactgccgaagctgcaagtcatggacggcacggacctaccccctgtaaaaaaaaaaatttaaacccagctgg

SEQ ID NO: 17119 - DNA, 381 bp, Oryza sativa
  Clone ID: uC-osflcyp009b04b2
ttttgggtttttttttttttttgttttttattttttttttttttttttttttttttttttttttttttttttttttttttttaaaaaattaaaaacaatgatagtttttaattatgaaaaagaaaaatttaatattttggggaaaaaaaaaaaaaaaaaaaaaaaattgggcaatgggggaaaaaaaaaaaaaaaaattttttaagggggcccaaaattttttaaaaaaagggggaaaaaagaaaaaaaaaagcgttcggagaaaaaagagggataaaagaggaagaccacaaaaaaacaaataaaaaaaaaacaaatttgaaaggtgggcccaaaaatcgccaaaaaggagaaactcaacacgaaaaaaaatgtcagggg

SEQ ID NO: 17120 - DNA, 457 bp, Oryza sativa
  Clone ID: uC-osflcyp009b05b2
gcaatccaatacattagagtgaagggatgaacataatatattgtaatgattttattttgctacaatgccgtgttttttattcaccacgaatgagattaaatccgtttgctcaggagcagcaaatccagcctaacccaaaaaactttgcatgaaccaccacaaaagaaacttaatggactggaagtgccaccttccttaagctacaaatcgatcttttaatacattaaactagagctcccaggtaagttttaggttttctcaagaatatagccagtggaataacagcggtatggtaccgcaaagtgcctaatctgcacgagattggccggcacgggatgagaggatgatgcccacaatgagaccatacagggcaagcgcttttgcgaaaatgaggatgaggatcatgcccacgaaaagctttggttgctgtgcatttgccctgacaccagcatcaccg

SEQ ID NO: 17121 - DNA, 335 bp, Oryza sativa
  Clone ID: uC-osflcyp009b06b2
ttttggggttttttaatttttttggtttttttttttttttttttttttttttttttttttatttttttattatttttgttaaaactttttaaatttttttttttggagcccaaaaagggggaggaaaaaaggaaaaaccaacgagggtgggaaaaaaaaaaaaaacttttggggaaaaaaaaaaaagggtttttaaaaaacaaaaatttatgaggctcggaaaaaaaaaaaattagcgggggtgttttgaagaagggaaaaacctggaaaaaaaaaaggggcaacacaaacagcggaagtttccccttttggggtttaacccaaagaaaggggac

SEQ ID NO: 17122 - DNA, 62 bp, Oryza sativa
  Clone ID: uC-osflcyp009b07b2
ttgtgtttttaaaaaaaatcggggaatatcactctttttttttttttttattcttctttttt

SEQ ID NO: 17123 - DNA, 454 bp, Oryza sativa
  Clone ID: uC-osflcyp009b09b2
ttttgtttttatgtgtaatagggatgaaatatttttcgcatgaatattaacacgcactgttttaagatatcaaacataaattatttaccttctcgatccaggatccaagaggtagaaggatatacagtgcatgctatatggtacatgccttcatgctgaagctgactagaagtgtcaatacaatgacaatttattcacacagatacgttcacaatttggtggtagatatatacatgaatgatactgttcagtccaggctggggccgccgctcatggactcagtgcttgtgcttcggcttttttactatcatcacggtgcagtgcgcatgatgagaacagtagtcactcacgcttccaagaacagctcgtttaattgctccatagccatggcttccgacaaccaacatctccgcctgatgcctctcaacagactcacaaagaacattcctggcat

SEQ ID NO: 17124 - DNA, 151 bp, Oryza sativa
  Clone ID: uC-osflcyp009b10b2
tgtgggggctttttaatacattggagtcaaatatttatcatatgaattctaacatactttatttttagattttactcatattttcatataaccactaaaagcagataaattacatgtggtaatgattcagaaaatcacatttcttaatgcc

SEQ ID NO: 17125 - DNA, 436 bp, Oryza sativa
  Clone ID: uC-osflcyp009b12b2
ttgggtttttttttatgagcgacgaaagcatcatctatttggaagtgaaattcccagaactcaaaaactccgccgcccaaaactccacaaataggaagcaaaggtgcccatctaacaaaaagatacaccccagatcctacaatcttggggaacaaatttcaaactcgtcgcgaaacgttccttaaaatttcggacctaactactctcctgctcattggctgtctgtaaaatcagcatcgatgacatcaccttcctcgcctcctggcttctcggatgggccagcagagccagcggcagcatcagctcctggggtaggtcctgctcctggggcaccctgctggctgtagagggcctgccccagctgcatcacttcctggatcagagcagcgagagcatccttcatcgtctgtgtcgagccacctgcaacagcgttctt

SEQ ID NO: 17126 - DNA, 390 bp, Oryza sativa
  Clone ID: uC-osflcyp009c01b2
gtcagcttgtatcactcttgttcggcgcgcgtccttttttttttttgttttttttttttttgtttttttttttttttttttttttgggaaggaattatctctttttaaccttttccttttttttttactccagtgaacacaactgtcactcgaatagaaactgttttatagcttgtttttagtttacaaaccgcataaacagggtaatagagatccaccccactagggattacacaggttttacacccccaaaattgtggcacggttttgcaaacagaacagaattgaaaagcctagttagttttccagaactttacaaccaaactaacggaattatggacaagggggggagccccaactgaaagaatgaaccattcaaatgctacctac

SEQ ID NO: 17127 - DNA, 403 bp, Oryza sativa
  Clone ID: uC-osflcyp009c02b2
cattccgatagatagcaacaagcagttcaaacaccataaccaaagcgaactcaattcatggtaacatcacggacgaagaacacctaacactggatggatggatagagggcttctcgactcgagagagccactggacacgataacgactcgactcgatgataagatgattctgacacggatagctaaggataactggccacgatgggccccaccaatcagttcctccagttcccgccggagtcgccgccgtagccgccgccacggctgccaccgtagccgccgccgccgccgccacggccgccgccgtagccgccgccgccaccgtagccgccctcacggcgcccgtagccgccgccgccacctcctccgtagccgccgcctccacgaccgccgccgtagccgc

SEQ ID NO: 17128 - DNA, 441 bp, Oryza sativa
  Clone ID: uC-osflcyp009c03b2
aaaataaaaacgagtgtcttatccttttggtataacatgtagccgccatgctgtttacacgacccaaattacagccatttacctccggattgacctcaagaaaacaaaccttccgcagcagagacggaactgttatccagaacctccatggtgctcaactctcaccgaagaaatttataatgatacatctggcaattagtccaaacaaggttggcaccccagacttcaaagctgcaacagcttaatccagcataccggaaagtcggtccaacaataaccatgaaaattgatgagcaccaacaattaccaacattagacaagtcattcctgaagcaccatgtaatgagcacaggtgatcacagcaaaacatcatcatcttgcttcagatgtcaagcttcagatgtcaagatcccagacggccacctcaaccaagtttgattc

SEQ ID NO: 17129 - DNA, 96 bp, Oryza sativa
  Clone ID: uC-osflcyp009c04b2
ttttggttttttaaaataaaagggttttttttatccttttttaataacattttacttccttttctttttacaccaacataaattacatctcattta

SEQ ID NO: 17130 - DNA, 331 bp, Oryza sativa
  Clone ID: uC-osflcyp009c05b2
actaggcaaaccacacgaatacacgatggattaatttcactgaaaaaagcaggggtccatcacatcacacaaattcatacgttgaaacacccaaaggcgccgaagcgaccagctggtaaattaatcgaaaacacacgggtttaattcagcaataatcagcacacacacaaaccacacttataggggggggttttatgggggactaaaaaaggggggggactcgccggcggggagggttcggttgctttgggactttacttgccgcacttgcaatcggggcaggagcaattggggccccacttgcagccgccgttcccctcgccggggggga

SEQ ID NO: 17131 - DNA, 426 bp, Oryza sativa
  Clone ID: uC-osflcyp009c06b2
ttttgtttttttttttttttttttttttttttttttttttttttttttttaaacaacattttttcggttaaacacttggtcacagcaaccagaccttacactttgagggaagcttacttcacacacaatcgatgcaactggcgttgcatctacaaagggagctaaaatcaaaagggggagaggctctacatgatttcagaccctttactcgcaagattcagagctgtaacagcgaaacttttgcttcctctgaactcgacaaaacaggggcttatcattgggggggggttgggactatgagggatgataatacaagctggacagatctaagccacttcagaaacaaaggaaaatcaaaaggggccgaggcccatgagccgaaccgaggcatggcccactgcctagatcacccagtatatttcttct

SEQ ID NO: 17132 - DNA, 341 bp, Oryza sativa
  Clone ID: uC-osflcyp009c09b2
ttttgtttttttatttttttttgtttttttttttttttttttttttttttttttttttttatttttgttttaaaaaaaaataaaaaaaaatattataaaccaaaaaaaaaaaaaaaaaaaaataaaaaaaaaaaaaaaaaaaaaaaaaaaaaaaaaaaaatggtaaaacaaaaaaaaaaggggaaagaaaaaaaaaaaaaaaaaaaaaaaaaaaaaaaaaaaaaagataaaaaaaaaaaaatggttaaaaagggataaaggaaaaaaaaaataaaagatacaaaaaaaattgaacaatataacaaaaaaaaaaattaccaacaaaagacaagtcattgctg

SEQ ID NO: 17133 - DNA, 460 bp, Oryza sativa
  Clone ID: uC-osflcyp009c10b2
ttttgttttttttttttttttttttttttttttttttgccagaagtttggtaattccttcttgggctggggcagttgccaactccttttttttttttgagaaccatgcagttgccaactcgaatctacagggcataagaatatgtatgtatgagcaacgaaagcatcatttatttggaagggaaattcccagaactaaaaaactccgccgcccaaaactccacaaataggaagcaaaggggcccatttaacaaaaagatcccccccagatcctacaatcttggggaacaaatttcaaactcgtcgcgaaacgttccttaaaatttcggacctaactactctcctgctaattggctggctgtaaaatcagcatcgatgacatcaccttcctcgcctcctggcttttcggatgggccagcagagccagcggcagcatcagctcctggggtaggtcctgctcc

SEQ ID NO: 17134 - DNA, 461 bp, Oryza sativa
  Clone ID: uC-osflcyp009c11b2
ttggtttttttttttttttttttttttttttttttttgccagaagtttggtaattcctttttgggctggggcagttgccaactccttttttttttttgagaaccatgcagttgccaactcgaatctacagggcataagaatatgtatgtatgagcaacgaaagcatcatctatttggaagggaaattcccagaactcaaaaactccgccgcccaaaactccacaaataggaagcaaaggggcccatctaacaaaaagatacaccccagatcctacaatcttggggaacaaatttcaaactcgtcgcgaaacgttccttaaaatttcggacctaactactttcctggtaattggctggctgtaaaatcagcatcgatgacatcaccttcctcgccttctggttttttggatgggccagcaaagccagcggcagcatcagcttctggggtaggtcctgctcct

SEQ ID NO: 17135 - DNA, 458 bp, Oryza sativa
  Clone ID: uC-osflcyp009c12b2
gacgagattggttcaaatatggattgcaatttgaaaatctcaacaagaatcatcatcgcccgacaacttgggaagtaacgtttctcatcagtgcaccactagaacaaagattagccagcacacaaaatctaagatatgtcgtgagtgtcctgtccttaggcagcagtaacaggttccgatccttgcttcgattcagctccagatccagctttgccgtcttcggctggctgcttggtcatcttggcgaacatattgctgtagaatttggcatccttcttgttgtactccttgaccttttccttgaggttcttgtatgtcaacttcacatccctgttatcaggatcaatttcaagtgccttcttaatatccacctctgctaactctaggtcagcaagttgcatgtaagcttgggccctcctgtataaagccttgacattttggctgtcaagttccagaac

SEQ ID NO: 17136 - DNA, 424 bp, Oryza sativa
  Clone ID: uC-osflcyp009d01b2
tttttgttaggatacaacagaagaaaaggatatacctatgattccatgcataccataaggaaagattcttacgtaccaaccttcctacatacagcccaagctgatttcatattctagaacatctaatgaaaccgcacgcacattaaccaaaattaattctaaaaacacaccttgtgagcaagccacgaggctcacttgacaacatcagttaataagcagccttaaatcacatcagacgaaactgcaagccggggaattctttcttaatgaggaagtcctacagcagctgcttactgcgacagccacgaggtgttcacgatccaaagctgtagtgggcagctttagctgcttcgccgccgtgcggattaaggtcagactcagcctagcccaccacggggacgccgctgttgactttaggcgtgca

SEQ ID NO: 17137 - DNA, 451 bp, Oryza sativa
  unsure (1)..(451): unsure at all n locations
  Clone ID: uC-osflcyp009d02b2
ttttggttttttganacaaaaaaggggaaaaagaagcacgcagaaagctagctcatcactttattccaaaaacggcacagcgtagtgactcgctcgctcctccctctggcgaaataatgtcgacaatgcctcaatcgtgcagcaccaagtgctcggtctccggtgatcgccgacactggtcggtcgctggcggtatgtgcggcggcttgtgcttcttcggaggtgcttcaggttttggctcaggcttaggcttaggtttcggttcaggctttggctctgggcatgggttaggctccgggtttggttcgggcttaggctctggttaagggtcaggcttcggctctggttttggctccggctgtggcttgggctctggctttgggtctgggtgtgggttgggttctggtttgggatcccgtttaggctctggatatggcttgggctttggttt

SEQ ID NO: 17138 - DNA, 411 bp, Oryza sativa
  Clone ID: uC-osflcyp009d04b2
gggtaaaatcgaccgatttcatccaattcaagattcttctgcatgatatgatagactagaataatgctaccccatttgtttgcacccagctcgattaggcgacaaatccctggaccatatgtcccagacattgcaacaaggaggggtatatatcctactctactactacaatgagctatgaattcgcgaggggggttctgctatttcatttgggcgaaacgggtgcctctggaaacgatgcattgtctcgtctatcactcatcagtgcaagtctctggcgaatctgtcacaggattgaatttctgccgcggattctggcttcttgagctgcttatgcagctgtggcctgtcatgcccaagcacatcgctgaacgccctcgatgcttctagaagctcctcaggactggttga

SEQ ID NO: 17139 - DNA, 181 bp, Oryza sativa
  Clone ID: uC-osflcyp009d05b2
tttttggttttttatgattagtgggttacaataatatattttatccgagatagaaataatccaaactatagggtagacaaaaattacactgccctaatggcgtgcactcggccaaattacaaacacaatgcttttaccagggcagactaaaacaggaactacaaggtgcataaatcactga

SEQ ID NO: 17140 - DNA, 399 bp, Oryza sativa
  Clone ID: uC-osflcyp009d06b2
agcaaaaacatttggtcattactccaaggggacattagacacaattcacacaacagccttattacaacagggggctacagctagcaggctcaagggagggataatccaggggtgaaaaccaaggataggctttttttaaagctccaggaccttggttgggggggccaaactaagctgggatacatgacgattttttcacacgaggacccaaactttttaacccaatactaggtaattaattagccgaccgattcgatattcgatcgattcgcagtttatttcgggcccataataataataataatggtattggacatgggggcgggcctagcgggtttacaggacaaacgggttgggggagatgtccaacatttcaaagcaagacagggtaggctcctg

SEQ ID NO: 17141 - DNA, 445 bp, Oryza sativa
  Clone ID: uC-osflcyp009d09b2
ttttgtttttttttttttaagcctttctgaacagagtactgaagcaaaagatgaatccaaaacaagttctagcgtctcatacaatacaaaagcagggaagtgcaaaaacatcttaactcccaaaccacaaaaggaacaacagacagtaacaccggtattacatatccagccttgcaaagcggcagagctcaagcgccaggcaacaagtaaacatgcttctgcctcttttggcaacaatgacgagcacctagaacaaccgttcaagcagtgcagcaatcaaatttcagttattgtgctcatcagcagcttggtgatactggtagtcaccttcatcatatgcctcgccctcttcagggccttcaggttctgtgttgttaggttgcatctgatagtactcatgctcatgtcgctttgagcgctccgtctcataagcatcatggctttt

SEQ ID NO: 17142 - DNA, 423 bp, Oryza sativa
  Clone ID: uC-osflcyp009d10b2
ttttgtttttttttttttttgggttttttttttttttttttttttttttaaaaaaaccctcccttaataaggaattaaaataggggtaattggtcaattcggggtaaacatatatgtaccttaagccaattatttccccggggaagaggatacacatggccattcatatggatatatcatttccctccgactaaaatataacaaggtactggaggatgtatgcagtccggtggcacttggcacgctgattggtttgccaggtggtcctcgtttataaagaaagcatggaatccgtagggaactcggcttggtagcttaacaactggcaccggatcagcagacattggttttggatcaatcacattggcttcagaattccctggattctcggcgggggcaaagaatatcaaataacccttattt

SEQ ID NO: 17143 - DNA, 450 bp, Oryza sativa
  Clone ID: uC-osflcyp009d12b2
ttttgtttttatcattgttgaaactttttctttccatgtaaattatctgcaaagtaagaaagtaacactcccaagttacaacagcacaccatccatatatccatgcaggcagcctgtttgtgcccttgtgcagatgcatttcatttatacaagtagaaggcactcaaatcagccaccacatgaacacacacatgttccatcatcgatcgatctacacatgcatcacccggtcatgcacttacaaacaaaagatctacttgaagaagtacgggaggtcgagcacgtagaggaggaagtaggcccagaggacgccggagatgccgccgaagaagaagccgccggtgaacttggcccagccgtcggcggtctgcaacttgtcggcctccttcttgcggccggtgagcgtcagcgtcggcgccgtggacggctcgccctcgccgaaggaggcga

SEQ ID NO: 17144 - DNA, 334 bp, Oryza sativa
  Clone ID: uC-osflcyp009e01b2
ttttgtttttttttagagaatggttgctgaaaatggcaacacctaaaggcatgcaactgattttgtaaacgtatgaacctaccaagcgtgtccaacatgaaataaactcacatcattataactgagttcggcttagatgacaacaagcacactactgtttaaaccatctatgaacaggagccttaaaaaggtgacctaacccgtcccatgaagcctaaggcggcgggtgacacaggcccgccttggagaccatcttgcccatctctttaggggagcacacctggcactgaccctccccggtgccgggctgcaggaacacatcgccgagcttcag

SEQ ID NO: 17145 - DNA, 408 bp, Oryza sativa
  Clone ID: uC-osflcyp009e02b2
ttttgttttttttttttttttttttttttaaattttaataattttaatgtattttttttttttttttaaattattttttttttaagttttttcaaaataaaattaaaaaaaatgattattaaatagtttggtttatattacaagaagcataataaggaaaaaaccatctaaaaacaacaggaataaaaaggaaaaggaaaccagcaaatgaagcctaaggcgccgggtgacagaggcccgccttggggagcaatttcccaatcgcttaaggggagcacacctggtactgaacctccccggtgacgggctgcaggaaaaaatcggcgaggtccagtttataggaggtaaaattggtcgaatccatggacatgctcaggaccttgagggcaagggttacgggctggtccc

SEQ ID NO: 17146 - DNA, 434 bp, Oryza sativa
  Clone ID: uC-osflcyp009e03b2
ttttgtttttggtatattctggagatttatttattaatttttttcggtttcatagcatttgttgttttagggagaaaaaaaggcggagcgccttattgggaaagaattaaggacagagaggaagagaatagtgagggtttttctaccccaaaaggtgggagtttataggggcgggggacaaacaagagcgcgccagctagggagctttctgtttcggggtggcttttagaactattaaaccaaggcctcgcaaagggccaagagattaattccgggaagggtgaacttatgggagaattgttcggaaaggaaaaaccacggtaccccaaaaggggggggcatttgaaatagcatggtggactttatacttttcaagagggagaatggggctaggtggctcacctaagttatgggctacagaagctttaaggaca

SEQ ID NO: 17147 - DNA, 122 bp, Oryza sativa
  Clone ID: uC-osflcyp009e04b2
aaaaaaaaaaaaaaaaaaaaaaaaaaaaaaattaaaaaaacaaaaaaaaaaacacaaaaaaaatacaaaaaaaaacacttaaccaaaatttctacaaaaaagtacaaagaccaaaaaaaata

SEQ ID NO: 17148 - DNA, 429 bp, Oryza sativa
  Clone ID: uC-osflcyp009e05b2
ttttgggttttttttttttttggggttttttttttttttttttttttttttttttttttttttttaaagggaacaattttcacctggagaaaaaggtaaacgggtttgcagccaattttaaacaaagggcaaacattcactttccaagaaaaccccagggggtttataaaataagcaaacaaaagattaaaaaaaaggggcaagtcgggattagataaggcctcaaccaaaaagatgggttcttgggggaaggggccccaaaaaacggggcataaaatcgggtgggatcccgggtgttttgggggggggttgggtttttgggcccgggggataagaaaagttttttggggggccaggttttttggttttgccgggcctttaacgggggggaaagggggttttggcatggccttggctgaggcccggggg

SEQ ID NO: 17149 - DNA, 466 bp, Oryza sativa
  Clone ID: uC-osflcyp009e06b2
atccgccgtcggcgtcgacggcctcccccagcgcccggctcgccgccctcacctgccccgcgatcgcgtcccgcaggcaccggaactgccgcgagatggtccgcagcgccagcgccgtgtacgtcctcgccgacccgccccccgccaccgcctcgaacgacgccaccaccacctgcatctgctggtggtactgcctgtaccgctgctccacctcatcaagcatgttaatcagctttcctttcttcatctgcagctcctgccgctccgccgtcgacatctcccgcggggggcggcgcgccgccgctcttggcgccgccgccatcctccgtgccgccgccggacacgccctccgagtcctccttcttcttcaccgaggccgggctcttcgccgccgcggcggccttgacgtcgtccacgcccttgctgacgctcaccacctcgtcgagcagctcctgcgccgccttga

SEQ ID NO: 17150 - DNA, 201 bp, Oryza sativa
  Clone ID: uC-osflcyp009e09b2
cgttttaacgtgttttcgtgccaccgtgcgcgggggagatggcgaattttataaaatggaaatgtgaaagatgaaagattaaagggagaatattttgaaaaataaaattaaaaaaaatgattatcatatagtttgggtttaaataacaagaagtataataatgataaaactcatttaatagtaatcaaggatttaaaagga

SEQ ID NO: 17151 - DNA, 391 bp, Oryza sativa
  Clone ID: uC-osflcyp009e10b2
gaatgttctaatgatggtttcaacagtcattccaattttaaatcgacactgaatccaggtgcacataaacggttaactcaaaagaagtattagcgaaacagcacataattgcaacccaggcatcaccaaagcccatacattgcattgcggatccacagaacactcaacgaatacagtatcatcgcagaggcaggctcaagttccaattttgagcgcaggaccgcacaagaataccaccgcgatattcaaaccattccaatgtcattacaagacgacgtgggaacgcttcaacgcgcctagactcagagaagagtctatgttactgctggatgtccacggaaatgacataaccctgtcacagcactctgagctctcataacattgaagtcca

SEQ ID NO: 17152 - DNA, 453 bp, Oryza sativa
  Clone ID: uC-osflcyp009e11b2
cttattctatatgaatactatagattctattaatacgtagattgaaataatacatagattgaaagattatacatataagtaggataagacagattgaataaagaaaaaagaatgggtgattcgaatactaaacaaaaagagatagggatctattcttcgttttttccaaataagccaagctgcccattgcatattggcacttatcgagtatagaatagatctgcttctctttcttcttacgaacagaattggcttcttatttttaatggaatgaaataaatattcacgctttctgacacagaatcccctagaagggttaggtacataggatatggatagtctttgccaatgcgataaaataaagtgacatcgtgtctatttttctttgctaaaggggtatttccatgggtttgccttggtatcgtgttcatactgccgattgatgatccggga

SEQ ID NO: 17153 - DNA, 120 bp, Oryza sativa
  Clone ID: uC-osflcyp009e12b2
tggggtttttttaattttatgggttttatttattcttttattttaatattatatatatttttttattttacatatatttattaaaagatacatttaataaattaaaaatagaatttgttt

SEQ ID NO: 17154 - DNA, 492 bp, Oryza sativa
  Clone ID: uC-osflcyp009f01b2
agtgactctatagagggcgcgctcttttttttttttgttgttatgaaagcaggggtttattattttaataagcctggcacgcatgattgagattggtgcaggagaacatgatgagatcaccatgatgatagatgatccatccaagctagctagggatccatccaacattgatcgacacacgcacacactgacaacgacgacgacggttttatttaggcgtcagagcaaaaggcaaggcctgcctacatataagctgggtactaatgcaagcaaattaaggcctcgatcaaagctctgatcgacgggagcaggatccatacgataaatcctcatgcagccgggcgaagacgacgatagattcagttgaaagagcagcaggagcagccgctggagctggtgccacacttgcaagtgttgcagccgaagccgccggtgtggacggtctccaccggcatctccatttctccagagctcgccttgttggatggagca

SEQ ID NO: 17155 - DNA, 343 bp, Oryza sativa
  Clone ID: uC-osflcyp009f02b2
ttttgtacataatagggacaggtgattaatttaactgttgactgaagaatacatagaggtttaagattcattaaaaaggggctgcaggacctacacaaaattatactccttactacttatgatagagcttaacgatgcatcgaatgaataattcactttacatacagagaccaaattattggccataggatgaatttgccgctgctgcgatctggcaaactgcatgctgaaccatggctgatgagcaaagcttaccttacttcgtgcggtgggcttcaaacactggacgggatgagcatccatcaatcggacaggttatcagctggcaacgctcatgctgagc

SEQ ID NO: 17156 - DNA, 440 bp, Oryza sativa
  Clone ID: uC-osflcyp009f04b2
acgaaatgtagtatataccacactgaactggcaaggtacacatattttcagtgctctactgtactttctactagtagcaatttagcatcaatgtacagtcatttcttcttcttggccttctcgatttcttcctcccacagcacgggccagttggctcgggcctcttccagcccgagcagcgacccttccttctccgggtcccagctcgccgacagcgtcccgaaggcgatccccagcgccgacgtgccgaaggcgacgaggatggtcagcagcggcagccacgacggcacggcgacgccccggccgcgctccagcgcgccgtacaggttgagcagcccgacgccggacgccatcgggacgccgaccatgaacatgatccggcggaggatgcggtcgaacaccggctgcggcagctcgtcgtcgtcctcgtccaccttgcc

SEQ ID NO: 17157 - DNA, 406 bp, Oryza sativa
  Clone ID: uC-osflcyp009f06b2
ttttgtgtttttatttttttttgttttttttttttttttttttttttttttttttttttttttttattaaattatttataaaaaaaataaaaaaaaaaaaaaaaaaaaaaaaaaaaaaaaaaaaaaaaaaaaaaaaaaaaaaaaaaaaaaaaaaaaaaaaaaaaaaaaaaaaaaaaaaaaaaaaaaaaaaaaaaaaaaaaaaaaaaaaagaaaaaaaaaaaagaagaaaaaaaaaaaaaaaaaaaaaaagaacaaaaaaaaaaaaaaaaaaaagagagaataaaaaaatgaggaaaagaaaacaaagaaaaaaaaaaaaaaaacgagaaaaaaaaaaaaagaagaaagaaaaagcgaaaaagaaaaatattaaaaaacttaacaaaaaaaaaaaaccaaacaaaaa

SEQ ID NO: 17158 - DNA, 458 bp, Oryza sativa
  Clone ID: uC-osflcyp009f09b2
ttttgtttttttttggttaacagtggccattatttgtcaggacaaggggaatacaatatcaatgtcccacacgagttaactattttacagcgccaaggatcaaaagttgcaaaatgaggggtagggcaaccccaagtacatccaactattgcaaagaacatattcatgatatcacaaaaaaaaagtttttgagattatacctgttttatgccaaaatttttgcagtccagggagagcgactgaaaaaaccaaccgtgcaacaaattcaaggtccgctgcttcaaaagaatgtcacgccctgatgtagccaggcagcaaaccccggcaaagcctcatgggaactggagatgaaagggtatcctttcaccatctacaagatgacaacgaaaggtacaagctggaactcagaaaatcaccagagaccgaagagaactcagcttccaatcaataatatattc

SEQ ID NO: 17159 - DNA, 434 bp, Oryza sativa
  Clone ID: uC-osflcyp009f12b2
ttttgttttagaacacaacttcaggatgagattatccatggagcccacgagctcagaagcgaacaccggactgcatcacaccatgcatgcccaggggggaacaacgagagctcaacgtcgaacacctgacgctcacaagaacgacgcggcgagcagagcggcggcggaggccacagtggccgcaacgctcgtggccgccgcggtggcgccgttcttcttctcggctttgtctgcagcctcttctcccgcgggcgcgtcggcgggcgacatgtcaggcgtgtcggccggaggcgcgggtggggaatgggaaggcgacttgcccttttttttcttcttgcccgccgccttgggggagggcgccggcgaggagccttctggcgcgggagaagcggctggcacattgcttgcccgtcccggcgccggcgcgggggaag

SEQ ID NO: 17160 - DNA, 407 bp, Oryza sativa
  Clone ID: uC-osflcyp009g01b2
tttttgtttttttaaaaaagatgggtttttgtttttcttttttggcaccgaatgaaaccctttatcctagacctgcccattcgcataggtcggtgcctgatgaacagattgacttgggttgcgcacatgctacctaagatacattggcccaattgagtagaaacaaatgccttctgttgcgcacatcctacctaaaagaccatggcccaatccttttttaccaaatgaacgctcgttcgttcttcagagggcccctggggatgcagcactggggatcacaaaaccctgggggtgtaatattgctggcaacaagagcccataggggtggatggataacaggtgccctttggcatacacctccaccttgcaccccccaacctggggaccgttacagaaccagaatccct

SEQ ID NO: 17161 - DNA, 329 bp, Oryza sativa
  Clone ID: uC-osflcyp009g02b2
ttttggtttttaaattttttgggtttttttttttttttttttttttttttttttttttttttggggaattaaatcaaacgaagaaaaagggaaaggttttaaccttgccaaccccacatgggacaaaaacccccccaaaaggagaaaccccggccccaaaaaaaaaggaaaccaggcccaaattttccgggggcccccatttacacgggtaaaaaaaggggggccccatggaccccggaattgggaccaagggggaaaaatcgggtgggggacaaaaagagggagccctagggaactttttttggttgcaaaagcacaccctaatgggc

SEQ ID NO: 17162 - DNA, 439 bp, Oryza sativa
  Clone ID: uC-osflcyp009g03b2
tttttgtttttttatttttttgggtttttttttttttgggaagaaagcagaggtagattattttaagaagcctggcacgcatgaggagatggagcaggagtacatgatgagatcaccataatgatagatgatccatccaagctagctagggatccatccaacattgatcgacacacgcacacactgacaacgacgacgacggttttatttaggcgtcagagcaaaaggcaaggcctgcctacatataagctgggtactaatgcaagcaaattaaggcctcgatcaaagctttgatcgacagtagcagcatccatacgataaatccttatgcagccgggcgacgaccacgatagattcagttgcaggagcagcaggagcagccgctgcagctggtgccacacttgcggtgttgcaaccgcagccgccgtttttgccgttt

SEQ ID NO: 17163 - DNA, 442 bp, Oryza sativa
  Clone ID: uC-osflcyp009g04b2
ttttgggtttttttttttttttgttttttttttttttttttagcaaaacgatccatgcgaccatgcgtgcaaataagttggagcacaaatttacatgttacacccacaccctacacccatgcataaaaatacatcggatatacgtacgtacatacataccccttttgatcacacccaccattgatcggacaaaggtgggtacatacatacgtacacacatatacgcatacgcacggacatacatacataattaaaaactcgtaattaattaaatacgtagttgatgggatttttaatggaacttgaggctggggaggatgttgttggggacgggatcaccgaggggaacaagcaggttttgcacggggccaaccccggggaaaagcgcctggacggaaaaacccgggaaggggagcatggggagcctgccattcttgatctc

SEQ ID NO: 17164 - DNA, 448 bp, Oryza sativa
  Clone ID: uC-osflcyp009g05b2
ttttgttttaaatcaaactgttggttatcatagtaaatcttcccggagaatcagatgctcagaattcatagtgttcttcagcatcttacaacttacaagatggcgcagatatacaagcgcaactatcttaaagtaagctgtaggaggaaatggaaccatttctaacaacgggaaaaataggttatagaaggaaaccatttgaacaaattaatagggaaataaattaggaggatcgtttccgtccgatctcaatagaactggacgtttgatacgtagatggcgtctggcatccagttgaccgggatgacgtctttggcgatgaggctcttgccggactcggtggtgacgcgaatggagaagggtgccttgagtggcgtggcggtgtccatcctccagatggcgccccacgacagcttcatgggcctccacgctggcaatccggcctcct

SEQ ID NO: 17165 - DNA, 334 bp, Oryza sativa
  Clone ID: uC-osflcyp009g06b2
ttttgttttttttaaattttttgttttttattttttttttttttttataaaaaaatttttaaatttaaaaaaggaaaaaaaaaatctacaaattacaaaatataaaaaagaaaaaaaaccaaaaaataaaaaaactaaaaaaaaaaaaattgactaaaatacttcaaataaagataaagggggaaacaaggaaaaaaaaaaaaaaaggaaagaaaaagaaaaacaaaaaagattttatgaaaaggaacagaccaaaaaaaaacaggcgaacaccataaggaaaataaggtgcaaaaaacgagagggacctgctagacaaagaagggtaataaaa

SEQ ID NO: 17166 - DNA, 452 bp, Oryza sativa
  Clone ID: uC-osflcyp009g09b2
tttgtggttttttaatttttggggtttttttttttttttttttttttttaaggacaaggaatggaattaattccatacctacttgatgctgccggaaaaagggcaagggtaaaatataatgcacaggtatttcatgtagcggccagccaaggcgatccaaaaccagagtcacataggaaagaaaagaagggaaatccagaccaacaaacaggcagcatgggaaaactgaaaaactacccaccaaattgtcaaggcagacatcatccttgggggggtattcctttgggacttggttggtaaaggctaacttgcatttgggagggattatccccaccaagcatattacgggcccctggaaccccgggctttaagggaaaccatttccaggggacccctaataactccacttagcacattggagtcctgaagaccttggcaaggatcaggaagtt

SEQ ID NO: 17167 - DNA, 455 bp, Oryza sativa
  Clone ID: uC-osflcyp009g10b2
ttttgttttttacacaaattaccaacttaacgtaacaacacacggtaacacatgtactcttaccatccaagaaaaaatcaacttctaactacgtctataaattcatagagaagttaattttttttagacaggaggagtacttaattaacacacagtaaggaggcacgttatattaagccgccggagtacacacatcgcggcggcgtgagcaacggtataacttaacgacggcatggtggctcgccggagttgattaacacctatggcacgggtggaacgacggacggcatcggcggctgtgggtcttcctgcacggtggtcgacgacgccggcggcacgccggggaatccggcgccggcgccgggatcaatcggcggcacaaatggcggcactggcagggttgtcatgccggcgatcatcggcacgccggggatgatcggcacgatcaccggcac

SEQ ID NO: 17168 - DNA, 433 bp, Oryza sativa
  Clone ID: uC-osflcyp009g11b2
ttggtttttttttttttttttgtttttttttacaaggggatgcattaattcatcatcttgggtgttcttatattacaaatcaccaccatgcaagtcgccattaaccaccaacccagctttcctaatttaagtagtaatcaacaaaaggatgacctctcctctctccataccctcccagctcgctcgtcatcacaaaactaaacagcgcgcgcgaacgcacaccaacgcatcgatcccgtttgaattgcgcgcgaaagagcttaaattaagaggatgaggagaaggggtcgaaaatggtggtgtggagcgggtcgctgaggtgggtggcccagttgttgaggggccccttgccgggggcggcggcctgcacggcgaagcccaggaaggcgaccatggcgaggcgggcgtgcttgatctccgccagctgcagccg

SEQ ID NO: 17169 - DNA, 52 bp, Oryza sativa
  Clone ID: uC-osflcyp009g12b2
ttgggttttttacatatatgggctattataactttgcccagctcgtaatatt

SEQ ID NO: 17170 - DNA, 273 bp, Oryza sativa
  Clone ID: uC-osflcyp009h01b2
ttttggttattagcattatatgctggctgtgttaaaagactctgtgtacaaacttgaatacattatgtggtcatacagagggttgtaacttataaactttcatgaaaaggggctgagccatgtcttacaactcttaatcgccaacatacacaggacacaggagtgccataattagagcttcctattactgatgagacatacatttactatagaggcgtatcaagcagtctcaaacttcaccatgccagaagaacgttcaaagaatcaccgggt

SEQ ID NO: 17171 - DNA, 387 bp, Oryza sativa
  Clone ID: uC-osflcyp009h02b2
ttttgtttatttcacaacgccggatcaaagtgagcaggttcaaaacctcaacgtaaatacccactaccctaccacatttcaccatctcttcaaaactaacacatacatccacgcgactcacacaaataccaacatgaataccgaacacgtccggacacatactgagccaattactcacagcacacactatatgggtatcagacccgcaatggttggcaattcgtaaatagcgttaaatgaaagtccttgcttttgaaggcctacccggtggatgagcccttgacttgcttgatacgatcatgaggagggcactccacactggtcttgatgctcctaaaggcactctccctggcaccagttttgaggaggcacatggcctggctgacc

SEQ ID NO: 17172 - DNA, 416 bp, Oryza sativa
  Clone ID: uC-osflcyp009h04b2
tttttgtttttttaaatttttgggtttttattttttttttttttttttttttttttttttttttttttttttttttttttttgggatttgtaaaaggggatctttttaaaaatcaaaggaaatttgttaaaaattaacaaccccttttgttttagggctaaaagtgggtatttttttaaacaaaaaacgaaaaaaataatccctaaatccaatatatcaaaaaattgggattttttggacataaaaccgggtcacttttttttttttaaaatgaaaaaaaagggccacaaattacaggttttccttgctaaaaaaaatccctgagaattgaactcaattaaatcctctgaaacggaaaccaatgggcataaacccctatccaagggggggagtggataaaaaattggccagattgg

SEQ ID NO: 17173 - DNA, 455 bp, Oryza sativa
  Clone ID: uC-osflcyp009h05b2
ttttgggtggattgcaaaagacggtatattcatatgaactttatacactttacattgcttgagaaaatgttgattaaaatctactgctactttttcatgcttatctctcaagtctttcattcattcttcttttcctcccttcttttcagcttctggtgatgagatatcctgctcgtagatgacctgagcaaccaaaccaatgaatattagacccagagctgcaaccttcctccactccacctcaggtgttgcgaagacggcatttgcaattgtaagcccgagtattgccatgagcccaaggtaaatgttcatcctagtttttgatcctgcactttcttttgcaatatctttgaccttttgtgcttctagcttgggtattggttttactgtgagtttcttcttgtggcgaggcttcaccttcccaaggcttttgaagaacataccttcatttttct

SEQ ID NO: 17174 - DNA, 452 bp, Oryza sativa
  Clone ID: uC-osflcyp009h06b2
gttgctagtcaatcaagacatctataaattattatcttctgagatgaaaggtttaacatcggctgacagcggactcaaatagttaatgtacaatactcagacattgttagcattagaacagaagaaatggttagccaatcagtcggacgccgtctccgtgcagctcggaaaggaatgccgcattgccgcagcttgcaaccatgtcatttccttggcggaagacatgatgatgataagtcatatcatcgtcctaaacaatattccttctattctttgcttgtcacagaagcctcagtccgcaattgcaggacgaaagagtacaactactgtacaacttgcacgggctgcaaaatcataggagcccctcgagcacaagcgcaatgaacctttaagaaaccacctcggtatcccttgctgacaacctgtaactttgtttgaaacaagtccagcaa

SEQ ID NO: 17175 - DNA, 119 bp, Oryza sativa
  unsure (1)..(119): unsure at all n locations
  Clone ID: uC-osflcyp009h07b2
gccccccctcttttttttttttgtttatttacaanattgtgttctcatctatcaattccctaacttcaaactcggctacatcatccggtacacaacacacttctaacttctaaactatc

SEQ ID NO: 17176 - DNA, 175 bp, Oryza sativa
  unsure (1)..(175): unsure at all n locations
  Clone ID: uC-osflcyp009h08b2
aatttgatcctctatatcgccccccccctttttttttgtgttttttttaaacatagggcgtacaaacctacacaggttcaatacaacaacgtctactacctaacacactaccacattttatcagcacttatcaacaaannacaaacttcccacgtaacctctcgcaatatcccaa

SEQ ID NO: 17177 - DNA, 472 bp, Oryza sativa
  Clone ID: uC-osflcyp009h09b2
ttttgtttttttaatttttttggtttttttttttttttttttttttttcattttttttttttttttttttttttttttttttttttttttttgaaaaaaggaattaaaaaagttaattaaaaaattcccccgggaaaaatatattggaaattctttcggaaaaaaaccaaaggttgggggcactacaaaaaatacaggaaaaaaaacaatgggttggggacttattaaaaaaaattttggttttccaaaaacccctaaaaaaatgaaaactgggctggccccatcatttaattaaaaacatgcttaactccaaaacagatgaaaattttaacagtcgggatccaacccctaaagctttttaaaaaagttttgtgaaccccaataaagccctcttataaacccctacccttattgggaaaaaaagtttttaaaaaaacaaaatttcctttaaaaagggagccccccccccccc

SEQ ID NO: 17178 - DNA, 456 bp, Oryza sativa
  Clone ID: uC-osflcyp009h10b2
tttgggtttttcaaacatttacgtttttcttgcattatcaattgttactatcatgtattgcattttccagcaaggctggctggttcattgacaaatgaaagtgtgaagcccataatattacagagtattgctgcatgtttagaactaccataacattaccgaggactcaccatcccagaaagcacgccgctactacttgcatcaacactagtaaaagtttgagatgaggccaagtaattcccatttgttgaatttgatgtagatttactcatagggtccttgctcatagcacgtcctgagtatgcctgtggagtttccagctggataagatcaccctctggcattatcttcaagatgagctcaagttctctaacaatctctgtcatggatggccccaccgtaatcttatcccgagagcacttaattgcaagttggaagaaactttccccacactct

SEQ ID NO: 17179 - DNA, 511 bp, Oryza sativa
  Clone ID: uC-osflcyp010a05b1
tttccaatctctgactcctccggcctccggcggccggcgagagagatcccaccctcaccgacgacggcgagcgaccaccatgtcctcctccaccttcagcggcgatgagaccgcccctttcttcggcttcctcggcgccgcctccgccctcgtattctcctgcatgggcgccgcctacggcaccgccaagagcggcgtgggcgtggcgtccatgggggtgatgcgcccggaactggtgatgaagtccatcgtccccgtcgtcatggccggagtgctcggtatctacggcctcatcatcgccgtcatcatctgcaccggcatcaaccccaaggccaagccctacttcctcttcgacggttacgcccacctctcctccggtctcgcctgcggcctcgccggtctcgccgccggcatggccatcggcatcgtcggcgacgccggagtcagggccaatgcgcagcagccaaagttggtcgtgggcatgatcctcatccctatctttgcagaagct

SEQ ID NO: 17180 - DNA, 513 bp, Oryza sativa
  Clone ID: uC-osflcyp010c03b1
gcggcagcttgcttggcgctcgcctccctcggccgcacttctttcttcctgattcctgacgtcttggatggtgcgctttattatgacacacgacctgcactagtgtttacagctccaagtatgggttccagagaacccttcctgagtgccatcttcttcttcttcttcttgcttttgttctgcctcggctgcaagtgtatagcttcagagttacacttacacacgacccagactgcggtcctcaaggttgatgcctcactgcaacatgctcgacagatccccgacacgctatttggaatattttttgaggaaatcaaccatgcaggagctggtggaatatgggctgaacttgttagtaacagaggttttgaagctggaggccctcataccccatcaaacattgatccatggtccataattggagatgactcttccatatttgtggcgactgatcgaacgtcatgtttcagtcggaatactgttgctctaaggatggaggttctctgtgacaat

SEQ ID NO: 17181 - DNA, 512 bp, Oryza sativa
  Clone ID: uC-osflcyp010c07b1
tggaagtccggagttggaagcgatcgatggcggctactacgacgggacgagttgttgcactcggcgcggtggccgtggtggtggcgctgacattcctcgccggcggcgcggacgccgactgctacgacttctgcttcaaggactgcatggccagggagaacaacatggtcgactactgcagctacgcctgcgacaagacgtgccagccggacaagcccacgctgtactcgtcgtcgtcgtcgtcccgcctcgccggcgacatggagtgccaactctcctgcgccttgggctcctgccaccgcctccttccggacggcaagggcgccgtggaggcctgcttcgggcagtgctacgacggctgcaagaccacggcggcggccagactgccgaggcctctccgcgccggccactacgtgctctctagtccccctgatgacgtagaccatgatccggaccaccgctacgtgttctctagcccccatgatgacgtagaccatgatccggaccaagtg

SEQ ID NO: 17182 - DNA, 503 bp, Oryza sativa
  Clone ID: uC-osflcyp010c09b1
aaaaaagaagaacgcagatactttggtaacaagcaagaaattggcacagaaatggctctgaggctgtgggctagctcagctgccaatgccctcaagatctcatgcagtggagccaccagggctgcacctgcctactcaatctccagatacttctccactgttcttgatgggttgaagtacagctcctctcatgagtgggtcaagaatgatggctctgtggccacaattggaattacagaccatgctcagggccatctgggagaggtggtgttcgtggagctgccggaggcgggggcgaaggtgagccagggaggtgcattcggcaacgtggagagtgtgaaggccaccagcgacatcaactcccccatctccggtgaggtcgtcgaggttaacgacaagctctctgagacacccggcctgattaactcatgcccgtacgaggacgggtggatgatcaaggtgaagccgagcagcccgtcggagctggacgccctgctggaccc

SEQ ID NO: 17183 - DNA, 340 bp, Oryza sativa
  Clone ID: uC-osflcyp010d05b1
ttattcgctggtcgtgtcactcctaccgttaagcttcccgcggcggcgagagcaagctaagctaggtcggacatggtgatggacaaggtgatggacagcggcagcgtccacttccagtccatcctcaagaacaacgccgaccccaaggacgtccatgggggaggccatgagggcgttctccttctccctcgccgaggccaagtacgatgcccgcgacagcgtccgccacgttgtcctgcacaccatccggtccgactgcctccgcgtccgctcccaccaggagaacgtcggccttgtcaagctacccaagttgacccactttgtcgaccccgccgacggc

SEQ ID NO: 17184 - DNA, 402 bp, Oryza sativa
  Clone ID: uC-osflcyp010d10b1
tcttgttctagacagacctaagccaacgggagggggaggttgacacgtacagcacgttctatattagagcatttacatacacatgacgtgggcaatcatgttagctaaaggagacgcgccaaaagagacgaacactactactaggggagtattgcgcattggattccatccctctgacgcactgctgcctgcctgccattgatagagtgcatcgttgatgtacgatcaagagctctaatttgcaattcaaagcaatcccgcatacccatatgccataggataggagtatggtatacatttaccgcgatgaggtgctgctgctgtcggagccacgcccacgcagggggcctcgcctcctgggctctccaatctgctgtagcgcgccgtcgtacgacttgggca

SEQ ID NO: 17185 - DNA, 253 bp, Oryza sativa
  Clone ID: uC-osflcyp010e01b1
tttttgagcgccttcgtcatcctggcgcgagcgctctagcgaggagagcgcgagatctcgccagggccatctgcgatggcactgtgcatccggtggcgcacggcgctcctggcgcgcacactctagctggcgctgggggcgccctcacacaccgcgcacacggctcgtaccgccttgcggcgcccgccgcgccggactgctgatgggtactaagggccgcgctcgccgagatccacacgcgcctgggcaagat

SEQ ID NO: 17186 - DNA, 503 bp, Oryza sativa
  Clone ID: uC-osflcyp010e08b1
tttttcccgaagaactgataatacggattttctcgcaaaattattcccagccgcaccctcgaggccgatggccgaggcggtcgcaagcggcgcagcggggagatggaccctccgcggcaagacggccctcgtcaccggcggcacccgcggcatcgggcatgcggtggtggacgagctggcggcgctgggggcggccgtgcacacctgctccaggaaggaggccgagctgggcgagcgcctcagggagtgggagggcaagggcttccgcgtcaccggctcagtctgcgacgtctccgtgcgggagcagcgggaacgcatgctccgcgaggtcgccggcctctacggtggcaagctcgacatcctcgtgaacaacgtgggaacaaacttttcaaaacaaaccactgaatactctgcagatgattactcgttcataatggccaccaatcttgaatctgcgtatcatctgtgccaactggctcatcctcttctcaaatcatctgggt

SEQ ID NO: 17187 - DNA, 496 bp, Oryza sativa
  Clone ID: uC-osflcyp010e11b1
gtgccgcctcttgcttcctcctcctcatcgtccgccatggcttctctcaccgatctcgtcaacctcaacctctccgacaccacggagaagatcatcgccgagtacatatggatcggtggatctggcatggatctcaggagcaaggctaggactctctccggccctgtgactgatcccagcaagctgcccaagtggaactacgatggctccagcaccggccaggcccccggcgaggacagtgaggtcatcctgtacccacaggctatcttcaaggacccattcaggaagggaaacaacatccttgtcatgtgcgattgctacacgccagccggagaaccgatccccaccaacaagaggcacaatgctgccaagatcttcagctcccctgaggttgcttctgaggagccctggtacggtattgagcaagagtacaccctcctccagaaggacatcaactggccccttggctggcctgttggtggcttccctggtcctc

SEQ ID NO: 17188 - DNA, 500 bp, Oryza sativa
  Clone ID: uC-osflcyp010g06b1
ttacacaccactccatttctgagctcttctagtttgagtgagagagcagcagaagggagtagtgcaagatgccgatccgcaatatcgccgtggggagccaccaggaggtgtaccacccgggtgcactcaaggcggcgttggccgagttcatctccaccctcatcttcgtcttcgccggccagggctccggcatggccttcagcaagctgaccggcggcggagcgacgacccccgccgggctgatcgcggcggcggtggcccacgccttcgccctgttcgtggcggtgtccgtcggcgccaacatctccggcggccacgtgaacccggccgtgaccttcggcgccttcgtcggcggcaacatcaccctgttccgcggcctcctctactggatcgcccagctcctgggctccaccgtggcgtgcttcctcctccgcttcccaccggcgggctcgccaccggcaccttcggcctgaccggcgtctccgtgtgggaggccctgg

SEQ ID NO: 17189 - DNA, 463 bp, Oryza sativa
  Clone ID: uC-osflcyp010g08b1
ttcgccagtttggtcgctctcgatttcgatttcccccaaatccaccgcaagagaaagccaagtcgccgccgagaagcgaagaggagatggcccgtacgaagcagaccgcccgcatgtccaccggcggcaaggccccgaggaagcagctcgccaccaaggcggcgaggaagtctgctccgaccaccggcggcgtgaagaagccccaccgctacaggccggggacggtggcgctccgcgagatccgcaagtaccagaagagtacggagctcctgatccgcaagctccccttccagcgcctcgtccgcgagatcgcgcaggacttcaagaccgacctccgcttccagagccatgcggtgctcgccctcaggaggccgccgaggcctacctcgtcgggctcttcgaggacaccaacctctgcgccatccacgccatgcgcgtcaccatcatgcccaaggacatccag

SEQ ID NO: 17190 - DNA, 354 bp, Oryza sativa
  Clone ID: uC-osflcyp010h01b1
ttttcgcgtgggttgtctccccgtgccgcggtcggagtgctagaacacggtggagcgagcgggtccgcgagggcgatagcgggaggcgacatgttcggcggagccggcgccttctgggctacgcgggcgctggaggtggtgaagcggaaccacttccctggactgctctgtatgcggatacaagctcaccaccacccgcaagaacaacgccaagaagcgcctcaagcgcctctggcagaatgaggcagttataagggctcgtggtgaagcagattcgtcagtgcagtcaacatcaaacaccggatgggcctttgggaaacaagagtagatcccaaagtgaatctgatgacatgc

SEQ ID NO: 17191 - DNA, 406 bp, Oryza sativa
  Clone ID: uC-osflcyp010h03b1
caagcagcatcaaattcttcagatgatgaaaccacatataactggaagttatgcaataacaatgctggaacagattacataccttgcctcgacaatgagaaggctatcaagaagcttcgaaccaccaaacattatgagcaccgtgagaggcattgccctgtggagcctcctacctgtgttgttccacttcctgaaggatataaacgcccagttgagtggcccacgagcagggacaaggtgtggtacagcaatgtcccccacactaagcttgctgagtacaaggggcaccaaaactgggttaaagtttctggggatcatctcctatttccgggggtggcactcagttcaagaatggtgcacttcactacattgatactattcagcaggcattacctgatattgcatg

SEQ ID NO: 17192 - DNA, 288 bp, Oryza sativa
  Clone ID: uC-osflcyp011a02b2
gacgcaagcaattcctcagtgcgattattaaaaccttctgtggtacagccatacagaacagtaaaatcaagaacggaaatacagaacggcctctctaagaccttctggatctgagcttttaaccaaacagaaagcatatgaccaaagcacggtagttcaaggataaaattttcaaagacgtcatttggatggaaacgggtttcttattgcgaccacacttcctcacgaacggcatctattccggatcgaatcgggggatcaggaggaggaggggggtgggtttggagt

SEQ ID NO: 17193 - DNA, 415 bp, Oryza sativa
  Clone ID: uC-osflcyp011a03b2
aaaattcaatcggagcttaggattgttcaatagatatggcattttgatgatatccaatgacatgagccagtgcactgctgctattcctgaaaatttagcatgtgcacaagaggacatatattcgaaatgtataagattctaagtaagaagctttggtgtcacaggatcacagttagctaaccatcgggtacaatcggcagtaccagatatcaagacaaaattattggcactatatatgtggaattagtagtatgcagtattcactaggatgatccaggtgaatacctgagggatcagctggctaactctttgggctatgtaggtagctactagctgcatgattatcatcaggggtttatttctttggtgattgatttgagtttttgtatgccatctttctaatcgagatcagaag

SEQ ID NO: 17194 - DNA, 429 bp, Oryza sativa
  Clone ID: uC-osflcyp011a04b2
gaccaaatatactttttcccatatatcttatataaataacatatattcaaaaccatgctttgcatatagctccacagcaatattttggagtacacatgtatgccttattttgccactagcccattacaaaaaaataaccacagaaaattaattaatagaaaattaattaatggttcgctcgaacatggagcgatctcttttaagacataattatttagaggttcataattccaatatgacccaacacaagagtatgcatgcctgttacttagagttggatgccactcttattttcagagccggcagtaaagctttcagggatgacatcatcgacgacacggtagccaccgttcttgacaaggaagcgaacggagaaggggcccttgagtggtgcatcacttttgagtggccaggtgttagagcccgact

SEQ ID NO: 17195 - DNA, 431 bp, Oryza sativa
  Clone ID: uC-osflcyp011a05b2
caaaagatgcagagtatatttattcagataagcagcagaacatccccatttccattaccaaacatcaaaccatccatcatcatcacatcgcatacggcatacagaccaccatgtcctcacattctcacgtagcaaacgataaagatgaacactctactcatactactagtcacaactcactcaactcaagcttcgattctttgatccacgcagcgacgcaaatgcagagagatgcggaatctcatcacgcgaccttgacctcgatggtcttgggcttcttgggctccggcggcgggagcttctcgacggtgacggtgagcacgccgtcctggcacacgggggagatcttgtcgacgtcggcgttgtcggggagcacgaacttgcgcatgaacttgcccatccgccgctccatccggaggtacttgcacgac

SEQ ID NO: 17196 - DNA, 350 bp, Oryza sativa
  Clone ID: uC-osflcyp011a06b2
gggggaaaataacagagaagctgtgaacaatttcacaggaaatgagtaacagttagaaatggctacaaaatcaaaatgttacagctggagtttatttcaacggcactaagatggcccagagcagggatctacaacacatcatgctgtattagacaggcattttgaagcaggatgaaaatgcctgctcatcatgtgcagacaggtaatgctactaagttcatctaggaaacattggacacgtttaagcgtaactttaacgccttcagctcaagaagatataagtgggattggtcttacagaaccctgtatacgacggaatgcagtcttgatcctttctcttagtgtaacat

SEQ ID NO: 17197 - DNA, 156 bp, Oryza sativa
  Clone ID: uC-osflcyp011a07b2
tttgggggatttatcaaggttggtatagtcatataaaagggcaaaaaaacccttgacacataatttctgagcctaacaatgaaaatgttgaaaggaaacaacaaaaacacattactgttacgagaagaacccaatatacggtttgtgctaggaata

SEQ ID NO: 17198 - DNA, 80 bp, Oryza sativa
  Clone ID: uC-osflcyp011a08b2
ttttgttgtttttttattatttttttttatttttttttattataattatattttttttattatttttttttttataattt

SEQ ID NO: 17199 - DNA, 415 bp, Oryza sativa
  Clone ID: uC-osflcyp011a10b2
ttttgttgtttttttcttttttttttttttttttttttattttcttttggggggcaaaaaaacactcctttcagcttcgatgtttcaatggtaagggctttagagaacacttccagctttatccctgacaaaacaagaattttggttctacttattaaaccggtaagcgtttaccactgtccgataacaactttggtacatggggacttcgtttaattaatcaacagcgttctacaaatttggggctatctaaataatgttctaaaaatttcgtacaccaaagttaccctggtcaatttatacaagagcatgggtgggaacttggggttcccttggggcctttggccaaaattcttatgttaaaaaactgggcaataaactttgatgctttcgggtttgctgaaaaatgggcctt

SEQ ID NO: 17200 - DNA, 145 bp, Oryza sativa
  Clone ID: uC-osflcyp011a11b2
ttttgggggtatattgacatagtgtataacattacataacacaaacaacataattaacccttacaaaacaccacatggacacagacaaaagaccatcacttattcagacacaaaatcatcatttagaagagtattctgaaagaag

SEQ ID NO: 17201 - DNA, 401 bp, Oryza sativa
  Clone ID: uC-osflcyp011b01b2
ggggacaaatcatatgatgctttatcagattctattttccgaagttgcccctacaacttttcattgaaaagaatcctactcttatgggtaaatgctcaatatccaagggggcttacaaatttgatcatgaccaattgctttggggattggctcgcgttttttgattaggggggatttatcccccccaatattgcaaggtttttacgtccaaacaaaggatttacttggtcctaataaaaaatcaaaaagtttagcctacgttcttccttagaaccctttttttactccgatagtgttgcagatcgcaatcgatgcaaagaaaaagaatgcctttccatactataataaaaagttagggtaataaatagagaattggatcatggcacatgacttattccatt

SEQ ID NO: 17202 - DNA, 368 bp, Oryza sativa
  Clone ID: uC-osflcyp011b02b2
ggaaaaaactgattgatatattccaaataggagaggggggcatcgatacttatcggcgctaaattaaaggggagtccaggctaaacacatgaaacatccctcgatttaaaacagattccaaacccatgggtgttcacttcacacacaccaaaagcaggagggggagcagttgttgaaacaaaaccaccaggggggaacttaattttttttgaaaagggaaaattttaacacgggagaacccatcatcgatcatcagggccattgtttaataaacgccttccagccattatcccccaacaagggcttttcgaaccccttgatatcacccgttgctcctgaaggagccgagggccctgatggcccccgcc

SEQ ID NO: 17203 - DNA, 441 bp, Oryza sativa
  Clone ID: uC-osflcyp011b03b2
atccttgcattgcatatttggtgggcactatttatgtgcctggagcgtaactacatcacccaagaacaatgcagatatccaaatatcaagaccaaacaaggagcctgaagagagccatggcttggcataccataaaatggccaaattaggaacatgtattccctccgtcccagaataaattaatctaatacaagatgtgatatatactagtactatgaatttggacaagtactgggatatgtcacatctcgtattagattaacttattatgcggcgaaggtactatttacttgttattgtgcaagaatcccatggctggacaatgctcgtgttcggccggacaaaatacttcctcggtaatgtcgtcttgacatgaaacaaactttcatcaagccttttcgccaagttttagaaaatattggtcatgaaatggaaggccat

SEQ ID NO: 17204 - DNA, 466 bp, Oryza sativa
  Clone ID: uC-osflcyp011b04b2
cgcatgcacccctccttcagcttttttcctccagatcaggccgcccctccttttttttttttgggggatggtgaatggccaagtgtatttctaagattgcaaggttgtattacatgtttggcagcaagaacaaaatgctggtggacaaatgtaatgagagatacaatcagccactgcattaaaacctatgaagaggggaatctactatgtttatacagttctaatctcaaaaaacacagaaagacttaaagaacaaaaatgagactgggaaagccacccatgctctgttgaaagacttagccacctatatcattatatgtcaataatcaacttccgtgctgtttaccatttgctgcacgcttaacaagctgcccttgtttattatagacatccaaattcttccatggtataggaaaacacttacccgtgacacgcccctaatgaaggaacactggaaaatatgttt

SEQ ID NO: 17205 - DNA, 127 bp, Oryza sativa
  Clone ID: uC-osflcyp011b06b2
ggggctaaaatatgtattattgccttccccatactctaaagtattttttggttattacctttttataaagaaagtttaatcgcattttaaaagttaaacaaagctccatttgaaacggtttaaaaag

SEQ ID NO: 17206 - DNA, 394 bp, Oryza sativa
  Clone ID: uC-osflcyp011b07b2
ttttttttttttttttttttttttttttttttttttttttttttttttttttttttttttttttttttttttttttttttttttttattttttttttttttttttttttttttttttattttttttattttttttttttaaaaaattttttaatttttaaattttaaaaaaaaaaaaaaaaataaaaaaaaaaaaagagggagaaaaaaaaaaaaaaaaaaaaaggggggaaaaaaacaaaaaaaaaaaaaatgctttacgagggagaaaaaaaaaaatatttttttaaggggggggtgtaataaataaaaacccatagggagggttatatttttagaagagaaaaaaactttatctaatatttataaaaaaaataatggaaaatttcgccttt

SEQ ID NO: 17207 - DNA, 445 bp, Oryza sativa
  Clone ID: uC-osflcyp011b08b2
gcacaacaataaacacagattttagccatcagcaaagccgaagagatagttgtcaatacttaacagtaagcattcatgccgagagcataattatggtgccacatgcaaggcgaactccagtccaacaaaacaaaaacaccaccacctaataagtgctagcgcagggccgcatgcatacagaatttcaccttctatcataaattatacatggactacgacttcttgacacactcgattaaacaggggctagagtagcagcagggcacattataatcgcgcgatttcatactagctacttcatgtattttttttttcagtcaggctttcggctgttgacgatcgtcctgttgacctgaagaagacgatgatccaaccttcttgaaaactctaccaccgaagagatctttcccaaacctccccttgaaggagaactgcttcttaaaac

SEQ ID NO: 17208 - DNA, 365 bp, Oryza sativa
  Clone ID: uC-osflcyp011b09b2
ttttgggggttttttttttttttttgttttttttttttttttttttttttttttttttttttaacacatgaaccgaaacactttgggaacagaaagcacaagagtttagttgcagtttcagggttaacaagagaacataagcaagggttgcgtttccatctgaagggaatgcaattctacaggggttaaatagtagcaccaaaatacttaattgtctaggacttgactgtgagggccaacagctaattaaaaacttttgaggggacatttatggcaaacaggagactgatcaaaacaaacgggggaatacttttgagacaggaccatgctcatttcattttgcaaaaaaaacaggtaggttgcca

SEQ ID NO: 17209 - DNA, 427 bp, Oryza sativa
  Clone ID: uC-osflcyp011b10b2
ggcattagcagagacaatccatgggcttaatttaatcttcttttgtccggaactagggacagcgcattaggggtacattcagggaaagacaaaacacatcctgcagtatcaaacctgggggcatccaactgccaatttctttgagccagctaaagatagggcatggtactaattacaaaacgggcaaacaaatcaatagcccgacttaaaccaaagcagggggacaggttcctaattttaaaactgggaaaacaaaactgtagcctgacattaaccacctaaacattatgtagaggcacttaagggtttgaaagaacccacgggatctgtctcagggctaatggtaaacatcaattgattgccggccaactttggtccaggatcacccccctcccttgggaggagtatgagtttttccccccttggg

SEQ ID NO: 17210 - DNA, 102 bp, Oryza sativa
  Clone ID: uC-osflcyp011b11b2
tttttgggtttttttttttttttttggtttcatggcactcaatcaattttattatcttaaccttcttaagcactcctccaaaagcggcgcgatccacggaaa

SEQ ID NO: 17211 - DNA, 249 bp, Oryza sativa
  Clone ID: uC-osflcyp011b12b2
gggggaaggaaaaaaagggaaaccccaaaaaaaaaaaggggtttttttttgaaaaaaaaaaaaaaagggaaaaaaaaaaaaattttttaaaaacaaaaaaactaaaagggctttaaaaaaaaattatttaagcttaaaaaagggaaaaaacccccaaaaaattttggaatgttaaaggaaaccctattggggaaaaaaaaaacctttttaaaaaaaaaattttttcacccttaaaaaatttttgctgaa

SEQ ID NO: 17212 - DNA, 361 bp, Oryza sativa
  Clone ID: uC-osflcyp011c02b2
ggggaaaatttgggggcccttggaaaaaaccctttttctccaaaaaaattgttttcaaaaacaattgaattaaataaaaacttagaaaaaaaaaaaaaaattggggggaaaaaaatagggggggcttttaaaaaagggggggaaagggaaccccggggggtaaaaaagggattgggattcgcggggttaaaccgaaccaagcccccgccggggcccaagcccgtgatgcccgaactgttcggtgttggaaaatttccgggggggggctttgggaccccccccccgggggggggggcccttggggggggttaaaaattggggcaacccatgggcaccccaaggggttcttgaaaaatttttt

SEQ ID NO: 17213 - DNA, 56 bp, Oryza sativa
  Clone ID: uC-osflcyp011c03b2
ggtgggttatttaagcatctcgccctttacatatggcttgctttggaagaaaggac

SEQ ID NO: 17214 - DNA, 154 bp, Oryza sativa
  Clone ID: uC-osflcyp011c04b2
cgcatgcacgcctccttcagcttgtttcctcctttgttggccgccctctttttttttttttgtgggtttttttattttcccgggatagaacaaccctggttctttcatttcaattgcaaaaagcttctttcggccaaaacatacgccacaggtc

SEQ ID NO: 17215 - DNA, 313 bp, Oryza sativa
  Clone ID: uC-osflcyp011c06b2
ttttggggggttttttttttttttgtgaatacttaatggggctttttactaaaaagattctaccaaattgacaggacgaataattacgtgatgaaacacaacccttaagcccactaccagagaagaatcaacataaacttgccctggcatcttgtaaacagagtagcaacaaagctgcttttcgaaagggatattaaaaaaaaaacctgaattttaggaaataacctaatatcaaataattagaaggggtgaggtttttgaacccaagtcgtttagcccaccaccttgtggagggagcatgaagaccccctga

SEQ ID NO: 17216 - DNA, 451 bp, Oryza sativa
  Clone ID: uC-osflcyp011c07b2
agcagaaggcaaaggaaatttcccgcaaatacttattcatatgttttgacaacatttctcccgacgcatgctcattgtggcagacgcagctgaccacctagagcttttagttcaccattattatttagaccaagcatacgtcccaagatcagaacacatgcttacaagcgaaaatactaatagcctggctggctgcttcacagaataaccaaacgacaacctcaacagataaaaatgccacggaatgaaaacaaagcagcgaatcgtcaccagaagtcccatcttactcatcaaacactccatcattctcctccaacgcatcctctccccaggggagaagattgcccagtttaccttccttaacaggagcagggttcaccatattctcagcctcgaagcagtgcagaacagatttgggcgacccaacagcaacaggtacgtctttagtagc

SEQ ID NO: 17217 - DNA, 439 bp, Oryza sativa
  Clone ID: uC-osflcyp011c08b2
atactaaaagagttttttttttcttttccaacgacaatattgctttttggtttttcctgtgatggttcagtagaagaagtacaagtacaaatgtgcaacaaaatctaatttgtcctgatatgtatgtccaggaatattgaactctacgaactaagctagctctcaaatgcttaaaggttcactcatcaaagagcagtaatttgtatcttctctgaaaattgtgctaatcagccataattagctagtagcagttcatgaggttctcatagatgaggagaaggtttggatcgtagaaataaggatcatccagatctgctcctagccctaatgcttcctccatcaccgttgactccagcggctgccccatctgatgatgatcgaattcatcagcgttgtgagatattgcagaggaattggatgaacaaggaggcaccttttg

SEQ ID NO: 17218 - DNA, 56 bp, Oryza sativa
  Clone ID: uC-osflcyp011c10b2
ggaccctcaaaggaaaattttttcccattgaattgctaatggaaaaggtcagaaag

SEQ ID NO: 17219 - DNA, 379 bp, Oryza sativa
  Clone ID: uC-osflcyp011c11b2
tttttgtgttttttttttttttttttaatacttaatggggctctttactaaaaagatactaccaaatagacagtacgaataattacgtgatgaaacacaacccttaagcccactaccagagaagaatcaacataaacttgccctgtcatctgtaaacagagtagcaacaagctgcttccgaaaggcatattaaaaaaaaaactcgaatattaggaaataacctaatatcaaataattagaaggggtgaggctttgaacccaggtcgtctagcccaccaccttgtggaggtagcaggaagacccctgagcatttttcgaaaggcatatacaatgcagaatgactagtggcctcgtgtgccaccacataggagccgagacg

SEQ ID NO: 17220 - DNA, 390 bp, Oryza sativa
  Clone ID: uC-osflcyp011c12b2
ttttggggtttttttttttttttttttttttttttttttttttttttttttttttttttttttttttttacaaaagcataaataccttataaaatcaacaaagggggggcccctacatggggaaaacaagtaggggaagggaggggatcaagcttaggaattacaacaacgggagattttttatggttttagggggggaaacaaaccgggaaagccaaaatgggatatttttaggggaagtttgttgcaaaaactggaactaaatcatgtccttgggttaagggggcggccaggtttggtccaaaattttgggggctttggggggggactcgggcttggtcttgctgaacagtttggttgctttggagtttgcaggggagtttgggtttg

SEQ ID NO: 17221 - DNA, 356 bp, Oryza sativa
  Clone ID: uC-osflcyp011d01b2
aaaggggccaaaaaaatttttttttcccaaacctttttataaaatccccccaaaaagacggatccagggaagtttttttgcccctaaaagggaaggaaagaaaaaaaacccgggggggggggaatttttttaaaaaaaaacctttaaaaaaacccaagggtaaaaaaaaaaggggggaaaaaaaaaatcccgaaaaaaaaaaccccggggaaaggccaaattttttttttgaaccaaaacccttggggaaacacccccctttggggggttttttttaaccctgtttttttttttaaggggataaaaaaatttcggggtttttttcaccccaagaaaaaatttcggggggccccccc

SEQ ID NO: 17222 - DNA, 444 bp, Oryza sativa
  Clone ID: uC-osflcyp011d03b2
acttaatagtaatagactctttgatggagtattacaacatgcagcagtggcattaatacgccagtacattaattaagttacacatatgcaggctccattttggtttcttttaatttatcgtattacagaatttctgtagccttgcagatgatcacttggatatcatgtactagtaattaacaataggatgcatacaaaagatggcccaacgacaacagaagatgcgtgcatctgacattgtctggccttatttgttggtagtactccaattaattaacaagagatgatgcattcttgtgccttagtttcttcacatgcttggcttcacgttgagcctattcgcaatcttcacccccaacgactcatcacactgggagaggtagttgacccagatggcgcggagcttaggggagaccttggggtgcgcgagctcgccggcgaagc

SEQ ID NO: 17223 - DNA, 438 bp, Oryza sativa
  Clone ID: uC-osflcyp011d04b2
gtgttctctttttttaccaggaatgatatcgatttgttctgaacttgtaatacatggagagtcctcattcacaattaaatgttaccctatcttacatagttagatctaagatcagaccaaaggaacaaattataattgggtcagtctagttctattactccctggttccctctagtaaaaaaaatttgacgttccaacgtcaattaattttgactggagggagtatgatatattttgtaactaaataattacagattggtaacagatattctgagtaagggaaattgtgttcggttgttggcaccaaacctggtcaaatattgctgtagggatggcaagagttgccactgcattaggggagccttcttttccagatatcctacccttaaatgggcagcatgatagcaaagggtttacctgctccttggagtacccaaa

SEQ ID NO: 17224 - DNA, 51 bp, Oryza sativa
  Clone ID: uC-osflcyp011d06b2
gtggagttcatatcaactggatctatgcattcaactggactatagacacag

SEQ ID NO: 17225 - DNA, 161 bp, Oryza sativa
  Clone ID: uC-osflcyp011d07b2
tttttgggttttttttttttttttttttttttttttttttttttttttttttttttttttttcagaaaaaaaaaatctcccccgaaaatgatcatgcggagggcccaaagattaaaaccccctttttttaaaatagacttgcaaggttgggagggcccttt

SEQ ID NO: 17226 - DNA, 142 bp, Oryza sativa
  Clone ID: uC-osflcyp011d08b2
ttttttttttttttttttttttttttttttttttttttttttttttttttttttttttttttttttttatttttttttttttttttatttatttttttttttttttttaattttttattttttttttaatttttttgagaag

SEQ ID NO: 17227 - DNA, 461 bp, Oryza sativa
  Clone ID: uC-osflcyp011d09b2
actcccaacggcatcccagcttccagacctctggcttcatcagttccaattgaggcagttctgttcgacattgatgggaccttgtgcgactcagatcctcttcatcatgtggccttccaagaaatgcttcttgagattgggtataacaacggtgtgccaatagacgaggagtttttcataaacaatattgctggaaggagtgatgttgaagctgctcagaatttgttccctgattggccccttgagaaggggctgaaattcctcgaggacaaggaagctaaatacagaagtttggcaaaggagcgtttggaacctgtaaagggccttgctaaagtggttcagtgggtcaaagatcatggatacaagcgtgcggctgtaaccaatgcccccaggattaattccgagctcatgatctcccttcttggcctcacagatttcttccaggccgtcatcgttggagg

SEQ ID NO: 17228 - DNA, 442 bp, Oryza sativa
  Clone ID: uC-osflcyp011d10b2
atgatgatgaaaagctgaaagtctttttatctcattgttgctaaaactagacaggtcactcacagcaaaatgatgtccatacgggcaaatctaacagcaacacaaaatggataattttaaggtaccaaggcactgccctacgaacaatgcagccataagcacgaaaaactgcagaaaatttcactcgtcctcctggctgcggagcctggcaagcttgttggtgaccacgatgtccagctgcgcagcgcgctcgacgatctccttgcgcttgcgggtggagacgttgtgagcaatctcagcgcagtatgtcctgttgtgcatcataagcagctccagctcagagacattgtgcaccacaaacttcttgaacttgttgggaaggtagtgccttgccttcttgtcagaaccatatccaatgttgggcatcaaggtgcattctttg

SEQ ID NO: 17229 - DNA, 440 bp, Oryza sativa
  Clone ID: uC-osflcyp011d11b2
cacacaaataaagaattcaattatattcagatgcatgactggacaattcagaattgcaaacttaacaaagggataataaagcaaacatccaccctgcaaaccatactacacacttaaagacctctttatggttttgataataaggcaagctccagcgatatatgaacaaatgaggggaaaaaacaagcaccacacactctacttcatatccagcgataaaaagatttgaatctgaagtcggtttggttgttctagatttcttgggctatgccaagatccattggcatttcactgtcccccatattctccttatcttcatttgtcacctccttcaccacatcaacaggttcttgctctgtaccaactggcaaagcctcgctgcctccattgcaatcttccttttgccccttgacctgcttcttggcttttttaccagtatt

SEQ ID NO: 17230 - DNA, 432 bp, Oryza sativa
  Clone ID: uC-osflcyp011d12b2
gacccagatcgcgcagccatggccgattcttttattgaacaaataattcagttggtagaacataaattacaattattacaattaaggcagagcattatttccgttgttttcaacatgcacacttgcacaagcagcaagtcctgcgcttactccccaatgcctagaaaggaagaagagcaaaacgaaacagaatccccaatacagtcagtttggtaagctttgtccactgcaggccacctgtataactacaacagagggatcaaggcacatcattcgccgaaccgagtgtcaggaggtgagtgtatcttgtgtgtgtatatatggtagggataaataagaatggttgccccatttattttcacggggcatgcaggaattggggcggggaggggcaagcaagaacattttcctgcctgaatgtgatacatgatg

SEQ ID NO: 17231 - DNA, 232 bp, Oryza sativa
  Clone ID: uC-osflcyp011e02b2
acggattaattaactgttcacaatacaaatacagttggcacaaaatgtgtcctgcccaaaagcgggatggctggaagggaaaaatttgtaggaactaatcgtgtggaatcaaagaatcgtttgctgcatctctaccgattgataggcttgtgttatagaactcacccctgtctttttctccaatgcatgttgcgctgttttgtgccgtgcgttacgtaactgtgtttgtttt

SEQ ID NO: 17232 - DNA, 63 bp, Oryza sativa
  Clone ID: uC-osflcyp011e03b2
tttttttggggttttttttttttttttttttttttttttttttttttttaaaattattttttt

SEQ ID NO: 17233 - DNA, 54 bp, Oryza sativa
  Clone ID: uC-osflcyp011e05b2
tttttttgggggtttttagaattatttttgttttttttttttttttttattttt

SEQ ID NO: 17234 - DNA, 139 bp, Oryza sativa
  Clone ID: uC-osflcyp011e06b2
atggtacactatttctttatttttttttttaatttacttttataaaacggtttataaaggtttcatttttacaaaaagaacttgacacatgatctctgaacgttttacagcaaggaccccaaaaatctagattcacaag

SEQ ID NO: 17235 - DNA, 466 bp, Oryza sativa
  Clone ID: uC-osflcyp011e08b2
gtcaaggccagcagcgactgggtcatgaacagcatgatgaacggcaccgacagctacggcgtcaccaccggcttcggcgccacctcccaccgccgcaccaaggagggcggcgcgctccagagggagctcatcagattcctcaatgccggcgccttcggcaccggcaccgacggccacgttctgccggcggaggcgacgcgcgcggcgatgctcgtccgcatcaacaccctcctccagggttactccggcatccgcttcgagatcctcgaggccatcaccaagctgctcaatgccaacgtcacgccgtgcctgccgctccggggcaccatcaccgcctccggtgacttggtcccactgtcctacattgccggcctcatcaccggccgccagaactccgtggccgtcgccccggatggcccgaaggtgaccgccgccgaggcattcaagattgccggcattgagcacg

SEQ ID NO: 17236 - DNA, 445 bp, Oryza sativa
  Clone ID: uC-osflcyp011e10b2
agcgcggcaataaaacattgcattgaattctgaacgataaacaccaggaaccggcgtttatttgaggcaagcactgcccaaaatctcgcaaaagtactgaaaccttagacatagtacacatccatggcaaacatggatgccaaatgacaactacagaaaattatcaaattcgaatgcagctgacggcttctcctgctgaagatgcatattttcccctccattacttggatgtgctctctccatcgacagccaatgggacggcgctggccaggctgcggtatttcagagcatagaacatctcaatgtaacggcgagtctcgcgcctctcaaggttgcttacgtacttccagaatccatatacaccagtcaaggtcatcagcctttcagagtacagcttccaggtgtacttctcgtaaatcctctgcagaccttcctgtgaaatatt

SEQ ID NO: 17237 - DNA, 436 bp, Oryza sativa
  Clone ID: uC-osflcyp011e11b2
ggttggaagaccataacatcaagaactctccttgaaaattttgtaatttgatccgcaacgattcagatgcagatgaaacactgctgattcccactcagattacacacaatacaaatacaccgacaaactgcctcaaaaaccaccaaattgattcaaaagtaaaacgggtatgagggatcttcccaccgagactgactaaacctaaccacagacaattggatccactggacccagattattcaaaaacagatggctatgacggcatcgtcctcgcaaccgaagggaacttgcagctatggatatcctcacttcgcgctggcgagctgggtgcggatgagcttggcggtcgaaaccatgttggtaagggcgggcttgaccctccttgtcttgccgggtcttgagaccgtagtcagggttcacccagagaatgtttagt

SEQ ID NO: 17238 - DNA, 445 bp, Oryza sativa
  Clone ID: uC-osflcyp011e12b2
gtataaaggttacacaaatcctttagtatgatgataaagtcactcctataaaacggtttataaaggttccatttctacaaaaagaacttcacacatgagctctgaacgaataacaacaaggaccccaaaaattagtttcacaaggtgcacacaacatcccggtctattgtcgacagatgaatttataccgatctgtcatactgatacagaaaatagaggctctgtaagcttatgttgtctgctttctgtatgtgtcctttgctgtaccaaacaaacatctgtcgttccctccgtttgatgctcaagaaatattcagcgatctgactcttcatggtttccaagctgacggtggaggtgggggagttggaaacatcggaggaactgcaaagaagatggtgttcttatcgattccacttttgacgtgaatgttagttagggaaatcaa

SEQ ID NO: 17239 - DNA, 448 bp, Oryza sativa
  Clone ID: uC-osflcyp011f01b2
acagcatcataattctcaagttagcacgaagaagatcaagttgtacaagatgctctactcaagtcaagtgagaaggtgactaagttaacccatctatgttaaaattgcctgggatcattaacaacatgaatatggcaaattcatatcaaacttgaatgtccatgtttttgagagacagccattgccattggtacgaggtcaccgaaagggtcaccaaacggattggaagatccagcctgaggtgcagggtactgatgctgctgctgctgctgttgttggtatatctgattttgttgataatgtgtctgaaaatacatgttatggtgatgttgatgatcctggaaatgatgaggctggtagtattgttgctggtgttgagactggtagtactgatgctgctgctggttcagcattgcaaactggacattggatgggggcaagaagctgc

SEQ ID NO: 17240 - DNA, 416 bp, Oryza sativa
  Clone ID: uC-osflcyp011f02b2
gattcaaagttcaaacagggataaaatagggggttccacaagattaaattaaaacctttaatattcggcgtataattaattggggcattaagcacattaaattttgcgagaactcaaagattgggtgacgcgacccacacgtacgtacctggtctgcactgcacagggcacatcatacacacacgattcatcagtacacaaattaccaacttaacggaacaacacacgggaacacatgtactcttaccatccaagaaaaaatcaacttttaactacgtctataaatccatagggaagttaattttttttagacagggggagtacttaattaacacacagtaggggggcacgttatattaagcccccggagtacaaacattgcggcggcgtgagcaacggtttaacttaacgacggc

SEQ ID NO: 17241 - DNA, 389 bp, Oryza sativa
  Clone ID: uC-osflcyp011f03b2
gcatcaaacagctgcaaagcttaactctttttggagcaacagtttacacaggtgctggaaccacaaacattactagtactcctactaagctacaaaaattccaatggagaggaaatgaatgccctccatatttttttaaaaaaaaaaaccaccatgaaaggaaggaataaccaatggtctttacagtaagatttccaggcagtgttcgtcctaatcaagcatgccgttggaacaaaccacaaatccttacgtttttctttccttgttcccaccacccgacatttatacaatgcatacagacagatttcagcagacctggttggctggtcgtgtctcatgatttcagccgtctcgccaacaaatttggttctggggaacctgaacaccca

SEQ ID NO: 17242 - DNA, 448 bp, Oryza sativa
  Clone ID: uC-osflcyp011f04b2
gaagcaaaaactgactgctagtattattttcccatcacatccaatccagaaacttaaaaagccatataagttcaggcaacatataactgtgattgtatcacagcagaattataatggtggctcaggaggcagccagatgacaactctgaaacaaaactcaaatatttaacgagaactagccaccaagaggtgatcgattataggcgcgaagctctaagactcatagatccaagggtgaaggttgctcctccactcagctaaaccttcagggaaccagagagcgatctccttcttcccgttgtccacggagtcgctcccatggatgacattcctgccaactttcacggcatagtcagcacggatggtgccgggggctgcctcccagggcctggtgggcccaatgatcctgcggccagtggcaacaacattctttccttcccaaaccatt

SEQ ID NO: 17243 - DNA, 521 bp, Oryza sativa
  Clone ID: uC-osflcyp011f06b2
agcaacgaccccgcatgctcccctccttcaagcttgtgtgtcctctatttttgtgccgccctcttttttttttttatgagaaatcataatgcttatggcatcagaaatacaaacgcaaagatttcgttacatactgcagtgtataacttcgttcaaatcgtttaaatttacttctattacatgcatttgatgctaaaaaagaaaaaaaaagacctagcatggaacacaagcatagaatctacattgcaaagttatatataagacacgatacaccttcgatcatatcatatgtaacaacactggccccatcgccattctgctcctacattaccaccaccatcaccacctaaggtcagccaggagcatgaaagcgaggacgaaattcgggccgggtcagttcttggcagcatggtgggtggtgccgccactgtaatcgtctaccttgagcatcagatatgacagacaggaacaagccatgctgctgcctgggagaaactatgagttttggtcgctggcggcct

SEQ ID NO: 17244 - DNA, 62 bp, Oryza sativa
  Clone ID: uC-osflcyp011f07b2
aattataatatttttattagttaatgttaacattgttggtgttataagaaaagaatataatt

SEQ ID NO: 17245 - DNA, 288 bp, Oryza sativa
  Clone ID: uC-osflcyp011f08b2
ggactggaaaaatggggttttttttggccaaactggctttggttgaaaaaaatgtcggtcaaaacttggtggaaaaattaaattggaccaaaacaaattccacccaacaggggacaaaaagacacataacccggtttattttgggggaaaaaatttacaaaacttttggcacttaaaacaagggaaaggaacctgaccgccaaacaaaaacccaagctttgccccccggcgggagaatcgatcaggggtcccgggtgggaacccccacggggcaaaatgggagggaat

SEQ ID NO: 17246 - DNA, 368 bp, Oryza sativa
  Clone ID: uC-osflcyp011f09b2
aggtattgaaattgttgcacccagaaagaatagttcccaagtacaagacaaccagtatgacaagggtgcttcttaagcaggagttgcctgcctcctagaagaggcaatcagatctcgtaattccacgtgctctccgctattagctttggcgctttgctttggtcagacagatcaaatgacgctgcgaccttgaaggaggcaccgatcttggagtccctggtccagtcgagggcgaggagcttggtggaggcttggtaggtggccttgatggcatcccctccttgaaacttgcgggtgacggcgaattcccaggcgttgttagcggtgtcgaagcagggctcgatggtggtgaggcggtcttggccgtg

SEQ ID NO: 17247 - DNA, 448 bp, Oryza sativa
  Clone ID: uC-osflcyp011f10b2
ggaacaaacgcgcatattataagtgacgaagcggtctcacataaaacagggcacacaggttacaacaacgagggttgtaagcccattaagccccaaacatcagatcaccacaagcaaatgtctcgaagacacacgcacacggcaacaggataactccacactggcagatcatgggatagcagcagttatcaatcaggccttgacacacagaacatcaagcccccagacgacgacgactcctctagtactcgtcaccatcatcgccatcctcattctcgtcggactcagcgccaacctcctcgtagtccttctccaacgcggcgagatcctcacgggcctcagagaactcaccctcctccatgccctcacccacgtaccagtggacgaaggcgcgcttggagtacatgaggtcgaacttgtggtcgatgcgggagaacacctccacgac

SEQ ID NO: 17248 - DNA, 99 bp, Oryza sativa
  Clone ID: uC-osflcyp011f12b2
aaaaaatgataatttgggagtaaaaaaggcctataggagggttgggagggcctattggtagtcggggacaaggaaatatagagaaaaaaagaaatgaaa

SEQ ID NO: 17249 - DNA, 453 bp, Oryza sativa
  Clone ID: uC-osflcyp011g02b2
gatacaatgcacggtttggcggctagttcatcaaattcgaggaaaatcatatgagactttaatggaagtatggaacaatatatggaaattcaaacttgcacacacacacacataagaggaccatatgatgaaaatattgaagtacatgtacgaatagctccgtaggatccattgacacttggttttttatagatgaatatcccataggtatgttacgtctgaggaactagttgaatatgatactcttgagcgaccaaaaccttggagatacgctttacattccctccgtcgatatccttccatctatactcggtcaccacgatgtggagaaagagtgtgataaaaagcttgttaaactttgccgcaggacacatcctgattcctcctccaaatggcatgaaaatcctttgcatcgagattcttttctcctccgtccatctccatggatcaaat

SEQ ID NO: 17250 - DNA, 402 bp, Oryza sativa
  Clone ID: uC-osflcyp011g03b2
agggcataaatatactattcataactcagaaacactcagattgttacaaacaacagtctagcatctttggggtggcatagaaaaattgagcaaatacgtttacagggaagagtggtaaaagaaaatctaccgacaaatcagggtgaggaatttcgcgatatcctacagcttttgttcaaaaatttttcttgccaaactaatgctgcttcggtggcaatccgagtgctgaactccaagaattccagtttcatatgctattctattcatataataaacctgttaaacctcttttgtgagtatggctgtatggtgagagttggtttccttgtagcaagttcattattgtctcaccccataatttagagttcatcatggtcacgctggttcgaagatgccttgagc

SEQ ID NO: 17251 - DNA, 387 bp, Oryza sativa
  Clone ID: uC-osflcyp011g04b2
agcaaaaatggtcccaagcaacatgctgaaattctataccagaacctggcaaccggtgtccggtagaatatacggtattacacatgaacatttcacagcattgcgatttccaattgccggaagtcgataataatccgtgccggacagtgaaaagtcagatgaggtggggaagaaaagcaaagaaagaaacaagaaactgtgttgggcgctcgaaacttcgaaaatttcattacaaaggatcgagaggaagaaggaagaagtctggggaaaatttttggagcgaggtggagttacaaaggcagtagcagcagcagcttctactttctcactttcactggttggcgacaatgttaagaaggtcgacgaccctttgcgagtatacccact

SEQ ID NO: 17252 - DNA, 94 bp, Oryza sativa
  Clone ID: uC-osflcyp011g05b2
gatgctaagcggatgtatacatataaaagtggccttttattctgcacagattcagaattgggggggggggggggccctatacaccccggctgcc

SEQ ID NO: 17253 - DNA, 197 bp, Oryza sativa
  Clone ID: uC-osflcyp011g06b2
gagggaccggggatggactttactcataataatatccaacttgatcggacattgtatagaagtactgaactcggaatgaacaacaggcaacaatcctgatagaaaatagatgtcaagatccgttatgatcgaaaattaaacaacacatttgcacggagcacacaacaggagcgcaaatttcatcatccaaatatgtt

SEQ ID NO: 17254 - DNA, 422 bp, Oryza sativa
  Clone ID: uC-osflcyp011g07b2
ataccaagattgggctatctcaatctataaggaaagataaaaagtacttgatcattactgatgatcataaaataaagtacacttcaggaagaaggaatgacctaaaatggctccttcaacagaggaagaatagggctagacaaggtacacaaaggtaggcaaggccattgccgtcatcgttaacgttggcctcgatcagctgtctccgttctgctgcccgaagctgcatgatcctgagggcaagaaggagaagggattctcagagatgtcaaatccaggtcgagtgaagtcatcaagcccaccgaagcaaggatcaaagctcaatggcgagaaatagcgtggatcatcggccatcttcatgtcaagatttgggatgtcgaccgatgagctacccgggaagtatacccagcgctccccaccat

SEQ ID NO: 17255 - DNA, 419 bp, Oryza sativa
  Clone ID: uC-osflcyp011g08b2
aaccaaatcaaactcatcttattctcttaataagtacatcgccaagaaactaagaaaagcaaacaaagcatgcaactaagcaccgacgacgagacgtcgtcgtggcgccgtgcacctcatcaatttaactgcaaacgcacacaagccacagttgaggtcagatctgaacactcacacaatttttgaataatatacgcatggtttgccacgacgcatccatgcaaggacttattcatcatcaacaccatgacgacactagctaccaactagctaagagagagagatggccggagagatggccggccggcggcgaggtatgggtagctaggtgtagtggcaggcgaggttggcctttttgaacaaggcggcctgctcgatggcggcggccttggaggtgaggcccaggaggatgcaggact

SEQ ID NO: 17256 - DNA, 449 bp, Oryza sativa
  Clone ID: uC-osflcyp011g10b2
aaaaagctatatacattatagactcgtatacaattacactgccacggtaatatctgaacaagaaaacatagccaggtagaccctggctccctggatctcaatgctgtcgtcgaaggattggccggttgaattgttgtacagggtgaaaaagacccacagatccgtgccaagctgcgtaaccgcaacggtgactgcgacctttttacgtggactcgtccctgcagtgtggaatatcacacgatcttttcccccgtaaagcagctcaatgtccctacatgttggctaaggccaacaagctgatgtgcacgagatccaaaagtctagcaatctaacctaagtggccagaatctgaagattcacaaagcaacacacgatgtcgaagcttttttctatcggagaacgaataggcttcgaccacactcggactcgggacggacgtgttctgttca

SEQ ID NO: 17257 - DNA, 405 bp, Oryza sativa
  Clone ID: uC-osflcyp011g12b2
aaggaatgaaacttttcagatggtcatggtgcacaaaacagaaccatcatgctcaaaaatcatgatgccaatagttcaccgttacagaacaagacgaagaggttgataagaaatgaggttcaatcgttccagcacataaatactacagagaaacgaggttcacatcattctagcacgtagatccgagatgcaatgtcttggacgagccaatcgaaaccttgaagaaggccctccccggtgtgcgcgctgcagcctacgatctgccagtgccggcttccgtacatcgcttccaaattgagtaccttagcaatttcagaaggtttgagagcgccttgaatatcttgcttatttgcaaacaccagcaatgaagctcctgctagtctctcttttttcaagagattgtgg

SEQ ID NO: 17258 - DNA, 430 bp, Oryza sativa
  unsure (1)..(430): unsure at all n locations
  Clone ID: uC-osflcyp011h01b2
ataattaattcacaacaccatatttcattgatcaggttcagaacctgcacagaaatacacactaccggtacagatctcaccttctctccaatactcgtacatccatccacgcggtccacacgaatacgtacatctatacggtacacgtacgtacatctactgcaccgngtacacacacgcacactctcctgcagagacgcgcatcgtcgtcaacctagctagcttagctgaaggcgatgcgtcgccatggcagcacggcggcggcggcgctcacttgccggggacgaagttggtggcgtaggcccaggcgttgttgttgacggggtcggcgaggtggtcggcgaggttcttgagggggcccttgccggtgacgatggcctggacgaagaagccgaacatggagaacatggcgaggcggcccgtcttgatc

SEQ ID NO: 17259 - DNA, 346 bp, Oryza sativa
  Clone ID: uC-osflcyp011h02b2
acaccggataatggacacacaggttatatttatacgtatttaaacaaaggggaattgtacacatacgacgtacatacacagggtacttttacaggacaaacaacacgcagacacgggccgtactggagaacgccatcacacatttacacttattacacgacagtaacatttttttttccttttattgggctggggtaggtcatcttattattcaggaaggggacttgggggccgtcgccgggggggcaaacacaaggtgtggtggtgttttaagcttaaagctggtcgggaagttttttttgaatttggccaagagggcggtttttatgacggagataggggtggg

SEQ ID NO: 17260 - DNA, 344 bp, Oryza sativa
  Clone ID: uC-osflcyp011h03b2
gccctgttggtcaaggagagcttttccatgccttcgccatagaattcaacgaatttgccaacaacgccatgcttccttaacatttgggtgacagtaagaacaaggtcggcagcagtgacaccattctgtaacttcccagtcaacttgaacccaacaacaccaggcaaaaccatgctcattggctgaccaagcattgtggcctctgcttcaattccaccaactccccaaccagcaacacccaaaccatcaatcatagtagtgtgtgaatcggaaccaaccacgctgtcaggatacataattccatctggggtgaaaacaactcgaccaagatactcaagattgac

SEQ ID NO: 17261 - DNA, 453 bp, Oryza sativa
  Clone ID: uC-osflcyp011h06b2
ctgtctctggtgtgctctctttccttgagaaccacagtttgcattcagtgtaatagtgaagcaggtgctggggctatcaccagaggagccggtcactgccatgatacttgaagatttcctcgccttcatgaagggtctcatctctttccctctctacatcccagggacgccctatgccaaagcataataacttcatccttttgtccgcgaatcctcacaggccagagcgaggatatcaagcactgtgaagggtattattgaggagaggaggaatgctggctccagcaacaagggtgatttccttgatgtgctgctttcaagcaatgagctctctgatgaggagaaagtgagctttgtgctggattccttactgggaggatatgagaccacctcactcttgatctccatggttgtgtatttccttgggcagtcagctcaagatctggaactagt

SEQ ID NO: 17262 - DNA, 461 bp, Oryza sativa
  Clone ID: uC-osflcyp011h07b2
gaaccggactaactgactcattcaagctgtaaacttgtcacaaatcgcacccaggtttacacattgttcaagagatacaaactgcagctataaagccacttgtgctaacaaataccactataagaggataggtatatcagatcgacacaaagtacagtcgctaaaaagatgtactaaaaaacccaaacttttatcaaccaacgcagatcattattccaagctctcttcaagaaccgcccacatcttcagacgcaaccaacgaatttgacatttctcaacgcatcacaaccgagcaaaaccacaattcaagcaacaaaggccacccctgagtctgctgtgaagtgacaccagcacaaacaggcgtttataacctaacataacttaggacaagaagccacccaaagtgctccagatcaaaacaagagatcactaagggcttaaaaatatagccataagcagct

SEQ ID NO: 17263 - DNA, 446 bp, Oryza sativa
  Clone ID: uC-osflcyp011h08b2
ggatatcgatcaatccagattttctaggagaaaaatgcgcatacactgtacatgaaaaatgagacacaaattatagctaccatattatttgcattacactaaactagtgagtccagatatagagcatataccaagctcctaacagcaccggcaggagattacatctcggcatgtgtaaggtctagctctggcttgtagtacctccagcgggggcactgcttccagaaaaaatcccctctgtttagagatgcaaagatcatacagatttctgcaaatgcctttgctgaatggatgaaccctgctaggaacctcccttaggtaagaaatccgcttccttctggcaatttcatatgttgtttggttcgtaagagcaagataagcatggaatatcaacaagggcagcaggaccacgaggattaatatcaatgctaccaaaagtacaatac

SEQ ID NO: 17264 - DNA, 383 bp, Oryza sativa
  Clone ID: uC-osflcyp011h10b2
catcagatcagatcagacaacattttttcaccaacgaaagtttcaattttttttcccatttaagattgttttattaaactaaccatattcattcattgggctgagttggggggggtttgttcaccccatcctaaataacaagcccatacaacacaccggcatgcttttcggtcgatcctttgaagtacacctccttgatcttgtggaagcacccgagggtcaacagcgagtcaaagccggcctgggggcaggtccccacacgcttgacatcaagaagctcaccgagcctgctcaggccgccgtggaggttgcttcaaaaccttatgaggtgcttggatgtctagagcaccgggaagtatattttgatgaggtcaaagaaggcg

SEQ ID NO: 17265 - DNA, 107 bp, Oryza sativa
  Clone ID: uC-osflcyp011h11b2
cattattatttactgttccttacaagggctcacaaaaaacaaagaaaaagttgctgacaggaactaaaataggacacacacacacaactggaagcaaggctaaccaa

SEQ ID NO: 17266 - DNA, 262 bp, Oryza sativa
  Clone ID: uC-osflcyp011h12b2
atgactgtaacagcagctaatcatgaattaaaacagttgtgcgtgtatgattgcaatggaaatgagacaacactgtagtctatcgtactgtcgtgtgtttcatttacaacggctgaaaaatttctcacatagccgcaaactttacagacaccattagcagcttgagctctccctataccccctctctggatgattatacagacatgatacaaattcctctccgataccatcttcaagcaatcacaaagtttaaaatatgaac

SEQ ID NO: 17267 - DNA, 434 bp, Oryza sativa
  Clone ID: uC-osflcyp012a02b2
gattccaaagtccggtggcgggtgtactcgttcatttgttactacccccatttccaatataatacaacagtgaaccgaatgtacacgtacaacaatgttgactatagttgattgtaactctacaaatgatcgttacttgctgtaagctctgccttttgtgtgtaggcaggtaaggggggaaaataatcggtcatccaaaattactggatcgttgcatatgtttcttgtttcattttcattaagttgctctctatgcctcttaacacaggtctatataggcgtgcgaggttattctgcgcttgcaccgcttttctgagttcagctgaaagtttcattatttctgccgacaaccccttggatctgctctgttctttgatgagctgatcctttagggagagattcttagttacaaactctggcgggaatgaaatgct

SEQ ID NO: 17268 - DNA, 324 bp, Oryza sativa
  Clone ID: uC-osflcyp012a03b2
gtaagagagaaaaataataaacggaaccccgggaagaaataagggtatgagggacaaaaccacaacacaaataaagggggcaggaaaaaaaggggagaagggaaaggaaaacgagggggggggggggtgggggtacccccaagaggatagtgacgagagggggatcatataccacaaaccaaaaggggaaggggtggcaaattgacatccagagagagagggctcgaggagtaaaaatgagggttgaaaccggggccgggggcggggggatggccctttataagcgcccccgcccggggggagggggggggccatgggcacggg

SEQ ID NO: 17269 - DNA, 445 bp, Oryza sativa
  Clone ID: uC-osflcyp012a04b2
agataattatttatcattaaaatctttatcattacgataatgttaaattgaacaacttacaccactagcttcaattataatatccaacttgacatatgtgggccaaatggagagacgtacgcgccacaattcaccattgatgcagtgaaagagagcaactagctgaccacaacgggcacggccttgagagggatggcacggaagttggcaatggtaaacctgtggcgcatgtccaactcctcggccgacacgccgtcggggagtcgccactcgaacgcgcgcagcagcgacgccagcatgaacggcacgacacgttccgccatcggcaggccggcgcacaccctccggccggacccgaacgggatgaactcgaacgtcttcccccagaaatccaccttgtcatcatctccccggcggatgaaccgctccggcatgaactccttcg

SEQ ID NO: 17270 - DNA, 413 bp, Oryza sativa
  Clone ID: uC-osflcyp012a05b2
cgaagcttgaaatggcattgcactgatcaaaaactgcctggcaagccacaccgaactgtcagagatacatacattgatttcattcccaaacgcttccatccatccaaacttttgaaaacagtctttgtacaaatccttttggaaacctcaaaaggcttcttgattcatgggcgaggctccatgacgctgatcgtcacgctgttcacagagtaagccgacggcgaaacgccggccgccgccgccgggacaaaaccgggggtggagggctcctccagctcctccttgctgccgagcacgccgtggaccctgtccatggagggcctcacggagcggttgctctggacccaaaggagcgcgacgtgcacgcaccgtgacgcctgctgcacctgctcgtcgttcaccaggccgagatg

SEQ ID NO: 17271 - DNA, 485 bp, Oryza sativa
  Clone ID: uC-osflcyp012a06b2
cttggttcctctattttggccgcccttttttttttttttttttgatgcaaacacaacaggtaaaggacagataattgatgaagagccaaaagccagtaaaccatttaatgacaatattaaaggaagatgtgtgttccaagaacacgttcaccattcttaaaccagcacaaggcaccattcatatcaagtttagctaaagatactgataaaagtcacagctaatacaaaaagagcaagatttacataaatgctgtcatttctggaaatgaggattgagtaacccagagatttcaagaaatccaacacgatcacgccctccaaatatcttcttcagtttctcgtcacacacaattatcttcttgttgttcggatcctggaggttgttgcccttgatgtgcgcccagatgatcttgagcgcctccgtcctgggcagctccttcgcgccgccgacgaactcccgcagctcggcggagatgggcttcggc

SEQ ID NO: 17272 - DNA, 291 bp, Oryza sativa
  Clone ID: uC-osflcyp012a07b2
aaattaaatttttttataaataataaaaaaaaaaaaaaaatttaaaaataaaaaaataaatgaaaattttaaaaaaaaaaaaaaaagaaaaaaaaaaaaaaagggatcaaaaaaaataacaaaaaaaaaataaaaaaacaaacccaaaaaatttttgatgaaggaaaaaaatataggtaaaaaaaataaatattaatccaaaaaaaaaaaggagctccattttaaactgaaaaaaaaaggaaaaaattgtgagaagagaaaaacaaactatttttcccaaacactaggaaa

SEQ ID NO: 17273 - DNA, 474 bp, Oryza sativa
  Clone ID: uC-osflcyp012a10b2
acaggacggagggagtagtatttagatgatggtgataggtcagtagttgctgacactgtgactggggttacataaactctttacaggtaaaagtaaaaaagaattacttactgatcgaatgcacctcttatactatctcctttctgttcagctctctcaaggctaagattaatttaaccacatacatagagacatctaatctaatttgttgagatctacacaccgagatgttacaggctaggagtggtacagggtcttgagcctctttgctgcctggatgaagcccagaatcacctgcaactcatccaattgctgctgagactgaaaatgctgctggaccccatggaagagctgttcctttgatggatcggggttcatgcttacaagattgaagtgcttccagtatctccacagggtaggagtttcgagtcttgtcaagtttactctcgtttgcaatattgaactggggtgaaa

SEQ ID NO: 17274 - DNA, 343 bp, Oryza sativa
  Clone ID: uC-osflcyp012a11b2
aaactgaaaaattggaccgaactgtaagagttacattcattgcttgaatataaaaacgttggaaacaaaacaatttgggtccatttgagggttagctaaagatactgataaaagtcacagctaatcaaatttggggctgggttccttaaaagctaagcaaagtgccaaaggggggggagtatcccagagttttggagaaatccaacacgatcacgcccgggctttagccggagatctggatggacttgacgttgggctttttggggttttccttggcatggggggccttaaggaccgttttttttttggacacatggattttgtttggaggaaccgggggtcc

SEQ ID NO: 17275 - DNA, 489 bp, Oryza sativa
  Clone ID: uC-osflcyp012a12b2
gatgcaaacacaacaggtaaaggacagataattgatgaagagccaaaagccagtaaaccatttaatgacaatattaaaggaagatgtgtgttccaagaacacgttaaaaattgttaaactttgacaaggcaccattaatataaagtttagctaaagatactgataaaagctacagctcatattttttgggcacaataagggtaagggtttattaaaaattaatcctccaaagtttttcttatgggccccaagaaattcaatacttatttatgccctccaaaaaattttttttaaaaaaaaagtacacctccttttttaaaaaaaacaatttttttcacaaacaaattttcttcccttggggttcttattttttggaaggtttttttcctctctcgataatttttattaggtgtcatcctcctaaaggggggtttttttttttccgggtttttttttgttttttttggttttttttttttttttattttt

SEQ ID NO: 17276 - DNA, 320 bp, Oryza sativa
  Clone ID: uC-osflcyp012b01b2
aaaaaaaattttttttttttttttaattttttttttttttttttaatggtttttttttttattttttatttttttgtttttttgggggaaaaaaatttaaaaccaatatttacaaacatggataaaacaaaaaaaaccggttgtgggggggaaaagggtaaaaaaaaacacaaaagggatacaaaaacgtgggtggagaccccaaaaaacattgaaggggggtataattaaacggaaaaattcttttaaaaggggaaaccccaccattttttgggggacccattaaaaatgggggggataaaaaaagcccccattttaat

SEQ ID NO: 17277 - DNA, 422 bp, Oryza sativa
  Clone ID: uC-osflcyp012b02b2
aggattcacatccatctcgtaccctttgtataaatatatatagccggagcttccatatatttcattcacatatgcctcacccaacaacatatagtcgtagcagataccactcttacatcaagtcagagagagatcaggtgaaacaaaaacaaaagcagagcacggccggtaaaatcaaaagacgatgaacaaactgggaacacacgaaacaaggtgggagacatcatcgaatcagagatgaacaattaaacaaggctatatatgacgatgacggcttagttgccaccagactcctcgcagcccgggggcttgtaggcgatgaagctgatgagctgcacctgcctgacgttgtcgaagccgatgatacggacgaatgcatcagggtaccccttttggcctcctcgagctccttgagcacctgg

SEQ ID NO: 17278 - DNA, 85 bp, Oryza sativa
  Clone ID: uC-osflcyp012b03b2
ggggtctaagtccggtggcgggtgtactacttcatttgtttctaccctctttttcaataaaatacaacagagtacggtatgatca

SEQ ID NO: 17279 - DNA, 451 bp, Oryza sativa
  Clone ID: uC-osflcyp012b04b2
acaccaatcatcccaagcaaagaaatgataactgacagagtgattgtttagacatgcttcaaacataaaaaaacacgcgcaaagccacaatttattatcagtgttgaagcgacatcatactatcatggagacggataacaaatagtgtccatgagacgaacgatgaaacgactgagcaggagcatcttttattcacgcagagtactatggctggcaagtgatagcagcaatcgatggccccgtagaagataacgcaccggaagcttaatcatcgtactcctggcggcgatggtggtggtgcttctgataacgctgcttcttttcatcatcagagtcattgtcatcatgtttcttgcggccgtagcctccctggtattcgtctcccccgccatagctcggcttgttgtatccaccactctcatacgcaggcttctcgccgtacccataccca

SEQ ID NO: 17280 - DNA, 258 bp, Oryza sativa
  Clone ID: uC-osflcyp012b06b2
gggggggaaaaaaatagaaccccctgtaaactttattaaatttttttcatgggtgaacagttttttttaaggaaccgcgatttgctatcatcctgtttctttgggaggaaacttttttcgatctttggccttcttgtgaatgctgggctttccaggggaaaaaaaaaatgggcaaaaattgaaagaatggtcctttttgaccggaataaagtcaatacatccaaagctaggatgcttctacctggattgaagaatttt

SEQ ID NO: 17281 - DNA, 451 bp, Oryza sativa
  Clone ID: uC-osflcyp012b07b2
aaaaaaaaattcctctatttgactaaactgcttttgtgaactgccaatggtgccttagcacatatctgattttactgttttttccaacacaagagaagcaaattgcagtacatacaaccaagtataaaataagatggtctggacaaggtaggaaatcactgatactaaactaacctaggtatacaatgatactgttagaggggttctcccttcaagaaaggcaatattttgctgtcgaatatttggcctactccaagcatcaaaacttcagaacgcaacgaagaaaagaccagcaaatgttgctagtcctcatcagaatcaccaaacgtaatctttgttgatttaggagcatctgctttgatttctttgaaatgagatccatatatttgcgattcctttttcttgacgtgtgtgccaaattttgtaagtgcaggaggaacgacctgaccag

SEQ ID NO: 17282 - DNA, 473 bp, Oryza sativa
  Clone ID: uC-osflcyp012b08b2
attgaaaatggtacatcatttttatatatatcagagtggtagcatttcccttaacaatgaagggtatgaaaggaaaaatgggggacaaagttcctcaacgtcctataacaacttaaatttcgagaaaaatagagaaatataaataaattacatttagaatcggtgggagcatttatgtaactaacgtacagagagagaggatagggagctaaaaatacatatgatcaaattttaccatttcaaatcgttccgagtataggatttgtcatgcaaaattcaggacttgtcccaaattcagggagtgagagatagagaggggagagctagctcacattcttcttcctccggttccagactccctctggcagttgaagtagacggcggcgacagggaggccgaggttgtagagctcggcgaagtcgcgggtgctgaagttctggcgccaccccggtgcgtacaccgtctgccgcccc

SEQ ID NO: 17283 - DNA, 466 bp, Oryza sativa
  Clone ID: uC-osflcyp012b09b2
gatcgaaattagacggccattaatttgaactagagtatcacaaactacgtacatcgacaaaatccccgtatcatggtactaagcattttcgcatggaaaaatggacgtccctcgaaaccatcacatttttaaacaacctaacacaagagctagataaaaaaacaacagttggtggcgacacatcactacagctcgtccttatcatacgacgacggctccgcctcctccttgatgttggatgattccttctcttcaacctcggcctcctcgacctcctcttcctcttccacggccgcgtcggggctcaggtcaaggctcttctgcaccgacctgtagatgctggaggcgaagtccttgggatcaggaaggttgaagccgctctccatgagggccgtctggtacaccagcttcgccgtctggttcaagctctcgctcttgctgtcctgggcgaccttgtcacggagtt

SEQ ID NO: 17284 - DNA, 242 bp, Oryza sativa
  Clone ID: uC-osflcyp012b10b2
ggaacacccgggggagggaaaaagttttttttttttggaaggggtaaaaatttaatttcaggactttttttgaattttggcccttttccaaaaggggaaaaattttactgccaaccaagtccaaaggtggttactcccccgcaggggggtttaacaaaattaccaaacattttttaaaaactaaggggttttggaaaaacttgcccctttttaaaatagttaacccaaagccaaattggttt

SEQ ID NO: 17285 - DNA, 418 bp, Oryza sativa
  Clone ID: uC-osflcyp012b11b2
gacacataaaacacattaaggttttgatagataaaaagatctccagcaggagtgtgacaccacatagtctgtaaggaccgtctgggtttattgaccaacattacagataagcaagcgcacaggacacacgaacaaactcgaagcactcataactcgtaggaaaagcacacgacgatacgaactggaaatattcatggcgaacgaatactcaaaagacgataaggcgaagtaggcgatgattggggacgaggttggacgcgtcacttttcctcggattcaaaatccgcgctctggagccactccacgaatggtttggcattcttcaccacctgggactccttgccagcagcaacagattcattgtaccactgagttatcactttttcatccaggatgtccccatcatacagggccttga

SEQ ID NO: 17286 - DNA, 432 bp, Oryza sativa
  Clone ID: uC-osflcyp012b12b2
attccacgcgtactagatggtttttcattattggacaccttgtttttcagattatctatattgctaacacttggcgtcagtcttttgataggaacagaagagacagtatcctcatcggaatcttcggaaaattccatggtctcaatagcttccttatgagcacaaaccaaagcattgaaatcagtgccagcttggagaagatcatcatattttccagcttgggtgatatgaccatccttaagaaccagtatcaagtcagcagctggtagaaactcaatttgatgggttacataaattacggtcttgcttgctagtgcagtcaatatatattccctaaataattcactcccagtatgagcatcaaccgcactgaagggatcatcgagcaaataaatatcagcatcttggtatagtgctcttgcaagctgtact

SEQ ID NO: 17287 - DNA, 512 bp, Oryza sativa
  Clone ID: uC-osflcyp012c02b2
tagttgccgcctcctgctcgtcgcgctcgtgtcggccgcggccgtcgtggccggcgcgctactgccggggtgcgcggcggcggcggcggcgggggagaaggtgccactcgcgctctactacgagacgctgtgcccgtactgctcgcggttcatcgtcaaccacctcgccgggatcttcgaggacgggatcgtcgacgccgtcgacctccgcctcgtcccctacggcaacgcccacgtcgtcggcgccaacaacaccatctcttgccagcatggaagcgaggagtgcttcctgaacaccgtggaggcttgcgccatcgatgcatggccggatttgagagtgcatttccgcttcatctactgcgtggaggacctggtggtgaaccacaagcaacgggagtgggaatcctgcttcgggaagctcaacctcgatcccaagcctgtcaccgactgctacaagggcgaacgcggccaccagcttttgctcaagtatggaagacagactgacgctttgc

SEQ ID NO: 17288 - DNA, 492 bp, Oryza sativa
  Clone ID: uC-osflcyp012c03b2
tttggagaaagtcaaggttcgataaatattgcttcacttgtacaaagtacagataaaaatacattgatacatgacacggagagagccatgcacaccacttatttggacacacagagggcaaggctgcagagaaaatcaagcaacacaagctgaactcacggccccacctgtcagcctctcactggtcgaggccggagactcttgtgaaaaacagcaacaccacgcatgcagaagaagacaaattattacacacacaaatcgacgacacggcggccggcgacgtacggcgaggtcgtcgccgccgccggcgacgttgtgatgaggtcgatcagccgaaaaggtggtgcttcttctcgccggtggactcctcggcgctcttgtggtccttcttcttctcgtggtgctcgtggaaggcgtagccgccggcgccgaccgccgccgtggccgcgatctcctccgtgatcttgtgcctgtgcgcgttctccgggtcct

SEQ ID NO: 17289 - DNA, 340 bp, Oryza sativa
  Clone ID: uC-osflcyp012c04b2
cacagaaaattcacggatcccaaatgttctaaccgactgattgcaatatcatacatgcaaccaccccaattaagaatgcaaacccaccccatgccggatccctggaacaactccaccgaattgacccaggaactgcccctaatctaaccaaaccatgggctgatctgacatgaccaacacgacacgagcttatggaaagaataacaccagcaccaccttcttgttatatagggacttgacgcctccagacgactgctactggggaaaggccaaggggcacaccccacatctaggaaaggtggccctattgggcgacgaccaccggcttggtgggactccc

SEQ ID NO: 17290 - DNA, 521 bp, Oryza sativa
  Clone ID: uC-osflcyp012c06b2
tgttggccgcctcggcgttgcatgacggggcgggcggcggaggcggcaccaccttgttgccggcggcgggggacgacgacgacgacgtgatcacgaacctgggcagcggcaggctgctcggcggcggcgcgagcacgtgcagcaggtcctggacgaagttgcgggccacctcctgctccaggtcgtccagggcctccgccaccgccggcgccggcggcagcggcgttgcccgctccagcggcttcttcttctgtgttcctcccttcgtcgtctccgtcgacggcggcggcctcgacggcttcctcctcctgtccctctggcgcgtcgacggagtactagctctgccgctgcgcggcggctgctgcggcggaggcgggtacgggaaagtggcgtacttggtggcggcgggtgggagcggcaggagaggtggctggttggacggcaggagaggcagagaccgcgaccagtacagcggaggcctcgcgtacgggagcgcgggtagtgatgcatggcttcacgcg

SEQ ID NO: 17291 - DNA, 453 bp, Oryza sativa
  Clone ID: uC-osflcyp012c07b2
tttttttttttttttttttttttttttttttttttttttttttttttttttttttttttttttttttttttttttttttttttttttttttttttttttttttttttttttttttttttttttttttttttttttaaaaaaaaatttggtttttttttcccggaaaaaaggaaaaaaatattgccaattttaaaaggcgccaaattttaaaaaaaaaatggccataattttccaaaaagggttttaaaaaaccaaaaagggggggaaaaaacacaaaaaaaaccccttaggggggggaaatttaggggggggcgtttataaaaaacccccctttttgggtttttgcccccccgggggcaaaaaaaaaaaagaccccccccccttttaaaaaaaaaaaaaaggggggcggtttttttgaaaaaaacccgaccaaaaaaaaatgggcggggtttt

SEQ ID NO: 17292 - DNA, 296 bp, Oryza sativa
  Clone ID: uC-osflcyp012c08b2
attattatatttttttttttttttgtttttttttatttttaattatttttccaagaacaaaaaggacgggatcgtcgacaccgacgacctttgtctaaaaccctaagggaacccccaaggtgtcggcgccaacaaaaacaacttttggcaggatggaaacgaggagtgcttactgaacaacggggaggcttgcgccatcggggcaaggacagaattgagagggcaattccgcttcatctactgcgtggaggacctgttggtgaaccacaagcaacgggagggggaatcctggtggg

SEQ ID NO: 17293 - DNA, 449 bp, Oryza sativa
  Clone ID: uC-osflcyp012c10b2
gaagtgataatttaaatacttaatagtaatagactctttgatggagtattacaacatgcagcagtggcattaatacgccagtacattaattaagttacacatatgcaggctccattttggtttcttttaatttatcgtattacagaatttctgtagccttgcagatgatcacttggatatcatgtactagtaattaacaataggatgcatacaaaagatggcccaacgacaacagaagatgcgtgcatctgacattgtctggccttatttgttggtagtactccaattaattaacaagagatgatgcattcttgtgccttagtttcttcacatgcttggctttacgttgagcctattcgcaatctttacccccaacgactcaacacactgggagaggtagttgacccagatggcgcggagctcaggggagaccttggggtgcgcgagct

SEQ ID NO: 17294 - DNA, 285 bp, Oryza sativa
  Clone ID: uC-osflcyp012c11b2
tttttgggtggtggttgagaatgccatatattattatactggactgtacagttttttccattgaaaagagcatgagacaacagctgactcaaagaagctgctgtttgaaaaaaatttacgaaatatcatttaaccctgtacagtccgcgcttttaggaatttacggtgagcagcagctttcatataactttgtatttgtaaagatgcctttaccccggttacaatcggcattatatattatatggttcttgttttgctatcacgcatggtgtaaaactgtggagg

SEQ ID NO: 17295 - DNA, 464 bp, Oryza sativa
  Clone ID: uC-osflcyp012c12b2
accagggcacaaaagcataggatctatttattgatggacaatatatatagcagctgcaggctacagcgtaatgttgtacacagacacacagcaggcaatgagacaatctggatgggccacatggtttagatagatggacacccagattgagactgatcatcaagcactattatcagaacagaaatgacattctttccgctaatcgtcgataaattcatctattctatctaccagggaagcatgaatttgtttgcactcaaacaaacaaggcaaactatcataaacatcataatatacaacaactccaagcaaagccgtaacaacatgtgatgtgtcactctagataccttttttaactcccaagtcccagttcaaatgttcaatgctagactaattaacttttcctattactaacagggataacataaccgtttgccgtaacagccaataaaaacatttagcat

SEQ ID NO: 17296 - DNA, 418 bp, Oryza sativa
  Clone ID: uC-osflcyp012d01b2
ggggcttaatttaattttcttttgtccggaactagtgacagtgcattaggagttcattcaggaaaagacaaaacacattctgcagtatcatacctagatgcatccaacttccaattttttgagccagcaaagatagggcatgttctaattcaaaactgcaaacaaactatagccgacttaaccaaaaatagggcatgttttaattcaaaactgcaaacaaactgtagccgacttaaccaccaaacatatgagaggcagtaagggttgaagatccatggatctgttcaggcgatggtaacatcaactcttccggccacttggtccaaatcacgccttccctgggaggagatgagtttttcgcccttggggtcgacattgatgatgcccatcttctgcagctttttaaggatgttgcgtg

SEQ ID NO: 17297 - DNA, 394 bp, Oryza sativa
  Clone ID: uC-osflcyp012d02b2
gcaacgttataatattttagtaaaccaatttcaacccaaactgggaattggcagtttggggcattagatgatcacaaagcaaaagaaaggggtcccaggatacgattcgagaacctaaagagaccgcagcatggacctaccaaaacttttcaaaaacaggcttcatttggataagattcattttaagttctgaactacgactaccccatactgggagattttacaaaacatggaaggggacttggatcacataaacaaggttggccttgaagctttgaagggtggcttcagcttcctgggagggggcctgaccttcctgtacaccagggggaacttgatatctgacttggggaactgcttaaggttggcacgcttgcagagtttaaaggggaca

SEQ ID NO: 17298 - DNA, 395 bp, Oryza sativa
  Clone ID: uC-osflcyp012d03b2
ggccacaaagaagggtcacataaacaacacaggtcacagcagggaaagctacaagcaaaccctgcataatcgaaaagcaaatgtttttcaaaaccagacacacaaactggtagatagaagcccacacggacagatcataggatagcagcagtaatcaagcattgccaaggcaccaggcaagaaccctgaacctttttaggactcggcacccttataacccttggcaccatcggcgaactcggagccgacctcctcggagtccttttccagggcggggaggtcctcgggggccttggagaactcccccttctccatgcccttgccgacgtaccaatggaccaaggcgcccttggagtacatgagggccaacttgatgtccatgcgggagaacacct

SEQ ID NO: 17299 - DNA, 246 bp, Oryza sativa
  Clone ID: uC-osflcyp012d04b2
actatataaggagaagaaaaaaaaaaaacggaaaaaaaaagaacaaaaaaagaaaaaggaaaagggaaggtaaaaaaaaaagccaaggcaaaaaaacagaaacagatcccaggcccttggaacagggaaaaaggacaaaaggaaaatataaacaaaggtaaacctgtcacaaggaaagggaaaaggaaacccaacgcacaggtggacggggcggtacaaatcccaagcaaaggccaaggaccccca

SEQ ID NO: 17300 - DNA, 88 bp, Oryza sativa
  Clone ID: uC-osflcyp012d06b2
gaaaatgaatatatccattttatttatgggtttactgggggaaaaccctagccggtttttttctggggggctcaatccacctaagaaa

SEQ ID NO: 17301 - DNA, 399 bp, Oryza sativa
  Clone ID: uC-osflcyp012d07b2
ggcgacggttaaaatttttaggaaacccaatttaaccccaactggggaatggcacagtgggggctttagtggaccacaaagcaaaaaaaagggatcccaggatgcgatccaaaaacctaaagagcccggaatgggccccccccaaaacttttaaaaaacaggtttaatagggaaaagatatattttaggttgggaactacgactaccccattcggggagattttacaaaacatggggggggacttggatcacaaaaaccagtggggccttgacccttagaagggggcccacagcctccggggggggggcccgcccttcctgaccaccggggggaacttgaaatccgactgggggaactgtttaggggcgcccccttggaaaatttaaaggggacaggcc

SEQ ID NO: 17302 - DNA, 444 bp, Oryza sativa
  Clone ID: uC-osflcyp012d08b2
aaatctggaatgctacttcttttcactgaactcattttgtgcatttgtacaatggcgatgcaactgcatcctgaggggaaaaagatacatacagaaagggtgaaacagaaaaaaaggaaccccctttggtcttctaacttatggaacatctttcattcctgtatacaaagtgtgtttgggttttctacaatcttcttggagaatcaaatggtggtgctttcagttgagagatttcgagccatggatctggaacatggttgcttggtctttttgggtagagtgcattgttgatagggctgtagttagctgctccagctgaataggctggatgaggaggcgacggcatgcaactcccattcgactgccggtactgccgtaatgggctagagcaaggtgacacgggcagggacatgttcatacgcacattggatgggttgatggcag

SEQ ID NO: 17303 - DNA, 463 bp, Oryza sativa
  Clone ID: uC-osflcyp012d09b2
catgatcaaacgcagaaaggatagccttatcattgcaccgcacatagattacagccttacaccgtcccttagataggagtagtactaagatgataacaaagtcataacccattgcctcaggggagctctctaaattctcatctgaagctcatacttttataggtagcagcatcaaaacaatgctcagtttgcacggcctctgatcacgtcgaggccaacctcagttggatcggtcgcctggagctccacctgaatgccgtcgagctccctcttgaacctgtccttggagctcgcgtagatcatcttgcttctcacgcgcgatgtatcaggagaccatgcaatgaagaatatcttgctcttctggcagttctcctcggtcacgaaatcgtagtcgaatatggcgtatctgcattcgttggcagggaggctagcggcaaaatcgtcgtagttcagtacgggctcg

SEQ ID NO: 17304 - DNA, 204 bp, Oryza sativa
  Clone ID: uC-osflcyp012d10b2
atcaatcgctttatggttttttttattatttttccgtttattaattacagtcttacactttaccttatataggagtagttctaatttgaaaactgaagaaacaaccaatggcgctgaggggcaagcaatcaaaatgtctcatcgggaagctaaattacttaccataagaatagccagcattataaaacaattgactcagctttt

SEQ ID NO: 17305 - DNA, 446 bp, Oryza sativa
  Clone ID: uC-osflcyp012d11b2
atggccatatgaagcagtaacttgactaaaactgttcgacaacattcaagacaaacaaaaaacaaataaaattcagtcctattagaacggaaaatcaaatgtagagaaacaaaaaataatgaccaaaactatgagacaacactccaactaatctctgagcaacaattaagtatggtacaaaacaggcgtcagttaaaagttaacaaaatctagtgaggcatcataacactgtagtccgtaatcacttggaagcccatatacaaaaaagatgcctctgcttcttgtctaagcacatgagggcgttggctttaaggtcctggagaacagcactgacaaatagagaactcattccctcttttggggtttctgaatcttgacataaggcaagaacccgaaaaggtgggtaattttgggctcccacccacgctgttgagctcggcaaaaca

SEQ ID NO: 17306 - DNA, 399 bp, Oryza sativa
  Clone ID: uC-osflcyp012d12b2
aaacaaaacccccggccggggggggccgaccttttttcctttttttttgggggcccccccagaaattcccgcccccattgcaggggggaaaaggggggccaaaaagaatgggggggtttttttaacagggggccccccagcagttaaaggggggggggggggaaaaaaaaaagggggggtggggtttaggggggggggttgggcccggggacaatcttgggggtcccgccggggatcttggcccggccctggggggtggaaacccgggggggggtcttccggggcccgagggggttggcgggggggctgtttatggggcccatccgggggggggggctgttggggagggaccccgggggggggggggggatctggcttttgggggaaaagggggggggc

SEQ ID NO: 17307 - DNA, 345 bp, Oryza sativa
  Clone ID: uC-osflcyp012e02b2
aaaaaaaattgcccacattttattgggggcacaacccggtttggaaccaaagtagttcctgccaaattacaggaaaacatgggtttttttttttggcccgggggctcctaaaataaaaaaaaccggacaatggaattcgcattttttacatgaggacccccctaagggaaggcccttttgggtctactttttgaacttaaatgccataaggggggggggggggcctaccattttggggggaaaaaatttttttttttaaacccaccaggaaggctcgaaaaggatgttttttttggcaggtaccaaaaagggggaaaaaacttggttaaaaaatttcaatttttt

SEQ ID NO: 17308 - DNA, 442 bp, Oryza sativa
  Clone ID: uC-osflcyp012e03b2
gaacgtaaaaaatgctggtttaagtgtgtatttatatggagggaaaaacttttacaagatacatctgggtacatatgcaaacacacaagtcaacaactgcaacgacacgctcgttggatggacccgagcaggccaaagcctaactaggcacggtgcgcgagcagagaaacggcggcgattacagcggcagagaacaaggccgcctttgcctccttgggccggacagcagccgacggcgatggggccggagctataacggtggcggcggcggagtcgcttcctgtcccagcaggcgatgccgaaggcgaccaccccccgaagaacggagccccagagaatggagcgggagcaggagcaccaccagtcacgcccggaatagaaaggtggcacttgctgaacgggggcgttttgaccttgcacgcggcgggcagctggagcgcct

SEQ ID NO: 17309 - DNA, 470 bp, Oryza sativa
  Clone ID: uC-osflcyp012e04b2
gacacgtgaaacacattaaggtttgataaataaaaagatctccagctggagtgtgacaccacatagtctctgaggactgtctgggactctgggtttatttattgaccaacattacagataagaaagcgcacagcacaaacaaactcgaagcactcatgacgcgaactggaaatactcatgacgaacgaaatactgaaaagacgataaggcgaagtaggcgatgattgggaggagattcggcgcatcactcttcctcagattcagaatccgcgctctggagccactccacgaacggcttggcattcttcaccacctgggactccttgccaccagcaacagattcattataccactgagttatcacttcttcatccaggacgtccccatcatacagggccttgagaacaatcggcaccttcttcacagcttcggggcttgacttggcgccgaaggccaccagcgcttgcagc

SEQ ID NO: 17310 - DNA, 311 bp, Oryza sativa
  Clone ID: uC-osflcyp012e05b2
ggattgggtttttttttttgaaacaaaatgccccccaattttaaatctggagggggacaatttggctttaagggccatattcgtgtaggaaaataaaccccccctttgagaaaaatccgttttttagggggatttttgaggaccgggggttaagaccacaggggggccccggggggcaaccatgttgtgggcattgtcggggacggtgtaaaagcggaggggggggtggtgcccccctgggtgctctgggaggaggaaaggaatttagatgggggtggggaaaaaggttggtttttggggggacacccccc

SEQ ID NO: 17311 - DNA, 427 bp, Oryza sativa
  Clone ID: uC-osflcyp012e06b2
gaatcaaacagaagtatttgcagctggattcagagggtgaactttgaagtacgtgaccaatttcacccaagagttttgacactcagattccgggacatgttttcccatcaatatgcccgcaaatgaccaaaaagaaaccgagacagattgactggtaacagaaaccctcatgtagtctaaaacaggctagaggcaaccaaagttaagccgattacaagttttgttcaatgagctgctgatatcaaaagctagcatcctaaaccaaaccagaaaaagcaggcgacctttaaggcttgaggaccagggacagcccaaccttggagctcttgtcgatggccttggtatcaacctcagtggagatggtgacgagcgacttgggcctgaactcgtgctggatgagcgcactggccatgccaaggttgttgaa

SEQ ID NO: 17312 - DNA, 174 bp, Oryza sativa
  Clone ID: uC-osflcyp012e07b2
gggaaaaaaaaaaaaattttttttttttttggggaaaaaaaaaaaaattttcttttttaaaaaaaaaattgggaaaaaaaaaaaaaattttttttttggaaaaaaaaccttttttggggtttataaaaaaaaaaaatttatgggggggaaaaaaaaatttttttataaaacaaa

SEQ ID NO: 17313 - DNA, 383 bp, Oryza sativa
  Clone ID: uC-osflcyp012e08b2
atcagctaaaatgttctatgaatctttaatcacctcgagcatcatgtcagtttacttgctattagtataaaatgatcactacttaacaggtgtaattgcatttgaatcatggagcacgctccagtatcatggatcaaaatgaccaataaatctccacaagatcatgtgtctctcgggcatgagcaaatgtgcatctaagacaatatagaagctgtagagaaatatctcaaccactgcttattcttctgtagttggatgctggcaatcactacactcgtggaaggcccgaagctcatgtaacactgtcacaagaccaaatcccttctccatcccctaaaactgggcaaagaagttctggaaccacgcggcgaccgtggcgagcg

SEQ ID NO: 17314 - DNA, 409 bp, Oryza sativa
  Clone ID: uC-osflcyp012e10b2
gaaactataacattacaaaatcattttttcgagataatacaagagttccatgcagcttatactctcaacaagctctatatagttctatgctgtacattcaaaagttagatgacacacaagtccatcatatacctcaatttacagtagtgtagttttttttttgtgtgtgtgtctaaattaactctaatatttcaccaaaccatgttttgcctgtctgatactctgatcttgaactttggtaccttcccaattcacagctagcttaacaaaaatttgcattcgcaggagtttccagtagagaactctagccacatcactaacagcactactcgggtttgggtattatgcaaattccttgctggggacatcatcttattcaaactcaatctgatacccaatcacatttaga

SEQ ID NO: 17315 - DNA, 459 bp, Oryza sativa
  Clone ID: uC-osflcyp012e11b2
agactcaaaaacattcatttctcatcagaaagcaaatatgcagctggcaagtaatcccaacaaactattcagaatatctgccattgacacaggctaggatgttcacgatccacaactagatagctgtttacttgttgtctaaataaacgggcagcaaaataagtgataatctctactcggcagcagcgacctcctgcccggccatggcctcatcttctgcaggcctatcaagcttcgtaccgatgtcctccttggcatagtcaccatgcacctccatgagcttccccaggtcaaatttcggggcctttagaatcttcactttgcggacaaacacattctgaagggggaaaatactggatgtcgccttctcaatttccttcccaataacttcaggaatgaactttgaaactagctctttcaaatcacagcttgaagcctggttggccatgatttcaacca

SEQ ID NO: 17316 - DNA, 374 bp, Oryza sativa
  Clone ID: uC-osflcyp012e12b2
atggtgccagtatcacatatggttccttcatattgaaagagacagtattacagatgcggttacacaacaacctgaaaaaaaaaaaagaacaagacaaactgatagagcaaactgcagagctctcttgcagtttcagctgactcaaaaaaatgaaaaaaggataaaacgccgaagatatctgaacactaaaactctggctgctacaccgatatcactagcaacttcgcaagtcgatttcaaccctttcatcatcttcccatcttcttcttcttccatggagcaaccagtcactactgatcaaagacacatcaggtaggcggtggcggcgccgacaacggccggcaatggaggtagatagcgagagagaaaccccc

SEQ ID NO: 17317 - DNA, 358 bp, Oryza sativa
  Clone ID: uC-osflcyp012f01b2
aaaaaacattgttataatggattgggggagtccccaggttacaaaaaaaagtttaaagggttttccaaagggggaaatgatacaaatggcccacccccgttggacgattttggaaacaaaatttttagggggaacaacaagggggtttaaaaatttatgggaccccaaattccacaaggaacgggaacaaaaataagggggaaccccaccttttaagtttgccccagggacatttttcgccaaatgcgatgcaaaagtttaggcctggtttttttggggccctggggggcgcccccggaaataattttccatgggccccaagccttcacgcaaaacgattttgggctccaacccaaaa

SEQ ID NO: 17318 - DNA, 369 bp, Oryza sativa
  Clone ID: uC-osflcyp012f02b2
actagccatccacattccttggattatttttgcacaaccaactttgcaaagggggatttactgggggggaatggggcccgtcctgtagggagatggcccattcgacatttacagaggaagcggcgaatgaaaattgcagtgatcacgggcgatcaccaaaagaacttatacaattttttttttcccctaggattggatagttagagcttgttaggatttttgaagggtcgaaaagatacattttcatttagctttaatcgctggtggtattagagtcttgactggcttggggctgcgctgcagggaggtaggaccaggcaatgggtggggtgccaagggtaactggaagcccaaccgagccccaaaacc

SEQ ID NO: 17319 - DNA, 439 bp, Oryza sativa
  Clone ID: uC-osflcyp012f03b2
agcaatgtatactcgcattccacaacagtcgaagggcaataataagtcttaacatccaaatttaaaccgaacagaaaatagagttttaaacgactgacatagtgcacaaagcgagcagatattaacggtcaatgcaacaactgaaatgaccgtcgacaaaacttaacgagtactaaaagagctagatatctcaaatgcagatatggaaagcaccacttgaacgaggctcatttcttcttggcggcagccttggtcaccttggcaccggttgggtccttcttctccacgttcttgatgacgccaacagccaccgtttgcctcatgtcccgcaccggcaaaacgaccaagaggagggtactcagagaaggtctccacaaccatgggcttggtgggaatcatcttaaccataccagcatcaccgttcttgaggaacttgggc

SEQ ID NO: 17320 - DNA, 128 bp, Oryza sativa
  Clone ID: uC-osflcyp012f04b2
aagcacaaccgaacaagcactgtttatttcatgaaattcttatggaagagattgtatcatgtattacaagtttacaacagcaaccacagccagataggtagaattaagcgcctgaacggaacatatgg

SEQ ID NO: 17321 - DNA, 385 bp, Oryza sativa
  Clone ID: uC-osflcyp012f06b2
gcttccattcacatattatgatgataatcccctttttacatgagcagaatgccctagtgcatgagagggcaacaccactacataaaagcagccaaaagtaactgggacatgggaacacaaaaacatcaacggactacaagcaatcacgggagatcttataatggtttaagaagacagcaaatctggagagccagaaacccacaggtttttcacgggtgcttattgcatctttctggcatgggggaaaccacccggtgccctggtgcatgccctaaacaggtggccaattctgctccacgatctcacgaaccttggggggggaccctcgcttggtctcactaaacagactggcaacttatgagtttgccggaaagttggggtttgg

SEQ ID NO: 17322 - DNA, 119 bp, Oryza sativa
  Clone ID: uC-osflcyp012f07b2
tttgggggttttttttttttttggttttttctttttttttttttttaacactgttttatttataaaaacttagctaaaaaggaaaaggcgggccccaggggggataacacgggggggga

SEQ ID NO: 17323 - DNA, 427 bp, Oryza sativa
  Clone ID: uC-osflcyp012f08b2
ggaaacttggtttattatactctcacagaagtagacaaactgcataccattctgctgtcccgtaacataattattacgttggtacaagaaaccaatgcttttaaacatagaagcgctacaaacacaaccgcgatctgctacgtgtatcgtatgctgatcgcggattgttatggaactggagatacagattacagaccggctacaataacacttaagatgcccccgtgcccacatcaactctgcaccttacgggaggaaacgacgcctggtgccgcagaagcgtgcctatctgccatggatattaccttcagcaatttgaccgggcacttatctatgcaaatatgcaccaggatttacccatgcatctatcgactacttaggctcatcttgatttattaatctccaaataaagtagtgagcagcaggt

SEQ ID NO: 17324 - DNA, 418 bp, Oryza sativa
  Clone ID: uC-osflcyp012f09b2
atgctagttcactccaaatcgcccacaactaagaggcgatataagcacgctgttatagtctaacagaaatttactccaaccagattcggggtagaagcatagcaaaacagagcagctaataacagttctacaacgagaagcagtagcagtagcttcagtgaaacatcatttcagctcattacatcggcagttcgccgctgtccgcgatgacaactttgctcttcggtgacccactctgctggccctcagcttcaatcttgtaaaccacatccattccagacagcaccttaccgaacacgacgtgcttcccgtccaaccagctggtggttacagtggtgatgaaaaactgggacccgtttgtgtctctcccagcattggccatggacaggaggcctggtccggggtgcttgatcttgaa

SEQ ID NO: 17325 - DNA, 474 bp, Oryza sativa
  Clone ID: uC-osflcyp012f10b2
attgcaaaaacatcatcttcttcttcatcttcttagtgtacacaacaccaactcgatcatcatctcgtcgcactaaacccatcttccccaacccaaagacaacgaactcgctggccacaaatccatccaaccacaattaaccactgctaagctacggtcccccacttcacttgccggggacgaagttggtggcgtacgcccaggcgttgttgttgacggggtcggcgaggtggtcggcgaggttctcgagggggcccttgccggtgacgatggcctggacgaagaagccgaacatggagaacatggcgaggcggccgttcttgatctccttcaccttgagctccgcgaacgcctcggggtcatcggcgaggccgagcgggtcgaaagcgccgccggggtagagcgggtcgacgacctcgccgagcggcccgccggcgatgcggtacccctcgacggcgcccatgagcaccacct

SEQ ID NO: 17326 - DNA, 404 bp, Oryza sativa
  Clone ID: uC-osflcyp012f11b2
acaccaatcgaatcccagtgactttaattatcaccaaaatcaacatgaactgatcagttcttgtccagtaccgtttggacatgtatagaacaaccaatttgtcagtaacaagaaaaggtctacaaattcacggtttagaatttttttttcaccgctgcattcttatctacacctatctctgcagaacctgcaggcaatttgtacatatgtacttattataaatggaactcaaaatggttgagttcaacgtgcaaacaacgaatttttcatatcgcactaactaatgcacagatcaccacggagatgtgcgatcgccaactaaaacgtccccaagcaagcgtcgctgtacacggccactccatttgccaccaaagcaagaacaatcatgaacaccgcgagatact

SEQ ID NO: 17327 - DNA, 300 bp, Oryza sativa
  Clone ID: uC-osflcyp012g02b2
gagcgggcaacttagctttttttaggcgaaagccaaaggggcttaatccaaggccaggccagagcaccgactcaaaacctggcacaaaaagtttcaattggacaccattagacccgattggcaaaccgccgcgggtttttttgggaaacggaaaaggcccccttaacccaacacaaggggttgaaaaaagcttgccctaaccaccgggaggcgctgctgccagggtcgagttaccctctggcaaaaaggccataccccccgagggagaatcaacatacccttgtgagaggacgcaccggg

SEQ ID NO: 17328 - DNA, 394 bp, Oryza sativa
  Clone ID: uC-osflcyp012g03b2
acacaaattccaagttacaagaatacaaagatgtcaggtttacagtcccaacacatcacacctacattaaggtaaacaatttgtttgcagcagagtacctggaacggactcgccagcagttggcaccatccgttgtttcgccacatctatctggagctgctcttcttgttgcaacaatgcagtgacggtaattcgtaagtggcatcattgaacaagcgtaacagcttgtcatatgtactccctccgtccaaaaaaagacaaatcctggtttccgtgtccaacgtttgaccgtccatcgttaaagttggacacgaaaacccagggtttgccttttttttttggaccgagggagtttccaactagttgggacggcttaacgccatgaacttgcact

SEQ ID NO: 17329 - DNA, 448 bp, Oryza sativa
  Clone ID: uC-osflcyp012g04b2
gaaacaagcattaacaccacaatggattatcatactgttccttattggctgccagcaaaatctctttagcaacaaacgtgtaaatgctccccaaaatacaccatcaccatgactccatgcatagccacaatatcacaagtatcgctacagccagcggcgccatgttccttttctgcgaggacgcgcgacatacacgtgattctgaagctctactgacctagacacagggggaagttcatgaccaaattggttggttcattcattccattgctactgcgtgcttaatttgatgaatacacagactcgacttattttctttctttagctgcatgatcccatggatggaagaaacgaaacctactactgcccttcacaccgtctcctccattcaagctttttccttaagcagcttttgatcaaagtgccacaccccatgcccctttcccac

SEQ ID NO: 17330 - DNA, 96 bp, Oryza sativa
  Clone ID: uC-osflcyp012g05b2
caaaaggaagggggttaattaaacttcaaaacacaggggtttaaaaaaaggtttttctcatggcggcaaaccaagtttacaccaaccccctttggg

SEQ ID NO: 17331 - DNA, 368 bp, Oryza sativa
  Clone ID: uC-osflcyp012g06b2
gggaaaaaaaaagaaaaaattaaaaaaaaaaaaaaaaaaaccccaaccccgggttttaaaaaaaaaaaccggggggggggggaaattttttaagggggaaaaaaactggggggggtttacctttccaaccaaaaaaaagggggcccccttttttaaaacgccccccaaagggaaagggaaccctttttgcccttttggggggccaatttgggcccaaaggttcccccccataaaaggccccccctttttttggcggccccaaaaaaaaaaaaaaccccggggggggtaaccccaaaattttctaagggccccaaggcccccttttaaaaagccgaaaaattggaaaaaaaaatttgccccggggggcc

SEQ ID NO: 17332 - DNA, 396 bp, Oryza sativa
  unsure (1)..(396): unsure at all n locations
  Clone ID: uC-osflcyp012g07b2
atcatctcaattctcacatgatccagataaaatatttcttcttaaaatggtgctgccaaatcatccttaaaaatcaacttctaactatgaacctggacatagattatgtcaatgttcgcagtgagaagttgatttttctgagacggatgatacatgtcaaaatatcagaatgagcatatttctccctttctttgcaaaatctgctctcattcatgatatcttagcacaggtacagactccaggattgcaggaatccagacgagaagatgagaagaaccagcgacaagtttctcaacgacaccaaaaaaaattagcagtaatatgggaacatgtatatatattcctgngtgcgcgtgcaagtggcactgtggcaggttcttctcatgagtgctcctg

SEQ ID NO: 17333 - DNA, 477 bp, Oryza sativa
  unsure (1)..(477): unsure at all n locations
  Clone ID: uC-osflcyp012g08b2
atactcaagaccgaaacccaacatattttgagccaagcgcacatgagtaaagctgcaaataagaatcccattcaaagtgttccgctgttaggacaaagctttcatgataatacagacccggccgtcccatatgtgtctacaagacgaactgatacaaaacacttcaaaaaaacaaacatcctcagattagaacacaaatatcagacacatcacatcctgtcctcccttctccggggagcacaagtgacgatctcatcgaccctgagaatcatctccgctgccttggtngcagccataagaacagcttgcttcgccttaaacgactctgatatccccagcttttccatgtctccaacgccgccagaaatgacatcaattccagcagtgctctgctctttgtgatgctctgctctgagctgagagatcagatcagcgctatccagaccagcattgtcagcgatgatggttggaatggac

SEQ ID NO: 17334 - DNA, 345 bp, Oryza sativa
  Clone ID: uC-osflcyp012g10b2
actgtaaaacaaatgagtgattgagtgaagagcgataggagattcattttacatcgagagagggcgcacaaaatcagcaacttcctcagggcacacatgttgtctccattcttttgatagtaaccagccttagtacacactttggtgcgggaataaaatcagcttccacctcacgctccagaatattcatgccagcttctttttcttccgatgtctccttttgcgacgtggtttatgagcatcagaatttgaactcaggttgctgttatgatctccaggctgatttgctgctctcctatttttgaaagtgccaccacttgtgctatttgaagtattgcttgagct

SEQ ID NO: 17335 - DNA, 369 bp, Oryza sativa
  Clone ID: uC-osflcyp012g11b2
caaaaaaaaaaaattttttttaaaaaaaaaggggggaaaaaattttccccccccccctttggaaaaaaaacctaatttttcccgggggaaaagggaaaaaaggggggaaaaaaaaaaatttttgggaaaaaaacccccggggaacggggttcccaaggggggggccccccccaaaataaaataaattgggggcgggaaccccttgggggggtttgggaaaaatttttttggggtaacaaaaaaaaggggttttaggggggtttcttccggtttttggggggcccctccctttacaaggaaaaggccccccacatatgggaaaaaagttcttagggggggtttggaattccttttcccccaaaaaggaat

SEQ ID NO: 17336 - DNA, 336 bp, Oryza sativa
  Clone ID: uC-osflcyp012g12b2
gaatgatgcaaccatgtaataactatttcacatctaatcaaatcatacatgggcgacaatgagcgtcttaaccacgacccaatgtagcggcatggcaaaggaagcacacaagtacagagacctgaacaatccaccagctcctgatgcttccatttcaccgatgacagaaagtatcaagctgccgctacttcttttaaattatacgcccataatggctacaatatgtagtgatgtcatgcccgggtgtcctgtgaagtaggaacttcagcactgcacatagggcataccttatttaattgcagccattggtttatgcattcagaatggtatgaatgc

SEQ ID NO: 17337 - DNA, 291 bp, Oryza sativa
  Clone ID: uC-osflcyp012h01b2
atggaaggaattttatttaggggccaggcgggaacatgacatacatgaaaccctgagggaacttgctagttagctaccaacaaattaaggacttgcattcaagctaggtaattaggacatggcatatgtgggggccctggaagctcgatgatcaggggaagaattggatggggaaaagttttttttaattgcaattgcaaaaagagcagccccagctgggcccccacttgcaggggtttcaacccaaatttcctttttccgcccccatttttgaaccttcggaaacatcac

SEQ ID NO: 17338 - DNA, 167 bp, Oryza sativa
  Clone ID: uC-osflcyp012h02b2
aaaattgaccttttttttttttttgtagtaaaaagagtttgttttttttttttaaaggcaggcccttttgccggggggggttatgggcacaaaaaaaatgggggatgaacccttgccgtttagacccgacccgcccctggaaatccgctcaatcatcatcatccagg

SEQ ID NO: 17339 - DNA, 385 bp, Oryza sativa
  Clone ID: uC-osflcyp012h03b2
ataggcttaataacgataatggttattatatctgaaactccattaatccgaatatacatacactggttcttgggtatacaacaccctatattacaaaaaggacccaagtttacaacaaacaaccaggatttatactatggactggagaggagatagggcggcacataacaggatatgctattcgtaagcagctttattgggaggctctatggatcatttacatatgtttattgcacaatacttgttagaggaagaagggaaagcccttttgggtttggggcttggagcagtctgaattaggccatccaatctgcctctgttgattgggatacacaaccaacttgccgcgcagagcattattttcgactattactggtgacccatg

SEQ ID NO: 17340 - DNA, 378 bp, Oryza sativa
  Clone ID: uC-osflcyp012h06b2
aattaattaaaaaaaaaaaaaaattaaataaaaaaaaaaaaaaaaaaaataaaaaaaaaaaaaaaaaaaaaaaaataaaaggaaaaaaaaaaaccataaggaatgttgaaaaaaaaaaaaatgtgagaaaaaaaaaaatttggaaaaaaaaggctaagaaaattaaaaaatcaaacaagaagggaagaaaaaggaatttaaaaaaacaaccattttaataaaaaatataaaagtgcaaaaaaagggaaaataaaaatagggcaaaaaaaaattagggaaaaaaaaaaagaaaagggataattaaaaattggaaaaaaatgataaaactgtaaaaaagaaaaactttttgaaaaaaacaccccaaaaggaaaaccaaaa

SEQ ID NO: 17341 - DNA, 483 bp, Oryza sativa
  Clone ID: uC-osflcyp012h07b2
gacaaaacaaaattgaactattatatcatctagtagtaaaaagagtttgtatatagtatctcaatgcaagcccatctgccgggggtggttaatggacacaagatagatgggggatgaactctagcgattagcaccgcaccgacactggaaatccgctcaatcatcatcatccaggtaaattattgttgtggcctagcacattataaatagtatataataaatatatatattggagattctctgttaatcacacggtgtatgactgctggatggtctcaagatccaagcccttctgcttcaccaccgactccatccgccccttcagggtggtcagctctctcaaccttgcgatttcggctctcctacgggcctcttctgcaagctggttgagatcgttgtagcttgtcatgtcgcggaagacaaccgcggtggcggctggctggagcccatgaatggtcctctgagcagtcgcccacttgagct

SEQ ID NO: 17342 - DNA, 356 bp, Oryza sativa
  Clone ID: uC-osflcyp012h08b2
gggggggaaaaaaaatgggttaaaggactgacccgaaacttgtttttccaggtggccacaactttaaataaaaaccctttagggggggtaacattgtgaaaaaaatttggccccccgaaaaaaagagttatttccccacaagggattgttgcatagggcctttttgataccaagggggggccccaaaaaggggcccaatttgcctttgccccctcggaaaaaaaactttgacgaaaggggccccctgggcccctttgggtgtaccttggccaaaaaaatcaaacccaccccgtcaggcaaaaaaagcccctgcccccgggcgggagaaagaatccccccggggggggggccatttt

SEQ ID NO: 17343 - DNA, 492 bp, Oryza sativa
  Clone ID: uC-osflcyp012h09b2
gagacaaaagaaatcaatgatgataaaagaaaatgagcatacatggacacttcatatcagactcgggaaagataaaatcataagaaaactttgtatagatgacattcaaagcaaggccataaacctgagctttttggaaattggataccattgatctatgcagtctggaccactctttaacatcaaaagtctggtaagataccactgatctaggaagctttaaacacccattaacatcaaaatatcttgaaggagcctgtttactggggtggcaggctgctgctgacaccacccaaccctgctttctgccccagttctgagagttgctgaataaactccaccccattaagaatttcagttgctccatatatgacttgcttggtagtctgtgaacgttgcgttagctctgtcaagctcctgtattcaatgtaatttccaccaccaatcatgaaaacaatggcctctctgagggtcctctgaactgtccagcag

SEQ ID NO: 17344 - DNA, 485 bp, Oryza sativa
  Clone ID: uC-osflcyp012h10b2
gacctgaatcatgcttgctttgcagcatgcatgcctgccgtaaagtctaagcttcacatggttattattagttaattaatagtagaaataatatagtcatttctgctacctactcccactttctgagagaatacctgttgataaattaaacttcctgtgggcagcagcagcagctagtgttcgtccagtccaggttcagccatggcgcccacctctcgctctcccgccgccctcttcctgctgctcgcgctcgcctgcgccgcgccgccgctcctgcgggcggcggacacgcacctccacttcttcatgcacgacgtcgtctccggcagcggccagacggcggtgcaggtcatcaagggcccgacgtcggccaacggtggcgtcagcaccggcttcggagacaccaccgtcgtcgacgacgcgctcacggagacctcgtcggcgacgtccccggaggtggggcgcgcgcaggggttctacatgat

SEQ ID NO: 17345 - DNA, 361 bp, Oryza sativa
  Clone ID: uC-osflcyp012h11b2
tttttttttttttttttttttttttttttttttttttttttttttttttttttttttttttttttttttttttttttttttttttttttattttttttttattatatttattttttttatttaattatattttttgagagaaaaccaaaaaaaaaaaaaaaaaaaaaattttttggagttgtgggaaatgttaaaactaaaaaaaaaaaaaaaaaaaaaaaaaaaaaacaccaaccagaaaaaaaaaaaaaaaagattgtgatagggagaaccgtgctttcaaaactaaaaaaaaaggaaacgcaacaacacttgttaataaaaaaaaaaaacccctgctttggccaaaccgcgggggagg

SEQ ID NO: 17346 - DNA, 486 bp, Oryza sativa
  Clone ID: uC-osflcyp012h12b2
attctcgagcaaaaaaacgatttcaatgctatagacacaactttacgaagtagaggcttcgttttacgacaaaccacgaacttggatattaaagatgccacaaagaaggttcacataaacaacacaggtcacagcagcgaaagctacaagcaaaccctgcataatcgaaaagcaaatgtttttcaaaaccagacacacaaactgatagatagaagcccacacggacagatcataggatagcagcagtaatcaagcattgccaaggcaccaggcaagaaccctgaacctctctagtactcgtcaccctcatcaccctcgtcaccatcgtcgaactcggagccgacctcctcgtagtccttctccagcgcggcgaggtcctcgcgggcctcggagaactccccctcctccatgccctcgccgacgtaccagtggacgaaggcgcgcttggagtacatgaggtcgaacttgatgtcgatgcgggagaac

SEQ ID NO: 17347 - DNA, 350 bp, Oryza sativa
  Clone ID: uC-osflcyp013a02b2
ctatggctgctactattgagatatggtgtgactgtggtgccggactactagctactgctctgccatttctctcttttgaggtggttttccggacgaactgcttgctgctactgctgttgcggctgaggcttctgcgccatggctgtgctcttgctgttgctactactactgcaactgcttgctgcctgtgttgatctgcacgaccaaaccgaggctaatatatgtgtgaatttttaatgaaagctaagtgactcaccagctcgcatgccggttggataagggcttgctgccacctcaacaaagctggttcggtgggataatctaaagctatatttactaatttcccaatc

SEQ ID NO: 17348 - DNA, 435 bp, Oryza sativa
  Clone ID: uC-osflcyp013a04b2
ggtcgaaatattttcgtaagcataaagaggaataataatcatgagatctttgcatcttacatcaaatcaaaatagcattctggagatcttgaaaggtctgcaaaaacaatcccaggaaacataactagtctaaagacaactcatctcacaaggtgagtgtttatctttaggttttcttttgttgtgtctgacattctagactagcttctgatgcttttcagtcttcacgtttctccttttctaacttctgaaaatcacaaatgaacatgtcagcatgcgactcagaagctccacaacaacgtattgcaagataaagagggaaaccgcctcaaactgtagataacaagaagctgataccatatagttcatttcaaaacatatttcaaccacacaccatgattaattgaagcagtgatttaaaccacaaaatcatta

SEQ ID NO: 17349 - DNA, 436 bp, Oryza sativa
  Clone ID: uC-osflcyp013a05b2
acacccatgcataataatacatcgtatatacgtacgtacatacatacccctctcgatcacacgcaccatcgatcgtacaaagttgcgtacatacatacgtacacacatatacgcatacgcacgtacatacatacataattaaaaactcgtaattaattaaatacgtagttgatggcatctctaatggaacttgaggctggtgaggatgttgttgtggacgggatcagcgaggtgatcaagcaggttctgcacggggccaaccccggtgaagagcgcctggacggagaagccgaggaaggcgagcatggcgagcctgccattcttgatctccttgagcttgagctccttcatctccgcctcgctcttggtcccgaagccgagcgggttgaagagcgggccgccggggtaggccggctcgccggagccggcgaggtac

SEQ ID NO: 17350 - DNA, 227 bp, Oryza sativa
  Clone ID: uC-osflcyp013a06b2
aaaaaaaaaatttaatataataaatttaaaaaaaaaaataaaaaaaataaaaaaaaaaaaaaaaaaaaaaaaaaaaaaaaaaaaaaaaaaaaaaaaaaaaaaaaaagaaaaaaaaaaaaggaaagagaaattaataaaagaagaaaaaaaaattttaaaaaaaaagaataaaataaaaaaaaaataatttattttaaaaaagactcaaaaaaataaaaaaaaaatac

SEQ ID NO: 17351 - DNA, 382 bp, Oryza sativa
  Clone ID: uC-osflcyp013a07b2
gaataaaaaggaccttttttctgaacacaagctagtagggttcatcatcaacacaagctagtagggttcaacatcacaacttaacgcagcaggcaaaattgtttgttcctcacaccaagatctccaggtgtggctccttgtctcctgcggatttattttcgggtgtttttctatttatgtggggaacaaagggaggcctgattgctcccagcgagaactctcgaatgtcggtgcaggcctgatcacaacattaggggaggggaaggcagaggagccccgggatgttggtgccatgggtgaaaacttgaaatggtgcgccttttctcctagttctgctccaggttgcgggtgaccacctgggaggatgcctccatggttgaag

SEQ ID NO: 17352 - DNA, 447 bp, Oryza sativa
  Clone ID: uC-osflcyp013a08b2
ggccacgaggaggcggaggcggtcctccttcccgacgaacaccgacggcaggcgctggagcacggcgcggtacgccttggtgggccgcgcgacctcgaactccgaccggaagtcgacgtcgacgaggatgcgctcgcgctcggcgcggtcggaggcgggagggaggaggacgtcgaggtaggcgtgctcgccttttgggtgggaggaggacttgtcccagcgggagatgcagaccgcggcgtcgtgccccgccgcgcggagcgagtcggcgaggaggcggaggaggtcgcgcttgcgcgcccccgcggcgcggtggcgctcgacgagcgtggagacgtcggcgaggaggttgcgttcccggaggctggcgcagtggacgaggccctgaggagaaatgcgagaaacggtcagcaccggcgttcgtcgccttctcgccgccggcaacgc

SEQ ID NO: 17353 - DNA, 446 bp, Oryza sativa
  Clone ID: uC-osflcyp013a09b2
aacctgtccgtcaatggggaattggttcaggatcgtgttcttggctgccagaagctccggtcgtactacgtgagccgctgcctccgctgcggccagcagtcagaggcatggaggggcgcctggaagcactactgccgtgaagggagtgaatcaagcaacgcacaaaatataccaaggaagcttttaaggcagccctcaatgaatgatgcaaaaattgaagatgacccatgtaaaaacatgggaattcatggacataatcaggatgataatgattctttggaagggcaggatcatctactagctgtgccaggtgtgattctcctatgctgtggtctgatgataccgtgctttcatgctgagaaaaaggaagtcagcaggcataacactacatccattcagcgcaatgcagtcgaatcgattgcatccttggatgtaagcacgtcatc

SEQ ID NO: 17354 - DNA, 425 bp, Oryza sativa
  Clone ID: uC-osflcyp013a10b2
agccagaaaagttcagaccgattgccactgtccattataattcagcagattgcagtcgcagatgaccctgaccaatgactatacacatggacgaactattttccaaccttgcatagtacataaagcaattgatttttcagacacaatcacattctccgttgttctggggtgccgtgcttacaaatgtaataatcgagtgatctagatatacacttgcttgaacctcaatgccggccccagtatgtcttaagcagctaagagccctgaactaccggcttcatcatggccatgtaattcttgctcgcgggaatcgtattttaggatgtgtaaagatatccatagacctcactttcgactgttatgatctcccgagtagaattagcatgtgctatggggtcatatgttggcagggtgatgtattgagg

SEQ ID NO: 17355 - DNA, 401 bp, Oryza sativa
  Clone ID: uC-osflcyp013a12b2
gatataatgacatagtttataacattacataacacaaacaacataattaacccttacaaaacaccacatggacacagacaaaagaccatcacttattcagacacaaaatcatcatcagaagagtagtagaagaagaccatagagcagcagcagattaaagccttgaaattctcaaagcagccaagagaagaaaaaaagatgaagacttcttgatgccaaccacagcttagctcagagctcactctcccatggcgcggcgttcgttcagtactggagcatgtgcgcggcggcggggcaggggatctgccatggccggagcagcgggtcgtcgggggggcactcctcctggatgtccatggcgacgccgctgaacttcttgacgacgcggagcaccttgttga

SEQ ID NO: 17356 - DNA, 371 bp, Oryza sativa
  Clone ID: uC-osflcyp013b01b2
gggcattcggcaaggttccatgattcatcattgaaaaacccgaggaaacccgcttggccaggcaaccacaacttttgaacaccccagggggaaaaaccagatttactaacccccccactaaattaggtaaacagggcctttgggtgggatttgacaaggtgagccctccaaagcaaagggaaactgggaaggggaaagggacccgacccccagagttcaattcaaaagtttaaaaacaactgatagcaagggccatctgctaaaaaaggcctccctggggagcaagcccgaacaggtccataggaatggcaggagggctatcccttgggggaaacatgaaaaccgccctgtacaggggatccccctccttg

SEQ ID NO: 17357 - DNA, 373 bp, Oryza sativa
  Clone ID: uC-osflcyp013b02b2
gaagctgaaccaagtgatccaattattattcactaattaagcaaaaaaggaaataaaaacaagtccaaaattgtttgacaaaaaaaaaatggagcacgctagcacgaggacaatgtacgtgtcacactctcctagaccttaatgttgaccaggcgcctccgacgccaacgacgcggtgtccaccgtgcatggctgcggacggtgagcgttcgatcccagggacgggtggctcactgtcagggtgaatgtccccctgtgggaggcacgagctagacggggccgtaggaggcggtcgacgtcaacgtcttgagggtgttccactctgcggtcaaatagtctatgagggtcacaacgggcaggtgattgaagttgt

SEQ ID NO: 17358 - DNA, 82 bp, Oryza sativa
  Clone ID: uC-osflcyp013b03b2
aataaattgttgttattatatacgggatgtattattttttagaaaaaaaaacttttttctgtttattggaagctctccactc

SEQ ID NO: 17359 - DNA, 393 bp, Oryza sativa
  Clone ID: uC-osflcyp013b04b2
ggaccccagggcccaaaaattcccccaaacattttttccaaggaaaaaagggacagaaatacctccaggaagatttaaacaaaaggcaaggggaggggaggcatgtgaaacaattgggtttcaggaaaatgcccataagttataagcaactccaaaggcttatcacaatgaaatattgggcaaaagccacgggggggattaagctgggaacctaaaatttttcctactcccaaaaaaaattgggtagaaagacttttcccccctgggatcacaaaaaaataaccctgatacttgctacgggcgacttgaaaagggactaacttttggcaacaaaaatcgggggcaattccataatttaccatcagaaccaacttttaacagggtgaagaaaat

SEQ ID NO: 17360 - DNA, 376 bp, Oryza sativa
  Clone ID: uC-osflcyp013b05b2
aaaaacccttaaaaatacccttttcaggcaaaacaacagggaaaattggtcattccccataaaaaccgaaacgaatggttatcccccactttttcctagggggggggtttttttatgaagggcaaaaaagccttatggtggtagcacaaggttttttttaaaacgacacaacttaaacattcactttttaaattaactgggccaaaatcccctaaaaggaacagtttcaccaaaaacttcttagtttaaaggggggattaatacttgggccaaaaagggaccctttttactggggggcacactggacttttgggggaacccccccctaaatttcgggggacgcttccgggttcctttgaaaccgggggggcccaaa

SEQ ID NO: 17361 - DNA, 334 bp, Oryza sativa
  Clone ID: uC-osflcyp013b06b2
caagaaaatcatcgaaaggatgatacttttatatagaacacaggtaacgaattacagagcaactaatccccctgtccatcatacacaagtgcaccttcttagttttagcatcggtacaagcacaattaagcatctaattcagatcctactagagatcaacgcaacacctaggcatcctagaacactactactactacacaacatatcatccatccatccactgcatccacatccaccgccgccgccattgccgggaagcgtcagaatctagttgtcatcgtcgccggccgccgccttggcgctgccgccggccttcttggggaggagcaggttg

SEQ ID NO: 17362 - DNA, 432 bp, Oryza sativa
  Clone ID: uC-osflcyp013b08b2
cttgaattaaatctcataatttcattatgatatccagttatccacatatatggacaaagcggacaaatgccggaatttcatccgctaatgggaagaaaaggaatgaagatatatggcatatagctatcagggaaaaagatacaaaaaaatgtacattatggtgatttatgggcagcactatgcaaccatggcgagctcaaggcggcaggtatatatcatgtactgcaaatatatctttctcaaaaaagtttttacatcttctataggcagtgagatgcatgctaccaaggcttcaggtcgcccaccggtccagcagggcagttcagggccctctccccgggcttcaagaagacgttttcaccatgtggaagcttgcgagcgagaccattcagaatctgatggaatgcatctcctgcctgagcatgctggggg

SEQ ID NO: 17363 - DNA, 295 bp, Oryza sativa
  Clone ID: uC-osflcyp013b10b2
aaaaaggggccacaaaagggccttaggtaaaaaaaaatttttccggttcatttctggaacccctcccgaatttttaacattataccccctacattgcatgcagggaacatgtgccgcttccaagagaccgacaaaaccttattcctcccaatgacaagttacccggatttattcattggggggtcaagggtttcaacaagaatgcccaggtctaaatccttatccccaaactttttgatgaaagggtgattcaagagtttttaaaaatacatccccttcgaaagaaccttttttt

SEQ ID NO: 17364 - DNA, 328 bp, Oryza sativa
  Clone ID: uC-osflcyp013b11b2
ggggcagaaaaacaaaaaggctaccgcctaataaaaccctacaaagggggggcccatggggaaaaggagaccggcaaaagggttaaccgaacccaaactgggttaaccaatcccacaaaaaaattggggccattaattagcccccagcaggtaggcttaaacattcgttgggggcaaaggactttatatgtttccccccagggggcaagaacagcaaactacttaacccgtcttctggggacctgcgcagggagccttaaggttaaggggtggggccaaaaaaagtgggacaactggggggaggaaccaaagaggggcccaaaggggg

SEQ ID NO: 17365 - DNA, 433 bp, Oryza sativa
  Clone ID: uC-osflcyp013b12b2
atacaaaatgtagcacaagcatcattgagcaattaatctctcgcgacgttacaaattaagaaagcacaagcatgatccaaacaaaacaaatcctagcaaaacaagcaagctactagctagtttaatgtcgatcgatatcataggcaaaggcaaatcatcaacatcatttggttctcaacaagctaagtctgtagtactagcagctaatcgatcgatcaaatggctcgaagcatgcacgcatgtaattaataaagagaccgatcgatcggtcagacggcgttgtcggaggaggaggaggtaggcagcaggaggggctgggtgacggaggaggactgcttgccggcggcgatgatccggcaaggggcggcgtcgcggtcggtggcaatggcggcggcgtccttggcgaggcgagcacgctcgtggctcttgcccc

SEQ ID NO: 17366 - DNA, 379 bp, Oryza sativa
  Clone ID: uC-osflcyp013c01b2
aacaaacaaaacttattgttatagacttgtatagcaaaacaagagttcacagggtagtagtagtacagcagtagtagtagtacacaacataggcttttataacaggctcaggtttgcacaacaacttttgatagcttacaagcttcatcaactttgccgcaaattgttttcactcacttgttacttacttagtagaacagttcactatcactggtttctggttgctaatccttcttgggagggtgtacctccagattgggcaactttaagaactcagacgaaacgcacagttattcgcaagggtaagtgcagagccatcttatttgcagcagagaacatcatgctgctagtaaggacctccaggatatgttcattaggt

SEQ ID NO: 17367 - DNA, 377 bp, Oryza sativa
  Clone ID: uC-osflcyp013c02b2
cgggccacaaaaaatgttgagccggtgggcacggtgtgaggtcaagtggggaattcaaaacttaccgggttttttttttggggggaaaagtgtgcggggccaacggggtaaaaaaagggagccgggttttactagatacgagggggattttttaagggggaaacaaagggggtacacgccccggtttaggggggggaaaatcaggttaactattttgatgggcgccgcaccgggaaacagggcacaattatttttggggcaaaaaatttacgggaaacctttgggacgaccttgttttgggaaccaaaggcggggttcctaggggacaaactcgggttactggggggggcactgaactttttggggccctccgggga

SEQ ID NO: 17368 - DNA, 385 bp, Oryza sativa
  Clone ID: uC-osflcyp013c04b2
ggtgaccaaagtaagaaatttaccaaaatgttgtcacatacaataaaacaacttttatcaaagaaggacgcgtgaaaaacaagaaaaattaatcataaatcaagggtatcctagctgggccgaccgccttacctttttagatagacaaggggatttcacataaaaatgtttgtccaagaagcataaattgggcatgaactcaataaagggtcatgttcacatttgaaggcacacccgcatttttggtgaacaaccaacttttgatcaccctttacaaggtcataaattggataggctgaaacgtgcaccacgggaggccatcaaactcgcgaaattttgggatgtgagctcgactgggaggtaaacatgagtagcgcgttttaaa

SEQ ID NO: 17369 - DNA, 417 bp, Oryza sativa
  Clone ID: uC-osflcyp013c05b2
atcaggaaactcagctcaactgcacaaactggtccttgttatcaacaacactccaacagtcatgctgatacaggtagcaatgcatagcggatttacagccaaacccagacagtactagcataagcacaacgcatgtgccagaatttattcttgttcatagagcggaaaccgcttctttattacattgcactggcattactacataaggtttgcgctttgcctcctagcacagaacttgggccatctctcatcttcactggagttccttcaggaagtcggcgttatcaaccaaaaccactttccagccatcagggtcaaggaaagaggcaatctttgtgttgagccctggtagtggacctggctgccgcaaaatctttccccctagttcttttgtaaccaacttaacagccttagcac

SEQ ID NO: 17370 - DNA, 521 bp, Oryza sativa
  Clone ID: uC-osflcyp013c06b2
tttttttttttttttttttttttttttttttttttttttttttttttttttttttttttttttttttttttttttttttaaaaaaaataaaataaaaaaataaaataaaaaaaaaaaaaaaaataaaatatatataaaataaaataaaaaataaaaacaaaaagaaaaacaaaaaaaataaaaaaaagaaataaaaaaataaaaaataaaaaaaaaaataaaataaaataaactcacaaaaaaaaaaaaaaagataactttataaataaaaatcaaaataaaataaaatttaaacaaaaaaaaaaattataaaaaaaataataataaaaaaaataaatataataaattatatatttaaaaaaaataaattaaaaaaaccttaaatcatattttaaaataaaaaaaaaaaattttataattttaaacaaataaaataatatatattattataaaatattatcattaaaaaatccatataaaaaaaataaaaagtataattttttataataaaaatcattatc

SEQ ID NO: 17371 - DNA, 362 bp, Oryza sativa
  Clone ID: uC-osflcyp013c07b2
aggaaacgacttaaataacagaacagtcaggtagaacagactaccagactgaaacggacttcacaaggtagggtacatatgagttcaactgggcacaacagccctcaaaagtccattcatacttcgttggggggagagtggtgacttgatggttatttaggtgataacgttcgatggggtttcgacaccgttcaccagttctggtttggcctttagtcccatggaagacctttttgtgttccaggaagcgagtcggtggtattcattacttggccccttattagttcttgtaacatggggagcattttacggattccaacggatcattcgggggtttgggttccgtcagcaagtggaacaaa

SEQ ID NO: 17372 - DNA, 306 bp, Oryza sativa
  Clone ID: uC-osflcyp013c08b2
aacacactgaaaagggggtgggatattttacaaggaagcactggtgttacaagggaatttaacaaaaaaaaggtggacatgaatacaaaaaaaggatcttattttgggaaaaattttttggatcccttttttttaggaaggggaaaccattgattttaagggggccgcagggtcctccaggttaaccacctgtttttgccccattggaggagaacaggcccccaaaaagggggaattgaaggatgggggtggccaaaaggggggagaaacccccctgggggcactgaactgaacatttccattggg

SEQ ID NO: 17373 - DNA, 375 bp, Oryza sativa
  Clone ID: uC-osflcyp013c09b2
gggcccaaaaaaagctttttgggtggggaaaaaactttagctttttttgggacccgtcccccttgaaagggggcaaaacggccgggacgaacccccaagaagaagaaaggttgcttgggggaccgggcccatcaaccctgggtgcccccccatgcatgcatggggattggacgaaaccttagctgggtcattttttattccagaatacagatttggtccccctaggaccgggaacaaaattcgggtccacacattgccccagggggaatttactgggggggaaccggggcgcgggtggaaaaataggaaccggctttttggagggggggtcaattcaccctggagcaatccatggaagcccttatggggtagggg

SEQ ID NO: 17374 - DNA, 414 bp, Oryza sativa
  Clone ID: uC-osflcyp013d01b2
aacagcaacggaacattacattaacacggattagagacaggtgaattacaatggaattgtatctagccatgcacagcgccaaagaggcagcaccgctagaataagacgcaaacgaatccgactaacaaaatacgagtcaccaaacacactgacaatattctgagtatttttgacagatccaccaataagacgaatacagcaccatcatgtcacagagagaaacatattgttccacaaaatacaccctactcagattgttcttataagcaaaagattaaacccacttctaacactacgacgcatgcttcatttgtcaaaggagtcgccgaggggaatttaagccctttaaccacgaatcctcctagccagctgaatgtccttaggcatgatggtcacacccttggcatgaatagt

SEQ ID NO: 17375 - DNA, 282 bp, Oryza sativa
  Clone ID: uC-osflcyp013d02b2
acacaacagaaacaacggtttacaggaaaatttaataagagcaaccaagaaagcccggtttgtttaaaaacccccaatacgacaagaacatttggaaaatgggtccgaaaaaaaaattttacctaggggggaagtaaaaaaaagagggttaaaaaagccctaagaaaaaccgcgttaaaaacgacgttagattcgtgctgcagctcccgcaaatgggggggcgggcacccagttctgttttgcagggttcaaaaacaagggaggcaccatggggccgccccc

SEQ ID NO: 17376 - DNA, 121 bp, Oryza sativa
  Clone ID: uC-osflcyp013d04b2
ggggaataattaaataattatattttattaaatatagaataaaaaaaaaaaaaaaaataaaaatctaaaaaaaaaaataaaaaaaattataaaattaatattaaataaaaaaaaaaataaa

SEQ ID NO: 17377 - DNA, 429 bp, Oryza sativa
  Clone ID: uC-osflcyp013d08b2
aataagaatatgcagcattttcaaacttgcaactcaaataaaacatcaacaggaatgagatgcaaatgagcaaattgagcacatatttaggttcaaatccaacttattcataaagcatactgctgtcccacaggaaactgtttcataaaactaacatatcatacggactcgatggtccattaaaccagacacaagtagacatcagcaccacaaatacttgacgaacagaggctcgggatgaccaggcacatcggcagctccaccaaactggctgattactgaccaccacggaggcggagcaccaggtggagggtggactccttctggatgttgtagtcggcgagggtgcgtccatcctccagctgcttgccagcgaagatcagacgctgctggtctgggggaatcccctccttgtcctggatcttggcc

SEQ ID NO: 17378 - DNA, 348 bp, Oryza sativa
  Clone ID: uC-osflcyp013d09b2
aaaaaaaaaaaaacgttgaaaatgcaaaaggggaaaaaaaaaaacgtttttaacccaaaaagaaaaaaataaatttttggggtggttcaaactttaaaaaaattgaaacccaaccctttaaaaagttaaggccacataaaaccttgggggaattccaaaaaagggacatgtttttcacaaagggggtggacaataaacccgggcaaacaaggttttttaaaagcagcaacaacagggggaaaaaaccccaaagccaaatggttttccccccctttaagtcatttaaaggaagcccccccaaaactggcccctttgggaaatgggaaaaccaaaaaaacccttgggggg

SEQ ID NO: 17379 - DNA, 342 bp, Oryza sativa
  Clone ID: uC-osflcyp013d10b2
acataaataccaccacaatgattttgtccaaaaagagccaaaaacacaaagggtcaaccttattaacaccgacaaaaagttgggctcccaatgtaccattaccaaatgatcgggcacatacaaataacaccaaaatgcggcttccaaaaaaacgccaaatgtttaagcacttggagaccagtatgtctacgacataataccgattgggtgctgccctatgaaagagaccatctttacaagatgcaagaagcaatgtcaattgattattggagggagggatacgtttataggcccgaaccgcatttcgcaaattgtttgtctccggttgggggccaaagctaa

SEQ ID NO: 17380 - DNA, 375 bp, Oryza sativa
  Clone ID: uC-osflcyp013d11b2
aaattcacccattcccatgacttataggcaagcacaatagtcataactcatgatagcaagctaacaaaaaaagggtttttaacatgttaagagcggagcaaaatctgggggtcctgcgaaaatgacaattttacatagcgaactgatgaagcttgagtcacctaagcttccttgccttccttgggctgtccaaccatcaaatgctttaaaaaatgaccgccttccatgatactacttttttagcccgaaccattgaggggatccagggtttttgggacatgccttatagagggccttccctttggattggcctgaacgcaagcgagagcaactttcagggctgggaacattttattttcccgttcagagtctttg

SEQ ID NO: 17381 - DNA, 424 bp, Oryza sativa
  Clone ID: uC-osflcyp013d12b2
gtatagtagtaatgtctcttattctaaccaaccagaaaaacagtatacattttctcaaaaaaaaaaagaaaaaagaaacagtgtgagtagagtccgggctagagaaaattaacatgtagtagtagtaataataataataacaatcctaatcttccaatggttctttatcctgtacgtgtagaatatactgtagtgtggtaaaaaaaaggagtggtaaaaattaattgatcagaagtattccaagttgaagtcgaattgagccaagctctgctcatggcatggcagcgagaacttgtgctccagcgtggcgtcgtcttccacctgatactcgccgccatagccactgtgctgctgctccatgtcggcgaagggctctgccttggcggcggcgtcggcgccggccgaggcggcccagttgagcacc

SEQ ID NO: 17382 - DNA, 386 bp, Oryza sativa
  Clone ID: uC-osflcyp013e01b2
aggggggggaccacaactttaaatattgctcaataaaacactttttggggacaacacacacgagagtcatttccagaggaaaacaatcagcccaaacggaccacttgcaccaaatgcaaagcaatgggaagaactaatttgaccggttccaccctagtaaaaaccaaaaaagagagaggaaggggggacaggaagaaaaacattttagttgaacaggagaagaatccatccatcatggggacagcagcatgaggcatttaaatcgatgggctccaataacaagcggggccatcgatcgatcgatcttcccattttactggcccttgccggggttgcccttggagggtttttttaccttattaccaccgtccttcgtgagggcaaag

SEQ ID NO: 17383 - DNA, 371 bp, Oryza sativa
  Clone ID: uC-osflcyp013e02b2
aaaaacgggggaatttccccccgggggaaaaaaaccctttcccaaggcggtccggatgatcccatcccctgcctgtttagtttacaatctagggctcctaaaattcccttccccggaaaaaacctgcccaacattgggcatgctctcatggggcccattgaaaagggcactgttccccctggaaatcttccccaggaaagcctccctgtggttgaagacaatttttttggccaaccctgaatccctgggagctttgaccaccgggttcccgggggtgggcccccccccggggtcccttcacccgtttaggaacccgattttttcgccccaccctttggaaccccctttgcccccacccccggataacctgg

SEQ ID NO: 17384 - DNA, 417 bp, Oryza sativa
  Clone ID: uC-osflcyp013e04b2
ttttttttggttttttttttttttttttttttttttttttttttttttttttttttttttttttttttttttggggtttttttttttttttttttttttttttttttttttttttttttttcaacgggggaaaaaaaaaaaaaggcccatttcgggaaaaaaattttttaactaaaaaaaagggggaaaaacggcccaaaaaaaaaatttctaaggaaaaaaccccaggggggccaaaagaaaaaaccggaaacgggttttaaaaaaccaaacccggaaatgggtttaagggaaaaaaaaggggttcccctaaacccaaaaaagggtttttaaggggggaaaacccaaaaaacagggcccaaaattggggaaaaaaaaaaaaccccaaaataaaaatagcccttttttgcccagggg

SEQ ID NO: 17385 - DNA, 347 bp, Oryza sativa
  Clone ID: uC-osflcyp013e05b2
aaaaaaagggggtttttttttcccccccatttgtttttaaaagggacttaaaaaagggggaaaaaaccccgggggacccaatgttaaaaacccccggaaacaaaaaaaaaaaaaaaggcctaacccccccagttccagggcctttgggctgggggaaatggcccatccaattccaaaaaattttggtgaaagggggataccggggggggtaaaacttttttggggcccttaaaaaggggcaaaaggggaaaaaaaaccccctttttttttaacttccccgggggaaccccccctggggtttttttgggggggggggccctttttgggttaaaggggggggggggttt

SEQ ID NO: 17386 - DNA, 324 bp, Oryza sativa
  Clone ID: uC-osflcyp013e09b2
ggggaaaaaaaaaacctttaaattacaaaaattttggaccgcaaaaaaaaaatttttggatgacactttggaaggggaaaaacccgggggggttttccttggggaaaaattccacctaaaaaaatttaaaggggaaggtttggggcaaaaaccaggccaaaaaaaaggttaaatcctaaaacaacatttgggggaaatatccaaatggggatccaaaaaaaaacccattttcccaaaaggaatgggggggtttggcaaaaacaaccggattaatttttaagggggccgtgccaaacccttaaaataaccctgaacggggctttt

SEQ ID NO: 17387 - DNA, 128 bp, Oryza sativa
  Clone ID: uC-osflcyp013e10b2
ataaagaaaaaaaaaaacttttccccttacaaaaaaaaaaaattgaaaagggagtggtttttacaaaaaaaaattttataattaaaaaaattaaaggagggccactttataacaaagaaaaggaaccc

SEQ ID NO: 17388 - DNA, 403 bp, Oryza sativa
  Clone ID: uC-osflcyp013f01b2
aggaaatgcccaattgcaattgaatgttattgaataaattttaaacttcaaatctaggtttaaacaaaagggaaaaagaaactccaggtctacaaccatcgcctttctggtaaagtaccatgtaccaccctatagtataaattccacctgtatgttggatcttggaaggtgtaacatgccttataaccaaccactcggtctaaagaggcttatccgctttcctcgcaggcggaagcacgcaaaattaagtgcccagtcctgtctttttacagatagggcacagattttttataaccagccattgtttgatgcatgcggtgtggaagtcatgcccacagtctagtctgcccatgtcctcaccttcggcatattcttcctggcaaatacagcatggttcaacacc

SEQ ID NO: 17389 - DNA, 428 bp, Oryza sativa
  Clone ID: uC-osflcyp013f02b2
cagcagattaattagcgacacaacctcgcgcttaattttgcttcgcgcatgcatgcatggattaaaagattacaagtacagaacacaaaacccagctacaacaacaaaaaacacattacaaagtaccacattgttttttctcagctgaacctagtatttcagttcagtccccatctgcatccatcatatccacagctgcttccttccattcttctttacctttgtggaagaaaccagctgaaatagtactggcagtagtagtaaaaccttcaatcttgtactgctgctacgtgatttcgattgctgctacttacttacttcttcttctccatttgaggcttgttcatcagtagctcatgacgatgagaaggccgatggcggtgacgatgatcgtcgacggcacgccgaaacggaggtggctacagaag

SEQ ID NO: 17390 - DNA, 431 bp, Oryza sativa
  Clone ID: uC-osflcyp013f03b2
acaaacacacttgcaaatatcagctgatataggaaatagctgcgagttcagttattctcgtccaagcaaaaatagtacagcttaagttcaggacacaggatatgcgcaaaccaaaagtactatttcaagagacatactgatcgaacattcatgaaaagtatgtaacgcttgcagggagtaacaaaattaatttggccttggtgttgcccactcaacacgaaggataaggttatcataaccataaccattgagcttgctgatagccttctcagcgtcctctctgtgaacaaagttgacgaagccgaaccccctgcttgctccagtcttctgatccaccgcaacgtagacacggctaactggaccaaatgtgcggaatagctcaagtaggtcgggttcacgggtgtcctctgatagattggtcacacggacag

SEQ ID NO: 17391 - DNA, 360 bp, Oryza sativa
  Clone ID: uC-osflcyp013f04b2
aaaccaaaccggaaaatcccggcgaaaaccaccttttaaggggccctggccggaaaacccctttttccccaccaaaggggtggggggacaacacaacccattggggggcccaactttggggcccgacaaccacccaaaggtcccccggaacaggggccccgggtaaaaaaaaaaaggcccccttcactttttgggggtgccgaaaaggcaggtttccccgcccacctttttggcaaggcagggggggtggaaaaaaccccccggggcccagggcccccgcttttccggaaggttgttcaggaaggaaccccacttggcgatgggcccccggggggaccccccccccaggggcaagttgcc

SEQ ID NO: 17392 - DNA, 73 bp, Oryza sativa
  Clone ID: uC-osflcyp013f05b2
ttttttttttttttttttttttttttttttttttttttattttttttttttttgggtttttttatttattttt

SEQ ID NO: 17393 - DNA, 327 bp, Oryza sativa
  Clone ID: uC-osflcyp013f06b2
atataaaaaccaccacattggatatggacatatttaggagagcacacaaagggttatccttattaacaccaacaacatggtggggttccaatggggcattaccagatgataggggacatacaaatcacaccagaatgggcttccaatcaaacccaaatggttagggcttgggaccaggggtatacacatataccattgggtctttttttgaaagaaccattttacagttggaagaagcaaaggtcttggttatttgggggagtttaaggtttttagggcggaaccggcttgggcaatttggtggtgtccgctgatgggggaaagctt

SEQ ID NO: 17394 - DNA, 373 bp, Oryza sativa
  Clone ID: uC-osflcyp013f08b2
cattccgatagatagcaacaagcagttcaaacaccataaccaaagcgaactcaattcatggtaacatcacggacgaagaacacctaacactggatggatggatagagggcttctcgactcgagagagccactggacacgataacgactcgactcgatgataagatgattctgacacggatagctaaggataactggccacgatgggccccaccaatcagttcctccagttcccgccggagtcgccgccgtagccgccgccacggctgccaccgtagccgccgccgccgccgccacggccgccgccgtagccgccgccgccaccgtagccgccctcacggggcccgtagccgccgccgccaccttcttcgtagc

SEQ ID NO: 17395 - DNA, 428 bp, Oryza sativa
  Clone ID: uC-osflcyp013f09b2
aattaaccatcacgggagcatggcatgcaaatatatttatatgcacacaattgcatgcatatatatcagtaggaagcactaggtacgtgctgatgattacacaaagacacatcctgatccttgctcataattaatttcttgcaaatcatatgtagcctgtagggtagggggcagcaggcaaacacatatataagaatagcttaatcgctaggtttgtttttttgagatcaatttcattttaggagaatcatatatattatcgctaggatcgataccaatgacttcaattcattcaaggttgctcccatgattcacggtgcatacggcagctgtttggccgacgacgacgacgatgatcatcttaagcattgaggtggctcagcatccatggcggaagacctccgatgcggagttgcacctggccctgc

SEQ ID NO: 17396 - DNA, 412 bp, Oryza sativa
  Clone ID: uC-osflcyp013f10b2
gcacaatgctagggaaatgcactttaaccatccaaccgaaccaccttcataccataattacattgatgtgaagagaatcaatgcgggatgagttccatttaaggagaatgaacatgttgaagtgaacttaatgcaaaccccgagattagttttctaacgccaccttattccgatccagcacaagctactggagtggggctgatacagggcaaggatatgattaaaggcccaaacggttttctaaaagtggataaccagccataccatatgaatactgcagaacttggaaaaccgaaacggcaaattacgaaagtattactgctgaccatataaatcttatggattgtgctgaatttccatatacgctattgggctccatcttgaccattgcttcagcctcggacaagaacat

SEQ ID NO: 17397 - DNA, 428 bp, Oryza sativa
  Clone ID: uC-osflcyp013f11b2
aaacaagttaataattgtggagtatatttaaaatcggaggagcggagtagtacacacacacgggtaattagatccaatcgccaccacgcgaaatcaatcgtccaccagctagctcatcgtcgtcgtcgatgatcaatactcaaatacacatgtataattgcgacgcgcgcgtgccgtccgtcagccgcggcaccggttgatcctgctgcagccgcgagtgtacgggttggcctcctgcatcttcgagacccccaggagatcgacggcgttgatggcggcatcgacgacctcgccgacggcgggggcgatggagggggaagacgacggcgggcagcttctcgggccgcgcggcgtgggccgtggaaaccaggattaggcccacgagcaccacggacaccagcgccacccttatgctcggcgccttcccc

SEQ ID NO: 17398 - DNA, 358 bp, Oryza sativa
  Clone ID: uC-osflcyp013f12b2
agaaattattagtgtatgttttacaagtctgtctaatttaccaaagggatagatcgatcgattacaatagctgtgtttgacaacgttagattcaatcaaaaacatgggtgggtcaaaaaacagaggggcctataccaacagcaacaaatgatttgatgatgagttaatagaataatatccatcctcctacgaccgagagagagagagagcagtaagtaaacaattaatattggtaaacctggaccttactgaacaaacaacattaattttgcttatacatatgtacaacaaacacttctttcagcacatcggagcttactgcggtgctcactcatgctttgctttgaattgctttcct

SEQ ID NO: 17399 - DNA, 263 bp, Oryza sativa
  Clone ID: uC-osflcyp013g01b2
caaccagggaagggaaaattaattttaaaaaaaaaaaaaaccccattagggggaacgggggggttttaatgggaaataaaaaataaaccggccggggggtgcccaaaatgaaaaaaacggcccaaaaaaaattatttaaacaaaaaaaagggaccaaggcgactccagggccggggaaaaaatttgttccggttggggcggggttttggagggaggataaatgtttttcttataaccacaaaaggggtgaggggtccgttcct

SEQ ID NO: 17400 - DNA, 367 bp, Oryza sativa
  Clone ID: uC-osflcyp013g02b2
gctcaatcattctgtagtaaatcaggatatttgttgacaaaaaacttaaatgcacatgcagttatgcacttaagacagcaagggtttattgccaaaggaaggaacaaaaaaaaagttggagagatttactaccaatatagggttcaaacctgacaaactaaagaagcagaaaagatttaaaatagtagatttgtttgaaagaaccccggaattctgcccatagtaagcaggccacaggcgcaattaagaatcaagaggggttgtgctggtaccaaaacaccaatttgatagaccttatactgaatctctcaggctcccagttgcggaaaacttttccagcttggtccctaatggacagcagatccat

SEQ ID NO: 17401 - DNA, 433 bp, Oryza sativa
  Clone ID: uC-osflcyp013g04b2
gggaaacggtactcagcagtaataaaacaaacaagctaaaaattcatcaacattgctataattgatttaggcgagtacacaggctacaaacaaaagtataaagagttctccaaaagcggtaatgatacaaatagcccagccccgtatgacgattctagtaacacaatatttcaggtgaacaacaaaggtgtatcagaatttattggaacccaaattccacaatgaactgcgacacaaataatggtgaaacccaactattaagtatgctccagtgacatctttcgccaaatgcgatgcagcagcttaggcctggttcttcttgggcacttggaggcgctcccggaaatcatcttccatgagcaccaagccatcacgcagaacgatcttgggctcccaccccaaaacttcctttgcctttgtaatgtctggcttt

SEQ ID NO: 17402 - DNA, 435 bp, Oryza sativa
  Clone ID: uC-osflcyp013g05b2
aatgaaaacagcaaacataatgtttattcacagttccacacatccaaaatggagattcaaccaggcaaacatttctacgaatttccatgacatatccatctcctggagagtagacaaacaaaagaaaagaaatggaaaacataacctgacaaacccaaccacagatcacacttattgtgctccaaacaacggaaagcacgggcataataactaaaacaactcaactcttattccaaaaaaaaaaaaacaactcaatggtgcaagagagtcacattatactctatgatcgcatcgccgttcacgttgtccagataaacagtctgaagcaaggcgaaacctcgagccatcctgaacaaaccacggccaccaacaatggcgagctccctgccattcccctgcatgaccgggttccgcgagtacacgacgaacgagctg

SEQ ID NO: 17403 - DNA, 392 bp, Oryza sativa
  Clone ID: uC-osflcyp013g06b2
aggacaagaaccaaagggaaattttttcaaacacttatcatttcgatgatacattagggggatccataacgtacattcacaatacacacacttggattatcatcatcatcatcggactccatacacgggacacgtacgcacacgtacacacgggtccctcggttcggacaatttgaaggagagttgaccacccacgcgtgcaggcacttttaccttgggtacaatttggactaacgtaaacccgcccagtaccctgcacgggtggacccgttgtaccgggtactacacgggcacgtccccgttcgcgaaaaaacaccaaacacgttttccgttacccaccccgggcttcaccttacggggcaacattaatttgccggcggggatggatggat

SEQ ID NO: 17404 - DNA, 291 bp, Oryza sativa
  Clone ID: uC-osflcyp013g07b2
aaaaaaaaaaatttttttaaaaaaaaaaattcggggaaaaaaaggggccaaaaaataaaaaagagaaccccccttggggaaaaaaaaaaaattcccaaaaacaaatttttaaaaaaaaattaaaaagggggaaaaaaaaaaattgccccaacttcccttttataccgggaaaaaaaaggggttttttgggggtttaaaaaaaattttaaaaaaaccccgggtaaaaattgggaaaaaaaaattaaaatttttcaagaaggggccttttaggaaaaaaccttttcccggggg

SEQ ID NO: 17405 - DNA, 244 bp, Oryza sativa
  Clone ID: uC-osflcyp013g08b2
agggaatcccataaaatatttgaaggacggggattacaaggggaagaaacagggagggggaatatgggcccgacattgggggatatactttttttaaggaccccttttaaagggaaaatgcttgggccccaaccgccagggccatcggaggggaagaagaaggctaattggcaagatcaaaacgacgggggatcgataaaaaggctttggggggggaaaggggccgacctttggagcctaaaag

SEQ ID NO: 17406 - DNA, 355 bp, Oryza sativa
  Clone ID: uC-osflcyp013g09b2
gaaaaaaaaaatcaaggggatggaacaagggcgacacaaaaaacaaatgttggtttcacttaaaaattaaacgccatgggccctttaatctaatccttctagaagctcattacacgcgcgcagcgcacgacgtgaggaggggggagctcgccggcgcggaaaggccggaattggatcgatcgatcgttacgccttcctccttgggaaggcgaccccggcgcgttctcggacgacgccaccggacggggggggggcgggaccatggcccttgagggccaggagggggccggggaacgccccaaggatgcccgggagggcgtcgcggacgttgagcgcgatgtaggagaggagcagc

SEQ ID NO: 17407 - DNA, 94 bp, Oryza sativa
  Clone ID: uC-osflcyp013g10b2
gcatgcttcatttgttgattgttctttgttgacaagcaacaatctacacaggcaatgtgatcaccaaattttgataaaaagttccaaatttaag

SEQ ID NO: 17408 - DNA, 99 bp, Oryza sativa
  Clone ID: uC-osflcyp013g12b2
tttttttttttttttttttttttttttttttttttttttttttttttttttaatttttttaattttttcttttattttttattaatattttgatatttt

SEQ ID NO: 17409 - DNA, 449 bp, Oryza sativa
  Clone ID: uC-osflcyp013h01b2
gaaataaaattatgccaaagacttagatcatcaaaaagtaattaagattgtgtcatacattccaaatataccaaaaagccttttttaaggtttagtggcagtttgccgaatatacaatggttcgccacatctagcgagcaccaaaagaaaactatgaaaaactaagagaagggcggagggcctcacacctctgggtggtcctgggcatcgcctccaccccctccggccgccacgtcttcctcttcacaaaggtccgccgcctctgctttcgccagctgctccaaaaggcgcgccttagcggcggagcggccgtccttctgccaaaattgttttcgccacgcacgaagtgcaggcgaaatgtcttgcgtactgatttcccaatcccccttcgtgtacttggggaacttaacgatgtgctcgcagccgaactgctgcaggaggcccatggt

SEQ ID NO: 17410 - DNA, 464 bp, Oryza sativa
  Clone ID: uC-osflcyp013h02b2
tcttcgagttctccagctgatcatgcatgtacaaaaccttggagaggtaccgcagctgcaactacaactcacaggatgcagcagctccagaaaacgaaattaattaccaagaatacctgaagctgaaaacaagagttgaatttcttcaaaccacacagagaaatattcttggtgaggatttgggcccactaagcatgaaggagctggagcagcttgagaaccagatagaagtatccctcaaacaaatcaggtcaagaaagaaccaagcactgcttgatcagctgtttgatctgaagagcaaggagcaacagctgcaagatctcaacaaagacttgaggaaaaagttacaggaaaccagtgcagagaatgtgctccatatgtcctggcaagatggtggtgggcacagcggttctagcactgttcttgctgatcagccttatcaccatcagggtcttttccaccct

SEQ ID NO: 17411 - DNA, 356 bp, Oryza sativa
  Clone ID: uC-osflcyp013h03b2
gaggaaaaatttaggaatcaaatgagagattgactcaaaaggaaatttctcaagaagtttgagctcttgctggaagagcattttcaacagcctttccaaatttgactttccaaatggctatttgggcaaatttccatttaatttaggaaggcaaacttttggttactccaacaacattttcatttattatttccattacaagggaatgacaaatggggcccctatttaaaccttaaaaaacctttttccattctggttttttatcccacccatgggcatactacatgtcccttgttcctccagaactacttccccttccccactggggcacctacctcggtggggggacggggcct

SEQ ID NO: 17412 - DNA, 431 bp, Oryza sativa
  Clone ID: uC-osflcyp013h04b2
aacagtccaagatcaggatcaaacagcaaatcgctgcacggtttgataccttccttacaaatcttatatgtgtaaacacaaaaaaagagaaggggaaattatatcccatttaaagtttatttaagcaccccaaatccctaaatttacaagcttggtagccagaagagatcattacacctgtgctatgggacacctcactagagggcctggtggtagttcaacattcacagagaactttacagaggtagaatttttgcggtttcgctaaggaggcacacaagggcgaaacgcttctgtctctagcgtgatgatagttttctctctaggtcgtatggttatcttcaacaagacctgctccgcactgatttcctcagctcctagggtgaacattcgtttcaagttgcaatcatcttgactggaccactttgtag

SEQ ID NO: 17413 - DNA, 309 bp, Oryza sativa
  Clone ID: uC-osflcyp013h05b2
gggggtaaaatttaaagggaaattaaatggggaaaaaaaaaaaaagggacaaaagggggtaaaaacaaatggttttaaaaacttgaattggtttttaaaaacggggaaaaaaaaaaaaagggacggtgaaagatcgaaataaaaaaccatttaagggacaaggagctccttgggggccccggggggcttccccaaaaggggggtgaaaaagggcgggggttttttgggggttgcccggaaaaaaaaccgggcgttttggaatgggaaccccttttaagggaatttggcggaaaaaaaaaatttggcaaa

SEQ ID NO: 17414 - DNA, 385 bp, Oryza sativa
  Clone ID: uC-osflcyp013h06b2
aaaccaatacacaaattttattggcagttcctccgactgactaaactgacatgagaaggggttaaggacaattgccacggacatgaatgtccaaatgactgggctaaagcaaccacgggccatttttttagacaaaggaaaaaaagccaaagaaggtcaaatggggaaaaaaaattgccttggttatggccacaaccaaactaacagaatttggcagccggggaagcaaattcaggggttatccatgggggggttcctgaaggtgccaccggggggggacaagggggcgccaccgggcacccttcccttcggaacgggacaacctccctttttgcccccatgcacgggggggtcggacgaccatgggggcattatagaggggggg

SEQ ID NO: 17415 - DNA, 188 bp, Oryza sativa
  Clone ID: uC-osflcyp013h08b2
aattggggtttttttttttattttctttggaaaaaaacagatgctggaagctggttactccgtcggcggaggaaagaaggcattcagaaaaaaaatttatgggggccatgagatgacccttaaacaggtcgtagtactacctttctaagttctcaaggcacacgcggggacacgtgtacacatagaaa

SEQ ID NO: 17416 - DNA, 118 bp, Oryza sativa
  Clone ID: uC-osflcyp013h09b2
tttttgtgttttttttttttttttttttttttttttttttttttttttttttttttttttttttttttttattttttttttttttttttttttttttttgggggaaaaaacccacggg

SEQ ID NO: 17417 - DNA, 141 bp, Oryza sativa
  Clone ID: uC-osflcyp013h10b2
attataatattttttaaaaatttttttataaaaaaaaatttaaatgagaaaaaaaaaaagaaaaaaaaaaaaaaaaagaaaaaaaaaaaaaaaataaagaaaagaaaaaacagagagaatgaaaataagaaaaaggttcaa

SEQ ID NO: 17418 - DNA, 431 bp, Oryza sativa
  Clone ID: uC-osflcyp013h11b2
ctgatgtatgaattatttaccacatcaacaaagtagacagttggctttattccaacagttagggcgtgtgcacctagtgcaggggctggaaatgtgatattttcaatcatctaataattcgaagtggacaattgcagctaactgaagtactttttgaatagtgagctggaaattgccaaagcatcacccgtagccttcacagcatagagctccttcccggactgccattcattcgagtaggcaatccaatctttcctccattcctccagctgaaaactctggttctcttgtaggccttttgttaatcgactgaagtatttcgatgcccttggtagatagtagctcttcagcagtccactccaaaatttattggcatagtcgtgtagtttactctgctcggtatttgtattgtcataccacattgttacctg

SEQ ID NO: 17419 - DNA, 431 bp, Oryza sativa
  Clone ID: uC-osflcyp013h12b2
cacagaaaatccacggatcccaaatgttctcattgattgatagcgatatcatagaagcagcgacacgaattaagatttaaaaccaaccccaagaaggatcgcagatccaactccaccgaatcgatccaagaactccgcctaatccaaccaaaccatgggcgatctcatctcaccaacacgacacgaactcataaaaagactaacaccaccaccacctcctccttatttagggactcgacgactcaagacgactgatactggcgaaaggcgaaggggaacagcacagatctaggagagctggccgcagtcggcgatgacgaccggcttggcggtgctcccgccgcgggatcccaccttctcgatggccttgacgacgtccatgcccttgacgacgcggccgaacacgacgtgcttcccgtccagccagctgc

SEQ ID NO: 17420 - DNA, 346 bp, Oryza sativa
  Clone ID: uC-osflcyp014a01b2
gggcactgcaaaaacaccatgggtgcttctaactcacaatgatttgggggctagaggaaatgtaccgttgctgcacaatacaaattttgggggatgtaaaactaacagggttcacacacaaatgaaaaattgcaagggttttcacaagccgtagtctaagcctcaacttgtcgaagaacttttttttccggggaaaaaacattttgcagcttgcctccacgtgttttttcgatgatcctgggaggtggtgtgccaagcttggtgaaacctgccttaaaactgggatgggccttggttacacaccttttttaaacctgccccggtggaacctttccaaacttggggg

SEQ ID NO: 17421 - DNA, 358 bp, Oryza sativa
  Clone ID: uC-osflcyp014a02b2
agggcacaatggaagcattcaaacagggaaaccatggaagaatggccctgcaaatgcaaacctatatcattttttaaggtagccaaaacccctcatccaaaaggacaaaaagggatttaaacccatgaaagttgggggggcacatatacaagctccagcaagccggcgggattatgaataccacccggttctgggatggccccgtgaaaaggcgactctgcaagttggcgacggaaaaaatgtgaaaatgggtgggctcgggggagggttgatctttgcagggatccacatttccccccaaaagcctggataccccaaaagggaccttttaatggaggtaggatcagcatttacatta

SEQ ID NO: 17422 - DNA, 257 bp, Oryza sativa
  Clone ID: uC-osflcyp014a04b2
ttttttttttttttttttatttttttttttttttttttttttttttttttttttttttttttataatttttaatttattttttaaaatttaaaataaaaaaaaaaaaaataaataaaatttataaaaaaaaaaaagaaaaaaaaaaaaaaaaaaataagagaagaaaaaaaaaagagggataaatagaaaaaaaaaaatggaaaaaaaaaaaaaaaagagggattaaaaaaaaaataaaaaaaagaggcgctttcct

SEQ ID NO: 17423 - DNA, 227 bp, Oryza sativa
  Clone ID: uC-osflcyp014a05b2
aaaagaaatatttttttttttaaaaaagaattaaaaaaaaaagaaaaaagtatttggaaaaaatgggaaagggaatcggaaaaaaaaaatttggggacggaaccaaaaaaaaaaaagggcccaaaaaaaaaaggtcaaaaagggaaaaaacttttattatggacacaggagggatggtataaaggggacagcgcagaaaaaaaggggaaaagccaaaaaccccccct

SEQ ID NO: 17424 - DNA, 124 bp, Oryza sativa
  Clone ID: uC-osflcyp014a06b2
ggggggaaaatccatataatttaacccgaaaagaatccagtcgaacataatttgatccagtgagaccacccatgaccacagaaataacagtcgcagagaccaaaccatttcatttggcaaacat

SEQ ID NO: 17425 - DNA, 54 bp, Oryza sativa
  Clone ID: uC-osflcyp014a07b2
ggggtaaacaacctaaggaaacttaaaattaagaaaaaaaaaaaaaattcccaa

SEQ ID NO: 17426 - DNA, 84 bp, Oryza sativa
  Clone ID: uC-osflcyp014a08b2
ttttttttttttttttttttttttttttttttttttttttttttattttttaaatcaattttttaaaaaatagctcatattaat

SEQ ID NO: 17427 - DNA, 405 bp, Oryza sativa
  Clone ID: uC-osflcyp014a10b2
gaatcaagataccattttgctattctttaccaagcatggtgtcaaaagtacatgcaactgctcaaaactaagactacacagtagtactgacacaaggtgagactcaaaaaacggagtgaaacagaggcaaaagcatcagttataaaatttgcaagttctcggtatgtttctccagtcccagagataagcttgacaaccattcatggctttttgattgcacacatgacaaatggcttcagcttgcagtgcagaatagaagcctgacggtgaaaaaccgatttctctggtgcttttgcaccatggcggaaaactcccggcatggtagaagatcgaatacaggatcagaatcttgcaccttactctttgccgaagtctgcactgtagtgggcgctggattccagctta

SEQ ID NO: 17428 - DNA, 386 bp, Oryza sativa
  Clone ID: uC-osflcyp014a12b2
atgttagatcccaaatataagaatagaagaacagcaaacggagataaaaaaaacaaatcgaacagaaatcgagcagatttttccatagccgcctctgctgccaccgcctcccatggccaaaaccggtgaaggggcgcggagtggccgccggcagtggcttgccgagctgcgctgccgacgcccgccaccaccgtcgtttcagccgagggagggaagcgagagggggcagagggagccgccgccgctgtcgccggatctgtcctccgcagccgccaccaccactggatccacccatggccgccgcgaggccgccaccgccgttagatctgccgcaggagggaggcgagagggggcggagggagccaccgccgccactgccggatcca

SEQ ID NO: 17429 - DNA, 398 bp, Oryza sativa
  Clone ID: uC-osflcyp014b01b2
acgacaaaccacgaacttggatattaaagatgccacaaagaaggttcacataaacaacacaggtcacagcagcgaaagctacaagcaaaccctgcataatcgaaaagcaaatgtttttcaaaaccagacacacaaactgatagatagaagcccacacggacagatcataggatagcagcagtaatcaagcattgccaaggcaccaggcaagaaccctgaacctctctagtactcgtcaccctcatcaccctcgtcaccatcgtcgaactcggagccgacctcctcgtagtccttctccagcgcggcgaggtcctcgcgggccttggagaactccccctcctccatgccctcgccgacgtaccagtggacgaaggcgcgcttggagtacatgaggtcga

SEQ ID NO: 17430 - DNA, 285 bp, Oryza sativa
  Clone ID: uC-osflcyp014b02b2
gggaaaaattttttttaaatttttaaaaaaaaaaaattttcggggggagggttatttaaaaaaacctctttttttcaaaaaaaaaaaatttaaaaaatttttgttttctttgggggcaagaacaaaaaacccccctttttaaaaaaaaaatggggccctcttgcccaaaggggaggggtaaaaaaggggggggtttttacccgggggaccgggaaaaaaatttcaatggggggggggtttaaaaaaaatgccctcctttaaaaaagtaccccccccccccaaatt

SEQ ID NO: 17431 - DNA, 396 bp, Oryza sativa
  Clone ID: uC-osflcyp014b03b2
atgaacgtcataaggtaaaaacatgaacgtcatacgtagcaccggaactgaaagcttttgctactcagtaatattcccgtcggatgacctacaaatcaattactagcaatcaaccaatcgtgcaatgagcataggcatatgtccgatgactaccctctctacccattaacaagcaagaaagtctttctagtttctacgaacaactgggcaactggcgagcgtatgaaccaggtctttgaggcagggtactggtagcagagacacaagattcacataccagcagcaccaacgaatcacaagctaaccagaaaaaaccgaatgtatgggtctaagtttctttggaggagacccggtatcccttggagagatccaacttcagcagcaaagcgacgatca

SEQ ID NO: 17432 - DNA, 361 bp, Oryza sativa
  Clone ID: uC-osflcyp014b04b2
aagaagctggcatatacttcggctagtagcattgcaacgcaaacagtatgacaaggtaccacgcattgtttaagagctaagacaaagacaaaactgatgcatccaacgtaccaaaaagaaagcgaacagcagcagtcagatagctatgagaagagaactaggagagggataactagaagggacagaatggcatccatgggtccatgacgtttagtcgacctcctccatcttgctctcgccggcgtcgtcctccagcggcggcatgtcggcgtcagcctcggcggactcgtcctcgtcgatgctcaggccgagcttgagcatgcggtggatcctggtgcccaaggtgatggggtcctccaag

SEQ ID NO: 17433 - DNA, 152 bp, Oryza sativa
  Clone ID: uC-osflcyp014b05b2
gattaaaatttaatattctcatttgacttgtaaaatggtgaccactacaattggtcacgattcaaaatgttggatgaaacgtaaaggaaggaccctacggatgagtccaacaaccaaacccgtaggggcacaccattgcaccacatagcacc

SEQ ID NO: 17434 - DNA, 105 bp, Oryza sativa
  Clone ID: uC-osflcyp014b08b2
aaaaataaaataatttgtatatattaaaaaaaaaaataaatattaaaaattatcaaaaaaagaagggttgaattaaaaaaattaaacaaaagggctgagtataaa

SEQ ID NO: 17435 - DNA, 82 bp, Oryza sativa
  Clone ID: uC-osflcyp014b09b2
gcggtattaacattattttttcctttcatttaccaagtttcacatattcaggacacattatggattttttttattactccac

SEQ ID NO: 17436 - DNA, 326 bp, Oryza sativa
  Clone ID: uC-osflcyp014b10b2
ggagtattacaacatgcagcagtggcattaatacgccagtacattaattaagttacacatatgcaggctccattttggtttcttttaatttatcgtattacagaatttctgtagccttgcagatgatcacttggatatcatgtactagtaattaacaataggatgcatacaaaagatggcccaacgacaacagaagatgcgtgcatctgacattgtctggccttatttgttggtagtactccaattaattaacaagagatgatgcattcttgtgccttagtttcttcacatgcttggcttcacgttgagcctattcgcaatcttca

SEQ ID NO: 17437 - DNA, 410 bp, Oryza sativa
  Clone ID: uC-osflcyp014b12b2
attataaaatgacttgtattatattcccaacattaaagtttgatattcggatacattttgctcactgtggcagacaaagcagaccacctagagcccttttattcagaatatattcaagataataaagaacattggtcatagcatatactagtactatatgaatagtctggctggctgcttcacaaagtaacagagtgatcgctattggagttttgagtattctttaatcttcagtgcgcttccctcatcagcagctcctcatcttcttaccctctgtgccatctatctcctcgacagcatcgtctttccagtagagagcctccattttaccagctttctccggggtttcatcaacaaagcaatgcagaacagatcgtggcgacccggtggcgatttcagcagtagcagtg

SEQ ID NO: 17438 - DNA, 336 bp, Oryza sativa
  Clone ID: uC-osflcyp014c01b2
ccacaaaactcacataataattattcttcccaaccgaggttggtgcaggaccccaaacatttgaatgaataagctttaaaggagcactagaacgactcaaagacttaaaataaggaagttgatgacttttccctttctgacaagcatcacaaaccgaatgcttgtttgactcactaacacagggtaaattattatgactcaagacttgttgaacaatgactgaggacgggtggcctaggcaacaatgccactgcgaaggaaaaagcttgatagctgaaaaaacttgtttatttgggaatgatttcagaggataaaggccttgctaacatttgcctt

SEQ ID NO: 17439 - DNA, 402 bp, Oryza sativa
  Clone ID: uC-osflcyp014c02b2
ggtacaacgctttattatatgacaggtataccagagtctcagaacaatacttgcagccaaaatgtttgaattgctcaattatttttatgacagatttctgtaagttcaagcgacagaaaacgagcgctgaaatatatttagagccggttgtacagtccaagcaattccttcagcttcgccgcttcagggctgaggctgtcgaagctgacagagctcggcatcctccatctccagttccctttctgtgtagctggagtattcattctagcagaactgtcgaggccaagaatgtcctgcatggttaccatggatgtccttgcaactgaagagagggcagcagtgatcagtgcccatgagatttcagtcctattagcctcaggcagatacttgaacacagtctgc

SEQ ID NO: 17440 - DNA, 120 bp, Oryza sativa
  Clone ID: uC-osflcyp014c04b2
aggtaaaaaacttattgttattgattcttttagcattacaagagaacacagatgacaaggggcacagcactacaagaaagacaaaacaaaggctataataacgaaaccagggtagcacaa

SEQ ID NO: 17441 - DNA, 152 bp, Oryza sativa
  Clone ID: uC-osflcyp014c05b2
gaacaaacccccaacgcttaagagcatatgaaaacctgctgccaaaactttgaagatgcagcttacaataacaagaagaatggtctggggcttctgcgacaaacaaccgcttccaaactcgacccttttgcgccattagctatttcgcccct

SEQ ID NO: 17442 - DNA, 192 bp, Oryza sativa
  Clone ID: uC-osflcyp014c06b2
gagataaattatattttccgcttagtttctttgcagaatatatttgtttactactggaaaatattctagttcaacatctcaaaattacacgtctaaagtcccagagaccaccgaccaaacatccagctccaatgcaatgtcacatggcttactttctcagtttcgaaaccaacactggaggaaaatcaatat

SEQ ID NO: 17443 - DNA, 124 bp, Oryza sativa
  Clone ID: uC-osflcyp014c07b2
aaacaaaagttcaaagaacttttattggcaacagagggaacagactgcatataacgcatgtgattgcctgggttcgaccaggaagaaaagatctcaccgtctttgaaagggaggtcctgaacaa

SEQ ID NO: 17444 - DNA, 94 bp, Oryza sativa
  Clone ID: uC-osflcyp014c08b2
aagaagcagtgatgatgactgacagaaattaattaagctagaaatctcctggatcggtcacacacacacacacaattaaggtacatacatacat

SEQ ID NO: 17445 - DNA, 115 bp, Oryza sativa
  Clone ID: uC-osflcyp014c09b2
ggatctatgaattttgtggttgttattttttattgtccattcatatacatggctacacaaggttaggacacagtaagaaagggctatatgatccaaggaaacatatcaattcaac

SEQ ID NO: 17446 - DNA, 399 bp, Oryza sativa
  Clone ID: uC-osflcyp014c10b2
agctcgaggaatcttgtgggcagaattctttattgacccctcatatacaaggttagacaaggttaggatagagtaggaatgtgctatatgagcaaaacaaatcagcaattcaacagttgttgaccctaatttgttcaagatttcttataaaaaaaaacagcagtagactcccgattcacctattacaggtactactgattgttaagctccacaggatggcacacagccaacagaaggcaacaagctgccatcagccatagcatcctactgcgagacactggtctgaagaggcaaagcgctctcgacttcagctttttttgcttcagcggaacgctctgcgacaacctttgacattccaaacattttctggatggtgtttttgaagcaatgcttgggctc

SEQ ID NO: 17447 - DNA, 190 bp, Oryza sativa
  Clone ID: uC-osflcyp014c12b2
aattattattgagaaaaaaaaaggggggtaaatggattaaaaaaaaggaggggaaacaggaaaagccaaggggaggaaaaaaagaaagaaaaaaaaaaaaaagaggggggggaaggaaattttaacaaaaaaaaaaacccccccaaaaaacccgggggtttttgggggggggaatctggggggggaaacc

SEQ ID NO: 17448 - DNA, 409 bp, Oryza sativa
  Clone ID: uC-osflcyp014d01b2
ggagcatcctcgtccatgcctccggccatgtcagctccggcgccctggtacatcttggcgatgatggggttgcagacgccctccagctccttcatcttgtcctcgaactcctcggcctcggcgagctggttgctgtcgagccagctgatggcaccgtcgatggcgtcctcgatcttcttcttgtcggcctccggcagcttggacgcgatcttgtcgtccttgatggtgttccgcatgttgtaggcgtagttctcgagcgagttcttggcgtcgaccttcttcttgtgctcctcgtcctccgccttgtacttctccgcctcctgcaccatcttctcgatatcctccttgctcagacggcccttgtcgttggtgatggtgatcttgttcttctgcccggtggtcttgtcct

SEQ ID NO: 17449 - DNA, 262 bp, Oryza sativa
  Clone ID: uC-osflcyp014d02b2
aaaacgcaacactacacaaacccgtcaataaataatcactttaagttacttacaatttccacactttcttagacagcaattgcatcgaaatgcacacacgacgcgggacccagagggcaaatattttgacaaccttgatacaggatatgacatcttaaaaaaagactaacacacagcattttagaagcacaattggagcaaacaagagcatgtcacaggggggcttaaaacggtgtttaaggtcatagccgttgggatacca

SEQ ID NO: 17450 - DNA, 397 bp, Oryza sativa
  Clone ID: uC-osflcyp014d03b2
aaggaaaaagactaacagactttgtaacttatgatcagtacaaatcagagacatgttgagagttacagcacgccaacaaacatttctacagagttacaaacttcagaagctaatagagcagcatacacggtacaactgaagacaaccacaaaacacaaaccaggttagttcttgcacccaaagcggttcaagatttttttttttgttagctaccctcttttgtcatgtggtcacctggagcaagtcatttccagagcttgacaaacctatcatggcttactgaggcaaccttgcctgttgcgctcgatgctgctagcgctgcaactaaaccatcatgagcactgtggaccgtcatggcggtcttctccctaatgtcccagagttccaaagactcgta

SEQ ID NO: 17451 - DNA, 135 bp, Oryza sativa
  Clone ID: uC-osflcyp014d04b2
ggtaattgactaacaggcgttgtaacttattattggttcacaacataaacatggtaagaggttcaggacaccatcaaacattacaacaaagtgacaatatgcaaaagctaataagggaaaatactcgggacaaca

SEQ ID NO: 17452 - DNA, 116 bp, Oryza sativa
  Clone ID: uC-osflcyp014d05b2
caatcaaccctttacatgattttattgttatcgattgttccaatcgaatttccactgtgttacatgacttggagtctgggaccaacaaaaaagaaatatttcctgacaccagatgg

SEQ ID NO: 17453 - DNA, 152 bp, Oryza sativa
  Clone ID: uC-osflcyp014d06b2
ataggcgccccccgtagatcaacaagtacttattaatagtggagtcggcaattacagagcaacaagaggaggagggtacaattacactcaaagacattttgatgaatgtaacaaagaaattacatacagcggctaacaaatatacttagtgt

SEQ ID NO: 17454 - DNA, 383 bp, Oryza sativa
  Clone ID: uC-osflcyp014d10b2
agcccaaatgctaattatttaacctaaaattcttattcaataatccaaacgagtagaaattacatgcacctaaaaaccaatcacttctcatacattcattatttttactagctcgagatcaaagttattattaaggcctaattaacttagaagtcgccgtcattcctaggaagcggctcatggccgggcgggcccatgaagaggccctcataaaccagcccagccaaaggcccacctataagaggcccaacccaatagatccagtggtcggcccattcgccggcggcgagggccgggccgaaggagcgggccgggttcatggaggcgccggagtagggcccgccggcgaggatgttggcgcccgcgacgaggccgacgaggag

SEQ ID NO: 17455 - DNA, 381 bp, Oryza sativa
  Clone ID: uC-osflcyp014d11b2
tttttttttttttttttttttttttttttttttttttttttttttttttttttttttttttttttttttgggccccaaaatattaggacatagcccggtaaaaaaactaagccccatggggccaggggccaaaaacagggaaattggcatgagggggcaaaaaaactggttaaaggtccccaaaccaaagttaaaacatccggatggggggaaaaagctctttttttttttaagcccagggaaaataaaacaggtggctaggacacccaattttagaggggaaaaaacgggggggggaaaaaacaaagggggggacaaccggaggacggggaaaacttgaacccatgaacaaaggaaattttggtaaaaaactgtttttcc

SEQ ID NO: 17456 - DNA, 407 bp, Oryza sativa
  Clone ID: uC-osflcyp014d12b2
gacacaaaaaccaagaaaatagtaggcacaagttatatcatcagaatacatagcaactgcaagtgctcaaaaattgtgacaaagcatcatcttgtccacagaaaactgcaccaattaccgaagaaaaactagcagtaccatgtctatccatcacaacgacaaacacttcctcatctataatgttttaaggtcttataggggtcttatgcggtggtggcagcagccttggtggcagcagaaagcttggacctcctctttgccaagctctcactcctgcgttccctctgctccttgagcctctgggcaagcagcttttggtactcggcagcctcggacttcttcttggcaattctttgcttcttctgggcgattcttgccctcttcctctgaagagtcaggggagtgac

SEQ ID NO: 17457 - DNA, 100 bp, Oryza sativa
  Clone ID: uC-osflcyp014e01b2
aaaaaaactcggtttcacgacgaattatcggaatcgattggcccatgaggggaatcgtcaccatgtcattggtggaagggttcataaaatataccaaatt

SEQ ID NO: 17458 - DNA, 118 bp, Oryza sativa
  Clone ID: uC-osflcyp014e02b2
aaaaaaccccaaaaaagccgggttttttgggcggggggggcccaatggttttgggggtttccggggagacccttcggggacaagggcccacgggccatgaaaacccccgggccccatt

SEQ ID NO: 17459 - DNA, 67 bp, Oryza sativa
  Clone ID: uC-osflcyp014e04b2
caaaaaaaaaaagggggggaaaaaattgggagggggaaaaagaaaaataacaaaacaggaaaaaggg

SEQ ID NO: 17460 - DNA, 202 bp, Oryza sativa
  Clone ID: uC-osflcyp014e05b2
cgggataaactagatttatatttgatttccacgcttgttataaaagcgcagcgcacagtcatcagtttattagcacccataaactgagcgtactccatataatacggaactggttcaggtttccttccaaaggcatgcaatccacccaaacagaatgatgactttcgcatgggctagaagttaatacgggtaacttagggaa

SEQ ID NO: 17461 - DNA, 53 bp, Oryza sativa
  Clone ID: uC-osflcyp014e06b2
ttttttttgggtttattattttttgccgtttttttttattattgttttttttt

SEQ ID NO: 17462 - DNA, 367 bp, Oryza sativa
  Clone ID: uC-osflcyp014e07b2
acttcaatattggaattccatacgaaataactgtagttcatgggctcgaattacaaaacctttctgaacagagtactgaagcaaaagatgaatccaaaacaagttctagcgtctcatacaatacaaaagcagggaagtgcaaaaacatttttaactcccaaaccacaaaaggaacaacagacagtaacaccggtattacatatccagccttgcaaagcggcagagctcaagcgccaggcaacaagtaaacatgcttctgccttttttggcaacaatgacgagcacctagaacaacccgtcaagcagtgcagcaattcaaatttcagttattgggctcataagcagtttggggatactgggagtcacc

SEQ ID NO: 17463 - DNA, 394 bp, Oryza sativa
  Clone ID: uC-osflcyp014e08b2
aacgcgccaaaaaaaagggcttacttccaggtgccacaatttatgccgtattcacaagatcattacaagcaaatcccattcttgttgctacatgaaacaagtactactaaatctatgcaggtgccttattgcatcatactatgtacaatctctcagaaatcagaatgatgtacctctggtattttccagagggaaccggagtcccaccgtgaccctcaaattggctttttcttcaaggcccggcttcaaacttccccccgggaacaacacgtgaaaagtagcccctccaccagattccggtgacttgtcaggccagaggccgtgcaacttctaatacaacaaactctgtcctggcctataagttagcagagggttacttttccaaataacacct

SEQ ID NO: 17464 - DNA, 81 bp, Oryza sativa
  Clone ID: uC-osflcyp014e09b2
atgttaacttactgatcatacatgtttgtatgattcatgtttgaccagtggtagagaatcataaaagaactgacatagatc

SEQ ID NO: 17465 - DNA, 407 bp, Oryza sativa
  Clone ID: uC-osflcyp014e10b2
gctcatcttctcatgtcaactcactgagcatacatgtttgtatgattcatgtctgaccagtggtagagaagcataaatgaactgacctagatcatagttatacattggagaagctcaacagtggagaattatatgtgattacatggtttgacatttacatggggccgcatagccatccttgaccttgtgtgttggattgatctaactttatttgacaaccaggatatagttctacttcctaaacttgttagccatggttgccctccatccaacaactcagtatctaatattctggataataattatacatggtatgcaacacaccatctactggagagattcaccaagcttccttctcttgatacaacagcttatacccaagacaatctttgtatctttacaagaaa

SEQ ID NO: 17466 - DNA, 379 bp, Oryza sativa
  Clone ID: uC-osflcyp014e12b2
gggttgcaagtttaagaaaccattagctaaccccggcttatgatcggctagacaagattcaaccaactcacaaccatccataaatatataacatccctaagatgacaaaaacaggcttttgcagcccctaaaaatagccttctctaaccggagcatttaaaacccaatactgcaatgcaaaagggtgtgggcaacggccaaagcttcccaatactgcaatgcagatgggttgagcaacggccaaagctgggacatgcattcatggatgcctacttcccagcagaatcaggggaaccatcctcatacgaaaccaaacctttcttcccttcaaaactggcagagggtgaccgggactttgcattactctttcgctttgggg

SEQ ID NO: 17467 - DNA, 384 bp, Oryza sativa
  Clone ID: uC-osflcyp014f01b2
gggaaacgaataaaatcattattgcaaaaacatcatcttcttcttcatcttcttagtgtacacaacaccaactcgatcatcatctcgtcgcactaaacccatcttccccaacccaaagacaacgaactcgctggccacaaatccatccaaccacaattaaccactgctaagctacggtcccccacttcacttgccggggacgaagttggtggcgtacgcccaggcgttgttgttgacggggtcggcgaggtggtcggcgaggttctcgagggggcccttgccggtgacgatggcctggacgaagaagccgaacatggagaacatggcgaggcggccgttcttgatctccttcaccttgagctccgcgaacgccttggggtcatc

SEQ ID NO: 17468 - DNA, 401 bp, Oryza sativa
  Clone ID: uC-osflcyp014f02b2
aacaaaagccatactctctgtattaaagatccaacaggttcagagaacacgcaagctcagaactacacatcaccaaaattggagcaagtttgggggtacatatccgctcatacagtggaggatttatttctcgattctacgagctttttaactagagttcgaccgggaagtcaattacggatagaaatgagcatcctgtcttcacaaaacccatgcacacaacagtgggcatgaaccgcatgatattcaccatcaagtttagtagggctccacgggtgcgcggaacttggcaccagcgtagacagcagccgcaccaagctcctcctcaatcctaagaagctggttgtatttggcaaggcgctctgatcggcagggtgctccagtcttgatctgacccgtgg

SEQ ID NO: 17469 - DNA, 319 bp, Oryza sativa
  Clone ID: uC-osflcyp014f03b2
gggggcactagctcattccctagggctagctttggggctatcaacttcattcaaacagagaccagctggcaacagggatcccggccatatatccctgcattctggtggtcatttgccttattaccctgccccaatataaggcatccccctctttagcttatcataaggcctaattaactaattatcccagagcatggccccaatataattgacccacttgagaccaagcataggggccacttgaacccatgcatgcattggcatgcccatagtccgggttggtcacaaacttaatcatcatactagcttccttggatta

SEQ ID NO: 17470 - DNA, 98 bp, Oryza sativa
  Clone ID: uC-osflcyp014f04b2
acccccaaaaaggagtttattgtaaaaatagccacccaaagggaacaaattcggggaaagcttgtttttgaggcaaaatttttggaaagttttttttt

SEQ ID NO: 17471 - DNA, 304 bp, Oryza sativa
  Clone ID: uC-osflcyp014f05b2
caaccaaaacgaggccgtaatatatgcatactgatttaattttaactgagatcagcccatcacacaaacagatagccaatacaacccatggcacacaatgtgcacattgacatatttacagcgagcttgctcaggtcgcacagagccaattgatgcagcctagccacacacagtttttaccaggcatacagcatcacctattgataagaagtctatttcaactctaccaaaacataaatattgaaactagggtataagtgaagcaaaagagtgctcctaaagctgaaccaatgacggtagcgta

SEQ ID NO: 17472 - DNA, 398 bp, Oryza sativa
  Clone ID: uC-osflcyp014f08b2
aaactcacaaatctactaaacctaacattcatcactgtaaatccaaggatttacagaagtcacagatacaaaggtaaaaagcattccgtcgtaagcgatgataagcataacatcattttgcttacaaacaattgttaagcaaaggatgatggtctgaagactagggggtattttgtcatatccttatgcgacaatcacgacttcatttcctcatcttcttcaatctttggcgccagataaaatctaatgtagcccatctctgcaatcttatactcaaccaccactggcagctcagatgaaaggctgattgtaacttgttcagagagcgggcttgccttggtgaaggagttcatgtacctcagggcaaaggttagtgacaccggttcctgcatctctat

SEQ ID NO: 17473 - DNA, 82 bp, Oryza sativa
  Clone ID: uC-osflcyp014f09b2
agccagaaaaaagaaacttttaacaaacatgaaaaacaaggccctaaattggtccaaggggggaaaaaaggaatggggggaa

SEQ ID NO: 17474 - DNA, 350 bp, Oryza sativa
  Clone ID: uC-osflcyp014f10b2
ggaaaaaattggaccttccatagacaaacaatttcgggagcaaaaggggcctttcatgacagaagaaacccaacgggatataccgataacagaacggataaagacatacttagggatcccacatactagggtttggaaagcccccaattcacaatttctatggggtttcaaggggaaaatggggacatgtcctttggaaaggttgcaaacataaggggcccaaatgggttcccctactacaggggggggtttaagtttggctggggcttcccggccctcctttgggaaggtcttctaggaatagagtttttcattcccaaaaaaaaaagcagggccccaaaaagggccaa

SEQ ID NO: 17475 - DNA, 386 bp, Oryza sativa
  unsure (1)..(386): unsure at all n locations
  Clone ID: uC-osflcyp014f11b2
aaaaagtgaaatgggggtttcctgatcttatttacttccccattcctttctaccgcggtcaaaatagctgtacaacgttacattacgtatgtacacgtgtctttcatgtaatcgaaaaaaaagatgtaatcgaaaagaaaagagtaaattacaagtatggcagtgagcaattgtgtgggctagcatatacacaacttgtacattcaccgagtgctatgtatgagcaaaggaccactttgcctagtcgttgtctctgctgncaatgaagctcaagaggaagccgctgacgattctcctggcgatggggttgggtatgtggcggcagagccggccgtcgacgtaggcgaccatgccggagacggcgaaccttcccacgcttcacaccc

SEQ ID NO: 17476 - DNA, 344 bp, Oryza sativa
  Clone ID: uC-osflcyp014f12b2
aagagggaaataggggggtattaacatacacaaaaatattagggtacaagccagggcagtacatagcaaacctccatttcaaacaaaaaaaaaaaagataacatagcaaacctatcaacatgggaagggggatatacatgcaatttaaaaatgggaactcaacacgcttatttacaacaataagcctctccttactatcaaaacatatagaagaatagggtaaacaatggcatgagattggatattacaccggatggatataagggtctggctccaccaaaagaatccggctgggaagaaatctttggattaatttggtggccaggaggcgtgttcgggtctgg

SEQ ID NO: 17477 - DNA, 367 bp, Oryza sativa
  Clone ID: uC-osflcyp014g01b2
cgttacatactgcagtgtataacttcgttcaaatcgtttaaatttacttctattacatgcatttgatgctaaaaaagaaaaaaaaagacctagcatggaacacaagcatagaatctacattgcaaagttatatataagacacgatacaccttcgatcatatcatatgtaacaacactggccccatcgccattctgctcctacattaccaccaccatcaccacctaaggtcagccaggagcatgaaagcgaggacgaaattcgggccgggtcagttcttggcagcatggtgggtggtgccgccactgtaatcgtctacgttgagcatcagatatgacagacaggaacaagccatgctgctgcctggga

SEQ ID NO: 17478 - DNA, 80 bp, Oryza sativa
  Clone ID: uC-osflcyp014g02b2
tttttttttttttttttttttttttttttttttttttttttttttttttataattatttatattatatttatttttattt

SEQ ID NO: 17479 - DNA, 277 bp, Oryza sativa
  Clone ID: uC-osflcyp014g05b2
gggacgggaaggtttatttttttaaaaaaaaaaaaaggaaactcggggccaaaaaaaaaagaacgttaaaaataaaaaggggggaaatgggaaaaaaaaaagcaattaattttcccaaataggataaaaaaggggggggggtcctaaaaaaaaccggcaaaggttttttttgagaaaagaaaaaaaatacggggttttcgggcttggggggcagggaaaaccagggggggcaaaagggttttacgggggtttgggcaagggggggaacaagtgaaaa

SEQ ID NO: 17480 - DNA, 113 bp, Oryza sativa
  Clone ID: uC-osflcyp014g06b2
tttttttttttttttttttttttttttttttttttttttttttttttttttttttttttttttttttattttttttttttttttattttttttttttttttttttttagcgcc

SEQ ID NO: 17481 - DNA, 115 bp, Oryza sativa
  Clone ID: uC-osflcyp014g07b2
gttgtacattatttggacaaatttattccagttataacaaggcttgttacaaaattagagacaaactaaccaaggcactacttgatacataagccggcagatcaaaattacagta

SEQ ID NO: 17482 - DNA, 406 bp, Oryza sativa
  Clone ID: uC-osflcyp014g08b2
agaaataattagattaattttctacccatataaacacaacttaagattcatgcccgcgtattcgcgtgggctaggtcattttacttttactggctcacgcacacgttgcatttaacttacaacgacaaacgactcaaagctagacaaaggctatggcagacccaatttgcagagcagctgggggatcaatcggtccccaacaacacacactggcacgctacttataaaatgcaacatcgtgtaccacgagccgacgaacggataggttcagcgtcttgccttcaaggagagcacaatgacagggtacttggtcttcacctgctcgaggtgctgtgctacgttccgcgcgtacatgttgaacaggtcggacactatgcaccttccgaaatgaccagcgaagaggggc

SEQ ID NO: 17483 - DNA, 59 bp, Oryza sativa
  Clone ID: uC-osflcyp014g09b2
attaaaaattttattataattttattagatttataatatataaatttatataaataatt

SEQ ID NO: 17484 - DNA, 95 bp, Oryza sativa
  Clone ID: uC-osflcyp014g10b2
ggaaaagaaaaaagaaaataaattaaacaatttttaaaaacaaaaaaaaagggcggggggaaaaaaaaaataaggggggattgggaaaaattaaa

SEQ ID NO: 17485 - DNA, 350 bp, Oryza sativa
  Clone ID: uC-osflcyp014g12b2
gtcgacgaatttatcagatatgctctagatacatatcttgtgtgtatatagccggagctttgttttcacatatcctcacccaacgataattgtagtactcttacaataaaaccggtcggagagggagggaagagattattacatatgtgttaagagcagaggccattgagatggtacataaccaaattgtaaaataaaaatatatagcatattatatattgatatatcatcaacatagcccaaaacaaagctgcatactattattataggcagcaatccaccagcgcgatgcttgatcttagcttagttgccaccagactccttgcaacctgggggcttggaggcgatga

SEQ ID NO: 17486 - DNA, 390 bp, Oryza sativa
  Clone ID: uC-osflcyp014h01b2
acagggcatgcaaaactatggtattacgagatcatttaagtaaatgaaatacaacgcccttggcacaccaaaaaacagaagtacggatgtgccaagatgattacaattattctgtaatgggatcatcgagccctggctgccgaatgcacacgacaattacaaaacgctcagctaaatatatctggaaggtttccgtgagcagcctcaaagatcctccggaccgttgatgtccttgttctcaagcacggctccatctgggatctccaacttccctgacttggcggtgatggtcaccttacccttgagtgtaactccagagccgaaccagacatcaccagagaccttaaaggggtaaagctcgacaatgctgggattgacttaaaccgggcc

SEQ ID NO: 17487 - DNA, 337 bp, Oryza sativa
  Clone ID: uC-osflcyp014h02b2
gatagcttgccgcaaacataattgttcatggagcgcatgcttgagaacgaccccattcttcaattatttcaacaacacgccaataattattcgcacaatcttgaaaaatggtatactacaaccacacgatcatcctgactgatcagctagagagctagaaggagaacttgaaggccatgtcgtgcctgtacacctggccgggcctgaccgtcatggaggggaactccgggtggttcacggcgtccacgtacccctgcgtcttcaggcagaacccgccgtactggtggtacaccttgccgcccttgcccttgatggtgttcagccagttgccggtgta

SEQ ID NO: 17488 - DNA, 330 bp, Oryza sativa
  Clone ID: uC-osflcyp014h03b2
gggaaaaaaaaaaataaatttttggaaaaataaacccacctttagggggaaaaaaactttttttttttaaaaaggacaaaaaataaaatcccaaaaaaaaaaggaaatttttttgggccagtaatttaaaaaaagggaatttttaattaaaaggggggggtaaaagtaaaaaaaatcaaaggggggaatatagggcactttctgaaccccaaaaccccggggaaaaaatttgggtttttccccttttttttttgggattttaaaccggggaaaaaaaaaccatttttttcgggggaacccccggtggtgggccctgggggggggggggaa

SEQ ID NO: 17489 - DNA, 321 bp, Oryza sativa
  Clone ID: uC-osflcyp014h04b2
gcatgaattacctagaaaacttcagctgactgcatatatacgataaacatacaaagggagtagatgtaatactaattcttgtgtgtatatggtgtctggtgattcaattcatgggcggccttgtgggaaaaacacttaatttgtgaagtgagtattaaaaaacaaactcttggaggcagaggctatattgatggaaacgtaataagattacagagtagtagtagtgggtgatgatgccttagggattgcgccggagccgccgcaggtagtgcaggagcgagtggaggagcagcggttgcagtaggtccacttggtgggcag

SEQ ID NO: 17490 - DNA, 295 bp, Oryza sativa
  Clone ID: uC-osflcyp014h06b2
cggacccttggggggaccggggaatgaccgaggaaaaccggacggggaaccgaagggcccaaaagtgggcccaaagagagctgggtaaaagcagggcaaaagcagggaccaaggtaaaaccggtgagaaattacaatgccacaaaaaatacaaacaagaaggaaaacgggaaaaaaaaggggaaactaaggggggaccaaaaagaaaggaaacgcaaaggaatggccggacgctaacaagccggtaaaacgggggggaaaccggcatgaaggatgtgtcaaaaaagcggacaaag

SEQ ID NO: 17491 - DNA, 208 bp, Oryza sativa
  Clone ID: uC-osflcyp014h08b2
gggcaaaaaaatgcccggttagacaaaaccccccacaatcccatagaccctttaattagggcccggggaaccaatccccgcccattaacaaaaggccctgacccacctttatcccaaattattgacctttgccccttcccaatttttttttggggggtactaccctcttgttcaaccccgggcgaatatccaccgggcggccaaactt

SEQ ID NO: 17492 - DNA, 366 bp, Oryza sativa
  Clone ID: uC-osflcyp014h09b2
gaacttattcccaaaatccaataatacatggttcgaacatgggctggctatatatagctcctggagtttagtcgtgacagagaagttgcatgggccatacatgattctgtcacgcgtcgttattactacggcaagcctagttgccatcccagtatctaaacaggagccgtcacgagttacaggcccgaagcctaaacgtgcacggggatcttgttcgccttctcctcgttgctgtcgagcttgatgcccttgtaccacacggggcacgcgacgtacacggggaggtcgaccaacgagagccccgcgaggaggaagtagaacctgtcgaggtggccggagttgagggtcccgggggaccacccgggc

SEQ ID NO: 17493 - DNA, 359 bp, Oryza sativa
  Clone ID: uC-osflcyp014h10b2
gcaacttgcaagccccaagtaaaataccaaaaatagtttgcattatacagcacaacaatttacagaagaaactacaagcaaggttaagtagacaacttacaggaacttacacaacttacgcttaaaatctaacataattgggccaaataaaaacaaaaaaaaaaaagggggtgacacataggtataaggaatccccttttcgcaacttaaaccattacccttggggtttagagaatgggaccttacaagtaaaagggatgtgattggaggggtcggatattcatattggggtcatcttttgctcagttccgatttttggtcttggcaggggcttttggagcaaggcccactgtatttga

SEQ ID NO: 17494 - DNA, 400 bp, Oryza sativa
  Clone ID: uC-osflcyp014h11b2
gaacaaccataaagatttctgatgggaaaattttctatacagaacacctgtaatttacatagacaaaagtgtattcgagaaatattccatcctataaacctagaagataaatacctaagtagaaaaaacatggaggtgacatgattttacttggaagtacaaacatgacaaagtatgatatatacaggtgattggctgcaagtctatgatgaacaatggactatctatgctcaattggctgttaacctaggtagcttgattccatctatgattttattaccagtattgactctcttactatgtgacgttgagttgaaagacagatcagatttcttgcaaactcatcatcactgacatcaatatgtagccagcacacatgccataggaaagaatgaagaat

SEQ ID NO: 17495 - DNA, 530 bp, Oryza sativa
  Clone ID: uC-osflcyp015a03b1
tttgactacaaagcttgtccaacatgatggacctactgctagatcagcaaagcacaagaggaagaatcagtacagggggatccgccagcgtccctggggcaaatgggcagctgaaatccgagaccccagcaagggtgtccgtgtttggcttggaacatataacactgctgaggaggcagctagggcatatgacgctgaagcccgcaagatccgtggcaagaaagccaaggtcaactttcctgatgaaccagctgttgctcagaagctctccctgaagcaaaacgctgccaagcaagagaaactagctccacctctgaagacctgtggcgatgatgctttctttcagctaaacagttcagacaatgatttgtttgcaatgcttgcaaaggtgcctgcaaagccggcagagcctgttgatctcatgcctccagtcaaacctcttgctttcactgagacattcgagatgaacatgctctctgattcgagcagcaactcatttggcttttagactttgtttggaggatgacacc

SEQ ID NO: 17496 - DNA, 231 bp, Oryza sativa
  Clone ID: uC-osflcyp015a05b1
gagagagagaaggtatcaacaagactccctgaagagcggcctgccgctaccatctcctatctgtgccttcagtatgtgcagcactctcacatgtgaaccaaggctaggaggaggccatggcagccaaggggggcatggatgtaggtcgcaacatctgcagactccaagaacattcttgtgatggcgggaaccaggttcattggagtctttcatggccaggctccttgtcaa

SEQ ID NO: 17497 - DNA, 405 bp, Oryza sativa
  Clone ID: uC-osflcyp015a06b1
ttggttagctagatatggcggaagagtgccttgtgcaagcgaaggacttaagtggcctgttgctactatattcatctcttggagatgctgagggaatcgagaagcttgcttctcaagcaaaggagcatggcaaaaacaatgttgctttcctctgtctctttatgcttggtaaattggaagattgcatacaattgctgatagacagcaatcgtatacctgaagctgcgttaatggcacgttcttatcttcccagcaaagtttctgagatagtagcaatatggagaaatgacctcagtaaagttaatccaaaagctgcagagtctctggcagatccttctgagtatccaaatttatttgaagactggcaggttgcacttactgtagaaaagaatgttgcttctcgga

SEQ ID NO: 17498 - DNA, 496 bp, Oryza sativa
  Clone ID: uC-osflcyp015a10b1
tcttttcgattcatttctcccaggaaaaagggctccccgatggcgccgtcgcagccgaagtccgggctcttcgtgggcatcaacaagggccacgtcgtcaccaagcgcgagctgccgcctcgcccgtccgaccgcaaggggaaatccaccaagagggtgacctttgtcaggaacttgatcagggaggttgctggatttgctccctatgagaagcgtatcactgagcttctcaaagttggcaaggacaagcgtgcactgaaggtggcaaagagaaagcttggcacccacaagagggccaagaagaagagagaggagatggctggtgtccctcaggaagatgaggtctggtggcggtcacgcttacaccgagaagaagaaatagagtatctccaagttcatgaagtccaaggcaatattgtcttgttgagtttacttttgaagaaccctactactagaattgcactctattatccagctaaacatcatggtggtaggt

SEQ ID NO: 17499 - DNA, 465 bp, Oryza sativa
  Clone ID: uC-osflcyp015b05b1
ttatggagatagagtgcaagataaaaagggcaaaaagcggagggccctttttcttggccatcccctgagagtatgggctgctcctactctttattagcaggagaacaaaacggaggcggataaatgcgctgcctgaccagcatggaattttttgctcatagcataaagtcaagtacagcatccaagctgtttaattctagtaccaagctggaaaacttgtctcatgtgtagtatatacaccaccagcacagctccagttgaaaaaaaaaaagaaaaaaacggccagatctatctcaccggcgcgcgcgacacagcgagttcgcgcgagcgaggcgtctggtggggcgtcgttttccccgcaccgtgcgggggtctcgtcgtactaccgagagtatgcgcacgccaccggcgtgcgcggcggaaaaacaggtaacgcttcttctgtggccgaccggagacacgttt

SEQ ID NO: 17500 - DNA, 520 bp, Oryza sativa
  Clone ID: uC-osflcyp015b10b1
gtctttcgcccgagcagagaagccgccttcgccgccgccgccgcactccaccgcgcgctatccgtatccggccgacgcctgacaagatggagagagtcagtgtcctcaatgacgctctgaaaaccatgtacaatgctgagaagcgtggtaagcgccaagttcttatccggccctcgtcaaaggtgatcatcaagttcctcatcgtcatgcagaagcatggttacattggtgagtttgagtttgttgatgaccaccggtctggcaagatcgtggttgagctgaatggacgccttaacaagtgtggtgtcatcagcccacgctttgacgttggtgtcaaggaaatcgagtcctggactgctaggctgctacccttccgtcagtttgggtacattgtccttaccacctctgccgaatcatggaccaacgaagaagcgtggcggaagaacgtcggacgcaaggcgctcggctttatctacctagagatattcatcccacatggaagattttctcaggtgtttgc

SEQ ID NO: 17501 - DNA, 532 bp, Oryza sativa
  Clone ID: uC-osflcyp015b11b1
ttctttgaaccggagggatttcactcacttgagtttcctgcctccatccccacggcgatggcggaggaggcgaagaatctggagacggcccgggccgaccgctccgtgtggctcatgaagtgcccgaccgtcgtctcccgcgcctggcaggaggccgtcaccgccgccgcctcctcctcctcctcctcggacgccgccgctggcgccaactccaaccccaacgcgaaccctaaccccgtcgtcgccaaggtcatcgtctccctcgacccgctccgctccgaagaccagcagctccagttcaagatggagatggctcaaacaggcaatggcaatacaccaaagagttactccttgaacatgttcaaggattttgtgccaatgtgtgtcttttctgaatccaaccaagggaagctttcatgcgaagggaaagtcgggcacaaatttgacatggaaccgcacagcgattatcttgtgaactatgggaagttatgtcgtgagaggactcaaaaatctatgattaaaaatagaaaat

SEQ ID NO: 17502 - DNA, 528 bp, Oryza sativa
  Clone ID: uC-osflcyp015c02b1
ttctggcaagctctcctcccccacgactcccctctccttcctctctctctcgctcgcgcgcgcctgcgtcgccaatggcggaccatctcaccgacgaccagatcgccgagttcaaggaggccttcagcctcttcgacaaggacggcgacggttgtattactactaaggagttgggaactgtcatgcgttcgctggggcagaacccaactgaggcagaactacaagacatgatcaatgaggtggatgctgacggcaatggaacaatcgatttccctgaatttctcaacctgatggcccgcaagatgaaagatactgattctgaggaagagctcaaggaggcgttccgtgtgttcgacaaggaccaaaatggttttatctctgctgctgaattgcgtcacgtcatgactaaccttggtgagaagctgacagatgaggaggttgaagagatgatccgtgaggccgaatgtgatggtgatgggcagatcaactacgatgaaatcgttaaagtcatgatggccaagtaagttg

SEQ ID NO: 17503 - DNA, 451 bp, Oryza sativa
  Clone ID: uC-osflcyp015c08b1
tttcttttcaaggagcttgcacaagcttatgaggtattgagtgacccgtagaaacgtgaaatctatgaccaatatggtgaagatgccctcaaggaaggaatgggtggaggcggatcccatgttgatccatttgacatcttttcatcattctttggaccttcttttggtggtggtggcagtagcaggggcagaaggcaaaggaggggagaggatgtgatccatccgcttaaggtttctctagaagatctttacaatggtacttcaaagaagctttctctttcccgcaatgttcatttgctcaagtgcaagggcaagggttccaagtttggtgcttccatgaggtgcccaggttgtcaggggtctggtatgaaaatcaccattcgccagttggggcctttcatgatacaccagtcgcagcagcctttcaatgagcgtaagggcactggagaga

SEQ ID NO: 17504 - DNA, 545 bp, Oryza sativa
  Clone ID: uC-osflcyp015c10b1
tatacccttctcttgttcgcttgcggctcggagaagaggaggagaggaggggggcaaggcaagcaaatgctcggcgccgctccggcgtattttggtggaatagtaacttaatatagagttctgggacagaaaattatggagagggaaatttctgccttatatgaaccaaaaagaaacaatgaaataagaatttttgagagttcagatgagatgtcaacagatctggctgagtatatctcgcaagtttcagaaatatctgtcaaagaaaggggatactttgctattgccctttctggaggtcccctagtcagttttttggggaaactttgtgaagcgccatacaacaagaccttggattggtctaaatggtacatcttctggtctgaggagcgtgctgtagcaaagaatcatgcagagagtaattataggataacaaaagaaggattcctgtccaaggtacctattctcaaggccatgtctactctataaacgacaaccgacggtggaggatgccgcaacagattacgaatttgtcatcaggcagc

SEQ ID NO: 17505 - DNA, 527 bp, Oryza sativa
  Clone ID: uC-osflcyp015d02b1
ttttccacctcccgtccctcttccgctccaaatccaaccctcccctcggccgctccgcctgcgccgccgccgccgccgccgccaccggagcgacggcgagggagggagtgggggagaagcaggaggaaaccccaaaccgtcccgatctcggggtcgggaacccgccgccggcttttccgctcgttcgaggcgatccaggcgcgtttcatgggcctccggaggcaatctctgcaaggtaaggcttttcctgtcagaggattccccctctcaagctggattaagaccgcaggataatctccaagcaaaaggctcatggttactgcatgcagctggcccaagctcagatgattccttgcctccaggctttgagtcattgccaccaagcaatgacctcaaaattgacatgtctcaaatccccctaattaggtggaaatgccccccaatatagtattggagcaggattggcatattgttgctggagagaaagtagggagattgaaattaaaatgagagaataaatggagcgc

SEQ ID NO: 17506 - DNA, 465 bp, Oryza sativa
  Clone ID: uC-osflcyp015d10b1
tttttgagatcgctgagaacaaggaagactacaacaagttctacgaggctttctccaagaatctcaagcttggcatccatgaggattccaccaacaggaccaagattgctgagctcctgaggtatcactccaccaagagtggtgatgagttgaccagcctcaaggactacgtaacccggatgaaggagggccagagtgagatctattacatcactggtgagagcaagaaggctgttgagaactcccccttcctcgagaagctgaagaagaagggttatgaggtcctgtacatggttgatgccattgatgagtacgctgttggtcagcttaaggagtttgaaggcaagaagctcgtctctgccaccaaggaaggtctgaagcttgatgagagtgaggacgagaagaagcggcaggaggaactcaaggagaagttcgagggtctgtgcaaggtgatcaaggaggtgc

SEQ ID NO: 17507 - DNA, 459 bp, Oryza sativa
  Clone ID: uC-osflcyp015d11b1
gcgccggctggtaccgccgcggcgttcctggcgggacccacgcgtccttcttgctatgatggaagctagcagtttccgagcctactgacgaagccatcagggcgatcaactacacttacctcacccagattcaagctaggtccataccacacctgccgaatggaaaggatgtgatgggcgcaggcaacactggttcagggaagactcttgccttcctcataccagcaatcgagatgctccaccacgcacatttcatgccgaggaatgggactggagttgttgtggtttgcccaacaagagagcttgccatccagacacacaatgttgccaaggaattgatgaagtatcactcacaaactcttggatatattattggccgtaatggccggagaggtgaagcagatcagcttgcaagggagtgatttatttagctgctacaccaggcaggcttttggacca

SEQ ID NO: 17508 - DNA, 505 bp, Oryza sativa
  Clone ID: uC-osflcyp015e01b1
tttcattctctccacgtccacgacgtgaagcacagcgacggcggcgcggtccgcgactcgccgacgcacatcggcccccgcacgcgggccgacggcgacggcatctcgctcttcgccgccaccgacgtgtgggtggcccacgtctccatgtccatgtgcgaggacgggctcatcgacgtcgtgcagggctcgacgggggtgaccatctccaacagccacttcaccaaccacaacgacgtcatgctgttcggcgccagcgactcgtacccgcaggataaggtgatgcagatcaccgtggcgttcaaccacttcggccgtgggctcgtgcagcggatgccgcgatgccggtgggggttcttccacgtcgtcaacaacgactacacgcactggctcatgtacgccatcggcggcggcatgagccctaccatcctcagccagggcaaccgatacatcgcccctcccaacatcgccgccaaactgatcacgaggcactatgcgccggagt

SEQ ID NO: 17509 - DNA, 513 bp, Oryza sativa
  Clone ID: uC-osflcyp015e05b1
ttcgtctcctttcccctccttcctcctcccctttcgtcttagcctcagctcgccgcgagacgaatcctcccctcgccgccgccgggtccgatcgacggcggtatcgagggacggagggggcgcgcccgttctctcgccgtacaccgtcgtcgccgaccggctccctcgacggcacggtaaaataaaaaataaaaagcctcctcctcctcctcctcccctatgatggcggatgcggcggcgggggggcgggccgatctggacgccgttgaccccacccgattcggctcggtcgcatccccccgtgcgcgcgtttactgggaggatctgttgtatttggacgttttagactggatcgagtgagggggattttgccggtgttcttgctgtgacgggattcagctatgtaggtgtaggaatcttatgttaacttgttgggtggctctgctgcttctgattctttctgtgaatctggagtaacaaggacttgggctatggccgatctctacttttaga

SEQ ID NO: 17510 - DNA, 489 bp, Oryza sativa
  unsure (1)..(489): unsure at all n locations
  Clone ID: uC-osflcyp015e06b1
caggatggcatcctcctcctcacctccactcctcctcctcgtctccctcctcgccgccgtcgccgccgccttcctcgcggcgcaagctctcgcccaacaccaaccccaaggaaatgatacggcggcggcgggggaggggtggaggccgaggctgaggaagacgtacgtggagggcggcgccgccgggatggtgccgcggcggcggaggctggtggnggaggttccagatatgcgcggtgtgcacctgctgcgggggcccgcacggggtgtgcatcccggcgccctgctgctacgccatcaactgcaacatcccgaaccgccccttctggcgtctgctccttcaccccgcgaacctgcaactgcctcaactgccacctctagcagatatgcagcacagcacatcagccaagaaaatcaggcaagaaaccccaagtaaaagaaaaaaaacagtaatgcttaatgctgcttttaatctctttgttttttttc

SEQ ID NO: 17511 - DNA, 507 bp, Oryza sativa
  Clone ID: uC-osflcyp015e07b1
tcgttaaacccctctcactcccactaccatggatccttgcaagttccggccgtcgagctcgttcgacacgaagacgacgacgacgaacgcgggagctccggtgtggaacgacaacgaggcgctgacagtggggcccagggggccgatcctcctcgaggactaccacctgatcgagaaggtggcgcacttcgcccgggagcgcatcccggagcgcgtggtccacgcccgcggcgccttcgccaagggcttcttcgagtgcacccactgacgtcaccgacatcacctgcgccgacttcctccggtccccgggcgcccagacccccgtgatcgtccgcttctccaccgtcatccacgagcgcggcagcccggagacgatccgcgacccgcgcgggttcgccgtcaagttctacacccgcgagggcaactgggacctcctcggcaacaactttcccgtcttcttcatccgcgacggcattcagttccccgacgtcatccacgcctttaagc

SEQ ID NO: 17512 - DNA, 204 bp, Oryza sativa
  Clone ID: uC-osflcyp015f03b1
cctgtgcgtacgccaccaacttcgtccccggcaagtgaagtgggggaccgtagcttagcagtggttaattgtggttggatggatttgtggccagcgagttcgttgtctttgggttggggaagatgggtttagtgcgacgagatgatgatcgagttggtgttgtgttcactaagaagatgaagaagaagatgatgtttttgctat

SEQ ID NO: 17513 - DNA, 370 bp, Oryza sativa
  Clone ID: uC-osflcyp015f04b1
tgtagaggagagcgagcaggcggcggcggaggaggaggattcgccgctggtggtggtggaggccgaggcttattctttatcacctgatgaatattcttttcttttttcttatcttttttttttattttatttatctttttttttttctttctcctcttttgttctttttcattttcttattacttttttttctttatcttctttctttatttccttattctttccatttttttttatatctatattttttatttattttattatattttttacttcttttttttctcatttctattctattatttatattattacttcttcttatctattttttatatttttttattcttttctctatatttcttatttt

SEQ ID NO: 17514 - DNA, 473 bp, Oryza sativa
  Clone ID: uC-osflcyp015f05b1
ttttactctatcacgctcacagggtcatgtgtgcggctattatcccctcgatttggctacttccccgccgtcgttctgcgccgtcgacggtgacgacctgctgttgatgcatgggagatctgtctggaagagcacactgagatggtttacggcattgcagttctacgggagtttgactaagtaactgtacaacaaaagaaagcgggcatgagtgggagtatatgtggcaaactcacctgatagcagtggtccattgacgggaagagcaatagcggtgaagaggtgcatattatcgggaagtgtaagaggatgtgggcatactagttaagccgtttccttccctacaggcaatatgaccaagcttgacttaccttcgagtattatgttctatatagaagaaaggaactgtggcatcacaacccagacattgttaaatgatgcatggacatctgcatatcgacataacaagaaca

SEQ ID NO: 17515 - DNA, 123 bp, Oryza sativa
  Clone ID: uC-osflcyp015f06b1
taaataattttgtgcaaacatgactgatgtatatgaaaatacgtctctgattgggatcttgtaaacttatttgatttgggaaggactgcaacacttgaaatttttattggaaggacaattcag

SEQ ID NO: 17516 - DNA, 402 bp, Oryza sativa
  Clone ID: uC-osflcyp015f09b1
tgccgccctttttttttttttttttttttttttttttttttttttttttttttttttttttttttttttctttttgagcacaacaatttgcatcattatttttttccaggcgaaggcggtcacccttcttcggctcccttcttctttccccggggttggccatgggagcctttgccaccgggaccccctggggggggaactccggggccccctggggcatgggggtgtttcgggccgggtttcccttccccacccggggcttcccgggggggaagctccggggggcgttctcgcccggggggggggccacgggggggtcgggcgggtggcttaattctttttcggggcttacccccatttggcctttcctttccctcggggaagagactttaagctttgagc

SEQ ID NO: 17517 - DNA, 446 bp, Oryza sativa
  Clone ID: uC-osflcyp015g02b1
tgttttgctgcaatttctcaaggattctcttccagatgttccaatggctgttgctcatggaaagaaagtttcaaagaacatacaacttgctatggaaaaatttgcttgtggagaagtcaaaattctggtctgcacacacatcattgaaagtggaatagatattccaaatgccaacacgatggtagttcagtatgctgaactatttgggcttgcacagctatatcagttgcgaggtagagtaggaagatccggcacagaaggtttcgcatacctcttctacactgataagtctttgctctcaaagattgcaacggatagacttggagctattgaggagcatttagatcttggtaaaggttccatgttgcagagaagatatgggtattaagggggttcggaagcttgtttgtgagcaacatctggagatgctgaaatgatggattgat

SEQ ID NO: 17518 - DNA, 423 bp, Oryza sativa
  Clone ID: uC-osflcyp015g08b1
tgtcctccaagagaaccttctcagaggcatctatgcttatggttttgagaagccatcagctattcagcaaagggggattgttcccttctgcaaagggcttgatgtgattcagcaggctcaatctggaacaggaaaaactgctaccttctgttctgggatcctgcagcaacttgactatggattggtggagtgccaatccctggtccttgcaccaacacgtgagcttgcccagcaaattgaaaaggtcatgcgtgctcttggtgactacttaggtgtcaaggtgcatgcctgtgttggtggaacctctgtccgtgaggaccaaaggattcttgctagtggtgtgcatgttgttgttggcacacctggacgtgtgtttgacatgcttcgtcggcaatctttccgccagaccacaataagaagttt

SEQ ID NO: 17519 - DNA, 394 bp, Oryza sativa
  Clone ID: uC-osflcyp015h03b1
ttagtggtcgaggtagagaggaaagggcgaggagggcggaggaagatgagcggcaaccgcgtgaataaggtggacgaggaggacgacaacgccgcgaaggcgatcgactgggaggggatggccaagacgctcgtctccgaccaggcgcgcaaggagttcaacaccctacgccgcaccttcgagggcgtcaaccaccagctccagaccaagttctctcacgagccccaaccgattgactgggagtactacagaaatggaatgtgggtctaaagttgtagatctgcacaacgtagcttatgaaagcattgaactccccaagtacgacgacaccgtgactcctcagtacaagccacagtctgatgcgctgcttgctgagctcgaagaagcacaaagg

SEQ ID NO: 17520 - DNA, 532 bp, Oryza sativa
  Clone ID: uC-osflcyp015h04b1
tggcgactgggttgttgaggcagttgtcaagaagaagctcaacgtacttagtgtccatttgacaagctcaaagtcactcgttggcgtcactggggttatatcagagattcagcaggaaaagaagggccgagatgtatatatactgggttcagcaaatgttgggaaatctgcatttataagtgctatgctaaggacgatggcatataaggatccagtggcagctgcagctcaaaaatacaagccgatacaatctgctgttcctggaacgacccttggtcctattcaaattgaagcatttttaggaggcgggaaattatatgatacacctggagtccatcttcaccaccggcaagcagcagttatccatgctgatgatctgccttctcttgcaccacaaagtcgtctaagggcacggtgttttcctgctaatgatacagatgttggattgagtgggaattcattattctggggtggactagtccgattgatgttgtcaaggctcttccacgcacacgactgacgttctatggac

SEQ ID NO: 17521 - DNA, 464 bp, Oryza sativa
  Clone ID: uC-osflcyp015h07b1
tctttttgcaaccggagatggatgctaaaaagaagaggaacaagaagaagaaggggaaccaagggaagaacactggtgatgtaacgtccagcactgcagaggctgccattcggtcccacaatcatgagacagcccctaatgaccatcataatggcactgatgctgatgatgcaatgtccactgttggagaggaagctcctcagtaccagaatcatgagccagatcgacaggcaaatcatgatagcacaaacactgatgatgtcatgtcctctgttggagaggggattccatttcagaaccttgaccctgccatgacacatgaaaatcacaaagtcagtagtacagcccatgctgatcaaaggagtgttgagatgtcagattccaccgtggagcttgacatgcacagactttatgaagcaaagcttgataaattacatgatacgataaagaaagttggaagatga

SEQ ID NO: 17522 - DNA, 514 bp, Oryza sativa
  Clone ID: uC-osflcyp015h11b1
tcttgatcctccattgctgcaaaagaagaagaggtagacgaaggaggaggagatcaggtgatcatggggactcaggtggcagataactacccaccggccaaggatggccggagcgcgcaggagaaggcgatcgacgactggcttcccatcacgtcgtccaggaacgccaagtggtggtactccgccttccacaatgtcaccgccatggtcggcgccggcgtcctcagcctcccctacgccatgtccgagctcggctggggacctggcatcgcggtgctgatcctgtcatggatcatcacgctctacacgctgtggcagatggtggagatgcacgagatggtgcccgggaagcggttcgacaggtaccacgagctcgggcagcacgcgttcggcgagaagctgggcctctggatcgtggtgccgcagcagctcgtcgtcgaggtcggcgtaacatcgtgtacatggtcaccggcggcaagtcgctgaagaagttccacgacgtgctctgcgaggg

SEQ ID NO: 17523 - DNA, 286 bp, Oryza sativa
  Clone ID: uC-osflcyp016a02b1
tcttataaagccgaccatcacaaccgcagggggggtgttgttaaataaattcgctgttcacccgctaccgcacaacggcgcaggctgggccacataaaagtgcccaacctaaaagatgatagtggccatgaagcagaagaccgatatgaatgaggagcttgctaaacagacaaaaacaacacagggcacagaatgaacagcgtgatacttacggcgaaaagcgcaaggaacaaggacctgggactaatctgatagctacactggtagacgcaaacacagacaccag

SEQ ID NO: 17524 - DNA, 400 bp, Oryza sativa
  Clone ID: uC-osflcyp016a05b1
actgatgtcacttggtcattactcaatgagggtgtgttttagtggcatggcgttttatctgcgcgacgctgttctcctattgaacttgcgcgctcttatagcttcattttggaagcggataaaaacttatgccaagttacgaaaggcacttagttcactcgacggagcacttccagatgctacatatgatgaaatctgtgcatacgacgatgagtgtgccatctgtaggggaccaatggctcgagctaaaaagttatcctgcaaccatctatttcatctagcttgcttgcgatcatggctggaccaaggattaatggatggttactcatgtccaacttgtcgaagacccttctttctgtcatctcaagggcacacaagatctacagcagaggtaggaaac

SEQ ID NO: 17525 - DNA, 340 bp, Oryza sativa
  Clone ID: uC-osflcyp016a12b1
ccgaacctccccgacccctacgggaggggcttttaaaccaacttccctttcccccccctctccccgacggtttccgccgagacctccggcgtcatgaactcctacgacgccgacgccaccgccaccgtcgtagccgccgccgcggcgcaccgcgccgtacgtaccagagcatccagcccgatcccgccgtgcccttccccgtggtcacctccaagctcatgaggtaccccttccctcaaggggatggaggaggccaacatagttctgtccaccgagaacatgctcatcattgagctcgaggcctaggcggagaaacactccctcaatgggtatccaggag

SEQ ID NO: 17526 - DNA, 460 bp, Oryza sativa
  Clone ID: uC-osflcyp016b01b1
tttaaaccttttagcttctcagccttttgcctctctttctactctctttcttggccgtctctcttatatccctcaatttaaccatcgagggcggccaaaaaaaagagagaaaggaagagcaaaataacacattacaccatggcgcgattcgtcatcatctccgtcgtcgtcgtcgccgccttcgccgctgccgctgtcgttgaggcccgggttggacctatcgacgtcgctccgaccaacctgatcaccaacccactcggtgccatcatcgacaatggccgcaagatcaccggcgccgtcgtcgacgagtgcgcctggacctgcgatcatgtcgcggcgggtaacaagaagatgtgcaacacgctgaggaagctgccgggggtgagctcgccgaaggagctcctgacggcggcggtgaagctgtcgatgaggaaggcgaaggcggcgagggcgaggttcg

SEQ ID NO: 17527 - DNA, 156 bp, Oryza sativa
  Clone ID: uC-osflcyp016b09b1
ggcaagaaagaccacgcctaggctcgcaacaacaagcgcaagttgacattcaaggccaacccgcaaatgtcaggaagcaggatgatcggcttcaacagggtgctgaagatcgtcaagctcaacggatagctctcatcctacaaaatcggcgagctg

SEQ ID NO: 17528 - DNA, 322 bp, Oryza sativa
  Clone ID: uC-osflcyp016c02b1
taaatactctctctcgccgatagcagcgggggcatttttggccgatctcgccgtcgcatccaccgccttcgccaacaagccgcgcctggcgcgcgcgccgtcatccccagccgagcggatctccgagtcgtgctccgagtggggcaacaacggcggcgcctgcgagatggcgcagacgctggcggcgtcggccaagacgttctccgcggcgctggcgctgaccacggagctgctctactcggcggcctggcacgacttacacattgcactgtccatgaacagggcatactgttggcctggaagacgaaacatccttcatctg

SEQ ID NO: 17529 - DNA, 320 bp, Oryza sativa
  Clone ID: uC-osflcyp016c03b1
taagaaagcagaaccaacacaagggacggggggatttttcacttagctacgtggatctcccaccatgccggacaagtgcggcaactgcgactgggctgacacgagccagtgcgtgaagaaaggcaccagactaggcgtggtcatagttgaagccgagaagagtcactatgaggaggacgccgccggccaggagaacgggggttgcaagtgcggtaccagctgctactgtaccgactgccagcgggggaagtgaagacacaaagcaaccgaacactcgccgcgggggagtcacctactttaatgtagcccacattaaaaac

SEQ ID NO: 17530 - DNA, 344 bp, Oryza sativa
  Clone ID: uC-osflcyp016c04b1
actgcaaactccgcctgcgatgacaccgggggcacttttaggtaacaccgggcttgccgcccccaccgcatctacagccaccgaacgaacccaggagagatagcgacagactgctacaagaggcgccaccgagcccgattactcccgatggcacacagatcggcaagcaaagaggacgagccaaactcgatctgcatgaaaatgtgggagcatcagccagctgcgaatgctcaggttatgcggaggagtgtacgcagggatacatcctccccgggccgtacgaggacctggggcttcagctgagagaactcgctgccgacgaacgagggcacgtgacacgacca

SEQ ID NO: 17531 - DNA, 295 bp, Oryza sativa
  Clone ID: uC-osflcyp016c05b1
actatgttctgctcctcgtgaggtgccctggggtggcttttgagggactatgcacaccgccggagagacgtacgggtgggcgatgggggcagattacaccacctgggtcagcgacaagaaattcaacatgggcgataccctcgagttcaactacgccggtggggcacactcggtggatgaggtgagcgcatcggactacgctgcgtgcaccggcagcaacgtcggtacagagttgactagagcggcactaccaccgtcacctttaagaccgccggcaggcactacttcatttgcg

SEQ ID NO: 17532 - DNA, 435 bp, Oryza sativa
  unsure (1)..(435): unsure at all n locations
  Clone ID: uC-osflcyp016c09b1
cggcccggaatccccgggtacgccccacgtcgtactgccgaacatatantgccatcctacaaggggttcttttatgtgcctcgttcgtgggcccctcgaacgtgcgccacggtatgcatgcgcgcaggctgacaaagcgagccaactgaaccgcaactacacgcattacagcactgagcgaacgccgatcatggctgaccccacatttgcctcctcaatcgataccggtgacccggaatcccgggatggacctatggacgcgcttaaggccaccctgggcaccgacccagtggccaccgtggaggaactcatgcgcacgatgaccgtcgccgaccgcaccgagaggcccgggagctcggatactgtcgttgcgcttaacaagatgatgaagctcactcaccagaagatgaccggggcgaacgaccgcacggaact

SEQ ID NO: 17533 - DNA, 437 bp, Oryza sativa
  Clone ID: uC-osflcyp016c11b1
atcgaaacccatccaagacggctccccagggggattttttgacaaaccgtgctgatgctccccacacgcataagaagcccaggatgatcaccaaaacagaaggccgcggcaatggcatcaagactaacatcgggaacatgggggatatagcaaaagccctagctaggcctgcttcctacacaacaaagtactatggatgtgagctcggtgcacagcttaaatccgatgagaagacaggcacttccttgggcaatggggcacatgacactgccaaactggctggtctcctcgagaactacatcaagaagcatgtccaatgctatggatgtggcaaccctgaagactgaggttcttatcttcaaggcccagatgatcacatcgaactgcgctgcctgcggtatgcgacacaccttaacataagggacaagctcacaact

SEQ ID NO: 17534 - DNA, 409 bp, Oryza sativa
  Clone ID: uC-osflcyp016d05b1
atgtttccggcaatcaagccagagtacaagcggcatcttatgactagacattgggctaccaagcgcaaacaataccatgatccctagctgcctcatgcctgaaggctcaagagacagctgctgacgactccgacacacactgggttgtacatgatcgaacatggagcgatgcaagctgcaacaataacctgtgaatagcaagttgtctggctacacacatcacacatgagagaggttacacgaccgcattcccatggtggctaggtggtacatgaaaccgagatgaactttctaggatgaacaatgtattgcaccaagagccttacccctcccaccccccatatatagagacaggccactttcaaaagggtcactgggggtgcatgctacatggtcgctgatgtagagg

SEQ ID NO: 17535 - DNA, 467 bp, Oryza sativa
  Clone ID: uC-osflcyp016d09b1
ggcgcggaatctcgggggtcgacacacgcgctctagatactgcatgatccttcacaggcaggggcctgtgctccataagatgacgacccataagcaacacctgatatattgataatcgggtaacgtgcttcgttatctgaagcgggactcgacaatgaagcatccggatgctggttctgtggcggtatggatcacaccatggcttgtggcatgccttcctgctgggaatgggataatgtgctggatcgagatggaaccatgaggcggatcagaatgcttgccaggaattactccctggcctgtttcggcctgaggatattgctgagtcgccagcatcacctgcattaatccgtgtggtggcatttatgctggagatgggacaacaatgattgacttgggagctgcatgaatgatgcaagaaggctgcttcattttagagggaatggagcagtgatatgttgtgatcc

SEQ ID NO: 17536 - DNA, 394 bp, Oryza sativa
  unsure (1)..(394): unsure at all n locations
  Clone ID: uC-osflcyp016d12b1
atacggccggaggcgacgggcggaagcagagaggaatttatagangaggcagggagggaccccccccgccgcgccgagagaggccgagcacaaaggggacggcgaccgaggcaggaggggaagaaacaggaccggaacgggatgcaggggaaccgggagctccttgaggaggcgcagatgaagagccagccggcggagcacacaaaccaggagacgctgagggggaacagaaccgacggcgaccaccgcacactggagaacgagcacatggcccgaggcaccacggaggaccacctgcacgaccagcaacccaggagccgagggactggaccggacccaaggggcgcgcaacgagcaaggagccgcccgaggacaagagcaccggcacgacgca

SEQ ID NO: 17537 - DNA, 370 bp, Oryza sativa
  Clone ID: uC-osflcyp016e09b1
tatgtggtattgtgcaccagacccagagcaggatttttttcagggatatgacggtaaagacgttgtggctcaaaatctacatcaaatttgtgtattcaaggctgctaatgagagtgggaagccatggttgtggcgggactatgtgcatgacttctcaattaggtgccctatgaaggagaagaaatacacacctgaatgtgctgttcatgttattaagtcactcgggttggatgttgagaagatcaagaagtgtgttgtagatcctgaagctgatgaggaaaaccttgttctgtcggcagattatgcactcccaaattggcccttgtcaactaggagatgtcccatctctgcccacccttgctatcaacaa

SEQ ID NO: 17538 - DNA, 151 bp, Oryza sativa
  Clone ID: uC-osflcyp016e10b1
acgacccaacacaaaagccacgcccaggggaggattaaagaacaggagcgggggcccccccacaggggaaggacaaaaccagagcccgacgcagaggcaagacaccagcgcgacgaagccggacgaaatcagcgggtgacagagagagaac

SEQ ID NO: 17539 - DNA, 453 bp, Oryza sativa
  Clone ID: uC-osflcyp016e11b1
atgaacaagaggcgctgtctattcatcggggggcttttaagcagtttcagctgcaacctccatgggcgtgcatcgctaagaatgggcacagagatagccaccggggaggtggaggggaacccaccatctcaggagataaccgggagcaagccattgtgactgcttgctaaaggcatcacagacattgagatccatacccttcagatcaaatacaacgccatcggggtgtatctcgaaaaggacaaggtgccagcgcattcggagagttggaagggcaagaaggccgcggagctcgtgcaggaagacggcttgtatcaggcacctagctatgtgctccggaggagaaaaagttgaggatagtggagatcaaggagagcaaaggatcacaataccgtgagcagctggagagctaagcgcgtgaccgccatgtgccaatagacagcacgaggagga

SEQ ID NO: 17540 - DNA, 481 bp, Oryza sativa
  Clone ID: uC-osflcyp016f04b1
actatagcctctaagcaagttatatgggtggggaatgtttgaagaccacgggtgttcgcatgcagcaagacaacatcatttgaaaggaagacatcaagaattagcccaccatgtgaagaacaagaacttgctattgggagtcatgatagtgatattgaggctgactgtgctcatttgcaagaagtgcttttcaattacaatgaaaacattgtgcacagaagagttgtacaaaggggaacttcacgatgtgtttctgtcactccaagaggccgcacaacctcttgcaatgaagatgaaagccttgttggcaaggatgttatactctatgctgtcacaagaaatgatgtcccagtagccaaggcaacaattgtctcaacgaacccaataacaacagtgggaggtcaagctcttggagtccaatactatgaggtggttgtgaatgtggtgctaaagaaggacaccgcgcttccttggccatttt

SEQ ID NO: 17541 - DNA, 304 bp, Oryza sativa
  Clone ID: uC-osflcyp016f08b1
tgttgcacaaaaaaactaaggcataggaagggggctgcttctggtagctggtggcgttgctggaagcacaattgcgggcaccaaatacccatggagacgagggtgaggatgagctgcaagatgggcactatggaggccctggtgctggcggacgcctcgctgactactgaaccagcatagaggccagccgacaactcgtgaatcgttcagcaggcgactagccggcgagaaaagtggagcacacgactaccattgactacagcatacctgaagggcgaagcatgcctccaccgaggcgcttgct

SEQ ID NO: 17542 - DNA, 358 bp, Oryza sativa
  Clone ID: uC-osflcyp016f09b1
tcgtcgcccgctgctcctgctcgcttcctccggggcaatgtgtggctctcctcctcctttccgccgccgctcgggttggcgtggctgcgccactggcgctgaggcagcagcgcccggtggtgctgcccggaggccagctccgcacgggaagcggcgccggcgcagcgtcggcgtgggcggcgcgccctctccggccggagctcgccgcggtctcccgccccgccgaccccgcccgcggcagggcgcctctgacccggcctcgcgcatggatggcgtcaaattagaacgcgagctccgcctcaacctggggcaccatcgccgaactccctttctacactaacatggtcgacgcccccaa

SEQ ID NO: 17543 - DNA, 404 bp, Oryza sativa
  Clone ID: uC-osflcyp016g01b1
catcaacaagatagtcctcgtgcaccaggtgtggtgaataaatggcaggcacaacttcatggccgtgctgcttttcatggaccaccagcactggctcttccatctcaatcatcatctccgccatctgtcctaatgtttcagcaagctaattcaaagatgcccaggttggagtttgggcatggacagttggacaagcacgagaatgataggcgtgttaggtttggtccttctgaaggaattgaaagaagagagcaaagaataccactccagccttatcctacttctggagaagtgatagatggacaggttacagttgagaagtctcactcccctggtcgacatggaaaggatggtccagataacaaagctgttggcacaaatagttgcaaaatatttggcatctc

SEQ ID NO: 17544 - DNA, 430 bp, Oryza sativa
  Clone ID: uC-osflcyp016g05b1
actgatggatgcagcagaaacagaccagggggggcatttttaaaaggctcacatttgccatcaagtgtcgccgaaggggaaatatggctctgtaaaaattgggcccattcctggggactccagcgagcaggtccaagcagcgcataatgccatgaagaaggacgaaaggatgaaattgttcttgtaaacattaacagcacagtgtgattcttgtgactctagcatattgccacacgaatggccatctttataagcaaaagccaagaaatttcaccatttcttggccaaacattaaaaagatggattcccactttagttgaatagcttaaatgagaggccacattgcctatttactgggaatatgttctgatacctactggaatttactggccagggtgggcatgtttggaccatactttcaggaggacct

SEQ ID NO: 17545 - DNA, 246 bp, Oryza sativa
  Clone ID: uC-osflcyp016g10b1
tcgtctgcaaaaaccaagggaaccgaacgggggggcattttaaaaactatttcgttcaatgccccaacggaggagcaatatgaggatgatatatggatataactcgcagatcgatggtgcggctgtgcggtgagctgcagcaagcattctcggcgacacgacgggcggcagaccagacgaccgctgggaacagcggaggctcaagctcaataacgggatggcgagcggcaagctgaagaggaagac

SEQ ID NO: 17546 - DNA, 432 bp, Oryza sativa
  Clone ID: uC-osflcyp016h03b1
ccgtacagtaacacgacaacatggagagaggagccattaaatatgagcgctcaccttgctcgacgccggcagcgtcgtcgtcgtcgacgtcggagacgcctgcgacggcgagccgaggatgccggccgcggaggcctgcaagcaggccagcgtgggccccgccatgtcgcggacgtgcgccgagacgctgggaaccttggaggacgagcagggggcgacggactacatggtggccggcgcgaacgccgagacggagatcgacaaggctggcaaggaggccgtcgagaaggtgctctacaacccgctggcgcccgacggcgagcggctgccgtgcctcgtgtgcacgaacaagtaccacgacccgtcgatgctcgtcgccagcaccggcggcgacccccagcgctggcagctgaggcgccgacaggctccccg

SEQ ID NO: 17547 - DNA, 286 bp, Oryza sativa
  Clone ID: uC-osflcyp016h07b1
tgatggtccgctaccggagctggatgctaaggggacattgaacaggatgaccacggggagccgagggaagaacactggtgaagtaaacgactgcacctgacaagggtgtattctgtatcacaatgagaaggcagcccggagtgaccatgatactggcgatgaagctgatgctggagtgtccagtgttggagaggaagcacttgaataccagattcaggggccagatcgacaggctactgatgatagcacaggccctgatgatgacatgatctatgcttgagaaggg

SEQ ID NO: 17548 - DNA, 426 bp, Oryza sativa
  Clone ID: uC-osflcyp017a01b1
gttacgcgtccgtactgctgaacgacacggccaacttcaccggcgagcagggggcgaaccccaacgtcggatccatcagaggattcaacgtcgtcgacaacatcaaggcgcaggtcgaggccgcgtgcaagcagaccgtctcctgcgccgacatcctcgccgtcgccgcccgcgactccgtcgtcgccttgggtgggccgtcatggagggttcttctcgggaggcgtgactcgacgacggcgagcttggcgctggcgaacagcgacctgccacctccgtccttcgacgtcgccaacctcaccgccttgttcgccgccaaggggctgagccaagccgacatggtggcgctctccggcgcgcacaccggcgggcaggcgcaagggcaaaactttcgcgacaggctctacaacgagaccaacttcgacg

SEQ ID NO: 17549 - DNA, 463 bp, Oryza sativa
  Clone ID: uC-osflcyp017a01b2
tttggtttttttttttttaggcaagggagttaatctcgcgggcatttgcatgagggctcttcagaattcagtgtacacgatcaaattcttgcaaacacgccactttctcggacacaatttgatccaagaaagcgtgaacatgatcactgatcagtgcaaagcacaaatatcgatttcagtggcatatatagccttattattgtcccctcatgcactcagaattttcgttgatgatcaccgctaattaattcaccttggagcagacgagcctgatttgtccctgcgttcccgtcaacggggcgatgttccccatcttcaccatggccgccgcgaagtcccttctgaacctcgacggcccggacgcgtacgaccggacctggccgacgacggcgccgccgttgaagagcacctggtcggagtgcaggagccccttgttcgacagcaggttggtgtagtaggcgtt

SEQ ID NO: 17550 - DNA, 317 bp, Oryza sativa
  Clone ID: uC-osflcyp017a02b2
tttgggtagactgcgaaaatgttgtgtattgcactaggaaatacaaaagtgatatgtctattatgacccggcaaagcaccaggttttattcatgatattacaccttccagcaagaccagttacatgttctagtagcagataattggatcactggatggctctgctttaagccgatgattcagcagccggacgatgatctatgtacgtttaggcggtggcgtcgtctaggggcttgaaatcctggagctgcttgaagttctaccacgccctctaccacaccttggcctcggacagcttattggcgccgccgggttcct

SEQ ID NO: 17551 - DNA, 428 bp, Oryza sativa
  Clone ID: uC-osflcyp017a03b2
tttgtgttttttttttttttggggttcttttttgtttttatgtttctcttgttttttttatactttgcttgtttttttcttctcgggaccaaaattggtgcaaggttgggggtacatgtgcgcacaaacagtggacgatgatgggcccgggggacccccgggcccccaaaagtttggccggggggcccgttacggaggggaatgaccaccctgccaaaacaaaacccaggcgcacaacagtgggcgggaaccaaaggatttttaccatcccgaaaaaaacggccccacgggggctcgaaacttggcaccagcgcggacggggaacgcaccagcccccggttggccaccataagcggggcggcctcgggatggccccccagaccgaaagggggtaaaatcctggggctaccccccgccggacggggggc

SEQ ID NO: 17552 - DNA, 401 bp, Oryza sativa
  Clone ID: uC-osflcyp017a04b2
ttttgtttttttttttttttttggaaggggaaacataattttccattgaagtgaaataagaaggaaaagaataaactgtgcgcgattacataatgtatacttatgaaacaggtataacaagaattttttttcttaaacacaggaaataccatctaggaaagttacctaattgccacgacttgtcagtcacactagataatcacaaggcagaaaggagaaaatgaaacaaacggatcgctcattgcctcgacaaagaggccttgcttcagctgccattaaactaggatccccggaccatgaatgctgtttcgcttaagcgagacgcaacaataataaagcctggcatcttcatgggtcttcttttgtcgacgatactgaagagtagatcacaaaggggggcg

SEQ ID NO: 17553 - DNA, 450 bp, Oryza sativa
  Clone ID: uC-osflcyp017a06b2
ttttgttttccaaccaagccattgtacaacaatcgttttgcaacatatacttatacagaagaaattctccaagaaaatctgttcgagaaaaaagaaaccggaaagagttaaaagcacaaatgttagccctgccccccagcgcatgcagcacgcccaccctgatcaggtgtcctgcacgtctcagccatcacacatatttggtacacacacgaacgtacgcatgcatgaatgtcacctcggatcctctcgtgcaaatctcccatgcacacgtccatgcatcgatcccacccttcacgccatgtagggggctagggtctttagaccttgaagccgaggaagtgcggcgtgccggtgaacttgagccaggtgccgccgtcgacgaacggccccgtggagaactgttcggccttcttctggccgatgacgcggaacccctttcagttgacgcgc

SEQ ID NO: 17554 - DNA, 459 bp, Oryza sativa
  Clone ID: uC-osflcyp017a07b2
tttgtttttttttttttttttttttttttttttcaccatgttaaagacttcacatttttatccttagattctgcaattttaggtttgtgctaggcatggcaacaaagcaatgccccattttaaggggatcaccgagtcatactgagaaaaatttaggcaaaccacatgatgattactgacttaaaattcctctttaactaagcaattggatcattcttatcgcctatcagataacacgcctaggcaaattcattttagcgggtacgttgtctgaaggtgctgcatcaggaactgagcagagtgtccatgacgaagtgatgagggcatctcgatgtttgacatgtttatgtccggtccttcctctgctatctcctctgtcgggaaaggaatgctcaagttgtcatccaagagaaatgaatttgacactggattttgtgcatcgttgctcaccatgtccct

SEQ ID NO: 17555 - DNA, 461 bp, Oryza sativa
  Clone ID: uC-osflcyp017a08b2
tttgtttttaataacaaaagccatactctctgtattaaagatccaacaggttcagagaacacgcaagctcagaactacacatcaccaaaattggagcaagtttgggggtacatatccgctcatacagtggaggatttatttctcgattctacgagctttttaactagagttcgaccgggaagtcaattacggatagaaatgagcatcctgtcttcacaaaacccatgcacacaacagtgggcatgaaccgcatgatattcaccatcaagtttagtagggctccacgggtgcgcggaacttggcaccagcgtagacagcagccgcaccaagctcctcctcaatcctaagaagctggttgtatttggcaaggcgctctgatcggcagggtgctccagtcttgatctgacccgtggccaaaccaacagccaaatcagcaatgaaggtatcctcagtcttaccac

SEQ ID NO: 17556 - DNA, 95 bp, Oryza sativa
  Clone ID: uC-osflcyp017a09b2
tgggtttttttaaacattggcggtacacactgttttaaagatccaacacgtttcatagaacatcgctaagcttataacttacacatgctccaaaa

SEQ ID NO: 17557 - DNA, 483 bp, Oryza sativa
  Clone ID: uC-osflcyp017a10b2
ttggtttcgcgcaaaattttggtatgcgcatgcatgcgtggctcaaatgattccaggtacagaccacagaacccagctacatcaacaaacaacacattgcaaacaaccacattgtgattcattaaatgaacctagcattgaaggtgagaacccacctgcgatccattatattcacggagtgcttacttccataccttctttacctctgaggaacgaaaccagcatgaattagtgctgcggagcaagcagtaaacaaccaacagtgttgtccatgctgctgcacgaatctggcactggctgctacttactggactagtgatgatccattagaggcttgttaataaagtgctcatgacgatgagaaggccgatggcagtgaccacgatcgatgacgggacgcttcattggaggtggctccagatggagaggttgatcccgaggtactgagcgcgcctggcctgatgatggaccatgaggcctatg

SEQ ID NO: 17558 - DNA, 457 bp, Oryza sativa
  unsure (1)..(457): unsure at all n locations
  Clone ID: uC-osflcyp017a11b2
tttgttttttttttttttttgaaatacttaatagtaatagactctttgatggagtattacaacatgcagcaggggcattaatacgccagtacattaattaagttacacatatgcaggctccattttggtttcttttaatttatcggattacagaatttctgtagccttgcagatgatcacttggatatcatgtactagtaattaacaataggatgcatacaaaagatggcccaacgacaacagaagatgcgtgcatctgacattggctggccttatttgttggtagtactccaattaattaacaagagatgatgcattcttgtgccttagtttcttcacatgcttggcttcacgttgagcctattcgcaatctttacccccaacgactcatnacactgggagaggtagttgacccaaatggcgcggagctcaggggagaccttggggtgcgcgagct

SEQ ID NO: 17559 - DNA, 497 bp, Oryza sativa
  unsure (1)..(497): unsure at all n locations
  Clone ID: uC-osflcyp017a12b2
tttggtttatcttttatagtaggtttttattcccacgcaaaaccaacaggtagatgctagatagatacataacatagccggtgttgacagcatcatgtcaaacaaaaccattctccgacagcaaccaaaccacacaccaagcttctcgctgctcacttctccctcactgcttggaagcagctttatttcgatcatacacactcgcaaagatcaaatattatcaaacatattttgggggcataggcatgatgacgatttagttgtaagcgtccgggttggcgatgaggtaggcctcggcggtcttgaagatgccggtgagggactccttagccttggtgatctcgtccttcacctccactccggggaggagcttgtacgtggactccaccttcacgacgctcccgccgttcgccggcggctccaccttgatgtgcgacgtccccgtctcgatcgccttgccgatgccgncgcccttcaccagcgtngacttgcactcg

SEQ ID NO: 17560 - DNA, 385 bp, Oryza sativa
  Clone ID: uC-osflcyp017b02b2
tttgtgtggaaacaagtacctggccttaatggcaaggataccaggccgagaagtataacgcctaacatccaacccgggaactcgaaccactcaagtcaaaccatacgagggaaaaagtgccatgttgccgataacctcatgcaagatcacacacaactgcaagctaaaaagatagctacgactgtaaattaggagataatggcgtcgcccagtgacagcgcagcaagttgactggtcggggtgttcgcattgtgctgctgggccacattggggaggacattcatcgcctcagcaaccttggacttcagagcctctggagactcgagcagatgcaggaccttcgtctgatccatcttcagaagcattccggtgaccttggccggat

SEQ ID NO: 17561 - DNA, 453 bp, Oryza sativa
  Clone ID: uC-osflcyp017b03b2
tttgggttttttttttttttttggtttttttttttttttagaagaaacactggtgatttccactcagtttacaatacaaataccccggcagactgccttaaaaaccaccaaattcattcaaaggaaaatgggtatgagggaacttggccccaagagactgactaaacctaaccacagacaggggatccactggacccagattattcaaaaacaagatggctatgagggcattcctcctcaaaatcgaagggaacttgctgcaaaggcgagcctgactttgcgctagcaagctgggtggggatgagcttggcggccaaaaccatgttggtgagggcaggcttcacctcgggggacttgcgggttttgagaccggagcccgggttcacccagagaaagttagggtcgagcaccgaaagcattttggtgatgcgggccgcaaattcctccggggac

SEQ ID NO: 17562 - DNA, 361 bp, Oryza sativa
  Clone ID: uC-osflcyp017b04b2
tttggttttattacgccaaaagatcactgatttttaacaaagcacaaagccaatgcatgctctggcattaataccaaactgttactgattgacaaagccaaaaattagaccagaagacacaaaagaacccaatataattatgcagccaaggaaaactgataaaggtgcccaatttgaaaacccaacaccataaaacccttaaaaaccttagttctacatgcggatgaaacagaagttgccctaacccttgtgcatcacgtcgaacgccgtgaagatctccgagaacggcacacagtgtgggatgaacgtcttcaccttcagaatctagtatatgaatagctcgacaaccgtgggcagatcg

SEQ ID NO: 17563 - DNA, 426 bp, Oryza sativa
  Clone ID: uC-osflcyp017b05b2
ctcttttttttttggttgatgaatgcagtaatacattgcacgtaaaaggccagtaaacctagccagacatggattgactgataacttgatccactttcagaatgggaaaaaaaatcacggcgtttacataagcttaatttgctgtaccaatccagaaagagaacggaaaaggtaagaacaaacaagaaaagtaggaggaaggttctactgctcgaatgttgcgctggatcgcctgggatagctccttgttcccacgctccacattgtttgaagcttcaactgcctggtcatataaatactggatccgctgagcttgttgtagaacatgtgttgacatgagatgattaagtgctgacatctatatcaattttgtatctgtttattggacagcatcaagaagaattgtcgactccacctgaagagctc

SEQ ID NO: 17564 - DNA, 436 bp, Oryza sativa
  Clone ID: uC-osflcyp017b06b2
ttttgttttttttttttttttgggtttttttttttttttttttgttttttttttttttttttttttttttacaaaaaaaggggaatcccttggatctttggggggctcccaaaagggcaaaggtgcaccccgggcccaaaccatagtgcattttcccacccacaacaaaaatttattttcctccaaaaatttaaacaactttttttaagagaaattaagctggcccggtacaaaaaatgggccgcaatttacccccccaaccatgttacaaaaacttgggggaacgaagaccccatccccattgccaagcttgacaaaatttaagggggtttttcaccccccattttgtggaaaaacctgggggattgccccatgtaccctaaaagggggacatggggggggatcaacgggatttttccccgcgggaatgggggga

SEQ ID NO: 17565 - DNA, 382 bp, Oryza sativa
  Clone ID: uC-osflcyp017b07b2
ttggttttttttttcaccctgcacacataaacacagttgcgatcgagtctcgaaagacaccaagagtacagcgagaattcacttccgatccgacgacgcacgagtgcacgacgacacgttgagctcctcagctcggccatgccatgccaatctccctagctacgtatggcaactggtgcagcggtggggcacacgcgcgctaggcgtcgtgttgatcaggttgcggtggtgggagcggctgcccccggatgaaggaggagaccagcaccagcgctcgttccggctggtcgatcggggccatgtgcccggacccgcgcaccgttgcgaacaccagcccgtcgtacgggatcacgtacccgggaacgtccttgccgtccgccga

SEQ ID NO: 17566 - DNA, 469 bp, Oryza sativa
  Clone ID: uC-osflcyp017b08b2
acgagcacttccgcggcacgctccccgccggctccgacgtgcagtcgctcgtcctcgagttcatcatcaccttctacctcatgttcgtcatctccggcgtcgccaccgacaaccgagccatcggggagctggcagggctggccgttggtgcaaccatcctgcttaacgtgctgattgctgggccgatctcgggagcatcgatgaacccggctcggagcctggggccggcgatgatcggcggcgagtacaggtcgatctgggtgtacatcgtcgggccggtcgccggcgcggtggccggagcttgggcctacaacatgatccgcttcaccaacaagcccctccgggagatcaccaagagcggctccttcctcaagagcatgaaccggatgaactcctccacctaacctctatctagctaaccaccaagaatcctaattaattactactgccagtactactactgctacta

SEQ ID NO: 17567 - DNA, 427 bp, Oryza sativa
  Clone ID: uC-osflcyp017b10b2
tttgtttttttaatttttttggttttttttttttttttttttttttttttttttttttttttttttttttttttttttttttttttttggggggccccaaaaaccaaaaaggtctaaaaccccggggccgggaacagggggccgcccccaaaaagaaaaaaaaaaccccaaaaaaaaaaaccccgccttctttaaaataaaaagggcccgccgaaacaaaagcaaaattgcatttaaaaagtccccggggggagggaaaaaaccccgcccaaagtaatttccaaaaaaaacccccgggttaaaaggagggccaaaaaacaaaaaggccccggcccctttggttaaaaaaaaaaaaggcccgagggttgaaccctcaacgggggggaaaaaaagccaaccctggccggggaaacaaaaaaccctccgg

SEQ ID NO: 17568 - DNA, 484 bp, Oryza sativa
  Clone ID: uC-osflcyp017b11b2
tttgtttataaaattagttttgtcaaatcttattaagagtgcacccatgtatacataatgttcatataaatcaagatttgaatcataacgattaaagtcatgcaaccaaaactctactaccatacaccagtgcttctccaaatatggcattttgcatgtacacgaacaatacctatgatgcaatacaatgtatttgtgattacaacttcatttcccaattactttatacagagctccggcaaactgtactttgtgaagattccctctctttctccaacttaacgaacacactaccatcgtatatacctctcacactatccttgtgaaaatatccgttattatcactcgcaagaccataaattagcccccactcttttatagctgcagcccatgattgtgggtcatttggatctctatttgctagaatcatctctttgacctccaggatgtcaatgcatctggtctattttttgcgtgtttcgag

SEQ ID NO: 17569 - DNA, 453 bp, Oryza sativa
  Clone ID: uC-osflcyp017c01b2
tttgggttttttttttttttttgttttttttttttttttttttattttttttttttttttttttttttttttttttttttttttttaaaaaattaaaaaaatttattaaaaaaaaaaaaaaagttaataaaaaataaaagaaaaaaaatactaaaagaaaaaaaaatacgaaaggaaaaataatgggaacgggggaataaaataaaaaataagaaaatgttacacccatagaaaaagaaaacagaaaaactataaaaataaacaaagggtggatttagggaaataaaaagggaaaaaacaacaaaaaaaaaggcatagggcacacaaaaagagttaaaaaaaaaaaaaatattgaatcaaaaaaaaactttatcgctcccaaaaaaaaaaaaactagtaaaggctaaaaaaaaaactacttaaatgaaaaaaaaaaaagaaggttaggaaaaa

SEQ ID NO: 17570 - DNA, 368 bp, Oryza sativa
  Clone ID: uC-osflcyp017c02b2
tttgggtttttttattttattgggtttttatttttattattttttttatatattattttttcttttaattttttttgtcctaataataaataagagcacacacacccttcgggaaaagaaaaaaaacgaaaaagacgaaaaaaaacatctataggggggggaaacaaagaaaaaaaaaaacaaaccaaaaaaaaaaagaaacgggaaaaaacaaaaatcccccaaaggggtaattaaaagcgcgaaaaaacaggaaaaaaaaaaaaaaacggagcttgatttaatcccccaccccaacactataaccccaagggggaaaaaccccgggaacagtttcaattgcggaaggaagccccaaaaggggaaaa

SEQ ID NO: 17571 - DNA, 424 bp, Oryza sativa
  Clone ID: uC-osflcyp017c04b2
ttttgttttttttttttttttttgttttttttttttttttttttttttttttttttttttttttttttttttttttttttttttttttttttttttttttttttagaaaattaaaaaaaaaaaccttaaaaaattacccttttcccttttgggggaaaaggaaatcttaaaaaaattccccaaaaaatccaaaaattggaaggggtttttgggggggaaatttaacccgttggggaaaaatttccaaaaaaaaaaaacccccggaagaaaacccccaaaaaatttcaaggggcaacccaaaaaccttattttaaaaaaaattcaaaaattccttttttcctttaaaattttttttttaaaaaaaaaaagggtttaaaatggggggggaagggaaaaaaaaattgggggggggtttccaaacctt

SEQ ID NO: 17572 - DNA, 414 bp, Oryza sativa
  Clone ID: uC-osflcyp017c06b2
ttttggttttttttacgttgaggggttattgtttttaacaattttttttgtatttcagtcattgattgataccggacaaaaactgatcgacaaagcgagaaatttaaccaggaagcacacaaaaaccgcacaatatcataaaagcaaggaaggaggctgaagcaggacaattttattacccaacaaaaaaaaccccggaaaaaccaaagaccgcatcctgatgatggagcggaagccctaaccatagggcaggaggaaaaacgcagagagggtctccgaaaacggcactctcagtgtgatgaacaagatcacctccatcaagggggggatgtaaagctaggaaacgctgggcaaaaggaaacggggctagccgctgccgaaaaaggcaccccggagaggcccatccttggggaa

SEQ ID NO: 17573 - DNA, 337 bp, Oryza sativa
  Clone ID: uC-osflcyp017c07b2
ttggtttttttacaatttctggtttatatacttattatcagttttttttttaatctgtttttttcttgtccaaaggaaggaactttaataagggagacacccggtgaataaaaaaacaagggggaataaaaccgggtccataaaaattttaaaggggaaatatcccaacacgaaagggggaaacaaatcgagaaacaaaaaaaggtgacccggcttaattaaagctggggataaaaagatgcaaccacccataaacgggggggaaccggaaaacgggaggatccggccccagtgcgagagaccaaaatcttttgagaaaaatcacataattattaaa

SEQ ID NO: 17574 - DNA, 345 bp, Oryza sativa
  Clone ID: uC-osflcyp017c08b2
tttgttttttttttttatttcctcatcctttttattcattcctcccagagagacggatccatggaagttttcttgccctcatcaggcaagcagagcacacacacacggtggcagtggaattgctatgaacaagacgctaatcaacatccagagctaaaacaaacaaggggatcaaagcaaatcccgaaaaaaaaaacacaggggaaagtccacatcttcttctcgtccccaacgcctccgtgtcaccaccacgtcttgcggatttttttttaccctgttctattcgctcaggcgtccacgatctcgccgtcgtccttcgacgccaggatcagctccgggtgcgcc

SEQ ID NO: 17575 - DNA, 443 bp, Oryza sativa
  Clone ID: uC-osflcyp017c09b2
gaatcatctaaggagtgatccaacaaaacaaacgtaaatggaaaagcagtgcttattacaggcctaaaataccactcacgctccaatgcaggcatccctctcccttcattattccaagctttgggcacaagaccttcatggcttcatgtatactgttccttggcatcaacgatgacaaaaactcaaaacgcgcggtttgaatcttacaggctctttgctgttgcgatgacgttctccgcggtgatgccatactcctggtagatctttccagcaggagcacttgcaccgaatttgtcgatgccaatagccttgcctttgcttccgacgtacttctgccatccaagagtagaccctgcttcaaggctgactcttgcagtaacagcctcagggagaacactctccttgtactcagccgactgttcatcgaaaagctcccagcaaac

SEQ ID NO: 17576 - DNA, 446 bp, Oryza sativa
  Clone ID: uC-osflcyp017c10b2
tttggtttttttttttttttttgtttttttttttttttttttttttttttttttttttttttttttttttttttttttttttttttttttttttttttttttattaaaaccggaaggagaaacccgaaaaataggaaccgacaccttgaagggtaaaaatttccctaaaaagaaaggggaaaaaaattcaaaaaaaaaaaaaaaaggggggtttatgggggaaaaaggggaagggaaaacaaatcaaaaaaaaaaaaaaaccgggaagcaaaaaggggaaaacctggggggcaaaaaaaagaaaataaatgcaaaaaattggccggggacaaatccccaattaaaagggggaaaacaagggaaccaaaggtaaaaaaaaaattaaaaaaaaaggggaaaaaagggttattgtttttcaccccctggggctgaaaaatgtaaaaagg

SEQ ID NO: 17577 - DNA, 471 bp, Oryza sativa
  Clone ID: uC-osflcyp017c11b2
tttgtttttcctatattgaaggaccatttaccaacaacaactgagtccaattacaacccggtcgattgaccatttgacagaaatcagccgtactttcggattctttaattcgccagccgactaattggtcacaatgccctaagagtcggttatgtgtctgtatcatgatgtaattttttttactgccatatatgctaggtcaggccaatgaccgcatccttctttctgccttaaaatatgttaccatctgccaagtgtcaacgaccatacaagcttactcactttccctcttgcagtgagttctctcgtatccacacgctcaagccgaagatggcatcctctgtcatccttttttagagaaaattgattaaaacccggcctctacatccaaaccggatgtacgcagtcaaggcatcctgtgtcatctacctcacccaagtacctttgcagctgtgctagctagttcttgat

SEQ ID NO: 17578 - DNA, 481 bp, Oryza sativa
  Clone ID: uC-osflcyp017c12b2
tttgtttttattacgccaaaagatcactgattcttaacaaactctttgcagctacagacactggaattcataccgtactattactgattgacaaagccagaaatttgcccaggatacacagaagaaccgtatatcatcattcacccaaggcaggctgctcaagctgcccaatcttattacccaacaccataatcccctgaaaaacctcagttctccatgcggatgatgcagcggatgccctcgcccttgtgcatcaggtcgaacgccgtgttgatctccgagaacggcacgctgtgtgtgatgaacttctccacctccagctccttcttcatgtagagctcgacgacgttgggcagatcggtgcgtggcttgtagttgccgaagaaggttcccttgagagtcctctcgttcaggaagttcatcgggtgggtcttgaactcggcgtccttgtgtggcacgccgaccaaaacagcaacaccca

SEQ ID NO: 17579 - DNA, 436 bp, Oryza sativa
  Clone ID: uC-osflcyp017d02b2
actcttattgaatcgcggtaaagtattctaattcaataaaaatttcgcgggcgaatatttactctttcctgtcttatttgttaattcataaccttatcaaataagacaatttttttggtttgttccgccatcccacccaatgaagtattgggattcttttcaagaaaatcctatccagtcataggttctgtcgttcccactgcttctcctttaatggttaggtttgaatctcgcaatggagcttccaaaaaatttctttccgagtcaatttctcagttttattaactcgggacgctctttgttattccttgaaatttgtatttcttgtttcaatcaaattacgatttcgaattctctgctatttttattatattgatgctttatcacattgctttttatgatgtaattcatagaccatacatattggaatcctata

SEQ ID NO: 17580 - DNA, 459 bp, Oryza sativa
  Clone ID: uC-osflcyp017d03b2
ttttgttttttttttttttttttttttttttttttttatgcatactgatttcatctcaactgggatgagcagattacaccgccaaatcgccaatacaacccatccagcctttttgaagtttgagctatttacaggggctccccccggtagcacaaccaagcatgcagctgtctgaccattttttcaggctacagctacctatgagaaaagctttttaacccaccccccaaattatcaactttttcaatgggcaaaaggttctttgggaccatgcgggggacttttcttagcctcgggcctttggcctcgggttcttggtcttgccagggaatagaggtggtgggcacttgggaattgggatttatgctggtcacaggctccttttcctccagagcattggcaatgatctcggggatgtgaactagactgggccttttccttgatttcgggcgctttggg

SEQ ID NO: 17581 - DNA, 447 bp, Oryza sativa
  Clone ID: uC-osflcyp017d04b2
tttttgtttttcagttattgctcagttgaataaaatggcagttattgcttccttgctttatcagctaaccatcatatgatttcctaatagcacaaatgtgacaatatactagtaacagtctagattcatactttttagattataatcatgccaacagttcagaacatgcgaagacacctgaatgactttcatgatcatactaatatggtcgagaggaagtacgattcgtagatagcatcgcgatacatcagatcatttgagtgatacaggaaaatagcgaggtaggcaagactgattctcttcgtgggatccatggaacatggcggtccgaggtttatccttcagtactttggtgctggcttttgggttgggagcaacccgaatctcttcttcaacaggtatctctggcgcgagtacttgtcatctggaaagaagcgagctgggtga

SEQ ID NO: 17582 - DNA, 419 bp, Oryza sativa
  Clone ID: uC-osflcyp017d05b2
gcgggcgccctcttttttttttgggtttttttatttttttggtttttttttttttttttttttttttttttttttttttttttttttttaaccatggggtggggaaaaatggcaaaccaaattttggcttgtttccgaaggccaacgcacaaaaataatttgggtgggggatttttaaaaaccttggaaggggggggggggattttttttaaacacccggaaggggggaaacccaaaaggcttaaatgggggaccccccccaaggggaaaggccctttccgggcaagaagggggcccagggcggggaaaaatgggccttgttcaaaagggacaaccccctgtcgctcctccttttggggggcacagggaaatgggtaaaaaaaacttggtagccgcccggggagagggtggctttgggg

SEQ ID NO: 17583 - DNA, 461 bp, Oryza sativa
  Clone ID: uC-osflcyp017d06b2
ttttgtttttttttttttttttgtttttttttttttttttttttttttttttttttttttttttttttttttttttttttgggaaaaaaaccaagggaaatttttttaaaaaacccggccccccataggagaagggcccaggacccccgatgggacccccccggggaaaaaagaacccacccaacttgctagggaccccccccacaatggacgaaacaccccccccctgacaacccccaccacgggtttatttaggccccaaaacaaaaggcaaggcccgcccaccaaaaaagcggggcccaaagccagcaaaataagggccccaccaaaacttttacccccaagggccgcaacccaaccaaaaaaccctaagcaacccgggcaacaccaccatagattcccttgccggagccccaggggcccccccttcaaatggggccccaccttcagggggtggaacc

SEQ ID NO: 17584 - DNA, 444 bp, Oryza sativa
  Clone ID: uC-osflcyp017d07b2
tggtttttgacctgattgaaatgtctaatgtttcaagatacaggcattcctcgccatgccaccaattgatatatacatacatgcacggtgctatttacaacttccaagcacacaaacatgctagcaacacagaaaacgagatgacaaactcttgggcaacagaacgatcaattagaccaacacatttcccacatgcaccaaacaacatgacaatctaaaacttaaaaagaaaatgaacagaacaacatgcaacaaaaagaatggattgctgtcaattaactgcatgatcctcaaaagcagtacgcctacttagcttggagcgagtcacacggatcgtgtcctccattggtctctcctctactgacttacctggaacaggatcaccctcttctgaaccctttacgggatcatcagcctcgtcaatggccatcttgtcagcttctt

SEQ ID NO: 17585 - DNA, 454 bp, Oryza sativa
  Clone ID: uC-osflcyp017d08b2
attattccaaaaatgatcttttactagtagtcaaaacgatacatctgacagaatttgatgcactaattatatgctatgcacactgtttaagcatcattatttgcttgcatcttggggatcttgattctctgggacatcatttttcttcatcatccctttctctgtttcttctgccttcaccacctgctccacattttcagctttgccttccttgccaacatctttctttctcttgaggaactgaataaggccttcaagggcaacatcagtgtcatcattcctcatgagctcctcagctacctctgctggtgtcaccatgacctccttgatcaactcttctatctctgggtatgtggcatggttatcaatggagtggtagttagaggccagaattctaaatgactctgggcagcagtaacccatatggacatgcatgtccatcctgccaggacgc

SEQ ID NO: 17586 - DNA, 420 bp, Oryza sativa
  Clone ID: uC-osflcyp017d10b2
ttggtttttttttttttttttgtttttttttttttttttttttttttttttttttttttttttttttttttttttttttttttttaaaaccgcaaaccaaagggggggggggccccaaaggccaacccagcccaattttgggggggggggaacccaaaaaccccgggaaggggcccggaggattttattaaacccccccggcggggggccaacaaaaaggcgaaaaggggccacccccccccagggaaaccccccccccaaggcgggaagggggccccggcccgggaaaagggggccggggtctaaaaagggagacccctttccttccccccttggggggccccagggggggggggaaaaaaaacctgccacccccccggggagagggggcccttagggggcccccccaaggaccggggg

SEQ ID NO: 17587 - DNA, 84 bp, Oryza sativa
  Clone ID: uC-osflcyp017d12b2
ttgggtttttttaaatttttggggtttattatttttattttttttttttatttttatttattttttttattttttatttgggat

SEQ ID NO: 17588 - DNA, 412 bp, Oryza sativa
  Clone ID: uC-osflcyp017e01b2
ggaagcccctgaatagggggtcactggctcactgctttcgctgatttcaaaacgggatccacccaaaagggggggttaacccttaggggcccaacaccccaagagattcccattacatgcattgttcaaactaaccaaaatggagggttctcataacaaagtaagctttgacccctactttttactaaacccccccttcttcctagcttttcttttatcttcctggaccttcaagggaagttggcccttcttcttgctaaggctaccaattggcttcaagaaggactgggacttgttatttccttaatccgccatttaaacgtccatggccgatgcccaactggaggcggcccgggaccccccggaatccttggaccgcggcggaggcccccggaccggcagcgcgggcccc

SEQ ID NO: 17589 - DNA, 463 bp, Oryza sativa
  Clone ID: uC-osflcyp017e02b2
gattctgaagttttctcaatcaaatgcagtgaaaagatggtgtgattacagagttatgacgaaatcaatgcatgtcctggaagcacatctacatcactggctgagcaatcaacaaattgaggtggctgatattctttaaagatccatcccaaaatcatttaaccaactctacaccatcatgtaattaaccaaatggttggcccaaaggggaggaaaaagaaaagaaaaccaaaagtcctaaccatttgtaccatatccccactaagttgagactttttaatcttggcggtgccaattgctacatgtcacaggagtaaggaagggctaacaagaacaaagagatttacatgcgcggaagcgcaggtaacgggcgctaccctcgcccgtcagaggaatcggcttgggatgacgtcatgcaccctgatcgggaagctgtagaactcgtcgtttctaggatctgagt

SEQ ID NO: 17590 - DNA, 451 bp, Oryza sativa
  Clone ID: uC-osflcyp017e03b2
aaatacttaatagtaatagactctttgatggagtattacaacatgcagcagtggcattaatacgccagtacattaattaagttacacatatgcaggctccattttggtttcttttaatttatcgtattacagaatttctgtagccttgcagatgatcacttggatatcatgtactagtaattaacaataggatgcatacaaaagatggcccaacgacaacagaagatgcgtgcatctgacattgtctggccttatttgttggtagtactccaattaattaacaagagatgatgcattcttgtgccttagtttcttcacatgcttggcttcacgttgagcctattcgcaatcttcacccccaacgactcatcacactgggagaggtagttgacccagatggcgcggagctcaggggagaccttggggtgcgcgagctcgccggcgaagcggc

SEQ ID NO: 17591 - DNA, 352 bp, Oryza sativa
  Clone ID: uC-osflcyp017e04b2
tttttgttttttaaattttttgaggtattttttattaatcatattttttttttttatttttttagtgtacacatcaccaacttgatcatcatctcgtttcactaaacccatcttacccaacccaaagacaacgaactcgctggccacaaatccatccaaccacaattaaccactgctaagctacggacccccacttcacttgccggggacgaagttggtggcgtacgcccaggcgttgttgttgaccgggtccgcgaggtggtccgcgaggttcttgagggggcccttgccggtgacgatggcctggacgaagaatccgaacatggagaacatggggaggcggccgctcttg

SEQ ID NO: 17592 - DNA, 474 bp, Oryza sativa
  Clone ID: uC-osflcyp017e07b2
ttggttttttttttttttttggttttttgccacagccgcacagaaactattttaaatttgagggttacacaatgctaattctcagtatcgaaatatatacttatagggttaaccaaaaacgacggccaacatcacgaagtgctctgcttcatcacaactactaagaacgtatacatgagcacatgacaccaggatctgagggcaccaacaattttcaggggttccagattatccttacaaaaaaatcaacctattgctgctgaaagcctaaaactatcaaaagccttgagagatgcatgcaactgacggggcactgttaggatgttgtccgcggcttgaagcttactctttgggggctcaactatccaaaatttctgatatatgcacacgattacattaactccctgtatcctgacctggaaggttcttcccagggttcttattagcaagtttgttccccagtagtgtaaggat

SEQ ID NO: 17593 - DNA, 177 bp, Oryza sativa
  Clone ID: uC-osflcyp017e08b2
tgggtttttttttttttttgggttattatattttttttttatgttttttttttttctgttttatgagcatttatacgcctgtacagtaagtaaattacacatacttgaaggtgcaattaagaaattgcaaaggaagggaagaacacaaaagaaccataggcaaaataagttgaacca

SEQ ID NO: 17594 - DNA, 452 bp, Oryza sativa
  Clone ID: uC-osflcyp017e09b2
ttggttttttttttttttttgtttttttttttttttttttttttttttttttaaacaacaaagctggggaaggaaattatcctcctccagtccttaagtatactaaaagcttggtttaaaatttaaatgctgggggggcagacccccaaatgattccgggaaagctcactccaggggtggcaaatcaatcaatccctccgggggggggggacccaagtttttgcccagttttgacaaaacctaactttcctttttaacacaaattcccccaaccaaaaacctttctagaacgggataaactaatatttataagcccagatttagcaataaaccccccccccatttaactaatcaaccgggcccatgggctaaaccagggttaggggggcagggaccccaatgtagacctagggggggggggttttaatcatggggtaaaaaaaagggaggaa

SEQ ID NO: 17595 - DNA, 464 bp, Oryza sativa
  Clone ID: uC-osflcyp017e10b2
tttgtttttttttttttttcatagaccccttcaagactcgagcttttattaagttgaggcgaggaggaattctctagtctgaagaacagacaggtatttacacgacatttgaatgtatcatgtattcaggactcatgtatgcagcaggagcagctgagtttgaggaagggctaaaactgtcacaatatttgcctatgctgttctttgggttttacagaaagatgatctcaaacgatgtcttttttacaatcatacatgtatacggctaatctttttcgcgcacacacactatcttttgcgcccagttgacccctgtaaagccgatggccaccggggcatcagtccacatatgaaatgttcgcgcacccgggaaaggagtgccgtttcaaatatcatcaccagcatgcgcgacatgatgttggttagctggttcttggttatccaaaggcatgtactgggccatg

SEQ ID NO: 17596 - DNA, 365 bp, Oryza sativa
  Clone ID: uC-osflcyp017e11b2
tttgtttttttttttttttttggttttttttttttttttttttttttttttttttttttttttttttttttttttagggcaaaaataccaccctggaaaaaattaaaaaacaaggggaaaatacaagaagaggaaagtcccaaaagggacaaaaccaaaaaacttaaaaaaggcacaaaaaaaaagggggaacccacgggaaaaaaaatcctttaaaaaagggtacaaaaaaccaccttggggaacaatggagtaaaaaaaaaccgggacacccttaaaaaccaaggggggcccaaggaatggaagaaatgggggcccaaaaaaagggcccccctttggagccaaaactaggaatgggggggggg

SEQ ID NO: 17597 - DNA, 201 bp, Oryza sativa
  Clone ID: uC-osflcyp017e12b2
tttgtttttttttagtttaggggtttttgcattattttgtttaaccttttttcacatgagttttgccaaagcaaaaaccagcatcctagccaggtaatcctaggcctcgcaaaaaaaaacccgaaacagggctgcatgacccctgagaaaactgccccaagctaccggaaaaaatctaaaatggaaagggggggcgaattg

SEQ ID NO: 17598 - DNA, 453 bp, Oryza sativa
  Clone ID: uC-osflcyp017f02b2
ttttgttacaattaccaaacacccagctttaaatttacgtatgtattacaaactgctcccagattgatttaaggataaaagagaagagtagaagatgttcagagaaatttcacagtaccctcacaagcctcattataagtgcaaaggtaactgttttatttatcgaacaaacagctatggagtggtatgatacttctcagaaaaaaaaactaatggccagaaatctcagaaacaattatgatgttgtgaacactgaagttaggctcatggttcaggttgcaacttctcacattcttctcttatcgactgaaaaaggatagatgaaaggtacctcttaccaaagcttggaaacacaaccactaccaactttccagcattttctggtctttttgcaactttaatggcagctgctgctgctgccccagatgaaattccaaccagtaattcttcctg

SEQ ID NO: 17599 - DNA, 95 bp, Oryza sativa
  Clone ID: uC-osflcyp017f03b2
tttgggtttttttttttttggggttttttatttttttttttttttacattgttttttttttttttaaccatagagggggaattataaagcccaca

SEQ ID NO: 17600 - DNA, 347 bp, Oryza sativa
  Clone ID: uC-osflcyp017f04b2
ggggcgcgggttggagacgggggtcgtcgacgacgttgggatcactcgctttaccggggcggctatgacgcccgaccggataacgttaagagggccctcgacaccgccttggactatatgtttctagagatcgactgccttgcggctctggtcgtacacaggtggggttacgaggaaggcctatcggtagctcggatacagtccagtggatgctggattccaacttcatgttgcgcagcgactgaactcaaggggtgccgcgaactgccatgtgctagaaatgggtgactttctccaggttaacgggctctctggcagctgattgaccagtgactctattcttgagg

SEQ ID NO: 17601 - DNA, 392 bp, Oryza sativa
  Clone ID: uC-osflcyp017f05b2
agggaggggaggaaggtcctggtgcggatatacagtgacggcttggagctcttattggaccgcgaggacaaggagcgcacatgctagtgcctgtctagacatgtactgggctgcggcctgctactccggttcaccaacggcccacactgggaaaacatacaaccacggatagtttatgtaactacctttcagagaactgaacattgaactgtggaggagtaaaaactgaaggtatcaccccagccttgagatccgtggacggaaataggaacttatttgtgaccgaaggaacaactgggacaatactggaaagagcctgtgatcatgtcatgaatagcgagaactcccggctaggtagcctgcagaacgagattgctgcacacggtaaagaa

SEQ ID NO: 17602 - DNA, 267 bp, Oryza sativa
  Clone ID: uC-osflcyp017f07b2
tgtgttttttttatttttttggttttttctttttttattttttttttaaattttgttttatttttctttattgttaaaaaaggccaggggaaaaatatcttaaaaaagagggggttccagaacaaaaacaagggggggacaaaaataacgaaagccccccccttttgagggggaaaaaaatctttttttgctttataataccacttaaggggggcccttaaatggagaagcaattgaaatacaacaggggggggggaaaaaacaact

SEQ ID NO: 17603 - DNA, 434 bp, Oryza sativa
  Clone ID: uC-osflcyp017f08b2
ttgtttttttttttttttagggttaaaaaaaaattaatccttcaacacggtacagtactgatcacgtcacatcggcaggtgcatattgcatacagtaatacagatcgatacatgcatggtagttaccttatttgcactgaaatgaaaattcatcacaaacatagttacagtagtaccttagctagttcgcccttgcaaacgccagatcaagaagcgtccggaaaaacttgcggggatagatgggtggtttctccggcagggcctggggaatcagtacagtggatggagttattccaggaacagggtgtacctgtatcagcagtatggtccccattctggacattaacaaaagcgtctatttttgaaaagccttgcaatccgagagtgtttgccaaagttttcgtacaactttttgtacttctgcaggggttact

SEQ ID NO: 17604 - DNA, 466 bp, Oryza sativa
  unsure (1)..(466): unsure at all n locations
  Clone ID: uC-osflcyp017f10b2
tttggtttgcagttgtgctgagtactataattcagtacttgcaaagtcaaaagtagcacggacacagtcacgcccaaagctgatgacactcgacagacatactgtactgtgcctggagactcaagtagccaaagcccacacactgtcaaaactcaaaaccaccactagctcatatcactacattacagatcagtttacattgcagagtgcagcagcagcagcagcagctaacaccaggtcgagagaacgggggatggtcagagcagccttgggctggtgtaagggccattgaggatgctgttggcgatggcgtggtagccggcctccgtcaggtggacgccgtcccagttggcgtacgccgacgggtccgtgcacacgctggagccccgcacgccgcaactcgccttcgggttgaagttgtacgggccttcgccgccgcagcacgtnctcagcgccccgtgcctga

SEQ ID NO: 17605 - DNA, 457 bp, Oryza sativa
  Clone ID: uC-osflcyp017f11b2
tttgtttttttttttttttttgtttttttaataactcacgacaaaaggagctaaacattattggtatggtagtatgttcagtggtgtgcattattagcattgctcaagctgcaggtagcttcagggaagtgaaggggaggaaaaagagtagctgctccagcacaaaactactagcattacataagcacagaaaaaggtatgatccttttcagacattttcccacgccgaaggtgaatggggtgaagatcttaggcggacttcacggtggcggagttgatgatgtcgatgaattcaggcttcaatgaagcaccaccgacgagaaaaccatcaacatcaggctttgctgccagctccttgcagttcgcaccagttacggaacctccatagatgatccttgttgattcagcaacctttgcactgacattagcagcgagccactttcttaggccatcatgc

SEQ ID NO: 17606 - DNA, 452 bp, Oryza sativa
  Clone ID: uC-osflcyp017f12b2
ttggtttgggaaacgaataaaatcattattgcaaaaacatcatcttcttcttcatcttcttagtgtacacaacaccaactcgatcatcatctcgtcgcactaaacccatcttccccaacccaaagacaacgaactcgctggccacaaatccatccaaccacaattaaccactgctaagctacggtcccccacttcacttgccggggacgaagttggtggcgtacgcccaggcgttgttgttgacggggtcggcgaggtggtcggcgaggttctcgagggggcccttgccggtgacgatggcctggacgaagaagccgaacatggagaacatggcgaggcggccgttcttgatctccttcaccttgagctccgcgaacgcctcggggtcatcggcgaggccgagcgggtcgaaggcgccgccggggtagagcgggtcgacgacctcgccgagc

SEQ ID NO: 17607 - DNA, 466 bp, Oryza sativa
  Clone ID: uC-osflcyp017g01b2
gtgctgctgctactcgcggtggcgacccaggcgtgcggcgagcccgataaagacggtggtggtggtggtgatggagaaccggtcgttcgaccacatgctggggtggatgaagcggctgaacccggagatcgacggcgtgaccggcggcgagtggaacccgacgaacgccagcgacccgtcgtcggggcgcgtctacttcggcgagggcgccgagtacgtggacccagacccgggccactcgttccaggagatccggcagcagatattcgggtcggacgacgcgtcggggccggtgaggatggacggcttcgtgcagcaggcgcggtcgctgggggacaacatgacggcggccgtcatgaacggcttctcgccggacagcgttgccgtgtaccgggagctcgtcggggagttcgcggtgttcgaccggtggttcgcgtccgtgccgtcgttgacgcaagcaaccgac

SEQ ID NO: 17608 - DNA, 305 bp, Oryza sativa
  Clone ID: uC-osflcyp017g02b2
ttgggttttttttttttatgggatttttttttatttggtatgaagttttattattctttaaatgtagggaaaacaaaaaagggggaaaactgggcaaggaaaccaagaaggacacaaggggatacaaaagacaacgagccaaaacaaaagggaggataaaaaaaaggcttaaggatgagaaagagaaaaaacaaacgatctcggagacacgcggtgccaataagatgcatgaaagaaaggggagataacgttcaagggggctggttgggcccccacaaggaagaaacacgagaccggtgagacaa

SEQ ID NO: 17609 - DNA, 217 bp, Oryza sativa
  Clone ID: uC-osflcyp017g03b2
tttgggttttttttttttttttggtttttttttttttttttttttttttttttttattttatttttttttattttaataatttttttaaatattataactaaagttaacttaatttatggtaacattacggtctaagaacacctaacactggatggatggatagagggtttttcgactcgaaagagccaatggacacaaaaacgaactagattcgag

SEQ ID NO: 17610 - DNA, 429 bp, Oryza sativa
  Clone ID: uC-osflcyp017g04b2
ttttggttttttatttttttgtttttttttttttttttttttttttttttttttttttttttttttttttttttttttttttttttttttttaaaaaaaaaaccgggcttttaaaaaaaaaaattccccgggaaaaaaaacgcttaaaattaaaaggggtcttgaccaattaaaaaccaaaaagggggggcaaatataacaggcccattttttaaaaaaaagctggcgggggaaagggaaccttttttaacccgggaaaaaaaatgggtttaagaaggaaaccttttgccaaaattaaaggggaaaaaaaatgggggggaggtttccccccctccaaaaaaaacacggccgtttgaacccaaaacgggggggggattcccatgccccgggaggaccttttggggggagggggtcctgccggactagggg

SEQ ID NO: 17611 - DNA, 434 bp, Oryza sativa
  Clone ID: uC-osflcyp017g06b2
ggttggaacccttttagggggcggcccttttttttttggtttatgaaaagatcagggttaaattcaaatataggagcactcgtgactacaacttgtagataggagaaaggatacatgacatggcaaacaaagacatgcacacgaaactgtactaccatacaccaactggctcatccaaatatggcatacaagcatgtacacgaacaatacctgaggatcaatccagagactaggacatgacaactgcattgcccaaacactttatacacagctgcggcgaactgggctctgcaaagattacctatctatgtccaactaaacgaacacacttccatggaatgtaccattcacactatcctggcgaaaatatacgttcttatgactcgcacgaccataagatcgacctcaattttttatagatgaagcccatgatt

SEQ ID NO: 17612 - DNA, 379 bp, Oryza sativa
  Clone ID: uC-osflcyp017g07b2
agagcaaaagatggcatgtgcttcatttggcaagaagtaaaacagactacaaaagtaaggagacgccaaatagttgtagcactggccgaggagactaggatgggcacaagaggatacagaagacaccgtgccaaatcaaatacgttcctaaaaacacattttcattcatgagaatctgaataaacatttgtctcgtgtcactggtgccaatcagttcatgaatgaaaggggatataacttcgaggcagctgctcaggtgtccactggtttgaaacatgagattgttgagacaaattattccacctcttccaagaaatccttgatctctgcagggctcagaaccttgaattcacggtcagatcggattatcccaatttta

SEQ ID NO: 17613 - DNA, 472 bp, Oryza sativa
  unsure (1)..(472): unsure at all n locations
  Clone ID: uC-osflcyp017g08b2
ttggttttttttttttttttcgaactcttttttttctccttgttttctatttcatttcattccgatagatagcaacaagcagttcaaacaccataaccaaagcgaactcaattcatggtaacatcacggacgaagaacacctaacactggatggatggatagagggcttctcgactcgagagagccactggacacgataacgactcgactcgatgataagatgattctgacacggatagctaaggataactggccacgatgggccccaccaatcagttcctccagttcccgccggagtcgccgccgtagccgccgccacggttgccaccgtagccgccgccgccgccgccacggccgccgcccgagccgccgccgccaccgtagccgccctcacggngcccgtagccgccgacgccaccttcttcgtagccggcgtcttcacgaccgccgtcgtagccggcaccgtcgccgc

SEQ ID NO: 17614 - DNA, 358 bp, Oryza sativa
  Clone ID: uC-osflcyp017g09b2
ttggttttttttttttttttttttttttttttttttttttttttttttttttttttttttttttttttttttttttttttgaaaaaaaaaaaaaaattaaaaaaaaaaaaaaaaaggttaaaagggaaaaaaaaaaaggttggtccaaaaaaaaaaaaaaaaagggttgaaaaaaaaaaaaaacggtttaaaaaggaacaaaaaaaggtaaaggggtaaaaaaaaggaaaaaacggaaggtccgccgggacaagaatttaaaaaaaggaaaaaaaaaaaaagggtaaaggggaaatccccccttggccccccctttaaaaaacccaaaaaacggaaatggaaatatcccccccttggt

SEQ ID NO: 17615 - DNA, 444 bp, Oryza sativa
  Clone ID: uC-osflcyp017g10b2
tttgtttttttttttttttttgtttttttttttttttttttttttttttttttttttttttttttttttttgggggggatgggggggataaacattaaaaaaaaaaacaaaaaatacaaaaaaaacccccacataaaaaaaattaaaaaaaaaaagttttgacggaaaaaagccattttaaaatccccaaaaaaaaaaaagggaaaatcagcataaattaaaaaaaaaacattccttttgaacttcacccaggggggggaggttaaaaaaaaccctttgggggataaaaatcaaaaaaacttattatttaccccaaccccccatgattgaaaattggaaaaacccattaaataactcccaaaaaaaactttgggaagaagaagaagaaaaaacccgggccccgattttttttcccccggaaaggggggggggggtccttccccc

SEQ ID NO: 17616 - DNA, 466 bp, Oryza sativa
  Clone ID: uC-osflcyp017g11b2
tttgtttattcagaatccgggcctcattttattcgggaaaaagatgctcaggccagttccaggtcacctgatggcaagctcacaagttcagacagtcacgcacacacatacaatactctcggacaaactgtaacaagatgcaagctcccttgagattatcttatctcactctacgatgactgccggagctctgggcgcacgaaatcggcgttggcaggcacggagatgtcgacggtgggccgcagctcagcgcacacctcgattgcgccatggacggggtcggacatgaagttgctgatgaggtcctggttgatgggagcatccttgtccactgtcacgaatgcttgctgggtcaggatgtagtcgaagcgtggcgcccatttccttgatcccagacgagccgtcgttgagcagttgtcaaccatgaaggccactccacgagcatgcatgaaggggttcagtgagt

SEQ ID NO: 17617 - DNA, 464 bp, Oryza sativa
  Clone ID: uC-osflcyp017g12b2
tttgtttataaaattagttttctcaaatcttattaagagtgcacccatgtatacataatgttcatataaatcaagatttgaatcataacgattaaagtcatgcaaccaaaactctactaccatacaccagtgcttctccaaatatggcattttgcatgtacacgaacaatacctatgatgcaatacaatgtatttgtgattacaacttcatttcccaattactttatacagagctccggcaaactgtactttgtgaagattccctctctttctccaacttaacgaacacactaccatcgtatatacctctcacactatccttgtgaaaatatccgttattatcactcgcaagaccataaattagcccccactcttttatagctgcagcccatgattgtgggtcatttggatctctatttgctagaatcatctctttgacctccaaggatgtcaatgcatctggt

SEQ ID NO: 17618 - DNA, 432 bp, Oryza sativa
  Clone ID: uC-osflcyp017h02b2
ataggatcaaaacatttctattaccacaactttttaaggatggaattgagtagcaatactttcaccccaaaatacagtttagcgacaatatcttagaaaagccgcttgctttgccgccatggctggcaagctgagcagagcagctaacacaaagaacacgagatcactataaaccaaacggcaacgaacgaagaaaatacagggtcttttttgtctgaagatacacgaagcggttcgttttcttttatttttagtctcctctcctcctcgatgatgggtgtatggcaatggcaatggcgatgggatcttggcttaattgatgggaaggggctcgccgttccactccttgaggcagtcgagcatggggtcgatgagcttgccctggctgatgccgaggaacaccttgttggacttctcgccgggggacttgag

SEQ ID NO: 17619 - DNA, 446 bp, Oryza sativa
  Clone ID: uC-osflcyp017h03b2
ttttggttttttttttttttttgggtttttttttttttacaacagcacaccatccatatatccatgcaggcagcctgtttgggcccttgggcagatgcattttatttatacaaggagaaggcacttaaatcagccaccacatgaacacacacatgttccatcatcggtcgatctacacatgcatcacccggtcatgcacttacaaacaaaagatctacttgaagaagtacgggagggcgagcacgtagaggaggaagttggcccaaaggaccccggagatgccccccaagaaaaagccgccggggaacttggcccagccgtggggggtttgaagattgtgggcctcctttttgcggccggagagcgtcaacgtcggtgccgtggacggcttgcccttggcgaaggaggcgaccccttatttggggaggcaaacccttaggatgggg

SEQ ID NO: 17620 - DNA, 429 bp, Oryza sativa
  Clone ID: uC-osflcyp017h04b2
ttttgtttttttttttttttttatccaaacaggtgttgttacattgagacacataaatttaattgttttacagttctgagcctgatgcaactgctcagcatgtatggtttacggaagcagatcatatccacggctatacagaggccacacagataaacttaaccagggaacatatatatatatactctaataaggcctagcaaaagtggatgtgtaaaattcaatcaaatgaattgaatatagatagctactgcactgtgaaatgatacatggcgctgtacttatatctagaagttagcaaggacatctttcatatcagcaaccgacatgatgggctcatttccatagatccgcgtcaccatctgaacgaagctcttgtacttgtccaaaaactctttcttgcacttgtcccacagtgaaggaaacaac

SEQ ID NO: 17621 - DNA, 456 bp, Oryza sativa
  Clone ID: uC-osflcyp017h05b2
aagccatgaaccgccatgagacatttgcataatcttgcatgatttgcacctccggtattggttcacaaataacagagctaccaacttcacttcacatgatctacttcgacagggtctacaaagtatataatgttataagacaactcaggcacaaaacaatctccagctctctacgacacggatagtttcataacttaagttttgactacgaaaagacagcttcagacaatttttaacattttgagctttgtcacgcagatcatctgtagtggctgctcagcagtttgttaaattcttttgggaccaaagagtcaattatcaccgccattctgcacggttgcatttgcccgaggatcatcagctatctctccatcttcatctatcataccttcctcttcgtcctccctggtcttaccatgatggggtggcgatgaaggatcaggattcttagaaacc

SEQ ID NO: 17622 - DNA, 465 bp, Oryza sativa
  Clone ID: uC-osflcyp017h06b2
tttggttttttgatttttttggggttttttttttttttgttttttaatgtgtttgttttttacagtgcaccatgtgcacacaataaacagcaatctatggcatcctgggcaagggggattaagggaaataaggagcccatcaaaacaatgggtattcagagcagacaggcccaaggagaaggcaaaaatgtaagggatgcggtactcaatcgtgggccaactgatgtttggccatcctgaagcgcatctaagatatcctggtatgaaaaaggatgggcgcctttattcttggagccagactacgctcctcctgactgctgcaccgaggcagggccaggtccatcaagagcactcccgggggctccggatccatcagcagcattgcactccttgaactaggactcgctggttgaagatgaacaaaccggttcagctggaaccgcgaaggagaactttggaacaaag

SEQ ID NO: 17623 - DNA, 377 bp, Oryza sativa
  Clone ID: uC-osflcyp017h07b2
ttgtttttttaattgggaacttacaagcttaaagcatttctttcctgctcagaaaaaaaacgaggatcgttcggaatccgaagagtgatcgcatttgtgtctaagtaacattcaaggagactcactgtctgccttgctctttttggattccattacattacagaacaaggcttattctatggaaccttctgtgctagtttcagtttcaatactttacaacaccaccagtccaccacacctgagcagcagcactcatggaggaatttattccaagaaactaatacggttcctctttctcaagtttgacaggaactatcaactgttggatgagacactaatagttactggctagtctgtcttgaatctgtgtacaaact

SEQ ID NO: 17624 - DNA, 298 bp, Oryza sativa
  Clone ID: uC-osflcyp017h08b2
gagataaaagtgcaggatttctcatataacaaggtcaatatgatgtttcttaactgcagagatgtccacggataggctccacggcgctaaactgacaagacaatagataaatttccagaaatggacacactccagaacttaaacatatccaggataattaggctattctggcaacagtttagtgtatatggcatggtttcatgctactgctgcagatttgaaggtcctttctgcattgcttctttctgttcagtttgcatagtcactcgtctcctgtcatagcgaggacgaggccggc

SEQ ID NO: 17625 - DNA, 444 bp, Oryza sativa
  Clone ID: uC-osflcyp017h10b2
tttgtttttttttttttttttgtttttttttttttttttttttttttaaaacgaaaatggacggcccgaaacttattatcgggtccatagacgatgggggaacggtccttgggcaataacataaaacattccagcgggagcacgcaacaggggtgggacgttacaattatttcagttctcaggggattttagacccatccggaattacatgatgcgtttactgggcgctaagaaccttaatcttgaacaccagcactgagttgggacaaattccccagggcggaaacccactagctccatacgcataacccggggggcactgaatacgagcaacttcacccacttgcatgggcataactccctgggcccatcctttgatcaccgaaccctggcctatattgaaactgaatggctcctggcctgggtcctttgggctccaaaact

SEQ ID NO: 17626 - DNA, 238 bp, Oryza sativa
  Clone ID: uC-osflcyp017h11b2
tttgtttttttaatttttgggggtttatatttatataatttttttttatttgaaaatacaataatgggttacaaaaaaccaagctaccaaacaaaataaaaaaaaaaaaaaaaaaaaaagaaaaaaccttccaaggggaaaaagacaacataggagcaagacaatcctccaggtaatgtacgacagggagttgattcataaccttaagataaagaccgaacgaaaagacatagatcaa

SEQ ID NO: 17627 - DNA, 467 bp, Oryza sativa
  Clone ID: uC-osflcyp017h12b2
tttgttttgagatcagaaagttttttttttccctttcatcagtaaaaggttctgtagcctacagtgcaccatgtgcacacaataaacagcaatcttggcatcctgccaagtagattaatgaaataagatacccatcaaaacaattgttattcagagcagacaggcccaaggagaaggcaaaaatgtaagtcatgcgttactcattcgtttgccaactgatgttttgccatcctgtagcgcatctaagatatcctggtatgaaaaatcatcgtcgcctttattcttggagccagacttcgctcctcctgactgctgcaccgaggcaggcacagttccatcaagagcactcccgtatgctccggatccatcagcagcattgcactccttgaacttggactcgctgtttgaagttgaacaaaccgcttcagcttgatccgcgaaggagaactttgatacaaaggagcggt

SEQ ID NO: 17628 - DNA, 383 bp, Oryza sativa
  Clone ID: uC-osflcyp018a01b2
gacgagagcggagcacactaagattcattcattcattcatttgatcaaagcaaacgagacgagctttcttcttgcgatcaaaaacacagatgggcaaccacacagttaacacaaactagatagttccacacaaaactaacgatgataacgatcggatgatgatgatggtagctcgattagatagatagataacttggccatgagggccccaccgctcagttcctccagttcccgtcggagttgccgccgccgcggctgccgtagccgccgccgtagccgccgccaccacggccgccaccgtagccaccgccaccgccgtagccgccttcacggcgctggccgtagccaccgccgccgccaccaccaccgtagccgccgccacc

SEQ ID NO: 17629 - DNA, 391 bp, Oryza sativa
  Clone ID: uC-osflcyp018a02b2
ttgtttttttttttttttttttttttttttttttttttttttttttttttttttttttttttttttttttttaaaaggaatggaaacatcagcccaacggaacaaatttcagcggccgggaaagggggaaattcgcttctgaaacattagcaacagggttttgacaggggcttacttgggccatacaaggctaccgcagaaaacaggggatagcttatgccacaacagggttttctaggggggggtgggcccaacttaggtgggcccacccccctggagacgggatgcgggcggggaaaaaccacatttttcattcagattccgggttaatttttggtttcaccccccccggttggcatattgaaaagggggggcctgaccaaggggcccc

SEQ ID NO: 17630 - DNA, 309 bp, Oryza sativa
  Clone ID: uC-osflcyp018a03b2
tttttgttggaaccaatcattttcaacacaatgtgatgagtttttacaagggaaatcataaaggttttcggaaaaacaaccagaaattatgtgcgattctgatttttctggaacaggtttgacatcaaataacattaggggcaagcacttatggcacacaaggaagatatgatgagattatattgtgttacagactcagcattgatggacatgagacaagttttcttattgagaagctaaatgctgcgctttgcgtcttttttttactgctgagcctctggctcctttttctccaaatacccctgtgcc

SEQ ID NO: 17631 - DNA, 374 bp, Oryza sativa
  Clone ID: uC-osflcyp018a07b2
ggatatcgatcaatccagattttctaggagaaaaatgcgcatacactgtacatgaaaaatgagacacaaattatagctaccatattatttgcattacactaaactagtgagtccagatatagagcatataccaagctcctaacagcaccggcaggagattacatctcggcatgtgtaaggtctagctctggcttgtagtacctccagcgggggcactgcttccagaaaaaatcccctctgtttagagatgcaaagatcatacagatttctgcaaatgcctttgctgaatggatgaaccctgctaggaacctcccttaggtaagaaatccgcttccttctggcaatttcatatgttgtttggttcgtaagagcaa

SEQ ID NO: 17632 - DNA, 390 bp, Oryza sativa
  Clone ID: uC-osflcyp018a09b2
ttgtttttttttttttttttttttttaagcaaaacgggtcattctcaaaagcaatcggactgcagtttcaagacatgtacatacatttttcgtgtccatgcaatcaactgtatttagtagtgtagaatgcactgctgtgctcccctggcctccttgggttgagatgataaaaccgcaaatcttctatacaaccatcatataagctgttacaaaaaaaaaaatgaaataaaacatattctacagcgtttcttacaaacaaactccctgggcccaaaatcccataaataacctctggctggggccattgaatctccgtacatcagatggggaagggcaagcttacaaaaactgcaaggcgcttcggtctccaaaggctcacccgttgaaact

SEQ ID NO: 17633 - DNA, 365 bp, Oryza sativa
  Clone ID: uC-osflcyp018b03b2
atataatgcagatagcattgataaaacgatcaaaacatagtaataatagtttttgcctcaaaacaataccgggataaacaagtatcaataagggttgatttatgactcatctaaacctcatcaaagctggaaaaggatatcaggcattgaaaatctgaccaaactgtaacatggaaacaccagttcctctccatgattaactagccactagcaagatttgaagtctgaggcacctaacataggcacgctgccttctgcaggtagtgttggaagacgacccacctcacctaggagcttggggcggggcattagatttggcaagacccacccagacaaccatgccaaccccaagaaccacccacccg

SEQ ID NO: 17634 - DNA, 337 bp, Oryza sativa
  Clone ID: uC-osflcyp018b08b2
ttgttttttttttttttttttttttttttttttttttttttttttttttttttttttttttttttttttttttttttttttttttttttttttttttttttatgtataaaggaaaaaaaaatttttttttaaaaaaaaaaaaaaaatttttttttgggggggggaaaaaaggaatttcaaaaaagggttaaaaaaccaaaaaaaaggtcttaaaaaagggtaaattaagagaaattttttggggaaggttgcaaaaaaaaaaaaggggaattttaaaggggggggaaattaaaaaaaactttaattacccaaaagggggggcccatttttttatgtg

SEQ ID NO: 17635 - DNA, 317 bp, Oryza sativa
  Clone ID: uC-osflcyp018b09b2
gggccaaaatattccaataaaccggggaaaaaccccccccgggttcccaaaaaaaaaaaaccccccccccgggggggggaaacccccccaggcttcccccccggggggggcccccccccccacccccggggctttttttcccccttgccaaaccatcaacgaaacggggggggaaccccccccccaacccccctgtccaaaagctaaaaagggggcccccccggttgcccccccaaggcccctgtcatcgttccccagctagcccccccgggccccaacagcccccaccccccggggaccatggcccccttgggggc

SEQ ID NO: 17636 - DNA, 407 bp, Oryza sativa
  Clone ID: uC-osflcyp018c04b2
ttttggttttttaaattttggggtttttcttttttttttttttttttttttttttttttttttttttttttttttttttttttttttttgggaaggggggaaaaaaaaaaatggattgaattttgaaaaaaaaacccccaaacccgggttttttttgggggaagccccgcccaaaattcccaaaaaggcccgaaaccttaaaaaaaaaccccaccccggggaaaaaggggggccaaaagccccccccaaaaaattttcaaattcgaggggggggggggggttttcccggggaaaaagaaaatttcccccccccaaacggggggggggcttccccacaaaaaaacaaagggaggggcctggccaaggtggggttttttaaaggaaaaaaaccccaaaggggacggggg

SEQ ID NO: 17637 - DNA, 285 bp, Oryza sativa
  Clone ID: uC-osflcyp018c10b2
gtggttttttaacaataggggatatcattacaataaacctttagtaccaagtgaacgactgaaatccaaagtttgttgttacccatatagacacaaaaggctagaaagaatgcattacaaatttgaacaaaaaaacaagcaaaccgggtttttattgaaggagcatcgtcccaaaatatgtacaaaaagaactaaaccttaaacacaatacaaattcaggggaaaatggggtccgacaagaaaacttcaaaaatgatctactttcccacggttgttgcagggttt

SEQ ID NO: 17638 - DNA, 412 bp, Oryza sativa
  Clone ID: uC-osflcyp018d04b2
ttttggtttttttatttttttggttttttttttcattcacagcccccctttttgttaaaacacggtatcctcgtgtttgtcatgttacaactttttataaattatccaaagggtccaagtctcaactttagattcagggagacagaaggatttctcctccttggttgaatgcaggatctgatagatcaaataaatttaccggccaattccttcaatcttgtcttcaacctcagagtagagctccctgagcttttccaagttttcctctgatgtctcccagtagcctttgccactggcttttaggaaggtctgaactagcttcctgaatgaattggggttggtgtccatgagccttttcctcatagcctcatcttcaataaatggggcatttgcctcctcataaacccagttg

SEQ ID NO: 17639 - DNA, 398 bp, Oryza sativa
  Clone ID: uC-osflcyp018d12b2
ttgtttttttattttttttttttttttgtttaatttttttttttttttttttttattttatttttttttttttttttatttttattttttattaatttttttttttttttttttttaaattttttttaatcctacaaaaattattttaacttttttaaaaaaaaaaaaaaaaaaaaaaaaaccaaagagcaaaaccttttaataaaaaaaaaccaaaaaaaaatattaaaggccccaatcgtaaattaaccaaaaacccaaaaaaccaaaaaaaaaaatctatcaaaaaaaaaaaaaattgcttactccaacaaagcacattgattaatttacaaaaacaaaccaaggcatctaaaaaccggaacaaggaaatatcaaacccccaccaaaaaacaaaa

SEQ ID NO: 17640 - DNA, 405 bp, Oryza sativa
  Clone ID: uC-osflcyp018e04b2
ttgttgttttttttttttttttggtttttttttttttttttttttttttttttttttttttttggggaaaaaaaaaaaaaggggggtccctcaaaaaaaaaggatccctggcccatttgcaaaaaacccggggggggggccctcaatctggtagaccattcataggggcaggggcccttagctttttcctctccaaggtcaaaccaaacccttggcaggttggataataagccttaaaattagcccaaaagcctccaggggggtgcctttatttacaacttccccttccattttattcccccaactccttttttaaccaaccccccttggggccctgggggtcctttggcccaacaaaatttgggggtccaaacaagggcttggggaaaaggcccgggactttcc

SEQ ID NO: 17641 - DNA, 404 bp, Oryza sativa
  Clone ID: uC-osflcyp018e05b2
ttgttttttataaatatatgatggatattacgccaaaagatcactgattcttaacaaactctttgcagctacagacactggaattcataccgtactattactgattgacaaagccagaaatttgcccaggatacacagaagaaccgtatatcatcattcacccaaggcaggctgctcaagctgcccaatcttattacccaacaccataatcccctgaaaaacctcagttctccatgcggatgatgcagcggatgccctcgcccttgtgcatcaggtcgaacgccgtgttgatctccgagaacggcacgctgtgtgtgatgaacttctccacctccagctccttcttcatgtagagctcgacgacgttgggcagatcggtgcgtggcttgtagttgccgaagaag

SEQ ID NO: 17642 - DNA, 404 bp, Oryza sativa
  Clone ID: uC-osflcyp018e06b2
cgccgcccttttttttttgttccttaaacaccccttgtgccccaacctcatttctccttagcgaaaactaatgaaagacatggtgtataaatatgtacgggacttattcacatacatacattcatattaacagtgcatgcccctacaaaactcgcttcgtcaagttctgatcttccaagctccccataaatatcccaatgggatacgatttaattatgggcggaaaaacagtgttcaccttaatatctcgatggctgatactgagatctgcaagctcaaaccttgaaaagcccacgagtaatttggcttgcaggtttgatgcttttgccatcccaggattcctgaccatggtccaggatgatctggtccaacatctccttaaaacattctgaatgactcttcac

SEQ ID NO: 17643 - DNA, 288 bp, Oryza sativa
  Clone ID: uC-osflcyp018e10b2
ttgtttttttatttttttgggttttttttttttttttttttttattattattatttttttttttattttttttttaatttaatttaaaataaaaaaaaaaaaaaccaaaaaaaaaaaaaaaaactggaaacattaacaacaaaaaaaaaataaatttatataaaactagaaagctcaagattctgagagacaaacaaccaaaaaaaaaccgaggcacacagaaagaacaccaaacggaagggaacaaccacccttaggggcaaacaactgatgctgctcttacctttg

SEQ ID NO: 17644 - DNA, 409 bp, Oryza sativa
  Clone ID: uC-osflcyp018e12b2
ttgttttggaagtatacaggaaaagaacttatatttacagagagaaaactagtgtgatacagggtgtataaatatgtacgggatgtatgcacatacatacattcatattaacagtccatgcccctacaaaactcgcttcgtcatgtcctgatcttccaagctccccataaatatcccaatggtataggatgtaattatgggcggaaaaacagtgttcacctgaatatcttgttgcctgatactgtgatctgcaagctcaaaccttgaaaagcccacgagtaatcgggctggtaggttgatgctgttgccatcccaggattcctgaccatggtccaggatgatctggtccaacagctagataaaacattctgaatgactcttcaccagcatgagctctcacgatctcaga

SEQ ID NO: 17645 - DNA, 401 bp, Oryza sativa
  Clone ID: uC-osflcyp018f01b2
tttgtgtttttttttttttttttttttttttttttttttttttttttttttttttttttttttttttttaaacccaacaagaaggggaaccctttaacttaaacaggaaaaagatgatcccggttccacatccgttacatcacgacagagaaaaaatagttttttagaagccccccaacaaaggattgggggtgggaaacacatgccttccacaaaggggaaatgaaataccacaaccaagggggtttttttagcgggggaccaactagaacatggagggggaacggcacaacacatgggggggccaaaaaattaaagcttggcctcaaaaacggggggggggggcatttgttccttgagacccttccttttggggatatcctgcaccaggggtgaagccc

SEQ ID NO: 17646 - DNA, 400 bp, Oryza sativa
  Clone ID: uC-osflcyp018f05b2
tttttgttttagatttggaatggaacaagttgaaggtttcactgtatttacatataagaagaatggatccatgttacatatcagtagagaaacgcctagggtcttccggctagctccacaaggtgatgggctagccggcttgggttcgaagcctcacctcttctatttatttgatattaggtccttccctaatattcatgtttttttatgttgcataccagtacatgacacaacagacttatgacagaaaatgagccagagtaactgactcaaattaatgtgctggtaataggcagcgaacaataagcaaattcaatttaagataccgaccggaactcaatgagatgaatggatttgatttgatatggttcagggagatggacaggtggcgaggaggaag

SEQ ID NO: 17647 - DNA, 412 bp, Oryza sativa
  Clone ID: uC-osflcyp018f06b2
aagcgcgaccgcggcgccctccgggaggtcaggagcgacgactaccttctctacaggatgtactggtgctcgttcggcccggagaattacggcgagggagggacgatcttgccgagcaggaagtataggctcaacacgaggaatcgtgctgctcgtccgcagtcgatgcgtggctgcacctgccactttgccatcaagcggctatatgcccggccgcccctggtgctcattatctaccatgagaggcggcatatcaacaagtctgggttcatatgccatggtcccttggaccgggacgccattgggccgggtgccaggagggtgccgtatgtggggagcgagatccagcagcagaccatgtccctgatttaccttggcgtgccggaggagaacatcctgcagacacatatgg

SEQ ID NO: 17648 - DNA, 325 bp, Oryza sativa
  Clone ID: uC-osflcyp018f07b2
cgatgcaggcctcctgcagctgggagcctcctgagcggcggccccccttttatttgtgttttttaaaaacatgggggtaaaccccctccacttatttttctattgcattttctgtcttttttaaaccccaccggaatgggaaccccttaacttacacaggaaaaagaggacccagggtccaaaaccggggctatactaaagaattaaaatatttttttatgaccccgcaaacaatggagtgttggtgggaaacacatgcattctaaaaaaggggaacgaaaatcgtcaaccaagggggcttttttggggggggcccaactaaaaa

SEQ ID NO: 17649 - DNA, 401 bp, Oryza sativa
  Clone ID: uC-osflcyp018f10b2
ttgtttttttaatggcactggatcatttttatttcctcatcctttttattcattcctcccagagagacggatccatggaagttttcttgccctcatcaggcaagcagagcacacacacacggtggcagtggaattgctatgaacaagacgctaatcaacatccagagctaaaacaaacaaggggatcaaagcaaatcccgaaaaaaaaaacacaggggaaagtccacatcttcttctcgtccccaacgcctccgtgtcaccaccacgtcttgcggatttttttttaccctgttctattcgctcaggcgtccacgatctcgccgtcgtccttcgacgccaggatcagctccgggtgcgccgccgccgccgccgccttcttgatcgtgccgtcgatggcgttc

SEQ ID NO: 17650 - DNA, 400 bp, Oryza sativa
  Clone ID: uC-osflcyp018f11b2
ttgttttcaatgttgaaagagaaccttgtattctgaagaggttttcggcaagccagcaatagcgcattgcgcacaggtgaggtgaggagatggtaacagtaagtagctcataaggtggcgagcaggaacctcatgctttcacacgattagataggagttcaatcatatcggacaggtgtacacatctgacaacgccttgcactacaattaacagtacactacatgaacgattacacgaactacaaaaacatttactactgtacaagctcttctataattaagaacgatagccattaaatatcttcacgacagcacgatagtcagggtacgctaagtcgcattcagaacttgccagcatcacataagccgctgcactctgagcagagaccaatgctagaag

SEQ ID NO: 17651 - DNA, 147 bp, Oryza sativa
  Clone ID: uC-osflcyp018g02b2
tttgttgtgttattttttttggttttttttttttttttttttttttggggatcaaaattggatccaatcgattggaaaagagcagtacaacaaacctaatggatctgatgcatcaaacttcgccacaagggagtagatctatctcag

SEQ ID NO: 17652 - DNA, 378 bp, Oryza sativa
  Clone ID: uC-osflcyp018g03b2
ttgttgttttttaggagcttttggtttttttttattgaatttatttaaggagtgattagtgttattttaatataaaatgaatttagaaaagtatatttaaaaaaaaaaagaaaaaacaaactaacaatatggatatataaatactaacgaaattactgtgtagaaaataaattggctgtttcagcatccatcctagcgatactacgaagtgaaattgttccaagcatacttaagaagatcaaaaaccttctcggaaaagaaaaaatgaatgattggagcacccctttgctggaaattatctggatggacacaaagggttgccttcctggaggctttcttgacaggagcagctgtaattagctctgtaagtgggactgg

SEQ ID NO: 17653 - DNA, 404 bp, Oryza sativa
  Clone ID: uC-osflcyp018g05b2
tttttgtttttttttggatacgggatcaaaccaaaacgtccatatgtttccaagacagtaagcggcgaggcaatttatactctagatgtataatcttgaacattttcttccgaaaaggagcaatcacgcaggcaaagtctcaagcttgaatttgaagcctgacaacagcggttagatgaattgcagaaaaggaaaagaagcaaaaacaaatatggtgcgattcttcctgacgcatctctatacaggttcatttttgcaacaaagaatggcagaaatgcctgaggacttcttcaccaatgcttatttctccaggctatcatatcatattagaagaaataatgccgccatcttctcgttgtcagcctatggaagagtagctctcaattccttcctgtctgccccaa

SEQ ID NO: 17654 - DNA, 403 bp, Oryza sativa
  Clone ID: uC-osflcyp018g06b2
ttgttgtagaaaggtgctaagggctagtgtaattggattggatcggagcaaaaggattttgatcttatttacagatgcagaaattcagaagaatttcagacacatgcgtctttcttcctgaacaatgcctaagtttggaaagtacacacagaacaatgccattactctggcttgcaagcaacacccgccacacgcgcgtcgcgagccctgtcaattctacacatgggagctcgccggcgccgccgccgccatggcgacctcgccggcgtcgaccagcgatggcagctgtcgcaatccgcgtacctaattgcctcaactgtctaatggtgtactaggtattcggtggaatcaatcaatcacacggtggtggtttagaattcggccgtgttgccgcacgacgagg

SEQ ID NO: 17655 - DNA, 408 bp, Oryza sativa
  Clone ID: uC-osflcyp018g07b2
gtggtgagctccggcagggtgcgactgggcaccgaccgcctcgacgagtccggcgacggcgtcgccggcggcagcttccccctcgagcacctcctcgtgtacaggctcctgatcgatgagtcgccctcgtagccaccgccaccgccgtaaccgccatcgacgccgcacttggcgagcctcacgttcaccgacttgcccttcgccaccacgtagatgttgcagtagtccggcgcgcccttcatcaggctggacggcacgtcggcgttcttgaatttcttggtgaatgcatttctgttggatgcgccgagcgcgatgctctggatcttgttcacggtgatgaactctattaaggcctttgacacgtctgcctcttccagtaccaactccgatacatgcacgccattcctg

SEQ ID NO: 17656 - DNA, 402 bp, Oryza sativa
  Clone ID: uC-osflcyp018g08b2
ttgttttttaggagcaatgaagctcttctattgaatcgattcaaggagcgacgagcgtcatcatcatctagcaagatatctagaactgcatatttacaccaatattgaattaacaaactaacaatatggctatataattactaacgaatttcctgtctcgaaaataaatcggctgtttcagcatccatcctagcgctcctccgaagtgaacttgttccaagcatccttaagaagatcaaaaaccttctcgcatatgtatttctgtctgattgtagcacccctttgctgtaatttatctggatggacacaaagggttgccttcctgtaggctttcttcacagcagcagctgtaattagctctgtaagtggcactggctgccaaccactgtcagctccaagaat

SEQ ID NO: 17657 - DNA, 315 bp, Oryza sativa
  Clone ID: uC-osflcyp018g09b2
gtgtttttttaatttttttggtttttttttttttttttttttttttttttttttttttttggataaaaaaaaaaatttatttattaaaaaaaaaaaaaaaaaaaataaaaaaaaaaaaaaggaaaaaaaaaaaaaaaaaattgcaaagaaaaaaaaaaaaaaaaaaaaaaaacagaaaaaaaaacggggagggaaaaaaagtggggtcacaaaaaactaaaaaaaaaagcaaaagtgaaaaaacctacttcaaaaaaaaaaaaaaaagaaggaggaaggtaaaaaaacaaggcgaaaaaggataaccaaattctc

SEQ ID NO: 17658 - DNA, 400 bp, Oryza sativa
  Clone ID: uC-osflcyp018g10b2
ttgttttaagtagatttaggtctttatcatctatttacaactgccgatcgatttacatatgacatcagctcaaagataaatgaaatgtcatcggcacttagccgattggctatcgtttatagatttaaccgcggtttctttgtatctatttcttgttgattgcaggatcaaatcaactggcatgctaacacgcccgaagacgagctttggacctgcactgagttaagcagatatcccagtcctcgtgtttttcgtcaacagataggttcttcagatatgcaacaatctcgttcctccaatcatccgcgtcaacatttgcaatcccaattaggcaaactcatcagtcatggaacacaaatcactatcatactcatcgctcatcaaagatagatcatcacta

SEQ ID NO: 17659 - DNA, 410 bp, Oryza sativa
  Clone ID: uC-osflcyp018g11b2
gagacggcggaggggaggaaggccgtgcaggcgctcaagtcggtgtacgcgcactgggtgcccgaggacaggatcatcaccaccaacctctggtccgccgagctctccaagctcgccgcgaacgcgttcctggcgcagaggatctcgtcggtgaacgccatctcggcgctctgcgaggccaccggcgcgaacgtcaccgaggtggcgtacgccgtcggcaaggactcgaggattggccccaaattcctcaacgccagcgttggattcggcggctcctgcttccagaaggacatcctgaatctggtgtacatctgcgaatgcaatggcctccccgaggttgcgaactactggaagcaggtgatcaagatcaacgactaccagaagagccggttcgtgaaccgggtggtgtc

SEQ ID NO: 17660 - DNA, 391 bp, Oryza sativa
  Clone ID: uC-osflcyp018h04b2
tttgtgttatcaaatatcaatatattagctgagaattcaatgtattacattacatgttacatgaaggaaagtccaaagccatttcctattgaacaacacgcagtgcaactgactgtattccaattgtaagatacaaacagaggaatctccacccttacccatttcccacggtattcatacgatccagaagacatacaaaagttgaactatatggcaccttgccttgttctatgtaatcaatatgacgggacggggtatgacttcctatgagaaacctatctgcttcaaaaacaatgcacacacagggaaagagtcatcatgcatgcttattgattgtcaccagggagagaaatgtcaatttatatggaataaataacaacaacattgtgtg

SEQ ID NO: 17661 - DNA, 400 bp, Oryza sativa
  Clone ID: uC-osflcyp018h06b2
tttttgtgtggccaaatacaattattgtatcctggttgcacattcatctacaataagttcagctaagaagttttcatacataaaagcacaattcagaaaataataagtttgtgtgctcaaacttcatttagcagacatcagatgaaaggcaaatcattcacgacataactttttagcaacggaaagaatgcatgtggaacaaggctttgtttaagcttcatacgagtaaccatgatgtcattaccatcatgttcgagacgcgccaacagcttgccgtcagtatcaaagcaaagcaccgattgtccgcaatcaaccagcacaaccacaacctcatccccatcctcggacgaaaccatcacactccaagaatcacccacgtcaagttcccccctgatacatg

SEQ ID NO: 17662 - DNA, 324 bp, Oryza sativa
  Clone ID: uC-osflcyp018h10b2
gttgtttttttaatttttggtgttatctttttatttatttttttttttttttttttttaacagggaacaaggccggatttttatattagaacaaggcggaatgcaaattaatttaaatgcaatacaagaatggcacaaagggagccaaaagtttttacatttccccttttaataatccaataaaggaattcccatgggagtatttaattaggcaagcgggcccacattaggcaaacctaggggcgatttattataaaatagcccgggaaaaaccttcattagtccaaaacaaaacccagggggggcaaccggaggcccacaaaa

SEQ ID NO: 17663 - DNA, 394 bp, Oryza sativa
  Clone ID: uC-osflcyp018h11b2
ttgttttgggaaacgaatggaatcattattgcaaaaacatcatcttcttcttcatcttcttagtgtacacaacaccaactcgatcatcatctcgtcgcactaaacccatcttccccaacccaaagacaacgaactcgctggccacaaatccatccaaccacaattaaccactgctaagctacggtcccccacttcacttgccggggacgaagttggtggcgtacgcccaggcgttgttgttgacggggtcggcgaggtggtcggcgaggttctcgagggggcccttgccggtgacgatggcctggacgaagaagccgaacatggagaacatggcgaggcggccgttcttgatctccttcaccttgagctccgcgaacgcctcggggtcatcggc

SEQ ID NO: 17664 - DNA, 389 bp, Oryza sativa
  Clone ID: uC-osflcyp018h12b2
ttgtttttttaattttttgggtttttttttttttttttttttttttttttttttttttttttttttttttttttttttttttttttttttttttttttttttttgggtttttttggaaaaaaaaaaaagggggggaaaaacatttttaaaaaaaaaaaaaaaaaaaaaggtggggggggaggaaaaaaaaaaaatttgtttggggttcccactaaaaaggaaaaaaagagaattttttttttttttttttaaaaaaaaaaaaaaaaaaagggccaaggggggggggtaaaaatcccccaaaacccaaaatttcccttaatttaaaacccttaaaaaaaatgggaaaaatacgggggaaaaaaaaactttttgggggaaaaattctcccc

SEQ ID NO: 17665 - DNA, 402 bp, Oryza sativa
  Clone ID: uC-osflcyp019a01b2
gacttgtcggacttgtccttcttgcggatcttgccgcgggagctctacttggccttgtccttcttatccggggcggcgccgacgtcggcggccgagcagtccatggaggaggtggcggcggagcccctggagcggtgccgactcgaccgagcgggagaacgggcgaacggcggggagctctcggaagtgatgtccatgctggcggtggcctctcttgtgggaacactgaaagatgtatctactaggctagctccggctaccactaattcttgagaagcccatggattagctgcagcagagcccactctgtcgctactaaatgaggctgagtccacaggcgccaaatggttatccttcatccagctaggtgctcctgcagtattatgattggtgatggagaca

SEQ ID NO: 17666 - DNA, 392 bp, Oryza sativa
  Clone ID: uC-osflcyp019a03b2
ttgttttgaaacacaactcattttttattgatatatgttggatgaatccaataaaaccgatacaagtcacgaaaaatcagactagatgaatccttcgagatcacatgagcaaaagctttcgacgaaagctgtcctatagtcgtggaagcaataacacttgataaagataggaattcagacacgagaggttgcagactataagatgtcatcaaatctccttgaacgccgcgaagagatcaccgctgatgtagtccatgtccacaagactaaccaagaagtagctcttctggaccttgtctagtatctccctagatgagtcgccctcagggaacaggcaagcccaaccctttgaccaaatttcgaaagcttcgtctttccaaaccataaagctg

SEQ ID NO: 17667 - DNA, 418 bp, Oryza sativa
  Clone ID: uC-osflcyp019a04b2
tttttgtttttttatgcaacacaatttcatatgaatgattaagcactcgaatttggggttctacaaaccgatctagcggcgaaactgttcttgacagaataatctaagcaaaacccgactctaaacaatgacggctactgattaagtatgatttgggacgtcctaaggttttcctagggggcataccccctgggctaagcccatgacacaattacaaggcccaaaacccaaatcagattcggactagatgaggtgtgtggcttgttttgcagattctcggcagctcggtagaaattttgacgtgggaccaaaacgatatgaaagtagacttcataagctttcccaccaggtcctaatagacccccgtaattccttctagatcagtggctaggtcaagagccccgaagtttgaagttgt

SEQ ID NO: 17668 - DNA, 315 bp, Oryza sativa
  Clone ID: uC-osflcyp019a05b2
tttttgtttttttaatttttttgtttttttacttttttttttttttttgggcacagccaaaatggttttatttatttgtagggccacaaagatcccaacagagggtccaaggataaacaaccaagttccctccaccctggggtgtttcttacattaaaaaaaaggggatagctttggacctccttatccaaaataagcgtaacacattggccataaaaattaaaaaccggtgcttccaccctacaaggggcttaacagtcaggagcaaccaaatatttcccaaaatttgaaggatttcacattttagcacaccgc

SEQ ID NO: 17669 - DNA, 373 bp, Oryza sativa
  Clone ID: uC-osflcyp019a06b2
ttgtttgtttattttttgtgtttttttttttttttttttttttttttttgaacaccaaaagattgaggattgctatgtattatttggattggaaaataaataaacaattacttgatcaagaattccatcgaatttatatgacattggcatgaggcaggccaaaaaaaaaaatgctagtaaaatacatttaaaaacattacttcaaatggaacaacattccgtgcctgagtaaattttggattgctctttattctggtttttgcaagaactcacaccaaacatccaaaagggcataggcccaatcatatccctgaatgataaggacttgggaagccaataaaaaccttccattttatgtgcaaaaaaccctttc

SEQ ID NO: 17670 - DNA, 390 bp, Oryza sativa
  Clone ID: uC-osflcyp019a07b2
ttgtttttttttttgattcagaaccgttttattcaacactattgttcctgtacaaggatctgaaacagaaaactgatgcacacatatacaagccatggcgacgactgcagtttatgctcgctatttgtaacagctaacataacataaatggtgaatcttgatcctatgcctaattcccccccaatagtggggtgcaccttatggagtgaacctagtaagcttcagtgacaggctcagtcgaggaaaatcatgaattctctagatctaattctgctcaagtgtatggtggaatgtcttcgagattattggcctaacgtcctccacaccaacaagtgtctccaggaatgggagtaactcgaccaattcctggtctgaggggtcatcaaacca

SEQ ID NO: 17671 - DNA, 368 bp, Oryza sativa
  Clone ID: uC-osflcyp019a08b2
aacagaatcagaacttgtggaaacacaagctgtaaaagaatatagattatgcaggaaataacagaaacaggttgcagtggacagtctacaacacttatcatctgccagaaacactacacctaaagaaaactacatctcatcgcacaatcgatatatatcgaaatccatatgttcatcagaaaaaatcaaactctaagtagccatcagaacccttctgaggcgcaccactggacacatcagtagttccagatgtggatgggggcaactttggtggcctctcaatctcgacaggctttggtacctccggtgggcttgcacatcggatcaacgcccagtttacgccttcgaagaacggatgctgctttatc

SEQ ID NO: 17672 - DNA, 256 bp, Oryza sativa
  Clone ID: uC-osflcyp019a09b2
gttgttttttttaattaggtagatactgaataatgatggacgatttgatggagacttacaccaggcaggagagagaaaaatacaccagtgcgtggagaaaacaacacctaagccggctccaggaaggccccctataggcatggaaacacagacacttgataacgataggaatgaagactcgagaggcaggatcttgtaataagcaatccgatgtcctcgaaagacgggccgacaacaccaggaggggcgtgcatgt

SEQ ID NO: 17673 - DNA, 418 bp, Oryza sativa
  Clone ID: uC-osflcyp019a11b2
ttgttttttatatatcttaggtaaatgacatatattccaaacaatgctcacatacagctccgcagcaatattttggaaggacacatgtatgccttatgttgccatcggcctattacaacaaaataaccaaaaaccatggttatttgctcactcaaacatgacacgatctcttttaagagaggattattaagatggtcatatttcgcatgcgacccaacaagaaaacacatgctctgacccttaaaggtggattccactcttgtactcacagccagctgcaaagctttcagggatgacatcgtctacgacacggcagccgccattctcgacaaggaagcggacagagaaggggcccttgacctgtgactaacttttgagcgtccaggtgttatacgacgactcctcgagcgccacccag

SEQ ID NO: 17674 - DNA, 342 bp, Oryza sativa
  Clone ID: uC-osflcyp019a12b2
tttcccccctttttacaccccaacaacactaggattgctttttattatttggattggaaaataaaccaaccattccctgaccaaaaattccatcctatctatatgacattggcctgaggcaggccaaaaaaaaaaatgctagtaaaatccctctaaatccatcactcccaatggaacaccattccgtgcctgactaatctttgcattgctctttatttctgccctttgcaagaacccaccccaaacatccagtagggccaaggcccaatcctccccttgtatgcatatggcccttgagatgccctctaaaaccctgccattttttttgcaaaaaacctctcc

SEQ ID NO: 17675 - DNA, 393 bp, Oryza sativa
  Clone ID: uC-osflcyp019b01b2
tttttgtaaaacaaatgagcagtgatatctctgaactttcgcttacacatagatagcaagcagtctagtagtggaccaatccggccttctgcacgcatacagtcactcacacgctactacgctatctttacatggagaacatatacatatattgcgacatagaagtgcatatgacatataattagtgtgcacatgtgtgcatgctgctgctgcatgcagcgctagattattcgttcgcagcaggtagcgaagttgtgtgatcagttttgtcaggcgtggtccggctcaccaggaagagcagcgagaacatcaggaggagcagcgaatacatggcggtctatgtcgtcaggtggactagcgaacacttggtccggatcatggtctacgtcatca

SEQ ID NO: 17676 - DNA, 392 bp, Oryza sativa
  Clone ID: uC-osflcyp019b02b2
ttgttgttttttttttttttttgtttttttttttttttttttttttttttttttttttttttttttttttttttttttttttttttttttttttttttttttaaaaaaaacccttggaaaaaaattcaaaaaaagaaaaacaaaaaaaaaaaactttttttggaaaaaaaaacccccccaatccccccaaaataccccattttttttgggaaaaaaaaaaagggttcccatttccccccttcaccaaattaaaaaaaaaaaccccaaaaaaaaatttcctaaggggggggttttaaaatggaaaaaacaaagggggatcccccaaagcccccaggggaaaattaaaggggaaccttttaaagccaaaacccttaatgggggggggaaaccaa

SEQ ID NO: 17677 - DNA, 393 bp, Oryza sativa
  Clone ID: uC-osflcyp019b03b2
ttgttgttttttttttttttagggggcatcatagcattagctagcgtccaataccatttcagtattagaacagaacaatatgatcataacacgtcatcataacctatagccaagatgttacagactttacaatcagttatcgcgcatatgcaaagtgtaaagccgtactctcttgctcaaggcaaaaacagataaactccactttaactttggcaaaaagaagtggttgctcagttaggtgccgacagaggtttattaacagtagaccaaaatgtttctaggggaaatcaagccaaaataattccacttcaaaaggatttggggttcccaacttcagacccctgaaatatgtcatgagcaccgctcatcttgtgccagcaaaaaataaacttg

SEQ ID NO: 17678 - DNA, 355 bp, Oryza sativa
  Clone ID: uC-osflcyp019b04b2
tttttgtttttttaaattttttgtgttctaaaccattcatttttttttttttttttggtactattcttcttgttaatgtctttcttacaacccattacacaaaaaaccatcagatggaatacttgtggtccccaacaccccatcccactgaaaaaaaaaaaaaaatctacttaaaaaaaaaaaaaacccggcaaaccctattgggctggcttaaaaaaaaaccccacattttccatcccaaattgaccaccaaaattgcggaaaaaccttcttccctagatcatacccagcaatggggttacccccccgaccccccccaccagaaaaaaccttatgtttcccccccatatttttc

SEQ ID NO: 17679 - DNA, 369 bp, Oryza sativa
  Clone ID: uC-osflcyp019b05b2
ttgttgtttttttagttttttgtggtttttttttttttttttcttcttctccttttttttttttttttttttttttttttttttttttaggaaaaaggattccctagggggggaatccaaggggggggggtcgaaaaaaaagggggggggtggatacggaaacggagaggggaacggccccccgaacaagggggaaaagaaaagaaaaaccaactttaaaagggagcccgcctttggtttttcaaccaaaaaatctccaccaaaaaaattggaaggaaaaataggtccgaacaaaaaaggggaacaataaaaatgatccttttttttccttaaaagggccaaatttaacttaattttaagggacttttt

SEQ ID NO: 17680 - DNA, 383 bp, Oryza sativa
  Clone ID: uC-osflcyp019b07b2
ttgtttttttttttttttttttttttttcttttttttttttttttgaaggaaaggggggcccccaggggcgaatgaacgccccttagcatttcctttattgaagaaccacttaccaacaacaactgagcccaattacaacccgcacgaatgaccatttgacagaaatcagccgcacttacggattctttaattcgccagccgactaattggccacaaagccctaagagtccggcctccgcctgtctcacgatgtaatttttcttactgccatatatgctagggcaggcccatgaccggatccttctacctgccttgaaacatgttaccacctgccaaggtttaacgaccatacaagtttactcccctctccctcttgcggggg

SEQ ID NO: 17681 - DNA, 382 bp, Oryza sativa
  Clone ID: uC-osflcyp019b08b2
agattcattaatatccatataaatataggaaataatagaatgacttacattgtgaaacggagaaagtacaaattagggtgttatcaagagatacaacacgcgttgggatcttcctcgcccaaaaacataaagtggggcggggtgtatttcgcagtcacaaactcgtacagttccggcctggcagctggttttggtttttctggttttttaaattcgatgcgatgaacttttacagcttcattgatgaggtctgcgaaggtcatgcgaggcttcgttgtctggtcgcagataccagcggcgatgttgttgaaccgagcagtcaaatctgcatccttgctgacaattctgttaaacacggttgcacagagggacgccaatgctt

SEQ ID NO: 17682 - DNA, 380 bp, Oryza sativa
  Clone ID: uC-osflcyp019b09b2
cgtcaaaatgacatttgtacagtaattgcacatcagtaccaaaatctcgagctgtgcatgtttttttgatttcaacagaagaaaacgaatacaagctttgtatgaacatagaatttcctaacgggggaagaatcaacagcactgttcttgagtagatggccatgccttgagtgtcagaagggctgagttccttgtggtctgctcaacaaaaatgaatagctgcatagtacgattctttatatccggcttcccctgatctttggggagaagagtgtgttctgtctaatcaaactacaaatcatgaaagaggcgtctgatttgttctactgtggcaggcatcaatgtgatggggcaccttttatgctgggagactgacttaa

SEQ ID NO: 17683 - DNA, 404 bp, Oryza sativa
  Clone ID: uC-osflcyp019b10b2
ttgttttttttttttttttggttttaaatcattcagatttttttttttttttggcaagcagcagcttgttaatgccaaccagtcaaccgattacacagaaaacgtacggcttgatatacaggagggtgcagaaattctatcttggtgatcaaccgaaaggactcgtacggaaacagcattggaatcctgcgatgctttctgcatactcctacttgaatactatggagtcctatcactactggtcactacataatgctgctatagtatttttcactagttcatacgcgatcaaatgattagtcctcgggatcgaagtccctaaccttcacatttgggtcttccccatactggatgcagctgtcgatgtgcgacagcacatactgaatgctgctctcttttcttaa

SEQ ID NO: 17684 - DNA, 419 bp, Oryza sativa
  Clone ID: uC-osflcyp019b11b2
tttgtttttttagttttttttttttttatttttttttttcttttttttttttttttttttttttttttttttttttccccccccccccccccccccttttttttttttttatttaaaaatttttttttttttttttttttcttttttttttataaaaaaaaaaaaaacaaattttttaaaaaatcaccaccaaaaaaccaaaaaccccccccccaccaaaaaccccccctcttaaaacaaaaccccattttccaaaccccccccccccccctaaaaaaaaaccccccccaaaaatttcttcttttaaaaaaaaatctttattaaaaaaatacccctcacccccccctccttaataacccccccctttttttacaaaaaaaatataaattatcccccccccccaaaaaatttttctttta

SEQ ID NO: 17685 - DNA, 414 bp, Oryza sativa
  unsure (1)..(414): unsure at all n locations
  Clone ID: uC-osflcyp019b12b2
ttgtttttttattttttgggtaccatataacctactaaattcgtatatccattaagcctcctcaagcagccttggtatgtatttacatgtacctgattttcactcatagctagctccgatcgaactcgatcttcctcgcccactagagtaaatnccaaccaacaacatagccgaaagatcagatgtctcactatacatgcttcagctaagggcccacccccatatccgatgtacacatgatatcaggaactggaattgattcaatgccaggaatttcatctaagcaaattcaattccctgaggatcctactctagtgtacacgattgagccgcacaaacttactgagcgtggtagcaagaaccttcatccattgcagatggcattgaggagcacatgccccagcatgaggtcca

SEQ ID NO: 17686 - DNA, 190 bp, Oryza sativa
  Clone ID: uC-osflcyp019c01b2
ttgtttgttttttactaaatgtggtccttttttgttttttaaaatgtttttatttattataacaacctgtgtctcttcaggttaaggccaagaatactctgaatgatgccaacaagaacatgcatgatacaattaatacagggagagaaaaacaaaatgggcacagctagaaatgtaatactgcgtgaat

SEQ ID NO: 17687 - DNA, 379 bp, Oryza sativa
  Clone ID: uC-osflcyp019c03b2
ttgttgtttttttaaaaatttgggtttcacccctccatttttttttttatttttttttttatatatttatatattttttaaacatattaaaaaaatttttaactacaaaaaaaaaaaagaaaaaagaaaaaaaaccctgaaaaaaaaactggggtaaaaatggggaaaaaaaaaaaaaaggaaaacccactaaaaaaaaatgccctaaaaaaaaggaaaaaaggaaaaaaaaaagggaaaagcccccaaaaaaaaaaaaaagacgggaacaaggggaaaagcaaaaaaaaaaaaaacaggggggaaacccccaaaggaaaaaaaaaaaaggaatgggattgaaaaaaaaaaaaaaaaccccgaggggttcttcccacag

SEQ ID NO: 17688 - DNA, 384 bp, Oryza sativa
  Clone ID: uC-osflcyp019c05b2
tttttgttttttttttttttttgttttttcttttttttttttttttttttttttttttttttttttttttaaaaaaaaagggccacccccttttttcattacaggaccaggcaacacttcacaaaaggggcaatccaatggagagggaagaaaatttttaaaaccctaaaacaaccgggaaaggattcagggcccacccgcaggaaacactggaggggggggggcaacatttcctccaaagcacaaaagccctttttaagaaaaaaacaggggcttaaatcccctccatcaaaaattgcccgaactttgggggggaaaccatataccctgaaaaacccttaaacaaaagcctgggtggaaacccccccactccaaaagggggaa

SEQ ID NO: 17689 - DNA, 387 bp, Oryza sativa
  Clone ID: uC-osflcyp019c06b2
tttttgtttttttaattttttggtttcaacactcttttatcttttttttttttttaaaacgaataaaacccaaataacactttttttttacttaaacatttgatggcccaaaaaaaaacaggaacttttgagggaaacttaaacaactttcctaagggacccaaaacgcccaaaatatttcaataaaatcaccaatcctttatgcaacatttcttaacagaaaaccatacacagttttatatacctttttaaccacgctaacatgcataaaaatcgcactcctaactaccatctgaagggaacccccaaccaacttgaaaaaatgcatcaggaaccgtcattttgaacccggatatgtaacccggtgggagcttaaaccacgggaaa

SEQ ID NO: 17690 - DNA, 394 bp, Oryza sativa
  Clone ID: uC-osflcyp019c07b2
ttgttttttttttttttttttttttttttttttgctctaaggaatgatatcataaatcagtccaaggactacaaactccgaggaaactcttgttctaaaacaacatggccttgaataacatgctaatcgggctaattaaatctgtaatgagctaatgttttacatattctacattttctaatggggcaatccatgacttcatggcacaaaactgaatttaactagtcaggtacttcttatcagttcattgttctaacctgctttgatgaagcaggcatgaataataccaaaggaaagctctgaactacacaaattcaagggctccacaagctggttggtccaatacattcctgtccagggctgcacttgccgcttcttccaattcactatttac

SEQ ID NO: 17691 - DNA, 409 bp, Oryza sativa
  Clone ID: uC-osflcyp019c08b2
cccccctttttttgttgttttttttgaactttgggttcctcctttacaaccgggacatcaaatgttacatgagaatatactaacggttctactgtactgcacaaacttgccactgcaagcatcaggtctacactttcctgtcatcactcaggggaactcaagggggaaaaaagcagatcattgatattattgcaaatcaacaaactacaatacatgagcacgtatattatgtgcatacgagcagatgaaacaagcaaacatgctagagaagaagacatggtctattcagcgaatctgaaactcggtatacccatttctgtcatccaatcaacacacccgcgaccaaagggcaagccaaaaaatgatcgaaccacagcctcaatttttgactagcagagcgggcacacta

SEQ ID NO: 17692 - DNA, 380 bp, Oryza sativa
  Clone ID: uC-osflcyp019c09b2
ttgttttttttattttttttgtttttttttttttattttttaaaaaatttttaaatttaaaattttaaaaattccaaaaaattgaaaaaaaattaaaaaagaaaaaaaaaaaaaaaaaacaaaaaaaaaaaaaaaaaaaaaaaaaaaaaaagggaaaaaaaggaaaaaaagaaaaaagccaaaaaggcaaaagaaagcatgctgcagcaaaacagcagggcaaggttattcgttcgcagcatgtagcgaaataaagcgaacaaaaggctaaaggggggaccggcttaccaaaaagattaggcagaacataaggaggagcagcgaatacacggcggaaaaaaacgacaggtggactagcgaacacttggatcggaacatgg

SEQ ID NO: 17693 - DNA, 400 bp, Oryza sativa
  Clone ID: uC-osflcyp019c10b2
ttgtttttttttttttttttgtttgcatcaagcaaatagtatgattttgctactactagctttcttgtcttacatcgagaaagcgtttcatcacaccagaggtaattaaaccaaaagcacagcaagcaccttactcgcaagcactttgaacttatcatcgacgacaacgtatacgtacggatcgttggattgactgactttgggtgtgtgtgtgtgttcatcgcatcactacgggctggcttcgattgccttcgcctcggcagcgggtgcgacgacggcggggacgggtgcggcggcggcgatggcgggctgcttgtcagtgaccaccttgggcacggtgacggtgagcatgccgccgtccatggacgccctgacgaggtcgacgacggcgtcgtcgggg

SEQ ID NO: 17694 - DNA, 398 bp, Oryza sativa
  unsure (1)..(398): unsure at all n locations
  Clone ID: uC-osflcyp019c11b2
gttgttttttgaacctctgggcttccaccccctcccttttttttttttttttttttaaccacaaaatccaaaaaaaacttcaacccaattaaaaccttttatanaacaaaaaacaacaaaaaaaacaaaccaaaaaaccaaaaaaaaatcaaaaaaaaaccaaaaaccaaaacccattcaaaaaacccccaaaaaaaaattcacaaaaacctccaaaatcccacccccaattcaaaacctacaacaaaaacctctcaccccaaaaaaccaccccaaaaacccaactaaaaaaaaaacccaacaaaaaaaccaaaaaaccccattatcccaaaaaccccaccaaaaaaaccccccccccaggggccccaaccggggggaacgcaaaaagggggccaaaa

SEQ ID NO: 17695 - DNA, 369 bp, Oryza sativa
  Clone ID: uC-osflcyp019d01b2
tttttgtttcttaatgaatctggattggaatgacaaattaatcatatctccaagccagagtacatatgcataaataaataataaataatcggtatacttactgatcagttactgatcattctgtttatatctgaacaaatggtagagcaaatcaagaagctatagctagcatggtatcttggaggtgaaccaggtcatgacatggagcggcgccttgatgagctccacgcgcgactgcagcaccagcgtcacgcacaggcagcacgggcagatgcacgagatcggcagcccgatgatccagatgatggcgccaacgatggagacgaggacggcgagcagcgcgaaaggcatacccagcagccaccccag

SEQ ID NO: 17696 - DNA, 368 bp, Oryza sativa
  Clone ID: uC-osflcyp019d02b2
attgggagatttcatatttgacaattaatcaatagttcacagtatatattttttacatcccaaatagggtcattacactatcggcatctgaggatagagggcaaatccgggttacagttggattggtttgggcctttccgagagctcctgcttctagtacttcttagcagggctctagtactgggccactcccaacttccggcccatttcacgagtccaggaggaaagacttgatgaagcggttcacttggtcggctccctccaactgcaacgcgtgccctgcgtccttgatgatctctagccgcgacacgtctcccagatgcctttgcagtctgtggccgagatccaacgggaacacctggtcttgt

SEQ ID NO: 17697 - DNA, 390 bp, Oryza sativa
  Clone ID: uC-osflcyp019d03b2
ttgttgtttttttttttttttttgttttttttttttttttttttttttttttttttttttttttttttttttttttttttttaaaaaaaaaaaaggggggggggaacattagaagaaagaaaaagcccctttttcaaggtttgggaaaaaaaagctaaaaatttggcttttacggaaacaaccatgtttttttggagggcatggaacaggtttaaaaaaaaagggccctttcgggggggcccaaggcgaacaacgaattacgggataaaaaaaaaagccaggagaaactgtttaaagagcccccccaaaaaggggaaggggatgcccttgggggaaccccgggggggggttaaagggagggggcaaaaaaagcccccatttcgggggggg

SEQ ID NO: 17698 - DNA, 368 bp, Oryza sativa
  Clone ID: uC-osflcyp019d04b2
cctccctcttttggtagatgtaacccatgggatatacaaactcatatttattcacggattcaaatagaactcatacaatatattttccactatcgtatcattcccgcaaccgttgggtcaggcgggtgcggaaaatacccgcccgttttcacccctaaatacaagatcccaacgcttacccattcttgaatccgtgtacaggcagctgatctgatgcaacaggagtcatttagaagtcgtcgtcctggttgggcttgggggaggtgaggatggcggagtagagcctgagcttttcctccccgagggacgagcaccgttagagcggcctgcgcgcccggatgaaggagagcgaggcgagcgccttgcgg

SEQ ID NO: 17699 - DNA, 298 bp, Oryza sativa
  Clone ID: uC-osflcyp019d06b2
tttttgtgtgtgaagatttggtggccacagcatcgtattgatggtgcagctgaatcaatgcacatgaatgaggacggcacgcaggacaccctgtgacgtgcagaagagcatattcagactaggtgccaagggatgacgacctgattaacaaattaactgttatacatgctagtaatatatacagcaagcacgaaactgacactgcattcacacacgtgcctgtgtaatttaggtctgaccattcttgccagaggcgtcgactagcctgaggaaccacacgcaggcgcataagccggtt

SEQ ID NO: 17700 - DNA, 358 bp, Oryza sativa
  Clone ID: uC-osflcyp019d07b2
ccgcccttttttttgtgtttttttatttatgtggggtccccccggcagatttcatatttgtcaattttttaatggataaaaaaaaatggttttttcaaaccaaataaagttgttacactgtcaaggtaccggggaagcggggacaagcacaaaacggtgggactgattgtgccattttggggggggggggtttaaggcgaacccaaaaaaagggtggtgggatgggacaataaaaaaaagccgtcaacttcacttggaaaaggggtaaggggggcaaaaggttattaccagccttcttaaggtggacgagaaaaaagggcgctgcataattgttggcagatcaccgggactaaacagc

SEQ ID NO: 17701 - DNA, 398 bp, Oryza sativa
  Clone ID: uC-osflcyp019d09b2
ttgtttttttttttttttttttttttttttttttttttgaaagcagaggtagattatattaagaagcctggcccccatgaggagatggagcaggagtccatgatgagaccaccatgatgatagatgatccatccaagctagctagggatccatccaacattgatcgacacacgcacacactgacaacgacgacgacggttttatttaggcgtcagagcaaaaggcaaggcctgcctacatataagctgggtactaatgcaagcaaattaaggcctcgatcaaagctctgatcgacagtagcagcatccatacgataaatcctcatgcagccgggcgacgacgacgatagattcagttgcaggagcagcaggagcagccgctgcagctggtgccacact

SEQ ID NO: 17702 - DNA, 398 bp, Oryza sativa
  Clone ID: uC-osflcyp019d10b2
ttgttttttttttttacacagaaacaaggtcttaatacatcactagatttgagttttttttaacaatacaaactgcaaaccaagcccacacaaacttcaagcatagtgctacagtagtagttcagtagatcaacaaagccaggtctcaaactcacaatagttatcaggatacaagcacaccacaatcatcaccactggaaccagttcaaagttccagactttatttaccttgccagattaagcttgctacctagtagtagcagttcagataatggtagcaagcagtaacagcatagcatagatgattttttttttttttacacgcgatgggttgttctgatcaccgcaggatcccagaaaccggtgctggagtttccgggacaagtaggcgatgagcg

SEQ ID NO: 17703 - DNA, 399 bp, Oryza sativa
  Clone ID: uC-osflcyp019d11b2
ttgtttttttattttttggtgttttttttttttttttggacagacagatggttccattcactcacaatagcacaagcacaaagtagagggtggtactgcataagaacaatcaccaagatgacaatgtctaaagcagatatgcttcaggttctgttcaggctgcactaggcaaaatagttctgttttattgagaccaagtactcacgtactggttcgggagtacggcataggtaggtagtttgtagccacagccatcgccattttagtcacggggcaaccttcagcatatatgctcccactacaatcttaggactcgagatccttgacgatgaagttctggcgactgatggggttcatgacaaccggtggcccaacagtgcgaggccaggcttgaaactt

SEQ ID NO: 17704 - DNA, 378 bp, Oryza sativa
  Clone ID: uC-osflcyp019d12b2
ttgttttatcaaaaaacgttggtttaatgtaactatataggattacacatcaaaagctactagtacaacttgactaaactgtagatcccctgaagcatccggggataagagagcagcctaattaccaatttatcatgacctgattaacaaattaactcttatacatgctagtagtatctcgagcaagcacgttaatgacactgcattcatgcaagtgcaagtgtaattaagctctagtcgatcttgacggaggagtagatgagcctggtgaaccagaagcaggcgtagaagccgattgtgccggtgaggacgaagaaggcggcggaggcgatgagcatgtagccgaagtagagcacgccggagacgaccttggtgatg

SEQ ID NO: 17705 - DNA, 395 bp, Oryza sativa
  Clone ID: uC-osflcyp019e01b2
caaatgaaatcgctacattttcatatgaattttaggtttacaatgaatctaccatagtccaagaatgagttagtacaacttaattatcacgaatcgagttctcatacttcacaaccatcgatcaaaacaatctggtgtgcacaacaatattgtcaggaataaatatatagtactaattaaaaatactcaaagtcagtgtaggactcgccggtgctcgagttggccgcgccgccaccatccgccgcggcgggggcggcggcggcggcggcgttctccggcggcttcttgtccttgggagtggtggcggacgcggcggcggcgtactgccggaagtcgaccggctccggcaccgacggcggcgtgaggctcctgacgagcgcccagttgacgccgtc

SEQ ID NO: 17706 - DNA, 217 bp, Oryza sativa
  Clone ID: uC-osflcyp019e02b2
gaaacaccacatgcctcgagccagtataaatggcttccaagttggaagttggaacaccaaacagagtaaaggttgtcacagcagcagcagcgagcacctaaccgagtaaatttgcctagctagccctgctgccatcgtgccagcggccacactgatacatcgctttctcgcttgtttattacagtatcatataatactacaaccacgcccccccccc

SEQ ID NO: 17707 - DNA, 391 bp, Oryza sativa
  Clone ID: uC-osflcyp019e03b2
aacaaataaaaacaggagtatgacgattttattacgaaagcatccagataaattacacatttacaagaaccaaaagaaaaaggaaattttgtgaaaatttacaatcaatgagaaggcatacgcaagaagataccaccacctacacttttgatatacattcaaacaaaggggggaaatagccaaaaataataataactgccgccataaaagatacataaagaaaaatgcggagacgttagcaacagaatatagctaaagaaaccatcctcatattccaattcgttttaatggcccaaaatctgagagatgcgtcgttcagcatccattggcatctctcttccaggaacgttgacctttaacacgctcaagtattcttttgcagaaaataaat

SEQ ID NO: 17708 - DNA, 393 bp, Oryza sativa
  Clone ID: uC-osflcyp019e05b2
ttgtgtttttttaattttttttgttttcccttttttttttttttttttttttttttttttacccaaaccaaccccattaattccagggggttaaaaaaatcattacccccccggggcgtttcaattttccaaaaatttttttattttccctggggtcacagcaaggaggcatgaaaaaatcacgggtcatgccccttcacctttaatcctgcccctttggggcccccaagcatgggaaatgaaaacgggcaaacccaagccaaaagaaaggggaaaaaaatagcaaaccacgagggcccttttgggaaaaacatgccaaaacaacgaaacgaacgaccaaccaacgccttaaccaccgggctaaaaggggggaaaaagggtagggcagcggcc

SEQ ID NO: 17709 - DNA, 54 bp, Oryza sativa
  Clone ID: uC-osflcyp019e06b2
cgcatacacacatacttaaatttaaacccataataaccgccgcccttttttttt

SEQ ID NO: 17710 - DNA, 298 bp, Oryza sativa
  Clone ID: uC-osflcyp019e07b2
aaatgaaattgttttatttttatatgaatttttggttttcaatgaatttactattgtttatgaatgaggttggaacaactaattttaacgagatgaggagtaaacttaacaaccatagaacaaaaaaatatggagtgcacaacaatattgtgaggaataaatatatagcactaattaaaaatactcaaagacagtgtaggactcgccggagctcgaggtggccgcgccgccaccatccgacggggggggggcgggggaagggggggggaatccgggggttctagtcttgggagggggg

SEQ ID NO: 17711 - DNA, 403 bp, Oryza sativa
  Clone ID: uC-osflcyp019e09b2
gttgttttttttttttttttggtttctccttcttttttttttttttttttttgtttttttttttttttttaccgaaccaaaaaaggggaagcatggggcaaagggtgttgggggccccccacaaaaaagccaacccgggaacaggcagccgcccactggggggggacccacacaaaccaagggggcaacccacaaatatttttccccccccaaagtttaaattaaaggggtctaagggtggcggggaaaccaaagacaccacattggttaaggggccacccccacagggggacaggggtcaagggcccaaaacaagggactagctgccgggggccaccaaaggcaaagctttaaaaagcccgttggccgcccccgggcacaaacggggaatggaagggcccaa

SEQ ID NO: 17712 - DNA, 334 bp, Oryza sativa
  Clone ID: uC-osflcyp019e10b2
ttgtttttttatttttttggggtttctcttttttttttttttttttttttttttttttttttttttttttccccaaacaaaggggaaaataaaaaaatcccaaacagggccaattatacaaaaaacccgccggggggggggggggggggggggggggggggtgccggcccggcaagggggggaaaaacacccgcggggggggggggggccggaaggaccgcccacagggcccgccccccccctcccaaggggggcccgcccctggggttcttacaagggccctgtcaagctgggggccgcccccccatttttgggagggtaacccccccccccg

SEQ ID NO: 17713 - DNA, 304 bp, Oryza sativa
  Clone ID: uC-osflcyp019e11b2
ttgtttttttaaatttttgtgtttttactttttctttttaaaatagatatatttttttaattaaaacaaaaaaaaaaaaaaaaaaaaattaaaaaaaattttaacttcaaatgaactaactaaaaaaaaaaaaaaattttgaatccccctggtccccccccaaaaaaaaaaaaaaaaattgcttttcattagccaacccccttgaaacaacaacccaccgggaacaaaaaaggaaccaaaaaaaacgaaaaaccaaaagcacaaataccaagaaaaaaagactttaaaaacaaaggcccgtccg

SEQ ID NO: 17714 - DNA, 376 bp, Oryza sativa
  Clone ID: uC-osflcyp019f01b2
ggcttgccttcattacatgttacaatttttgttttcatacattaacttatcatgtatttgtatagcacatttgaacctacatgtgcttaattcactcatgttctggttagctactgggaaactgtcagctacagatgtcagcctaacaagactttcctcgcttctctttaataatacactaatggcaatcgcttgttttcttttacagaactaaactaacaattgtacaaagcatatctcacagattagcatctagtagctaaatcagtggatgaattctgccatgtcacccctcgtctgagtgatgagagcttgagccttgaggggtcaaaaactcgaacattttggtcggaagctcaagaaactttgaagaact

SEQ ID NO: 17715 - DNA, 454 bp, Oryza sativa
  Clone ID: uC-osflcyp019f02b2
acgatgcacgcagcacgtacagcagggatgcattctataggagccgcccgtccttttttgtttttttttttttttttttgggtcttcccttttcttttttttttttttttttttttttttttaatgaaaaaaacctaaaagggcccatttaaaaagggaaggcaaaaatttaaaaaccaaatgcttggtttggggcctaaaaaacttaaccaaatcccaggggggggaaaccaaaaaaaagggctggtaaaaaaaagggtacaaccctttgggggggaaaaataaaaaattcccctttaaatttaaaagaaggttcccccccaaaaaaaaagggtcaaagttcaatttttggatggacacaccccccaaaagggggcctttttttttttttttggggacccgcggggtttttctttctttcaaaaaaaaaaacccttaaaaaaaccccgggggg

SEQ ID NO: 17716 - DNA, 374 bp, Oryza sativa
  Clone ID: uC-osflcyp019f03b2
catgcaacgcagcacgtaagtcatatggatccataatagagagccgcccgttctattttgttttttttttaaaattttttgtttttccttttttttttttttttttttttttttttttttttttataaaatttataaaaatttaaaaaatatttaatccaaagaaaaaagaaaaaaaaaaaaaagaaaaaaaaaaaaaaaaaaaaggaaaaaaaaaaaaagggaaaaaaaaaaaaccaaaaaattgaaaaaaaaaaagaaaaaaaaggggtttcccaaaattaaaaagaaaaaaaaaaaaaggggggggggagggaaaacaaacaaagaaaaaaaaaaaaaaaaagattggccgcccaaaaaccaagggggggt

SEQ ID NO: 17717 - DNA, 444 bp, Oryza sativa
  Clone ID: uC-osflcyp019f05b2
catgcacccctcctacagacagggagcctcctgagcaggccgccctccttttttttttgtttttaacactttgggtttccccgcctctatttcatttcattccgatagatagcatcatgcagttcaaacaccatggccaaagcgggcttaattcactggaacatcacggaccaatttcagctcccactgggtggatggatacagggcccctcgactttaaagacccactggacacgataacgacttgggggtcttaaacggggggaaaaacacgcttttttaggcccccataggggggattgcccccacgaaaaaaagcccacagtccccgccccccaaaagggcgtaccaaatggcaaaaaaaaaaaaaaaaaagggggatccaatgaccccccctcggaatccccccccgggggcaccggatatataatcacttgacccgtc

SEQ ID NO: 17718 - DNA, 392 bp, Oryza sativa
  Clone ID: uC-osflcyp019f06b2
ttttgtaaattgaaactgtggggtatcatagtaaatcttcccggagaatcagatgctcagaattcatagtgttcttcagcatcttacaacttacaagatggcgcagatatacaagcgcaactatcttaaagtaagctgtaggaggaaatggaaccatttctaacaacgggaaaaatataggttatagaaggaaaccatttgaacaaattaatagggaaatcaactaggaggatcgtttccgtccgatctcaatagaactggacgtttgatacgtagatggcgtctggcatccagttgaccgggatgacgtttttggcgatgaggctcttgccggactcggtggtgacgcgaatggagaagggtgccttgagtggcgcggcggtgtccatcct

SEQ ID NO: 17719 - DNA, 337 bp, Oryza sativa
  Clone ID: uC-osflcyp019f07b2
cattggtggtttttttattttttgtgggtccccccccccccccattgggggtttttggtttctcggtactaggggcaaaggtccaagggggccccccgggcaggggaggggaaacccaaaaaaccaaagccagggggaagggggaaaaaaaaggccccccccccccccggggggaaccccgggcccaggggcggccaaaaaaggggaacaagccccccgcccaacgccaaaaaaaagaagcgcccccaagggggggggggggccccccagcaacaaccacggccaaggcccacccccaggagggggggcacccccgcggggggggccccaaggggcc

SEQ ID NO: 17720 - DNA, 389 bp, Oryza sativa
  Clone ID: uC-osflcyp019f09b2
gttgttttttttttttttttggtttttttttttttttttttttttttttttttttttttttttttttttttttttttttttttttttttttttttttttttttaaaaaaaaaaaaaaaaaatgggggatcaaaaaaaaggggggggggcaacaaaaaaggaaggaataaaaaaagggccaaatttaaaaaaaaaaaaaaaaaaaggggggttcccctaattttgagggggacaaaaaaatgggggggggggggggggcccctaaaaaaggggctaaaaaaaaaaaaaaattcctgggcccaaaaaagggggggggaaaaaaaaaaaattttccgttttcaaccccccaaaaaaaaaaaaaaaacccggaaaggggctcctttttagggg

SEQ ID NO: 17721 - DNA, 380 bp, Oryza sativa
  Clone ID: uC-osflcyp019f10b2
gttgtttttttaatttttggtgtttttatttttttttttaataaattcattttttaataaatttttcctgtttgtgtttattttacaattaaagttttcctttttcaaaaaaaacccaaaccaaaaaaaactcaccgagggggggacaaaaagcaaaaaaagttccccaatttcggggggggggaaaaaaaccaaaaaaatgtttttaaaaaaaaaaaaaggggttaactaatcccccttgaaggggctaatccgggccccctttaaaagggggataaaaaaaaaaaaggccaaacctaattgggttgaaaaaaaaaaaaaaagggataaagaaaaccggggtaataaaaaaaaaagggccccccctaggcctattacag

SEQ ID NO: 17722 - DNA, 392 bp, Oryza sativa
  Clone ID: uC-osflcyp019f11b2
ttgttttttaactctttgtgttctccttgttttctatttcatttcattccgatagatagcaacaagcagttcaaacaccataaccaaagcgaactcaattcatggtaacatcacggacgaagaacacctaacactggatggatggatagagggcttctcgactcgagagagccactggacacgataacgactcgactcgatgataagatgattctgacacggatagctaaggataactggccacgatgggccccaccaatcagttcctccagttcccgccggagtcgccgccgtagccgccgccacggctgccaccgtagccgccgccgccgccgccacggccgccgccgtagccgccgccgccaccgtagccgccctcacggcgcccgtag

SEQ ID NO: 17723 - DNA, 397 bp, Oryza sativa
  Clone ID: uC-osflcyp019f12b2
ttgttttttgaaccaatggtgtgtccaatgtaacaactcaaaacgttgacacaaatagttcctctcgtgcaagttttggtctgtttggcattaggccgtcgggttcttattgtaaagctcaaatcctcaggatcccaacacaaggggtaggaaaaagcattaatcaaatcaagagaagcctcatctacagggatgagttgctagcctgcaaaatgggctaactactcatttgcaaatttgatacccttctcaattgaagccttgagctcgcccttaagattgtccaggccttccttctcaaaggctgacagctggcccaacccaagaacttcctcaactccattcttcccaagcttgaccttggaggcaaagaatggcagctctgttacagttgatt

SEQ ID NO: 17724 - DNA, 245 bp, Oryza sativa
  Clone ID: uC-osflcyp019g01b2
ccccccacaacaacgaaatgcaatcagttcaagtgtttttcaagacacacttgatattagggatccaccctttcgaggccttacttaaaaaacaacacagtgcaaacttatgaatttcctttatacaacatatataaaagattacctagaacctacaagcagaaggatagcttcaaaagcctagggggatagcctgataccgaaatcatatgggccgccgtaatccagtgggcccctggctggaa

SEQ ID NO: 17725 - DNA, 356 bp, Oryza sativa
  Clone ID: uC-osflcyp019g02b2
ccgcccttttttgtttgttttttacaaagaggggggacccccacagcggagacctaactaaaatggaacatgtgcattacagaaaaactggattttagggaaatagcttggaaaggccttacttaaaaaacaacacagtgcagtcttatgaattgcttcgatgcaatatatattaaagattacctacaatgtacaagcacaaagaaacttcaaagcctaataggatagcctgataccggtatcatatgggccgacgttatgcagttgggctttggcttgaagcgtaccttcacaccttgaaaaagcacaatagcgataccgagataagcatcgcatgagactttgagatggacttc

SEQ ID NO: 17726 - DNA, 397 bp, Oryza sativa
  Clone ID: uC-osflcyp019g03b2
aaagaatgtacaaaaaactcataaggatctcataaaatcgaccaaaacaatacagcagattctagatttagagttttgtactctttcacatgacctacaatacactggactgtttgcttgattctgccaagaaatcaagttggcgctgttgtacttgctgaattcttcagagcagcattgccagcagatggagctatatttgtttgcttgatgctagaggactgatagctctgaaatactaatttctgatactctccaagagcccatattgggaatatattgcgataagccatataacacaaggggccatttttcaagaaacttccgatcatttcctcttgtggacagtcaccatcactgagctggatgctgatgataagtcttgctgctttgtgca

SEQ ID NO: 17727 - DNA, 355 bp, Oryza sativa
  Clone ID: uC-osflcyp019g05b2
cgccattttcccagagtaccagtaaccaaaacaaagcaaccaagctttagaagtatatgacaaattcacaagggatgttcttaaccaaaatctgtagcaataaagaaatccatgactccaggtgccactccaaaacgtttaccattaggacgacgactcaactaaggtctcaaggggatacagcagcgactactgacacagatagaccccagacattcagactgaaccttgacgacgacgctggaccttcttgaccctcataactgttctaggactcactgattgtcctgatcagcagatgactcattagcattgtttgtctgaaatggcttttcagcctcgcaacttggacggt

SEQ ID NO: 17728 - DNA, 389 bp, Oryza sativa
  Clone ID: uC-osflcyp019g06b2
ttgttgtttttttaaaatcaggggtatcaagccaaacaaataccaccatccaacatgccaaccatattttacactaggaataccttcctaccccgcaaaaaagggcaggaacaaaagaacattctctaaggtaccaaccaccactagctcagagctagaaaagctttacaaaggagggaaagatggcagccatctccggcacacactgcggcagccgccaggtgaggtcaagattttctgggggtgggaaaaaagaaccaaaaactaatttagacatgtcatcatcatcatcaatcaacacctgtgctgctgccacaggcaaaaggagatgctgtggacttgatacatttcacctcatcccacaaatctaaactgtttcttctttctcc

SEQ ID NO: 17729 - DNA, 319 bp, Oryza sativa
  Clone ID: uC-osflcyp019g07b2
ttgttttggacaaagagaggggacctttcccatttcatcaacgaaatgcaatcagttcaagtgcattacaagacacactcgatattagggatctaccttttcgaggccttacttaaaaaacaacacagtgcaaacttatgaatttcttttatacaatatatataaaagattacctagaatctacaagcagaagatagcttcaaagcctaataggatagcctgataccggtatcatatgggccgccgttatgcagttgggctttggcttgaagcgtaccttcacaccttgaaaaagcacaatagcgataccaatataagc

SEQ ID NO: 17730 - DNA, 410 bp, Oryza sativa
  Clone ID: uC-osflcyp019g08b2
gttgttttttttattttggggcacaactcaaaagaggagacctcaactcaaaatggaacatagatgaagacgccagaaaaggttccaaaagaaaatgcagggaaagacttcctttccacaccaccactaaaaactcatgtaaattgtctccttgctctcctctttttctctctctcccctcagcacagttactggaaactgctatacaacatggggttaatacattcttaaaaagtgaccaaaatctggaagctctcgctgcgcctttcacctttctcgggcttcaggttaatatgataatggtaggttcaggggaaactggaagcaccctctctgtctctctatccatgtttccatcagggacaaaatgttgcagcaatctagccaagtcttcggtaacccgcattcat

SEQ ID NO: 17731 - DNA, 394 bp, Oryza sativa
  Clone ID: uC-osflcyp019g09b2
caaaaactctggcatggattcattacaagtcacaacaaatgtagccatacatcaacgcaacaggtaatcgtcatagcacatttgaacctacatgtgcttaattcactcatgttctggttagctactgggaaactgtcagctacagatgtcagcctaacaagactttcctcgcttctctttaatcatccactaatggcaattgcttgttttcttttacagaactaaactaacaattgtacaaagcatatctcacagattagcatctagtagctaaatcagtggatgaattctgccatgtcacccctcgtctgagtgatgtgagcttgagccttgaggggtcaaatactcgaatattctggtcggaagctcaagtcactttgaagaactcccatct

SEQ ID NO: 17732 - DNA, 387 bp, Oryza sativa
  Clone ID: uC-osflcyp019g10b2
gttgttttttttaattgaggggtatatcataaattgccattttcccagagtaccagtaaccaagacaaagcaaccaagcttcagaagtatatgacaaattcacaagggatgttcttaaccaaaatctgtagcaataaagaaatccatgactccagttgccactccaaaacgtttaccattaggacgacgactcaactaaggtctcaaggggatacagcagcgactactgacacagatagaccccagacattcagactgaaccttgacgacgacgctggaccttcttgaccctcataactgttctaggactcactgattgtcctgatcagcagatgactcattagcattgtttgtctgaaatggcttttcagcctcgcaacttggacg

SEQ ID NO: 17733 - DNA, 309 bp, Oryza sativa
  Clone ID: uC-osflcyp019g11b2
gttgtttttataaaaattgtgggtatcaaccccccccaataccattttttattttttcacatataaaaaacactagaaaaaccaaaaaaccaaaaaaaaaaaggaaagaaaaaaacaacaaaaaccaaagaaccaaacaccaatagacaagagaacgaaaagctaaacaaaggacggaaagacggcagtcatttccccaacacactgcggaaaacgccaggtgaggccaagcaaccccccgcggtgggaacaaacaaccaacggcaaaaccagacatgtgatgatgatgaggaaacaacacccgtgctg

SEQ ID NO: 17734 - DNA, 253 bp, Oryza sativa
  Clone ID: uC-osflcyp019h01b2
gggaaaactggttccatttttaatccgggggggttctggaatacaaatttcccattcccggtccaggaagccaagcaatgggcaaaaatcaagggcccactttttggcccccacaaatggagttggaaactaagtttccgaaacccttttcaaggttccccttcctttagcatcaagggggagggggggaccaaattgttgaacaaaaaccattaattcccccctttatttttaaaagaaggcggttgggggc

SEQ ID NO: 17735 - DNA, 239 bp, Oryza sativa
  Clone ID: uC-osflcyp019h03b2
cacagcagcacagaaacgccgagtggcaccaggaaagactgaagggggccactaagacagcacgtaaaatactgacaaaagggccatgctgattatacggaagttgatttcgccctgacggtgacacggggtacgtgcgagccttcccaggaaaattaaattgggaggggattctttgttttaaactaaaccagattttgggggcccatttctttttggggcttagataatgttggggg

SEQ ID NO: 17736 - DNA, 388 bp, Oryza sativa
  Clone ID: uC-osflcyp019h05b2
ttgtttgtttattaatgatgtgggtggctaccgcctgaacaatggatggcacaaagcctgtcactgtgttctaacatatatctcctgaaatgctaggcacctagacaaatctaattaccctgctggcctgctacattgagtcactcactcaactaacctaggatatgcagctaaaattaaatatgcctcatctgaaataaaagaacatgaggcggtatttaatggcagtggtaaccacaactgccaaactccagctaaaactatgaaatgtagacaattacatttgacaaaatccagatgtttgaacaaaaccttctctactaaggccatacctaccatatacgcttcgcggatttgctgaagcaggaggttcagctgaagaagaaca

SEQ ID NO: 17737 - DNA, 390 bp, Oryza sativa
  Clone ID: uC-osflcyp019h06b2
ttgtttgttttattaatttgggtgggaccaaatcccccttttttttttttttttttctgaaagcataggatgaccccatttaaaacactgtagatttgccactgttttgaacaaaacaaacttgtttaaaaatatccattgacaaataggccgtaacacgactggagtgcaaccccctatgcaaacaatggtttaatctatgctgaaatttggcacaaatataggtaagctgggcaaaaaattaacatcggtctttgaaaaatacaacattttttttcatatttttggaaacatcaaaaacattatttccttccctgggatccacaaacaatgagctgttttgaatcatgaggttcccaacaaaacactccctgagcagggcagttgatg

SEQ ID NO: 17738 - DNA, 181 bp, Oryza sativa
  unsure (1)..(181): unsure at all n locations
  Clone ID: uC-osflcyp019h07b2
tttttancactggaaggaaaaccataactcaactttgatgtgaaacgagagccaaagggacaagatgggtcaacgacctttaggggaacagcctaaaggggtctaagatgaatccttcttgtggaacgcaaggacatccagattggaacgtaacctgattgcatatacaggcaaatcaaca

SEQ ID NO: 17739 - DNA, 420 bp, Oryza sativa
  Clone ID: uC-osflcyp019h09b2
aattgtttgtttttttaattttttgggtttttcccccctttccttttttttttttttttttttttttttttttttttgaccccaagggattttacctaaatccctatataaaaaccatgctttccaaacaccccatttattattacaaacccccccctgggacaaaaccaaaacgcaaccccctcctccaggggggaaaacaggaaacattcccgacttcccaggaaaattaaaccaggaagggattctccggtttaaactaaaccagatctagggggcccatgtttttccagggtggtgcctagggtgggggggccatttttactttgagcgggacccccccgaatttaacccggaacaagcttattaacgaaaaggtcgacctttgggatttaacagccctaaaaagggggccctttg

SEQ ID NO: 17740 - DNA, 378 bp, Oryza sativa
  Clone ID: uC-osflcyp019h10b2
aaaagtgtggtttatgaaaaaggggggtgaacaaaaccaaacaaaaattttttttttttattttttttttttttttttttatatattttttattaattatataaataatataaaaaaaaaaaaatataatataatataaaaaaaaaaaaagaccaagggaaaaaaaaaaaaaaaggggagaaaaaaaaattgctttttttaaaaaaaaaaagaaaaaagggggggtaaatgtcaaaaaaaactggaaaaaaaaaaaacaccaaaaaggaagggggggggggggggataaaaaaaaaaaaagaagggggggaataaaatttaaaaaaaaaaagcaaaaaaaaaaaaaaaatccccggagaaaaagggccacccgagggg

SEQ ID NO: 17741 - DNA, 300 bp, Oryza sativa
  Clone ID: uC-osflcyp019h11b2
cacacccaaacctacagttactgcatactggatcacacgattgagtccttcatggtccacattggtaaaacctttttcggactaaagatacatggtatccacatatactcagcaactgcgcccggtaaacaagacattacgattgcgtttcatttcccctgatgctcaataaaggcacatggcttaagacctaatgttgaatgggatcacccttttcctcacctcttgttaaactgcaaccagggcaccaccacctaagggaccaacccaaaatatccactgcacactttatatcccaaa

SEQ ID NO: 17742 - DNA, 328 bp, Oryza sativa
  unsure (1)..(328): unsure at all n locations
  Clone ID: uC-osflcyp019h12b2
gggggggcaaaacccccgaaaggttgtcngaatttccggaaggaaaaagggccatccaaataggccataattccttcccaagttcccaggccaacccaagtccctaactggctaaccctagggaggagagggatagatccagagggggtgtggcggagcggcccatccaggggtcgagcgcgccaccaatgggcgccaaccttaggtaggcgggtcctaaagacctaccccccgccatgtaaacgcccttcctttctcgctgcatcctgggccccaccattttcgtcgtcgccaccaccacattccccgaccacaccaccacatacga

SEQ ID NO: 17743 - DNA, 451 bp, Oryza sativa
  Clone ID: uC-osflcyp020a03b1
cctttttgcagcacgcagcgcacaagccccaggggcagctttctgctactcatcattagcgagagccagctagctgagtgtgccacttacactgctgctgctgctggttctagctaagctcagcgatcgtagtcttcatcatcgccggtgacctggtgaattagtcgagagagacggctgcggctgtgacggcggaggaggtgaggagggcgcacagggcggaggggccggcgacggtgctggcgatcgggacggcgacgccggcgtactgggtgcaccaggccgactacccggactactacttgaggatcaccaagagcgagcacatggtcgagctcaaggagaagctcaagaggatgtgcgacaagccgcagatcaggaagaggcacatgcacctgacggaggagatcctgcaggagaaccccaacatgtgcgcatacatggagccgtc

SEQ ID NO: 17744 - DNA, 477 bp, Oryza sativa
  Clone ID: uC-osflcyp020b02b1
ttgtcatactctactactactagccagtaaggtagctaactaactacgtggctatggcccccaccgtgatggcctcctcggccacctccgtggctccattccaagggctcaagtccaccgccggcctccccgtcagccgccgctccaccaactcgggcttcggcaacgtcagcaatggcggaaggatcaagtgcatgcaggtgtggccaattgagggcatcaagaagttcgagaccctatcgtacctgctaccactcaccgtggaggatcttttgaagcagatcgagtacctgcttcgatccaagtgggtgccttgtctcgagttcagcaaggttgggttcgtctaccgtgagaaccacaggtctcccggatactacgatggcaggtattggaccatgtggaagctgcccatgttcggctgcaccgatgccacccaggtgctcaaggagctcgaggaggccaagaaggcctaccccg

SEQ ID NO: 17745 - DNA, 469 bp, Oryza sativa
  unsure (1)..(469): unsure at all n locations
  Clone ID: uC-osflcyp020b03b1
tttttccaacctccccctcaagctcatgctgggtcctgtgccgctctcctccgttcaggagctcgccgtcaagaccgtcccctccgcctccaaggtcgacatccgccgctgcctcgagtccatgtacggcttctccgtcgccgaggtccgcaccctcaacatggagggcaagaagctgcgccggggccccttcctcgccgccaagcccgactacaagaaggcctacgtcaccctccgggccccgctccccgtctcccccgacctcttccccattgggcttgtcctcggcgagagggagcgcaaggccagcgccgccgccgccaggaggaaggcggcggagggcgccgaggtggaaggggagggcaaggggaagcactggatggaggatgagaaggcgggcttctccagggccggccgcggcatggtggtgtacggcaaccccgggaggctgnggaagaagaggattgga

SEQ ID NO: 17746 - DNA, 388 bp, Oryza sativa
  Clone ID: uC-osflcyp020b05b1
cccgggcaggagccccgccgggagaatccggggcgacgccaccacgtttcttggctcttactctttcctcctctcctgggtctctctcaccgacggcagcggcgggctcggcaccggcggcggcggcctcgaccgccgatcgccgacgccgcgcgccgcctactggctcatcaggatgggctcggcggagtgtgccggtgccggctggctccgtgcgacagacccgtgacgccagcttcgaggccgaggacgcgctcgacgacttcctccggcggcagtccactttggtcgcggtcgcggagacgtccccaacctgcatgacgtcgtcgactcgggtactccggagcccactggccctggcccgatttggaagccagctacacaacga

SEQ ID NO: 17747 - DNA, 477 bp, Oryza sativa
  Clone ID: uC-osflcyp020b08b1
tggggtgggcaagggcgacgtggtgatgagcctcctccgcaactgccccgagttcgccttctccttcctcggcgcggccaggctgggcgccgccaccacgacggcgaacccgttctacacgccgcacgaggtccaccgccaggcggaggccgcgggcgccagggtgatcgtcaccgaggcgtgcgccgtcgagaaggtgcgggagttcgccgcggagaggggcgtccccgtggtcaccgtggacggcgcgttcgacggctgcgtggagttccgcgaggtgctcgccgcggaggagctcgacgccgacgccgacgtccaccccgacgacgtcgtcgccctcccctactcctccggcaccaccggcctccccaagggcgtcatgctcacccaccgcagcctcatcaccagcgtcgcccagcaggtggatggagagaaccctaacctgtacttcagcaaggatgatgttatactatgcct

SEQ ID NO: 17748 - DNA, 472 bp, Oryza sativa
  Clone ID: uC-osflcyp020b10b1
tttcggacgcgtgggctggtccgcaacgatgctcgtgttattgctacattgtacaaggatgagagatgctcaaagttgaagatatacccaatactgcagaaggtctttcttgaaaggattttgaggaaaccagaaattgaagcatttgcagaggagctgagaccgcatcaaaaagctctgttaccagataagtctactgtgcttgaccgggcaatgattgagcataacctccttagtgccagtaaactttacactaatatcagctttgatgagcttggagcattattgggcattgaccctaggaaggctgaaaagatagcatcgcgaatgatttatgaagataggatgcgaggttcaattgatcaggttgaagctgtgatacattctgaggatgacactgaagagctgcagcagtgggaccaacagattgcgggactgtgccaagcgctgaacgacattctggacagcatgt

SEQ ID NO: 17749 - DNA, 329 bp, Oryza sativa
  Clone ID: uC-osflcyp020b12b1
acaacaagatcctttggccccccaacaccgcctcccaggacgacctcaataaggcgtcccggacggccaccatgaagaaccacccggacaagggcggaaagccccacaagcccaaggagctcgcacaagctaatgacgtatcgagagacccaaacaaaccagacagcgatgaccaatatggtaaaaaggccctcaaagcaagaacgggtggacgcagaacccatgtcaagccatctgacaaaccacaataaagattgggacctaacttgggcggggggggcctgagcacgagcactaggcataggagaggaaagggcagtgacccatcc

SEQ ID NO: 17750 - DNA, 485 bp, Oryza sativa
  unsure (1)..(485): unsure at all n locations
  Clone ID: uC-osflcyp020c09b1
tttcacgcgccggacttcaccggcgtcgggggcttttttgaacgccatgcacattgacagcaccggccctgcctccgtcatcccgtacccctgctcgatcaaattcacatcaaatttccacttggatgttgttgttgtttttattgcttgatttggtccttgtgttcgtctagtttgggttatacctgtccgaggacggcgttggggagcttggcgtggacgatgtcctgaagctccttgcccatgggggcggcgccggagatgaccatgcggatggaggagaggtcgtggcggtcgagggcgtcgctcttggccatctcgacgacgatgggagggacgagcggcgcgatggtgacgccgtggcgctccaccagctgcagcatcttgacggtgtcgaaccgcttcatgaccacgatggcggcgccggcgcgcatcccgcagaggaggatggagtggaaggagtagacntggaacatggggagcac

SEQ ID NO: 17751 - DNA, 474 bp, Oryza sativa
  Clone ID: uC-osflcyp020d04b1
tgacgctttcggcacattctcctcgcgcgagaggggggaggagaggggaggttggaccagccagagcggagcgatgggctcgccggggcatggggatgcggcggagagggacatcgacgatctcccacggaacgacgccaactacacggcgctgacgccgctctggttcctggagcgcgccgccgtggtccacccggacagggccgccgtcgtgcacggcccggtgaggtacacctgggcggagacctaccgccgctgccgccgtctcgcctccgccctcgcgcagagatccgtcggccccggctgcacggtcgctgtgatttctccaaatgtcccggcactgtatgaagctcatttcggcgtccccatgtctggagcggtggtgaactgcgtaaacatcaggttaaacgccgagacaattgccttcctccttgaccactcagtggcagaagtcgtcatggtggaccaggaatt

SEQ ID NO: 17752 - DNA, 448 bp, Oryza sativa
  Clone ID: uC-osflcyp020d11b1
ctcggtcgcacctcccacccacccgcagccgccggctagttcgagcggcggccaccgggcgggcggcggggcggcggctcggctcccctgatctccctcccctgcgccgctgcgcggtatggacctccaggatccagccgcggacgccgtcgcggccgagccactcaccgtcgccgagaccgacgaccagccgccgccgccagcgccgcctctggaggcggagggtgttgtcgtcgcggaggaagacccgctgccgcatccgccccttgaggtggcggagaaggcatgtggcccccgtcgtcgcagaagccggcgccgctgccgtacctatggagccctccgaggctggcgcgggtggcgtcccgctcaccgacgagctctgcgaccggatcgacaaacaggtggaggactacttcagagatgagaatttggcacggatgaggtcctg

SEQ ID NO: 17753 - DNA, 475 bp, Oryza sativa
  Clone ID: uC-osflcyp020e04b1
ttgggaagtccggagttggaagcgatcgagggcggttactacgacgggacgagttgttgcactcggcgcggtggccgtggtggtggcgctgacattcctcgccggcggcgcggacgccgactgctacgacttctgcttcaaggactgcatggccagggagaacaacatggtcgactactgcagctacgcctgcgacaagacgtgccagccggacaagcccacgctgtactcgtcgtcgtcgtcgtcccgcctcgccggcgacatggagtgccaactctcctgcgccttgggctcctgccaccgcctccttccggacggcaagggcgccgtggaggcctgcttcgggcagtgctacgacggctgcaagaccacggcggcggccagactgccgaggcctctccgcgccggccactacgtgctctctagtccccctgatgacgtagaccatgatccggaccaccgctacgtgttctct

SEQ ID NO: 17754 - DNA, 484 bp, Oryza sativa
  Clone ID: uC-osflcyp020e07b1
tctggccactgatcataacccacaatggggggagcgtcgtctacccgggcagcactgacctcgcatatcagcaggcggtgaaagacggcgccgacatcatcgattgcgcggtccggatgtcgaaagacggcgtggccttctgccagccatctgcagacctcagcaccagcacgacggcgtccaccagtttcatgaccaaaatctccactgtcagtgaaattcagaacaagtcgggcatcttctcctttgatctcacatggagcgaaatccaaacattaaaacccgatcttcttggtccgtacacccaggcaggcctgaagaggaaccccgccgcgaagaacgccggcaagttcgtgacattgcctgaattcctagacttggccaaggccaccaatgtctctggcatcatggtcgagatggagcacgcatcgttcctcgcgaagcgaggcctcgggctggtggatgccgtgtcgggggcgctggc

SEQ ID NO: 17755 - DNA, 473 bp, Oryza sativa
  Clone ID: uC-osflcyp020f03b1
ttgtatgttcatgtgtttatacaagctctggaggacttcaagtgaaggtgactctgcacctgtagacaatgtattgcgcaatgatggaaatacagaagttgtcgctatccagtcgaaagaaaatggtcgcaattctaataacatattggaggatggagagaagtcagttctgtcgtcggatcattctaaaaaattgagtgcacatcatcgactgaaaatctggattactagtggacacagtggcataatcggaagatacggaaagaagttggagctaaatgctgccaatgtgcctaagcagttcccaagtgaacatgtgaatactgtatggccagattggctcatgaaggtggcccctgaggcagtgcaaggctggttccctcgtcgtgcagaatcatttgagaaattaggcaagattggagaaggaacttatagtagtgtgtacaaagctcgagatcttaaaacaggcaaga

SEQ ID NO: 17756 - DNA, 354 bp, Oryza sativa
  Clone ID: uC-osflcyp020f07b1
cttggcgaggcgtacgtgcgctggtaggggggggatttcatccacgctgccggttaggcctacgagcgggcgctaggacagggactgtcagccaggcaccgtcgccagcaatggcgagctgccgacgtcttcacatggcgcgccgacatggccacccagaagcccacctgcggcacacgaagggggactaccgcgtacttcccggagaaggagccggtgccacaggaaacgactagacggaaggcttccccgccgccgagcacgctgctgacgaacgtgcagaagctgcggctgctgaccacggcggagaaggcggtgctcctgtcgggagcggaccgctcctggctgacgctg

SEQ ID NO: 17757 - DNA, 278 bp, Oryza sativa
  Clone ID: uC-osflcyp020f08b1
ttctgtctgcctcatggacaaactaagatgtggacgtaaatttttagggaagcaaagtcagtttgggaacaaaaattcttttggtagctcttctctgctcatccctccgtttgacttttcgaaccggaaaggtttgtttcatctggatttcccggttgtacaatatgtcagcccatttcttagctaaaaagaagcaattgcggaaatgggtgttttggtttcaatccctgcttgcaagaagattcctgctttgggtcaaaaatcttaaagctgattcc

SEQ ID NO: 17758 - DNA, 488 bp, Oryza sativa
  Clone ID: uC-osflcyp020g03b1
tccgaccattgccttctgtgacaccgattccccaatgcggtatgtcgatatcggcatcccggccaacaacaaggggaggaacagcattgggtgcctgttctggctcttggctaggatggttctgcagatgaggggtactatcctccctggccacaagtgggatgttatggttgatctgtttttctacagagaccctgaggaggccaaggagcaggaggaggaagctccagcacaagactttgctgccatcactgattacaccgcacctgaacaatggtctgctgaccagtggacctctgatgtggctgctcccccagctgctactgttggtgattggggcgcagctccagctccagttgctgctgccgaaggatgggatcaagcaggagcacccgtagccactgaagccgtcgtcgttccaccggttgcgcctactggatgggacccggcagctcaaccagctgctcaaggctgggattagactaggc

SEQ ID NO: 17759 - DNA, 482 bp, Oryza sativa
  unsure (1)..(482): unsure at all n locations
  Clone ID: uC-osflcyp020g04b1
ttcntacattttccccaaataataatagaggaaggggaaaaacacatttgcagccacatcatccatggcctctctccgcaccattccggtgatcttcggcatcctcttctatgtccttgccagcactgccactgccaccgacgcaccggactacgtcgtccaaggccgtgtctactgtgacacgtgccgcgccgggttcgagaccaatgtcaccgagtatatcaagggtgccaaggtcaggctggagtgcaagcactttggcaccgacaaggtcgagcgtgcgattgacggtgtgactgatgagaccgggacatacaagattgagctcaaggacagccatgaggaggacatctgcgaggttgtcctcgtccacagcccccttgcaaactgctctgaaatcgaggccgatagggatcgtgcccgtgttttgctcaccaggaatgtcggcatctgtgacaacctgcgcttagccaacccactcg

SEQ ID NO: 17760 - DNA, 478 bp, Oryza sativa
  Clone ID: uC-osflcyp020g08b1
tgccaaaagacagttctttgaatatctgcaaggtgaggcggaatcaggtttggagcggctgcatcaatgtgcagagaaagaacttcaagtataccttgaagcagaatctccctcaaaagatttcaatgacttccgtacaaagttggctggattaactagtgtgactcgcaattatttcgagaaccttgtccgggctttggagactggattaaatgatgtaggtccttccactagccatggtacatgcagcatgagcgcaacttcgaagagtcttggcagtaaaagcaagagtagcaagagcagagcatccagtaccagctccaaaacaggtggctcgagccgtggtgtcgatgaaagcaacatttggacgtgtgaccagtgcacatatgctaaccccagatctgccagaaactgccaggcttgtacaaccagcatcgatagcattacatagctatggctttagatctcgactccattg

SEQ ID NO: 17761 - DNA, 478 bp, Oryza sativa
  Clone ID: uC-osflcyp020g10b1
ctcgctctcccccccggttgctgctgctgcagctgtttcctccgttcttggcatcgagagccaggcagggaggagggaggcaattgccgaggctttcgcaggaggaaagggaagcttcgggccccagcatcctcctcctcctcttgctcactcaccacgctctcctctcaccaaactctctcttatctccttccaagatcccaaccccttttcttctttttttttgtttgttcttgttaggatcattttcttgatctttcaagctcagctccagcactccccccgttcgtttccagctgcagcacataccttgcctagctggattttcagcttccccgttttctgagcgagttcttggttaattgctccaatccgagaaaaatcaccaagtgtcctttgcttccctccctccccccttgttttctgggcttcgattcgatcgaattcgaatccccgtccaaatttatttattttccca

SEQ ID NO: 17762 - DNA, 376 bp, Oryza sativa
  unsure (1)..(376): unsure at all n locations
  Clone ID: uC-osflcyp020g11b1
tctcgccgcacgccgccgcatcgatcggaaccaaaccctaaccctaaaccctagcccccccacctcgccttccaccccccacgctcccatggcggggcgcggaggctacgcgtagccacatcgatcgaacaccctgtatggattgaggtgggtttcccgaggcatgggtacaaaccctagcctgcacgagctggcggcgggggcggcgccgcggggacgcgtggtgcgtatcctcgtgcgcgacgccgacgccaccgactcgtcctccagcgaggacgaggcggttgcggtggcgcagcctcggccgcggcggaggggtaagggggtggggnngngttnggtggtggtgnngaggcgtgaagcgccgcgtgatgga

SEQ ID NO: 17763 - DNA, 387 bp, Oryza sativa
  Clone ID: uC-osflcyp020h03b1
cctttttgtccatttccacgatacctacgggcggtcgctttcaaagatcctcatctctctccagatgggtgagagcgctgcggactattggcgtgagtgcctaggagggtgcccaccactccaaaggtgcatcggcccttgagaagacggacgacggggggtacatgccgaacgggctggggatcagcaccaatgacgccctgtgctaggtgatgaccttcggcaagctcatctagcaccatctgacacgccaggaggcatgcatggcagctctcgttgggtgaagccagggtgctactgccaacaaatggaacactgtgatgcgcacttacagggaactgagcagcataaccagagatgggtgctaaacatacaatcttatcacat

SEQ ID NO: 17764 - DNA, 88 bp, Oryza sativa
  Clone ID: uC-osflcyp020h04b1
cgcgcgcttcttatgaaaaaaaaaaaacaaacaaaaggggcatttttaacagcaaaggcccttttaaaaaccaaccggggccgtgggt

SEQ ID NO: 17765 - DNA, 328 bp, Oryza sativa
  Clone ID: uC-osflcyp020h05b1
ttctcctttgttcagcttgacactccattggagagggtgggtatagctggtgacagagagaaatgggcgaggaggccaattgcatcgccgtgatggagtccgctgcgcccaaggagaacggccacaccacctgtggcgccgcggcggatgccatggccgacgccgccgcctgggctgagatcgccgtcaccgacgccgctgttgtgccaaagccgacgcctccgactgcggccgtggccgttgacccccggcttcagggcatctccgacgccatccgagttgtaccccacttccccaagcatggcatcatgttcaacgacatcacgcc

SEQ ID NO: 17766 - DNA, 365 bp, Oryza sativa
  Clone ID: uC-osflcyp020h07b1
ttttcctcctcctcctcctccggcgccgcgtggctgttttcacacctgcactctccactccaatggcgactcacacgcagatcagcaagaagcgcaagttcgtggcggatggggtgttcttcgcggagctgaacgagatgctgacgcgcgagctcgcggaggacggctactccggcgtcgaggtccgcgtcacccccatgcgcaccgagatcatcatccgcgccacccgcacccagaacgtcctcggcgagaaggggaggaggatccgcgagctgacgtccgtggtgcagaagcgggtcaacttcccggagaatggcgtccagctctacgccgagaaggtgaacaaccgcggtctatgctgcatc

SEQ ID NO: 17767 - DNA, 469 bp, Oryza sativa
  Clone ID: uC-osflcyp021a01b2
ttgtgtttttttatttttttgtgtttttctttttttttttttttttttttttttttttttttttttttttttttttaaaaaaggccccccccaaaaaataaaaaattttatccaaaggggaattaaaattaaaaagagttttgggggggggcaacccaacacccccattttttttcttcccccctttttccatccaaattccaaccttaacccccccttaaacaacaacaaataaataaacatatgggtctcccttgggtgggggcattttggggcccccacctaatccccttttcttttcttttctttttttccccctttacccttaaaaaagcttccaggaaaaaaaaaaagggggggccgcttcaaaataaaacgggcccggggggcgccccgggaatttcgggccgggccctgggggggaaccctgtttcccaaataggggggggtataaaagctggggggaaaa

SEQ ID NO: 17768 - DNA, 411 bp, Oryza sativa
  Clone ID: uC-osflcyp021a02b2
ggggggaggcgcctttacacactagggaaaacaggggatcttcttactacaaacgctccacgctgggcgagagaaaaaccacacttaccctggccaaccaaacagcacaaggggctcaacatacactccaactggtttggtgggacacagcacagcacaaacagggcgacagctttgaactatggcagggcattagcacacaaacacaggaacaagcaccacaggtgtactcaaaaaagtaccccactggatgatgcaatgttgcaaacaactcttccagggggacccagggcaaggggggcccctaacccctgaaccctgggcaccccaaaccttccaggaggaaaattgagacccgggccagcagggactggccgtaggtgtaaatcacagatgagggggggaagaact

SEQ ID NO: 17769 - DNA, 494 bp, Oryza sativa
  Clone ID: uC-osflcyp021a05b2
ttgggtttttttttttttttggttttttttttttttggggcacactaagattcattcattcattcatttgatcaaagcaaacgagacgggctttttttttgcgatcaaaaacacagatgggcaaccacacagttaacacaaactagatagttccacacaaaactaacgatgataacgatcggatgatgatgatggtagctcgattagatagatagataacttggccatgagggccccaccgctcagttcctccagttcccgtcggagttgccgccgccgcggttgccgtagccgccgccgaagccgccgccgaagccgccgccaccacgggcgccaccgtagccaccgccaccgccgtagccgccttcacggcgctggccgaagccaccgccgccgccaccaccaccgtagccgccgccaccgtagccttcgccttcgccgtgctggccgtagccaccggcgttttcccctccggagcggcgcgactgggcctt

SEQ ID NO: 17770 - DNA, 513 bp, Oryza sativa
  Clone ID: uC-osflcyp021a06b2
ttggtgtttttttattttttggggtttttttttttttttttttatttttttttttttttttttttttttaaataaataatatatattaacatttactttttttttaattattaggggggaaaaaaaaaaattaacaaaaaaaaaaaaaagggggaaaaaaaaaaaaataaaaaccaaaaacaataaaaaaaaaaaaccccaatacattggaaacaaaaaaaggggaaaattgtttggggggagaaaaacataaaaaaaacccccaaaaaaaaaccacccgaaaaaccgttttaaaaaaagggggccagaatttaccccttcccaaaaaacaggtaattaataaaaacacatagggggcaatcaaaaaaaaaacacccgtgaaaaaaaaaaaaaaacacccccaaaaaagacaatgaaagaaagtgtaaaaaatgtggagtaaaaagggccaccccttttggaaggctaataaaaaaacccattgcacaaaaaaaaaaaaagggggtgtttatt

SEQ ID NO: 17771 - DNA, 508 bp, Oryza sativa
  Clone ID: uC-osflcyp021a07b2
ttgttttttttttttttggggctagaaaagttcaagaatctcaaatcaatttatgaaatcaaactacacacataatgttcttgactccccacgtacttacggaataattatattggcatacacaaaaaccggagctaatcagagtagatacacccatagacaagccatcagacccaacaatttttttgtccatgaaacagccagctaatgctaatagacaaggggttctcatgaaagatacagctaggccacatctagaagcacttcctgtggacgatagctgggccagattcttcatactcagcccttgagatccacatctgctggaaggtgctcagagatgcaaggattgatcctccaatccagacactgtacttcctctctggcggagcgacaaccttgatcttcatgctgcttggcgcgagcgcggtgatctccttgctcatgcggtccgcgatgccagggaacatggtggatccaccactgagaacaatgttaccatacaggt

SEQ ID NO: 17772 - DNA, 496 bp, Oryza sativa
  Clone ID: uC-osflcyp021a08b2
ttgttttgtgcgcaagatgatctatagtaataattggatcgagtaataaacaagaagaaaaaaaaagtgccaatagtaattcaccatcaacctgtctctgtaactgtaacgaatggagaacgaatggatggcaaaatgtacatggatcaagaagaagaagaagacgaagacgaagacgaacaagaacaagaagcaattacaaatcattcaagaactcatcaatggaggatttgttcatcatcacttgcggtagcactcggcggggaagccctgggggaagcgccagccgtcggcgcagtagttgtaggacatgtagttgcgctcggcccacgcgacggtgccgagctcggcgccgtcgagctcgcggtggatccacgccgacgtgcccttggggcacgacgacgacgaccacccgccggcggggttgttgttgacgcacgcgttggcgctgtacccgcggtacgacaccacgaacggcgcgccgttccagtcgatc

SEQ ID NO: 17773 - DNA, 133 bp, Oryza sativa
  Clone ID: uC-osflcyp021a09b2
ggtgttttgtgcgcaagagggtctatactaattattggatctagttaaaaacaagaagaaaaaaaaagtgccaataggtatttaccatcaacctgtctttgtgagctgtaacgaataggagaacagaatggat

SEQ ID NO: 17774 - DNA, 440 bp, Oryza sativa
  Clone ID: uC-osflcyp021a10b2
ttgttttttttttttttttgttttttttttttttttttttttaagaattaagatctccatcacataaaaacatacagggactgggtactggattacacgattgagttgttcagggttcaaataggaaaaacattttggggactagagatagagggaatcgacagatgcccagcagtagcgcgcgggaaacaggacatcacgattgcgttgcatgtcgtcggctgcccaacggcggcgcggggcttaagacctgctcttgaatgggatcgccctgatgatcacctggggggagatggcagccagggcagcgcccacgaagggaccaacccagaagatccaatggtcattccaggcatggtccttgttgtagaagatggcagcgccaaggctcctggctgggttgatgcccgtccccgggatggggatggtggccaggggga

SEQ ID NO: 17775 - DNA, 474 bp, Oryza sativa
  unsure (1)..(474): unsure at all n locations
  Clone ID: uC-osflcyp021a11b2
tttgttttttactcctcaatatctctgtatttttagctggtgtatgaatttgaatcggtgaaacaaaacgcaaaaaatggatcttattgggtaggaataatcatctagcggaggctcctctccatcatctcgttgtactgcagccatgagatttgcctctgtagcttcatctgcgcgtggaatttggcgatgaactcctccgccttggcgtccacgccggcgtcctccgtcacggcggcggcgctcgcctccagcatggacagctcgaggagctgctcctccatcgcgccgtcgcggaagctctcgtcgtccacgccgccgcactcgcccggctcgccattgtagtcgtaatacccgacgccgccgncgaactcgggctccgtgtcgcggcgggcgaagaagtagcggtccttgtcgccgtagagcccgggcgtgtccgggacggcgggggcgatgcaggggattaggcggagc

SEQ ID NO: 17776 - DNA, 520 bp, Oryza sativa
  Clone ID: uC-osflcyp021b01b2
aaagtagacgtaagttcagcaatgtattttttttcctcaccttttctaggcgactggattgttctaacttatgcaatatactcggcaaagaatgttattaggttacaagagggaaataaatgcatgtagagcatgaattatgcaattcccgcatgagtttggtacccacattgcagagtagcacaagaataatttatctactactcttatgttgtagcacatactcgagccatgcctatcctctcaaacctattgtagtgtactgaactattttcatcttgctgtgtgccagcaaaacacctgtaccactggaatgtttcgtgtctgtcctgcacctgaagattagccttcccaactgatcatcaaaattgtgtccgagatcaactacacaaccgtactggccaactgaattaaccagtaatgacaaaaattaaatccaatcaggttctgtcacacctactgaaccatgcgcttcctctttgatcttttgcccttctttccggagtaatttggaagtttt

SEQ ID NO: 17777 - DNA, 416 bp, Oryza sativa
  Clone ID: uC-osflcyp021b04b2
tttttgtttttttttttttttttgtttttttttttttttttttttttttttttttccggaactactagcatatccattgcatttttttttaaaactacccggttttttaaaatccagggaaaagttcaccaatttttcaaaaacatatccccccatttcactcacatatactacaaactagtcactaatggaaatttttacaaacttttccaagaaaaagaaaaacctccccctcgtccggaagcgacaactagagttgttccagtggggaaaagagatgcccccaagggttaggggaaaccactccctgggggaccacccccgcggacaaattacttgggggaggccgcctcctcgtcgtcgccgtggggaacctcctgggagataacctggagcgacatgcccttggactccgg

SEQ ID NO: 17778 - DNA, 391 bp, Oryza sativa
  Clone ID: uC-osflcyp021b05b2
ttgttgttttttgatgcttggtggctgttttatttgtattttttcatttgtttttccggaagcggacgggcacacccatggactttttttgccaaacgacacggtcttttaaaatccagggaaaagagcaccattgttgaaagaacaaatgcacacacattccctacttatacaaaaccctagaacctaatgggaatttgtaccatctttccccagaaaagggaaacacggcccccggaccggacgccactactacagtcggatccgggggcaaaagaaaagccccccatgggcaggggaaacccccccttgggtaaacacccgcccggacaaattacttggggggggccggctactcaacgacgcctgaggcgacctgctgtaaaataac

SEQ ID NO: 17779 - DNA, 469 bp, Oryza sativa
  Clone ID: uC-osflcyp021b06b2
gatgcagggaaactgttttaatgagaatagtacattgttcctctggagggagggatacactcatacacagtgcatgctatgtgatactaacacaaatgataaactgccatgagtactattgttgaaactttaaatggaaaaacaatccctcatgataaataacctcaaaacagtatctgttattgttacatgactcaacagtagagggttacatggatcacggatggaccgacacttgtacatacagatacagatacaaatacagaatgggtcatgtgcagcagacagacgccttggggttgtgaatggcctaaatcaataaattaacgcaataatgaaaaacaaaaacaaatgacacgacaagcaacacatggtcaggccaacaccgcagcaacacaagaggcgggaaacggggctggctgctacaaaactgacacaggatgaactccagagaactcagaacaatgct

SEQ ID NO: 17780 - DNA, 465 bp, Oryza sativa
  unsure (1)..(465): unsure at all n locations
  Clone ID: uC-osflcyp021b07b2
ttgttttttttttttaagacgaaatagatatttgtattatggtttttgaggatgatgggatcctatcattacaggcgagaagatgatgataccgcctagagggaggtgaaacgaactaagacgaacaagcatttacagaacacaatttctgctactacttgctgatgatgatgctaatggcgctgtcgcctgtggagatcaaaaggtgggcaatccaatccaggtggcatcatcgccggcgacctctacttcatgctcttcctcgccgcacccttgcgagcagccggcgccgcagccaccgacgccttcttcttggtcgccgccgccttcttcttggcagccaccggcgccgccttcttggcaggcgagtccttggcagaggttttggnggacttggnagggcggncgcggggcttcaccggcgaggtggcggtcttggccttcgccttgggagacgccttgggc

SEQ ID NO: 17781 - DNA, 507 bp, Oryza sativa
  Clone ID: uC-osflcyp021b09b2
ggagatgagcgccacgacgcacttgatgctcttgcacaccgtctggatcaccgtcggcccgggctccgggatcgtcaggttcaggttgtcgccgaacccctccgcgtacggcggctcgccgaccaccacgatcgcgtagtcgtacttgtcgccggtgaccacgctgctgtccgggttctccgagtacaccaccgtcgtgctgggatcaacggtggccttgatcgccgacaggatcgtcgtgccagcagtgatgttgttgccgggctgtccttgccaggtgatggtccatccttcacactggctgcccaaatcattagcatggcttcccgcgacgagaattttaccggctttcttcgggaggggaagcaccggagagtaggaggattttccgttcttcagcagcaccaaggactttctgaccgcttcgcgcgcgagctcacggtgctcttgctttccaagttcatcggcgaggctagagtcagcaaaagggctcttaaatagacccat

SEQ ID NO: 17782 - DNA, 446 bp, Oryza sativa
  Clone ID: uC-osflcyp021b10b2
ttgtttttcacccagaagaaagtaagcctgcccgtcctgatcacctcactttatttgtgcattacattacattatccaacacacacacacacacataccccaatcttttatcatatcatttccatctttatttgtgcatgcacgtcacatgacattacttactttatttgtgcacgtactagtagtagctcgtgcatgaatccagtgaagtgatcagtgatcaaagtgaaaatggatcaaggtctggttaattaccagccgtccatcacagaacctgatccaggagaccaggctcattaccagccgtccatccggtcttcttgtcccagtacctgttccagaccatgatgcccccatagttgggcagcttgttgatgaactgcagcacgtcgtagtagagatccttgtgcgacacgtagccgtccctgtcagcctccggcgacgcg

SEQ ID NO: 17783 - DNA, 392 bp, Oryza sativa
  Clone ID: uC-osflcyp021b11b2
gttgttttttacatttacgcaatatgagctcaactatctaactgaataagcacattacggcacacacatggacaaggcaggtattggaatcaggctccaacatacttgaaatcatagaccacaccatacagcaaacatagcgtaaacattgtcatagagagctcagctgatagcagcttgcaatattctagcattactttgggagcatgcctgtacaaaacatagcagacatcaccagctcttcatcttggccatacacattcaacatggtttgctagtgacagaccacactgaccagaacatttcgtctcctcagtaggcaccagctgccatgagcagctgatcaaggctccagatgccctggttgcttgccccgtcttgtgtagcatcat

SEQ ID NO: 17784 - DNA, 482 bp, Oryza sativa
  Clone ID: uC-osflcyp021b12b2
ttgttttttacagagaaaaaaatttcactcaacataccaatggcacggacaaaacaagggaacatgatacatccttgttggtgtgagtgagtgtgcagactagagagtagttcaagaatacaatggaacgaattcgacgcggtaaatacatattttcatgcttggagctgacaataaaacatttgtcacttcagttaagcagcagctgcttgtagcctggatagtttcaccgatgtactcttctcttttccaaccttagaaggtgccatggagccacttgttatcttggtacttcttgttgatgatgctactctggaagctccctgtgatttcccaactgtttttccattcgtcatcgcaggcttcaccttgttgcaacgaatgctgttcaagacccttttggcttcatcaacctgacccggtgcaacatttctgatttgcttcttctgtttctcgccgcacgtcggttttctcgtcccttt

SEQ ID NO: 17785 - DNA, 417 bp, Oryza sativa
  Clone ID: uC-osflcyp021c01b2
ttttggttttttttttacatgagatagtcaagtattctcagcgaacaactgtaaattaaacaaactatgtaatcaaatgaatattgtaacaaattacaacagggagttttggtggtggtggggaggagcaatgcaaaagaatcgtcgttcaaaaatcaatttcatgtgagaaatgtgtcatcctatattatacagatgagaagcgacttcagctattgccacttcatggcaaagcgggcagggatgcagcagcagcagcagcagcagcttcagtaactgacgcttgtatgcttgttggagatgtaacggcaacggctgatctcctccttttgcatccccagcatatccggtgtattttccgtttgcttctcaagttaaatggtacctttatacagttggtccaaggtaacaaatgtg

SEQ ID NO: 17786 - DNA, 493 bp, Oryza sativa
  unsure (1)..(493): unsure at all n locations
  Clone ID: uC-osflcyp021c02b2
gtcacgcccaccctcctccgccgctatcttcgcccgcaccacctgtccctgcccgccgacgaccaccatgccatggctatgatacctgtcgttgactttgccaggctcatcgatcaccatgaggaggccgccaagctgaggcacgcctgcgaggagtggggtttcttccaggtgatcaaccacggaatcgccgacgagacggtggaggagatgaagcgcgacgtcatggccttcttcaacctcccgctggccgacaaggcggcgttcgcgcagcagccggaatggatcgagggctacggccaggcgttcgtcacgtcggaggaccagacgctggactggtccgacctctacttcctcaccacgcagccgcccagctaccgcgatctccgcttctggccaccggagacatnctncaccttccgccgctccatggaccgctactccctcgagacgcagcgggtggccaccgagctcctncgagccatggcgcgca

SEQ ID NO: 17787 - DNA, 510 bp, Oryza sativa
  unsure (1)..(510): unsure at all n locations
  Clone ID: uC-osflcyp021c03b2
attaggaagtttatttctgcatgcataaaagtatgacaaactatgatagtacaattttgcatgcatatggaattttaaatacttaaacatactactatcgcattatagcgctctatggtcattccaagtaccaaaagatacatcatggagatttcataaggggaagttgcagacattctctgaattcaagcctccttgtttcactgtgaaaggtcttctgtttgttaggccagtaggtcagccaaatccagcctctaatctcccagtccatggtcttccctaatgctgcaccacagatcttccaccagacgctgtctccatattcatcacgtgcgaaaatgacaccacccttcttcgtgaatgggcgatacacggtcgagtacctgtcacgaaaccaggcccgtggctgaagcagggagagcttggaaggctttgaagaataaacctcccttncgtttacaccattatggagaaaccaagttaaggttgtagtgtttccatgcacagact

SEQ ID NO: 17788 - DNA, 507 bp, Oryza sativa
  unsure (1)..(507): unsure at all n locations
  Clone ID: uC-osflcyp021c05b2
tttgtttgcaaactaatcaggcatcttctcaatcatcatcatggggtagtacatatacaaaaaaaaaaaattacagctcaaattattaccaaatgcatcgatcgatcgatcaccaccaatattatgatacaggaaaagaatgcgataattaaccccaaaccaaaataacaaaaaaaaaaaggcaatgcatgcagccctttgtgtcactgcagcgtgggccccacctccctcttgatcctccccttttgacagcgccactccacctaaattatttcggccccttggattctcgatcgcttccttcccacgccaaaaaaagccacacgtttaactgatccctgggccccacctcctccatcccctagtcctagctggcagttgactagccatccatccagaccgtccgatcgatcgatctccgcacgaatctcaaagatcgatcgatcgatcgaccgggcacgaatcttaaagatcgccggagcttagttgggtttncgcagttggagc

SEQ ID NO: 17789 - DNA, 511 bp, Oryza sativa
  unsure (1)..(511): unsure at all n locations
  Clone ID: uC-osflcyp021c06b2
tttttgttaatacgtaataagggtaatcataataatatcaataacgatctctcagaacagtgtactcaagtggtaaatacacagatcccaaacccatcacaccaaaagactaccaaaataaataaaccagtagtagtaacagtctaacagatactaataatccccatctcaaatcctcctcactccaaaccaacccgtaaaaccccatagatccaaccaaaaaacaatgcctccacacgcacacgtnatcatcgctactaagctctaatactaaatgctaagtaagactcgcacgaccactgtactgctagatctgaagcaaaagcattcagaggaagaagaacgcttcagtggcggagcaaggcgaggaggaggccggcgacgcagcacacggagagaggcgccgagacggccgccaccgcgccggaggtcggggcgggtgccggcgcgtcggcggcggacgccacggtggccagcgcggccgcgggcaccacggcgaaggcgatcacgg

SEQ ID NO: 17790 - DNA, 438 bp, Oryza sativa
  Clone ID: uC-osflcyp021c07b2
ttgttttgttttttttgggcgcagaaatgcacgggagaggcccgccggacggcttagttctgcttccacagcagcgtggtctcggcgatcatgccggtgacgacgtatgggtccatgttggacgccggcctcctgtcctcgaagtaccccttgccctccttctccgtgtcgcgccccacgcggatggacgcgccgcggttcgccacgccccatttgaaggtgttgatgtcggcggtctcgtggcggccggtgaggcggcgctcgttgccctcgccgtaggcggcgatgtgctccttgtgcctcagcgcgagcttgtcgatcgccttcttgatcacctcgtagcctcccggctccctcatcgacttggtgctgaagttggtgtgggcaccagcgccattccagtcacccgggatcggctttgggtcaagggagagcacg

SEQ ID NO: 17791 - DNA, 435 bp, Oryza sativa
  Clone ID: uC-osflcyp021c08b2
ttgtttttttttttttttttttttttttttttttttttttttttaaacaaaaaccgggggggaaccggcagatacattttagatttgacttcgacatagatgataggcatagataagtatcatggatccatatggaaaacaacacagggggaataatatgaaatggatttgggggcgcaaagaatggcagcatatacaaccgactcaaatcaacaagaccaggagatgatgaccacaagtgggtcgacgcttcagacaaagaacacacaacagctggtgatcaaccagcaaatacagctgctattatttcacaagatagctcatttcggagaattacataacacggctttttgctaagatatacaatcatacaaggtaccatccatatttgataaagtagaaatcagcaattttaaaccttgaaggccagggatg

SEQ ID NO: 17792 - DNA, 509 bp, Oryza sativa
  unsure (1)..(509): unsure at all n locations
  Clone ID: uC-osflcyp021c09b2
ctgaaccaattgcgttccatgtaaaatatcaacataccatgacttttgactactttttattgaaacaacaaagtgtaaaagatgtgtgtgtagcatcctgatgtttgaatcacacggaaactctgaaactgaacagcccactctataataatctgtatccttcggcatatcacccacacaacctgatcttcagcaacaacgcatcatctcgggcaatctctgctgcgatcatttcagcccccatcaatggcaatactggcggtaccagcagcacctggagaacccgacgacgccatcatcggcggtgccgcggctgtgcagccaccagagaaggttggtcagggagttgccatcgtcgtgccccgtcagcgccctcgtcttctgcaatgccgattccttattgtagatcccctccagggcgtacacgaagcccttccacccttctccgaccccttcccttgacaatgccggcattgtnaagtncaccagctccttgacgaagctgatgt

SEQ ID NO: 17793 - DNA, 470 bp, Oryza sativa
  Clone ID: uC-osflcyp021c10b2
ctgaaccaggggcgttccatgtaaaatatcaacataccatgacttttgactactttttattgaaacaacaaagtgtaaaagatgtgtgtgtagcatcctgatgtttgaatcacacggaaactctgaaactgaacagcccactctataataatctgtatccttcggcatatcacccacacaacctgatcttcagcaacaacgcatcatctcgggcaatctctgctgcgatcatttcagcccccatcaatggcaatactggcggtaccagcagcacctggagaacccgacgacgccatcatcggcggtgccgcggctgtgccagccaccagagaaggttggtcagggagttgccatcgtcgtgccccgtcagcgccctcgttttttgcaatgccgattccttattgtagatcccctccagggcgtacacgaagccctttcacccttctccgaccccttcccttgacaatgcc

SEQ ID NO: 17794 - DNA, 497 bp, Oryza sativa
  unsure (1)..(497): unsure at all n locations
  Clone ID: uC-osflcyp021d02b2
tttttgtttttttttttttttttttttttccagcaccagagatgataacttaagaattaagatctccatcacataaaaacatacagggactgagtactggattacacgattgagttgttcagggttcagataggaaaaacattttggggactagagatagagggaatcgacagatgcccagcagtagcgcgcgggaaacaggacatcacgattgcgttgcatgtcgtcggctgcccagcggcggcgcggggcttaagacctgcttttgaatgggatcgccctgatgatcacctgggggtagatggcagccagggcagcgccaacgaagggaccaatttagaagatccaatggtcattccaggcatggtccttgttgtagatgatggcagcgccaaggctcctggctgggttgatgccagtcccggtgatggggatggtggccaggtggaccaggaacaccgnaaaaccaattggcagtggggcaaggaatggaacat

SEQ ID NO: 17795 - DNA, 457 bp, Oryza sativa
  Clone ID: uC-osflcyp021d03b2
tttttgttttttgttgtttcctggttttgcttttttttttttttttttttttttttttttttttttttttttttttttccaaacccgaggacggactaaccgggttacgtttgggttaagggaaaaaacaacccggttgggggaaaaaaaaacccacggaaaaggggcaaggggaaaaaaaacaaaaagaacctttccaaaatttttggacaaaaaccgcttggggaggaaaaaacatttttaagggaaaaaagggggcacccgaaaaagtttatgcccagggatgggggttttaaggggggggggggtttgttcgtcccgggcgtttaaaattgaattcttggggccgaagaatgaccttggggagccaaacgggggggagggggggaaacattatgggcagggccggggtttgaaaacaaaacgttgctgtttggtggccgctaaaaaggttggg

SEQ ID NO: 17796 - DNA, 509 bp, Oryza sativa
  Clone ID: uC-osflcyp021d04b2
gaatgtacgagaatattgacgattattctatctggtatctacagcttcctttgaagaaaaagaaagaaagtaaccagccggtacaggtcgaactacatgcccaatctcctaataaccagacatgactaaactcttccggatgcaagaggtgttacttattggatttgcatccggagcagctcttgcgtcttcaaagagaaaccacccattggaggtgtttatatgttcaaaaaagttctgttctaagccctggcaactaagttcaggtgtttcgagtcagcatgcatatgcgctccgaccagccaggcatggtaatgattcatcagatgagggaaaaaaagaatcacgggagaattatcgccgaccatttgcccaacttctaatgtgattccttgacttcatcataggttgtctattttgatgcttaggctttggtatgtcgcccagctccattacttgtatggtgcgctgcctttttgcattttcagcttcctggtagcgctcctgga

SEQ ID NO: 17797 - DNA, 449 bp, Oryza sativa
  Clone ID: uC-osflcyp021d05b2
ataggatcaaaacatttctattaccacaactttttaaggatggaatcgagtagcaatactttcaccccaaaatacagtttagcgacaatatcttagaaaagccgcttgctttgccgccatggctggcaagctgagcagagcagctaacacaaagaacacgagatcactataaaccaaacggcaacgaacgaagaaaatacagggtcttttttggctgaagatacacgaagcggatcgttttcttttatttttagtctcctctcctcctcgatgatgggtgtatggcaatggcaatggcgatgggatcttggcttagttgatgggaaggggctcgccgttccactccttgaggcagtcgagcatggggtcgatgagcttgccctggctgatgccgaggaacaccttgttgcactcctcgccgggggacttgagcttctcgccggtgagga

SEQ ID NO: 17798 - DNA, 526 bp, Oryza sativa
  Clone ID: uC-osflcyp021d06b2
gacgcggagccagaagagcgcggccagcgcggcgaacggggtggtgcccggctcgacggcggacagcagcgcgcgcatcgcggctgcgctgaagcggaacgtggcggatgacatctcgccgccggtgtccggggagcccctggacttggcggcgagcagcgggtgctccggcggcggcgcggcggacttggcggcgagcgccggcgagtggaggaacggagggtaggggctatcccggcggtgggcggcggcccaggcgttgaggaagagcacggcggcggtggggtcgttgtgcaggtgggtgcagctcagccccagcgcgtacgatttgtccgcgaactccgtcagctgtacgtagaagggagaccagatgtaggggtcggggcccatgggctcgaagtaggcgaggtccatctcctcctcgccggacgccgtcgcgagccactcgtcgagcgtggccgccgccgtggcgttcaccgtgcgcacgccgggcgtcgtgcacttgacgatccacccgtggtgcaca

SEQ ID NO: 17799 - DNA, 427 bp, Oryza sativa
  unsure (1)..(427): unsure at all n locations
  Clone ID: uC-osflcyp021d07b2
aatcgaatcaatttgcagtccttttatttccatcacatagttcatagccagctctgatgccatccaagcggcagcctagaactgaacatgatgatcaatggatggcaacttcaacttcagtctgcgtgtctttcattctcagtgctttagcatgtccctgaaccagtaggccgacgccttggggtggcgctcgagcgtgttgaagtcgacgtagacgataccaaacttggacgtgtaacctgacagccactcgaagttgtccaggagagaccaggcgaagtagccagccacattggcgccctcgtcgatggccttcttcagntgggtgaggtagctcctgtagaaatgaacccttgtggtgtcgcgcaagtactggtcgcggntgaggttcgcaggttgatccattccgttttcagttatgacgact

SEQ ID NO: 17800 - DNA, 462 bp, Oryza sativa
  Clone ID: uC-osflcyp021d09b2
ggggcaaccaaaagaggcatttaattgatgtaaaattccaccaacataccggaccaaatcctcgtacatgacaaaaccgagcactgacacaaataaggtaggtcagaggtttttaagagcggaggtctctaatggcaattcgcaacttataatccttcacaggagaagacatgcaacaaaatcatgattcctttttctcttctgctgcctcctcaaatgtctcaccagggacaagctcaggaacatcatcatcgtcaccctgagcagctccagcactggcaccagcctcttcaccagaagcaccaggagcctgcttttggaattgctctgcaagcctccgcagattatccaagttgtcaggaccaagttggttgataattgatggcagcagatcctgcagcttctttgtttgtggagttccactgacaacccatgtattaacaccaattgaagcttgcactt

SEQ ID NO: 17801 - DNA, 515 bp, Oryza sativa
  Clone ID: uC-osflcyp021d10b2
ttgtttttcaggaaacgctactctcacttttattgcatcgcagtagtagtttcagtacatcaataacctatccagatctcgtccaagtataacatgtatcaagaaacaaatcagccatctgcagagaactactgcaactacaccacactctcatccatgtcgcacccatcacgcattcagcatcttgcctgcagatcccagaacttgcatcttcatttatgctgcggccataacgcattcaattgcttgcttgcagattccagtcatcgtcgcttctggcccatacacctcaatcgggacgccgagttcttgcgccaagcttgcgcattttagccagcccagtttggtaatttggaccaccacgtcggacatagatgtgcatccttgcagccttcaacttggattccttctctcttaaggcccgaatgatgccgctaaatgtggccccgacgtcggtgaagttagctataccccctccaatgagaagagctctcttgcggccatcaggatcagca

SEQ ID NO: 17802 - DNA, 482 bp, Oryza sativa
  Clone ID: uC-osflcyp021d11b2
ttgtttttttttagacaaatttacatctattaattaaaccaaaacaactgtacattattattcagattacaaaacggcatttcaccatgcaaatcattttactggaaaagtaacaagcagaacacaccaaaatttccaattgtttatctaccaaaatataagaaggctcttctcttttccctattgagcccggccttatctttcaaagacaacttgctgtgatcaaagactaaaaacgttgatcctaatttagattgcactggtcttgaaaagtttgcctgtttcatttatgctgcaacaggctgcacaaaacctgcacccgagggggttatgtcctttgcggcatcttgttcattccttgacaagtacttgtcgacagctgcagcagcttgccgcccctcggtgatggcccaaacaacaagtgattgtccacgtctgcagtccccggcagcaaaaatgccatccacactggttgcaaagtt

SEQ ID NO: 17803 - DNA, 324 bp, Oryza sativa
  Clone ID: uC-osflcyp021d12b2
ggcctcgcctctgtttctccgtttcggggagccggaggaggaggttgaggaggaggtggtggtggtggtgcaggaggatgaggaggagaaggacgactccgaggtcgccggctccggcgacggccgcttgtcaccggctgccgctgccgctgcggcggcggctgcggctgctatctccgagccgatgcggagcgggaagttgaggagcgcgcgggagccacgcatgcggtaggcggcgcggtcgtacgccagggcggtgtccttggcggtgtccaacgttgccgagccacacgcgcgcgccgttcttggcggagtcccggatct

SEQ ID NO: 17804 - DNA, 507 bp, Oryza sativa
  unsure (1)..(507): unsure at all n locations
  Clone ID: uC-osflcyp021e01b2
tttttgttaacagtgtcactgaaacatgaacaagaaagaaacaagaaagaagaacaaatccctctcacaaacacaacctccacagcaattttccaatctttccttcccacaagcccatttaatcatcatcataccctcccccttccctcgccggaatcggcaaccgcactcatgccttcccctttctccatgcccagcctcttctcgtcttccattcccttcagatgcccagcagccttcagcgccccgatgttgctcacattaccaaagatcagaacaatgatgccgaggaagctgcctaggaacgcagcagcaaacgatcctccagcacgcccaggcccagcggatgcagcagcgaagccaatcatagcaccaatgcagcgtacaaatgcataccacaccgcaaaagnaccctccttccctggtggcgaggcatcgagcagcagaatgcgaccaaatgagtacagcacaccattggctgtgctctggacaagagcgatcacaatg

SEQ ID NO: 17805 - DNA, 449 bp, Oryza sativa
  Clone ID: uC-osflcyp021e02b2
ctattgaaccagaaattaatattttattgcataaacaaaatataaccacattttgtcccttggcaaataaccacattttgagtgtctttttctaaaagtgactacgtgcagtgtcctacagctaaaaccacaaagtcgcgatgtcctgtagcaaaatttgccgtagtagaaacattcactgccgaacacatggctaccggctgccgcgataggaaggtaaggtccgaagatgtcaggctgttactttacttgggagctagcagcccccgatttttttttatctgagcaaaacaagaaattccttttttctaacaatatccttgcttacccaaatcgcagaagcagaactctgaaaaaaaagatactccccatgcagaactccgaaaacggacaactgtacatcacatttttcaggcagccaccgagggcgagggataacgagttctaat

SEQ ID NO: 17806 - DNA, 349 bp, Oryza sativa
  Clone ID: uC-osflcyp021e03b2
aaaaaaaaaaaaaaaaaattttttggcccctttaaagacccccccccgccccaaataaaaaaaagggggaatttttttcccaaaaaaaaaaatttgccctttgggaaaaaaaaaaaaaaaacgggggtttaacccccgcccccgggaaaaataaaaaaaaaacgggggaaaatttttgggtttttgaaaaaaaaacccaaaaagggccaaaaaaccgggttcaaaaaattttaaaaaaggttgggcaaatttgcccccccaaagggggtaaaaaggggggaaaacccccggggggcccaaaaaaaactttttttgggggcccccccgggggagaaaaaaaaacaacccc

SEQ ID NO: 17807 - DNA, 465 bp, Oryza sativa
  Clone ID: uC-osflcyp021e05b2
ctatcaaatgtagatatatagataaggtcactattacaaccattcaaaaatttgggctcactaaactgatatcttctacatagaggccaactcaagtacacatgggcaatgaccattttaacaacaaacagcccattgctacacaaaggttaatttggtttggcctatgggggtcctaacttctcccctaaagtacttctcctagtactagttaagcagacacttcaatagatgtgctgccagctgactgacatcggaaactactgaattggttttcctctagcaggggatttcagcgaggagtccgaacctccaatggtaacattggagatgtagcgctagtgcttgtgccgctcagttgttctgatgctgctgactttagctcaagttgctggagttgatggaccacatgagacatccttggtcgcaccgaagggacatgctgggtgcaggcatagaccaagt

SEQ ID NO: 17808 - DNA, 459 bp, Oryza sativa
  Clone ID: uC-osflcyp021e06b2
gaattaaagccgctgctccaatttaccatacgcagcatttgattacaggaataccaaaaaactactaccgatgacaggtattaattattaaaaagcacaggttcagattattgcgacaaaagtttttgatacccgtaagattggacgcttgatagccaaaccacactcagaaccctaaatatgcatacggaggatgtccaatcggatcttcagccaccaccagaggcagatcagtacttgtagtccttgacgtgaaggctctcagaggcacccttgccgagcacagcatcaccctggtatgtaccaagggtagcctcagagttggccttgcacctggtgatgaaggccttctgcgccttcaccacgttctccgtcttgccgccccaggccttgagcgtgctctgctggagagcacggccgaaggagaaggacagagcccacggcttcttggtgctgagc

SEQ ID NO: 17809 - DNA, 426 bp, Oryza sativa
  Clone ID: uC-osflcyp021e07b2
ggtcagtggtttttgaatcatgaacagtaggaggaattgtatttacatgatatgggtcataaccggctttgatgccatctaagaccgacgctacaagggggcatgatggctaaagagggagatcatcaaattcatcaatgccggcttctattgtacacggcatccaacaggcacgtgatgcaggaggccgcacacctgggcggggatgcttcggcgtattgacaccctcgtacacggttcctaagttgtacgtttaacgagactggcggtcataaccaagctggtcagagccaacgaaacgccgagcctgatggtccggggtaccataagcgctttcggagatttggagcgatgtcctgcatagccgaactcatgaggggtcgcgcaagctctgggggcggctgacgggatgggcgtgaggcattc

SEQ ID NO: 17810 - DNA, 447 bp, Oryza sativa
  Clone ID: uC-osflcyp021e08b2
gaagcacaatcaatatttctggtatttcggagtagtttggagtgcattggtttttacaagacaccggaaatcacactgtttgtttacaccaagtgtaatagagctgcaaacaacaagccaaatgaattgggtgtgattttccatctcagtatgaggtccaaaaaggaactagtctacttccgtgcattttacatcctaaactggatttaccgttacttcactgagggtcaccacagcagatggatcccttggattgctggattggtccaaacagctatttatgcggatttcttcaactactatttcttaagttggaacaacaatgttaagcttgaattgtttgattgatagttgtttggaatcttataaaattgttccatcacatgaaattttggagattctttttttttgtattaaattgttaaagaagggggaattttctaattt

SEQ ID NO: 17811 - DNA, 479 bp, Oryza sativa
  unsure (1)..(479): unsure at all n locations
  Clone ID: uC-osflcyp021e09b2
aagtaattatgttattttctccaattcacaccaacgtataatattgtcactgcaaaccaagggtcaatcacctgcagcaattcaactttcaattctcaccttcccaccagactagctttggtgatcgttggtgatgaccgtgcgagagggttggtctccctctgcctactaaactcagggttactagatcctgcatagctactagtggtgtagctactgctcccaccatccctgagctgccactcggtgatatagctcggcttcgtgaccacctcagccacatcaacatctccgatgagcattgccacaacccttgacattggcggnngttggtgcggtgagccccactccaagagatatatcttgctttcctcaagggagttgtttgtattcgatcgaccagcaacagtctccaacataagtactccaaatgcaaaaacatcggccttctctgacaaatgacctctcattgcatactc

SEQ ID NO: 17812 - DNA, 489 bp, Oryza sativa
  Clone ID: uC-osflcyp021e10b2
ggggtttgtccctgaaaggtggaagttgaaacactatgtaacagccagaaaaatttacacttggattcatcataagccttgagcatcatgatataatatagataccgacttgagactaaataaaaccaaatacacgatgagaactatcacctaagtttacaacaacccagttgcacttgcacctatcacccacatatggttgctgccagcgccaatacaaattttcaggcttgatacaacaaacaggcctgtaattgcagtacagattattttcttgccggacagtccaccaattctcttgagaattttcaccatttcaaattcgaatttgtgcaaaagggtatatgcaatacaactgccaactgctattatcctactgctctggtagatctgatgggacgagtggttcatgctcattagcaccatttgatgttctgccatgccacacaccttaggagattttataggcacaaaagaggacttgtgtag

SEQ ID NO: 17813 - DNA, 495 bp, Oryza sativa
  Clone ID: uC-osflcyp021e11b2
gtgttttataaaatacattaatacatcacaaatagatcataatgattgtagggatataatccatagggacatgcttcacaaaaaaagtatataacatacaatagttccaccacaaatgtggcaattgatttaattctagaactggatgtgagtatttctttttccttcagaaatgtaacaacaaataaacttgaaagagaagatgaagttggcatacttccaaagttgaatttaaattgttccaatcaatttattggtactggttcattggcttaggagcggcaactgatcacttaccgctggctgtatcatgactcctctttgtgcatattcaacactgcattatttaattttgtcttctaattaacatacttgctccatttttcagttcttccttaaggaccaatgctgtgtctaatttccataccctcgaggataagtcctttcttcgagttgagctggacgatctcttgcaggttgataacaaccattcca

SEQ ID NO: 17814 - DNA, 444 bp, Oryza sativa
  Clone ID: uC-osflcyp021f01b2
gccgccgccgccgccggcggacgacgacgacgacgtcgtcgtcggcatgaacgccagcgccagcagcagcaccagcatcgccaccggcaccagcatcagcatcgacggcggcgggggcagcggcggcagcacgagcgggaggatcaccagcgacgccgtcacgcacaccagcaggagcagcgactccaccgagaagtacttgccccacacgccgccgccgccgccgctagccgccgcctccctgatattgctgccgccgccgccgccggatttacctgacgacgacggcggcggcgggggcggcgccgtactcccgccgccgcaggctttacctctttccttctccatgtcgctgccgctgctgctgctgcttgtgggttgagtggcgcaagatgccaacttgagattgggcgggttgtcgtcgctgatcagctcctggatttc

SEQ ID NO: 17815 - DNA, 444 bp, Oryza sativa
  Clone ID: uC-osflcyp021f02b2
gccgccgccgccgccggcggacgacgacgacgacgtcgtcgtcggcatgaacgccagcgccagcagcagcaccagcatcgccaccggcaccagcatcagcatcgacggcggcgggggcagcggcggcagcacgagcgggaggatcaccagcgacgccgtcacgcacaccagcaggagcagcgactccaccgagaagtacttgccccacacgccgccgccgccgccgctagccgccgcctccctgatattgctgccgccgccgccgccggatttacctgacgacgacggcggcggcggcggcggcgccgtactcccggcggcgcaggctttacctcttcccttctccatgtcgctgccgctgctgctgctgctgctggctgcagtggcgcaggatgccaacttgagattgggcggctcgtcgtcgctgatcagctcctggattcc

SEQ ID NO: 17816 - DNA, 500 bp, Oryza sativa
  Clone ID: uC-osflcyp021f03b2
ttttggttttttttttttttttgtttatcgaaatagtgccattttggctgcagccatttttgcagtacaagcacaacatgaacagggtcaaacacgacatttcctttagacagcacaagaaaactgaactatttagtctggcagcccaaaagaaaaaggcatggctaaaccattacgaaccctttttatttagacaaggtgatatatacactaacttacatggggaggacataataacgtatagaaataaatttcaggagcacgggaaacaaaaaaagacccgtatgtgatacatacacaatcctgaaattggagagactgctttgtttcagtaaaatttggggttccggaccctttgactttttcgggtattaaacggcaccaagactgccttttaaatccttgggttggagggggtgctttcgcttatatccttccttgcagcacaggatgaattctcagcttcctgattcttgggagatgagcacgactttccagct

SEQ ID NO: 17817 - DNA, 469 bp, Oryza sativa
  Clone ID: uC-osflcyp021f04b2
ttgttgtttttccaccgcaaatccaagagcttcttattaataataatagtaaaaataaacgccaaaagttctcacacggaagcaactaacttagcacacaaaagacagacatgaacacacccaagcccctcctcttccttgtctaaaacgaagcagcaactaaattaaatcgacctaaaattccgaggcccccaatggcggcgatcgacgacgaaaccgaggagctctagttggctgccttgctgatgagctcctgcgcgacggcgacggtgggcagcgccgggatggcacccttcttggtggtgcagatggctccgcacgcgttcgagaacttgagcgcctccctcagcttctcctcgttgtggaagatggagtcgtccttggcgacgttgacgaggagggagccgacgaaggcgtcgccggcgccggtggtgtcgacggtgttgacggagaagccggggacggagcc

SEQ ID NO: 17818 - DNA, 482 bp, Oryza sativa
  Clone ID: uC-osflcyp021f05b2
ttgttttttttttttttttttttttttttttttttttttttttttttttttttttttggaaacctcaattaaaaattttttaaattttttaaactttacatatacaaaacggggccaagagggccagaaaacacagacttggggtaacctttgaacaagagggggtccctttggtggccctaaactacaacaatgggatccaagctggaatttattcttactacacacaacacaagggtaacctattgcccagtttatgtacaagggggcctgggcctattttggggctcaaaaacttgggggggggggttttcacccctgttttttttgaacctgaaactaaactaatctatttatttcaggcacctttttttggaggggcattaagcaaaccacttggtaaccacatttttttggttatttcagcctcaaaccagaggggatcaagacatgtgcaggaagcaataaaatgcaactttttg

SEQ ID NO: 17819 - DNA, 486 bp, Oryza sativa
  Clone ID: uC-osflcyp021f06b2
aggacaatccacacccagtaatccatattaataccacaatataagagtttgggagagggtgtttcatacgttttacaggctctgagacctcatacgggtaaatctccgacaacactccatctgcagctagaatcatgcaggcaaggctaaacgatgatgatgatgatgatggtggggatacgttttacaggaaacatggatatctttcttattaacaatagtatcgcaagggagcatcactgataggatgaatttgcgtcttgacttgagattcgcaggtgatcgatcatcagggccagggccttaatgagcccgctcccggaggacctcaaggtctacctcagttgggtcggttgcctggatctcgtagtggaatccatcaagttcttgcttgatgcgatccttggaggtggagtacagcatcttagcacggatcccggatgttgatggagaccaggcgatgaagaaaatcttgtcttttgcaca

SEQ ID NO: 17820 - DNA, 489 bp, Oryza sativa
  unsure (1)..(489): unsure at all n locations
  Clone ID: uC-osflcyp021f07b2
ggggtaaatgctatttatttccttttttttctcacctttacaaacctgcaaactcatttctgcaaagaaaaaaaaatgaaaatatgttgcagagtattcctaattgcctactatgatacaagaaaaaagaaaacacacactgaatttcagtttcaggctttcacactgaatttgaggccttaactgaatttcaggcggtttcggaggaggcgatctcaagctccgcccaccacaggggcttctccctcggcgccgcctgctccggcgacaacccggcgatgcccctcaccagcctcgccacctcgcccatgcttatcgctctcttccccgcctccggccttctcacgcactgccgcaccacgtngcacagngccgncacatntttctccggcgcggcagacgacgacctcaccagcgtccggtcagccatggcgctgagtggcctcttgccgtccaggtagctggacgcccacagcaccaggagccgtc

SEQ ID NO: 17821 - DNA, 402 bp, Oryza sativa
  unsure (1)..(402): unsure at all n locations
  Clone ID: uC-osflcyp021f09b2
aggatgcatgggatgtgttgacattatattgcagatgagacaaccgatggatggacgacgttacagctgcaatgcatggttggcttggttgacagcacagcacagattttggaattaaaggagatttacgtaatttgtttgtacagaagaagagagtagtaattgattgggggtggaagaccacacaggtagcagctgcatggagtaattaatattctagctatatatggatcgagacgggggacgaattcgattattgagactgggagcagacgatatgatatgatatgatcagtagtcgggggggggcagntggtcgtgcgggcgctggccgatgaagatgatgtcctaaatgagcgcggcgatggcggcgccgacaaaagggccgagccagtagaccca

SEQ ID NO: 17822 - DNA, 508 bp, Oryza sativa
  Clone ID: uC-osflcyp021f10b2
ttgtttttttgcgctcacaaacaagatgggatgcatttgaggctacaaaccaagatttggcatacatatgactggaacttttgtctcggcaaaacttagtttaaaaaaaaataaaatgacaccagtacatagcttttgtccataataaaactgaagtaaccgactgttgcattgcccttactgaagacagagacctagctagaactggccaaactggagttttaagagggtactgtcaaacatgcccaaggcttcaaaaagatgtgaaatatcatcataagcttaagcctcagcgatcaacaccggagggcgcagctcctcctcctccttgggagcatggatggttacaagatccggcagaggggtggtcgggccaaccttgcccttggggtcccagtcgagcatgatcttcaccttgatgccaagaacaccctgtctcaggagcacgtgtctcacagccgagtcaatgtactcattgactggctgaccagatgagatcatgtaacca

SEQ ID NO: 17823 - DNA, 455 bp, Oryza sativa
  Clone ID: uC-osflcyp021f11b2
gttgttttttgcacataagctgcagatgaaaaccatctggtcactttatacaagccgtacatcagctaaaagaagttcacgatgcctcagggctcaggcagacagaaactgaaaacgacgcagcaagttaaaaacaaattacaaaacctacatgagacaaaattaaatcgtagagatagtgtcccactaccaccaaagcaacattatttgcagaggttcctttttttcagcccacatgatcccgtggtctagttattattcgaaaatctccgtccgtcctcaaattcgatcgaattttaaatctctctctcctagaagagcttgaatagaattcctccgtgcgtggcgaagaatggcgcgaacaccagcgactcgacggccatgagcttgatgaggatgttcagcgacgggcccgacgtgtccttgagcgggtcgccaatggtgtcgccgatcac

SEQ ID NO: 17824 - DNA, 494 bp, Oryza sativa
  Clone ID: uC-osflcyp021f12b2
aacttggttcttcaagcacaacaaaggtccaacaagatttaggttcccacaaacacaacgatacaagtaccagacttgcgttgttcacgctctgcagcgtcacaaacacaaatacaaaacaagtagtactacaatacccagaatagtccaacagcttatggtagcatacccgttttaacgggatcaacgacagagtgcaagtgctaaaataacataacatagtactacattccttggcgcatacggggtacagcccaagctcttagcagtaaaacatgacacgcttcacgttttccttgagagcaggtagaggcctgacggctacatttccagcaaccctggcgctgcgcacacctggtggaaggccacggctcgttgcagctccactcgccattgatccactgtcagatgtctctggctccatgtaaaagcgagctcggaaggctgccagatgagcatagtacgcaggaggcacaattgatacagagcgagtg

SEQ ID NO: 17825 - DNA, 513 bp, Oryza sativa
  unsure (1)..(513): unsure at all n locations
  Clone ID: uC-osflcyp021g01b2
tttttgtttttttttgggcaaaaaaaaaaagtttatatacagcaaaatttacaaggatcgattctgttccaatgtacagaaatacacacacacacacgtacacacgctgaagaattgtgcatttgcagtttttgcagagaatatttacagactgcaatgcccggtactagcaggagccgaggtccaataatccaaaagcaagtgggacaaattaacaatggaatagcaattcatctctacatgttatcataggttagcacattatcaagaagggaataggtttcctctatgacgcgcgcgattcgtgttgatcagcattatgccttgctttgcaaaggtacaatagccttgaaacctcaggaaggacatacccacattcagcgctgcttcaaaatcccactgctactctctctcttttttttggtgctggtttctttttatacatctttttttgggtttccatgtcttccttcatcgatatagntctgcgtctttaaaaaacgtagtagaaca

SEQ ID NO: 17826 - DNA, 383 bp, Oryza sativa
  Clone ID: uC-osflcyp021g02b2
gtactttggtggtggtccaatcaccagagggcggatacgtcatctggttgagctcatgaagaaattgaactggatgctgacgatgatcctgacggcgttgcgatacttggacacaaatcatcaattgatgcgattaactgagctgcctgatatcctctagactggctaaagcgatgcaaagagtaccacggatggtgaaattaattgccctagttactacccataaaaacaccctgatatattacttggcggcctagaaatatttcacgagaacccattttgcaacaacatagatgactatgcttatgaggcatcagaagaccattataggaatgatgaacaggagcatgatgattacgattatgacagtacgctttatgaaa

SEQ ID NO: 17827 - DNA, 501 bp, Oryza sativa
  Clone ID: uC-osflcyp021g03b2
ttgtttttttttttttttttgtttttttagaacaaatatactcttaatttaactagagaaaaagccagccgtatgtttcttttaagcaatacagagatagctaatccaatttaaaagaaacaagggaaaaaactcactgccaatgctacagttcgagtgccctagcgtaagaaacaagacaaataccaacgtagccaaaaccagctgaaacggatcatcaaaagctaccaccgattgaggtgaggtctgaacaaaaaaggaaaaccaactttcccaccattacgtggtacgagtcccatgcaaattgaggacaaggcatttggagatgaggtgagacagtcggcatatggaagtgctcgtttgcaaattgcaactgcagatagcaaaagctttatgttgttgcacagcactcattgcttctgatttctccatgattgccaagatgtgaggttagggactttggcatgagtactaccataccttttggaaggaactgccgag

SEQ ID NO: 17828 - DNA, 480 bp, Oryza sativa
  Clone ID: uC-osflcyp021g05b2
ttgttgttttatatcagctatggatgtactgtatttcacaaagcagtacagtagtagtagtacaattacagcagatagctgctctgtcaggctatacaggcaatcaggcagctactgcttagaatttcagataagcagatctacatacttcacatgctcaaaacacacgtgaactgagtaactgaccacaaacccaaccacaccagctgcctcaaccacacttacaagttacaacagacatcaccatgttaagtatcatacaaaccaggcagcattttattttgggatacacaaagtcacaaagcttgcacatatacagtacatacacagcatatattggtgtcccgattttgtcacaaatacacagtagtccagtgtcacaaactcacaatgccatgagtcacgggctgcaggggatgccggcttcagagaaggtggtgacaagcttcggcaagagcttggctagcattatcttgaaac

SEQ ID NO: 17829 - DNA, 457 bp, Oryza sativa
  unsure (1)..(457): unsure at all n locations
  Clone ID: uC-osflcyp021g06b2
ttgttgtttttttttttttgggggtttttttacggggatcggatctaacatttattagcacaaatcactagttttaacgcgctatatatctgggcatatgtatatctgcatttgtcccatcatccaaccaaccaataattaagcattgacgtaaatgttgaatggtttgccaaatcgccacgtacgacgtacgaccatcatccgtcgtgaagctctggattcatccagccagctacagcggaggaggaggagactacgccgccgccggaagcctgaagtggtccagcgccgaccgcccgtcgagccccttgccgttgtagtgcgccaggaactcccccgccgtcgggctcctgtacaccgncgccgtccgtgccccgccgccgccgacgacgaccgggacacacggcctcgtcgacgcctacccgtggcggaagaagcaccccaccgacacccgggc

SEQ ID NO: 17830 - DNA, 525 bp, Oryza sativa
  Clone ID: uC-osflcyp021g07b2
gtgtttttttttttgggactgtctgaataatttcttcatactaatataaaggaatacatacactccacggtttagtccatctcatcgccggcatgatctgttctaattaacagatcccaagatgaatttcgccctcggcagaaaaactatttacaaggctcttccgtctctcacaggctactaaacaaaaacacagaggaccaaaacatcggagagaaatatccatcaaagaagaaaataagagagaaactacaaagtcgtcagctaacccatcctgagctagttctctaccggcggcggccggttcagatccagatcgaaagctgccgccttgttcgccgtaaccgctggaggtgacggcgcgagatcaaccaccgacgaggagtcggagtcactttgtgcaaccgccgccacggtgaccggcggtgcaagcttcatcatacggtatccagcctcagctgcggcagccgctgcagcctgctcatagaaaaagtaaggatgctttgctggacgtgccacgggata

SEQ ID NO: 17831 - DNA, 480 bp, Oryza sativa
  unsure (1)..(480): unsure at all n locations
  Clone ID: uC-osflcyp021g08b2
ttgttttttttttttcgaaaagagaggtttctttcttgtgttcattgcttttttatgctcaatgctgtctgttttatcagaaactaacagatgaatataatatttttgctgcttcttgttagtagtactagtacatacatatagatttcttccctgcgttgtaaatgcaaatgtttcagatattttggttctccgtactgcaaaagttttttttttcttcactgtcgaccatgcatgcgttgatgcatgcaggtgctttggcagtactgctggattgaattaatggatcaagactgaatttatctgtaaataattagttcatcgtaataaggttgatgtgtttgtgcttacctgcttcagtactgcgcttcatgtgcagataggttcgccttcagcaccttgccggtgaataacgccggcaatgccgcgagccgtgtccgacgggggcgaggtcatngacgccgacatcgccagccggac

SEQ ID NO: 17832 - DNA, 102 bp, Oryza sativa
  Clone ID: uC-osflcyp021g09b2
ggcgccgccggcgttgtttggtagtgcggcggagggcggcaggtactctgggtgtctgtctgtagtatgttggttagatggactgatccttttgactgattg

SEQ ID NO: 17833 - DNA, 508 bp, Oryza sativa
  Clone ID: uC-osflcyp021g10b2
gtgtttttaatgtcaactgggctgaaaattcctttttgtcagatgaacacacagaaacagcagcagtgacagttttgctatgctaataagctagatcaacctcagctgcggcggctgtctgctgccgccatggtacggcgagcagaagagctccatctgcggcggcggtggcggcggcggcgcaggcagcacggccaccggacgcagggaagagacgtcgtggagccggctgctgtgctgccacgccgccgacacggcggcggcggcggcgtctggccttggatgatggtattgagggaattgaaactgccacatctggtgctgctgctgatgctgatgctgattgggcatgagctgctgctgaattttcataatggctgggtttggattgcacatgtactgtggcatctgttgaaagagtagtgcagtgtgcgtcaaaattcccctggtgtaagggagatgctgaatggttatggcattgcaccgcggggagcgatcgggggatgta

SEQ ID NO: 17834 - DNA, 486 bp, Oryza sativa
  Clone ID: uC-osflcyp021g11b2
ttgtttttcatgtcaactgggctgaaaattcctttttgtcagatgaacacacagaaacagcagcagtgacagttttgctatgctaataagctagatcaacctcagctgcggcggctgtctgctgccgccatggtacggcgagcagaagagctccatctgcggcggcggtggcggcggcggcgcaggcagcacggccaccggacgcagggaagagacgtcgtggagccggctgctgtgctgccacgccgccgacacggcggcggcggcggcgtctggccttggatgatggtattgagggaattgaaactgccacatctgctgctgctgctgatgctgatgctgattgggcatgagctgctgctgaatcttcataatggctgggtttggattgcacatgtactgtggcatctgttgaagtagtagtgcagtgtgcgtcaaattccccctggtgtaagggagatgctgaattggatatggcattgcacc

SEQ ID NO: 17835 - DNA, 345 bp, Oryza sativa
  Clone ID: uC-osflcyp021h01b2
ctcccctctctctctcgcctcaccaccgccgtcgtcgtcgccgccgccgcaaccctcgccgccggcgctaggctcgcgactccgacgatgtcggcgccatccgaccccgccgtggccacccacccgcaggcgggcgccgccgcggcggcgtcctccagcagcggcctcaccttcaagctccaccccctcgtcatcgtgaacgtctccgaccaccacacccgcgtgaaggcccaggcggcgtgctccggcgacggggcctcgtctgcggcggcgggggggcagccgccgagggtgttcgggtgcgtgatcggggtgcagcgcgggcggacggtggagatcttcaac

SEQ ID NO: 17836 - DNA, 415 bp, Oryza sativa
  Clone ID: uC-osflcyp021h02b2
tttgtttttttttttttttttttgtttttagctgcaaatttcatatgtcgggtaaatatatggatcaagtcatatatatacaaatagttgatccgggatatactgtactacattacaattccaggacattacaaagatttcagattcgcattgcggcggcatgatcatgcccccgccacggccgggaggaaccagggatgtcaagggctcaaggctggcaagccttggtcgcgatggcagaagcatactcagagatggctggatccggcgattgcctcaggtgcacgatgaccgggagcagctccgacgatcggaggaagagccggcaggcggcgtggtcgcacatcttgcgcagcgcgaaaagcacgatcttcagcggagattctgttagcacgtctttcctggtggggctcaa

SEQ ID NO: 17837 - DNA, 370 bp, Oryza sativa
  Clone ID: uC-osflcyp021h03b2
tttgtgttttttttttttttggggttttttttttttttttttttttttttttttttttttttttcttgtttttttttttttttttgggccaaacaaacccgaagagcggggaaaaaagcaaaacacaaaaaggggcctagcggaccattttccaccaaaaaaaccggggcccaaggttagctttttttgggggggggggggtccccctgggccctttccaaagggggggggggggaaataaattgggcccttttaaagaacaggggtcccactaaaccttccaaggattgggggggggggtttttccgggtgcccccgaaaatgaggctataatgaggggccggttccccggggatctcgttaggcaggg

SEQ ID NO: 17838 - DNA, 390 bp, Oryza sativa
  Clone ID: uC-osflcyp021h04b2
ttttgttttttttttttttttttttttttttttttaagcgcggcaataaaacattgcattgaattctgaacgataaacaccaggaaccggcgtttatttgaggcaagcactgcccaaaatctcgcaaaagtactgaaaccttagacatagtacacatccatggcaaacatggatgccaaatgacaactacagaaaattatcaaattcgaatgcagctgacggcttctcctgctgaagatgcatattttcccctccattacttggatgggctctttccatcgacagccaatgggacggcgctggccaggctggggtatttcagagcatagaacatctcaatgtaacggcgagtctcgcgcctctcaagggtgcttacgtacttccagaatc

SEQ ID NO: 17839 - DNA, 495 bp, Oryza sativa
  unsure (1)..(495): unsure at all n locations
  Clone ID: uC-osflcyp021h05b2
tttgttttaattacttactacttgtatttatgtatttatgtatgtatatctcacaacggatacacgtcgaatctttattacttgtgtccttcaccggcagtcccctgatattcttcagcaagcagcagcagggaagcagtagcctcaggcgtcatccttgtctgcaaagatgtcaagaagggagagcgcctcggcgacgctgagctccagcctgaacttggggccgtcgtagtggtggaggatcggccggaaggcgtcctcctccagcgggtcatagatcttcctcgtcgcaaccttcacctgtgcagggaagcgcgactcgccggggcacttcttgtcctcccacgccgtcggatcgatgtttgttccgccaaagctcgcagcctcgaagatgccgtggagctggtgggtggagtagttgtagaggaagaggggcagncctgngctgatcgnccttactgaatccctgtatctcgatggaagcccgaagagctg

SEQ ID NO: 17840 - DNA, 512 bp, Oryza sativa
  Clone ID: uC-osflcyp021h06b2
ttgttgttaactcacgacaaagggagctaaacattattggtatgtagtatgttcagtggtgtgcattattagcattgctcaagctgcaggtagcttcagggaagtgaaggggaggaaaaagagtagctgctccagcacaaaactactagcattacataagcacagaaaaaggtatgatcctcttcagacatcttcccacgccaaaggtgaatggggtgaagatcttaggcggacttcacggtggcggagttgatgatgtcgatgaattcaggcttcaatgaagcaccaccgacgagaaaaccatcaacatcaggctttgctgccagctccttgcagttcgcaccagttacggaacctccatagatgatccttgttgattcagcaacctctgcactgacattagcagcgagccacttcctcaggccatcatgcacttcttgtgcttgatctggtgtagcaactttaccagttccaatggcccacacaggttcataggcaacaaccacattagt

SEQ ID NO: 17841 - DNA, 373 bp, Oryza sativa
  Clone ID: uC-osflcyp021h07b2
ggttgtttttttattttggggggtttttattttttttttttggatacagaacattgctttttatatcatagggggggtttgtccaaatatggttgggccttacgacttatcctttacaactattccctgaaacatcccatgcattccacggaaggaagcactgatccacactagatcatctccactggaaaatggggttttgccccagggcttcaccttcttcttttactaactagtacaggcgcttggtatactaggctgaatgaccattgagacttgagctttgcatggagagcgttctactggggtgatccttgaccctgatggcagttcggacacctcttccctttgggggcggtccgctaaaagcttt

SEQ ID NO: 17842 - DNA, 522 bp, Oryza sativa
  Clone ID: uC-osflcyp021h09b2
gtgttttttccgggaaaaaagcacatcacaattattaccgagcacctctatgtacattgtacaggatgggttccgttccatatggacataactctccattgaaggaaaacctcaatctacagttgccctaagaaaggtcgaaagaaagggaaacatctcaaagaccgccagatccgcataaataaacagcttcaaagactgacaaactctgcaccctaacgcataaaaccggttacagtagggcggctaagccaagcgaacaacacagcagcaaacataaacatttgtgcctctgatatgtgcaagctaacggctggaaatctggaatccccttgctgccctttgggtcctgtccagatttcttaatctgcgtacctgctctggtgcataattttattctgcacttgtggtattccacctgctgatgagattgccaggtgcattgctctctcatggttttggtaagctttggtgccaaccaaaacgggttttcatgggatgacaggatgactgggtcatact

SEQ ID NO: 17843 - DNA, 502 bp, Oryza sativa
  Clone ID: uC-osflcyp021h10b2
ttgttttttcgagaacggggtgaatattatttttttctcgagtgaaaagatttgttgtgctcgtcgacaatgaggtgtgacgagcacatgaacaatcagcatccgtttcttggtttggcactggtgcacatacaggtgacaggccacagggcgctgctaagctcacgcccaaatcatcaaacttcaaactttttttttaaaactactcacctagcaaagaaacatctttgaacagcacatcactctcgcgcctatatacagcattttatcttcttcccctttaccatggttcttggtcccgggattcgccgtcgcgccgccatgagtgaccgtcggcgccgcacatcctcgtcatgttggctctctgcacaaggcggaccagcaactggacgacctccgacatcggcggcctgaactccggttcggactgaacgcagagcgcgatcgcgtcagcgaagcgggagagcgatttcgaagggtacagcccctggagtgcagggtc

SEQ ID NO: 17844 - DNA, 413 bp, Oryza sativa
  Clone ID: uC-osflcyp021h11b2
tgccgccgccggggcggcggaggccgcgggggaatcggatccgaggaacgaggtggaggaggacggcgaggagttcgcggtgtactgccggaggggaaaggggaggagaagggtggagatggaggaccggcatgtggccaaggtcgccctcggcggagaccccaaagtggccttttttggtgtattcgatggccacggcgggaagagcgcggcggagttcgtcgccgagaacatgcccaagttcatggccgaggagatgtgcaaggtggacggcggcgacagtggcgagactgaacaggcagtgaagcggtgctacctgaagacggacgaggaattcctcaagagggaggagagcgggggcgcctgctgcgtcaccgctttgctgcagaaaggtggccttgttgtgtctaatg

SEQ ID NO: 17845 - DNA, 467 bp, Oryza sativa
  Clone ID: uC-osflcyp022a01b2
ttttgttttaaattaacaactcaaatatgcaacagataatagatcaacacagggccaacatatttttacatcttgaacaaaacaatggcgacaatctcacggacagcagggcacttcatccaccacaacgttgcaccgttcaaatggaagttggttgtcctcaccaccgtctccattcagctctgatcgctctgttgtttgtagaagaaggtagagactggcggcgtgtgaagccattcatgtctgctggtgaatcagaatccagtcttggtgaattctgtcctcgcaactttgcctttgcagattctgttgcagccatatagcttggcttccttcgtggaactggcgtattctgggctccattttccgggtaatctgatttggtggagaacgaagacctcctcttgctagttttaaggtttccattagacagaggttcttccttggaccttggcttctctttcttc

SEQ ID NO: 17846 - DNA, 461 bp, Oryza sativa
  Clone ID: uC-osflcyp022a02b2
agtggcacctcagttcacatcaggcagatgatgctgatgaagccaccacagcagcatcacctgccgtgctggacccaacgactccctgctgctgctgctgctgctgctgctgctgctgtctgctttgcaaagcagcactgctgctgctgctgtcgccagcctgcccctcctctgctgcagccagaagaggtctgttcaacgccccttggttgctgacatctcgccgctgctgctgccgctgctgccgccgctgctgctgctgctgctgctcccgttgttgcggcttgggccagcagcagcagcaaatgtgcttcagcatccacaccatgcccttgtatatctgtgatgctgtgttgttgatgaagccgttcacgcccgccttccctgtgcgctggatcagctgctccggcctcacttggtggcagccgtccaccacctgccacactgccgcatacacactg

SEQ ID NO: 17847 - DNA, 114 bp, Oryza sativa
  Clone ID: uC-osflcyp022a06b2
tttggggggtatcgcaaatcaaggcctaagggctaaaataaaaccagcaaaaagaaccaccaaaggtacaaaaactagttactagaaaaagaagcgcaacggggcaatgaaaaa

SEQ ID NO: 17848 - DNA, 462 bp, Oryza sativa
  Clone ID: uC-osflcyp022a07b2
tttggttggttgcgaatagcgatcgaatttgactaggaaaaaacgaaggaactcaggcaaatgcatgcacagttttacagaagcaaagcaacgggttcccaaaggtccacacttacagtacgttcaacgtacaactgatccaagcaaatgaaacaggtttgatgatgcactgatgcgagaaactaaacggttggatcggagtcggagacgaggcgatcatggacaagcggcggcggcggcgatgagcttagtagtcggtggtggggagctgctcgtgggtgtgggagatgaagaggacctcgtagatgacgccggcgaggccaccgccgatgagtgggccaacccagtacacccactgggactcccaggaccagctgacgagggccgggccgaaggagacggccgggttcatggaggcgccgtcgaacgcgccgccgacgaggatgttcgcgccgacgatga

SEQ ID NO: 17849 - DNA, 96 bp, Oryza sativa
  Clone ID: uC-osflcyp022a08b2
ggtgtttttttaacatacgagggttcatttctaatggaataacatcacatgatttcgtcagatggatctcagctccaaggctgcaaaacacctgat

SEQ ID NO: 17850 - DNA, 446 bp, Oryza sativa
  Clone ID: uC-osflcyp022a09b2
gaaacagccaaagagatcattgatattttaataagcttaatgcataaaccacgcaggttatcaagtcagttttaaggcccagcacaacttttgcacactggggactatgacacacaaagagcggctgccttacaaggtttgcgacaacataatagttattcagtattcacttatgcaccaacagaaacattctgaatggaattaaaagacccagcataggttacgcaaacattttggctttggttgctccaacactatgcttaagggcctaatagtagaacattatttcttgccgcgcagctttggtccaagagccctttcaagcttcccgatgatctggtggttcggaatagctttacctgactcgtacttactggtgacctggggcttttcattgatcatctgtgcaagctgtgcctgggacattttcttgtccagccttgctt

SEQ ID NO: 17851 - DNA, 72 bp, Oryza sativa
  Clone ID: uC-osflcyp022a11b2
gggtttttatagatatgtttatattaatgattttagatctaaataattggaacttgcttgtaataataggaa

SEQ ID NO: 17852 - DNA, 458 bp, Oryza sativa
  Clone ID: uC-osflcyp022b01b2
aggttcgataaatattgcttcacttgtacaaagtacagataaaaatacattgatacatgacacggagagagccatgcacaccacttatttggacacacagagggcaaggctgcagagaaaatcaagcaacacaagctgaactcacggccccacctgtcagcctctcactggtcgaggccggagactcttgtgaaaaacagcaacaccacgcatgcagaagaagacaaattattacacacacaaatcgacgacacggcggccggcgacgtacggcgaggtcgtcgccgccgccggcgacgttgtgatgaggtcgatcagccgaagaggtggtgctttttctcgccggtggactcctcggcgctcttgtggtccttcttcttctcgtggtgctcgtggaaggcgtagccgccggcgccgaccgccgccgtggccgcgatctcctccgtgatcttgtgcct

SEQ ID NO: 17853 - DNA, 410 bp, Oryza sativa
  Clone ID: uC-osflcyp022b03b2
aaaaaagcaaaacccacaggtcccatgaccaggtaaatgtacaaaactaagggaagggacagttgagtttgatacgacacgatgccaaacataaaccacgggtaaatatttttaaacacgttcaccaaccaaaaaacgggggctaaattattcactccatataaggggaaacccaggcagatgcaagctcacattacggaaccaaatggggggaaaacttagtcccaaaggaccaaaatagcatatgggggatttagcacccctgctcgatcagaaaatcgccaagcctttcaaaaataatgttgcactggccgggggacatgggttcataatagattccaagaataaacgacgggccggtttttttgacaaataggcttacagggcccttttttttttgggaagaaaac

SEQ ID NO: 17854 - DNA, 432 bp, Oryza sativa
  Clone ID: uC-osflcyp022b04b2
gaagcaaacaaaacgaatctgactagactttgctttactctgtttcagtgtcgagaaataccttaagcaagagcatacactgtagtaatacatctgaatttctgcagcgacaccctagtattcacatttacagaacgaacatgacaaaataagtaaacagcaagctgggatggcagcagccactttacaagcctttgtgtgcatctctgatgcatacacactttctcctggaattcaggcccatggcattatgtagtttgtaggtcactactccacacttagaattatgagcagcattgaagaactgcttcaccatcctcttagctggtcttctggttggagaaccatttccagccggtgtgttttgaagcctgttgtccttgaacaaatctctttgccattttcgggaatacatcgttcacattgatcgct

SEQ ID NO: 17855 - DNA, 402 bp, Oryza sativa
  Clone ID: uC-osflcyp022b05b2
cttagaacaaccaaatgaactcattttatatattgaattattaaacatacacgttttgcaacgcaatcacaataacacaaatgatcaaacagccttgacgcattacaaccagctttacttatttaaacaaaacatgccactaccaccacccttgtaaaactcagcacacaagacaacctcagtggtagttaagttgttgaggcccttccctgcagtttcttccctgaatcttcccccttgtgaatccaagtcagaggccgagaatgtttgccccattatttcaccaatttgaacctgtgccgaagtggcttggaagaagaggtttgccatcattcagcatacgccctttaacgagccgccgttgttttcagcgcttttggttaagccggacctgatcagagc

SEQ ID NO: 17856 - DNA, 78 bp, Oryza sativa
  Clone ID: uC-osflcyp022b06b2
aattgaaacaatttgctacgtacgcatagattagcaacccaggtagctaaggggattcatgaacatttacaaaaattt

SEQ ID NO: 17857 - DNA, 452 bp, Oryza sativa
  Clone ID: uC-osflcyp022b07b2
atgatcatgaccaacaaacatatgaatataattacacatgtttaatcacccccaaaaaacaagaaaccccacataaattaatttacaaccgatgaggcgaccatatatatatataggagagagatgaaaggatcaaagggtgaaagaattcaataacaaatgttcttgcatgccaagtgtgtgtatcttgatttttacttactttttgtgcagagactgagagagagtagtgtgatcacattaaccttaatcttgattttaattaccatcagctaagcttagctaagctagcttagctttgcttgcttctggagtgatcactactgcttctccggctcagccgccggcgccgccgcctccgctggcttctcctcctccttcttctcctccaccacctccgtcgacggcgccgccgcctccgcggcggcggcggcgggctcggcgggggccgc

SEQ ID NO: 17858 - DNA, 457 bp, Oryza sativa
  Clone ID: uC-osflcyp022b08b2
ggatcaaaccagtcatttcattagcttgattattatataaatttacatcatactttgacatgtcttatttctgttcaagagtctggactatttacaaaatgtaccgtaaagaatgaaaactaaagacgcaaacatgggaccaatggatcacacgatgtaaataagggtgatgtgatcaagcaacaattcgagatgcagagcacaaaccaaaaacaacggaaaaaggttaatgttatggccttatatgggtattatatgtactcacattgaactgcgactcgcttcatcattcatcatccctttaaaacttttggccaaccagattgctgtttctcgaggagataccttatccttcccgaaaggctttagaacaaccgcaagctcctccagcctattgtgttgcagtagatccgcagaaagctccaggagtccttcaagggcctcggctcgctgcctg

SEQ ID NO: 17859 - DNA, 435 bp, Oryza sativa
  Clone ID: uC-osflcyp022b09b2
tttggttttttacacacatcaaacccgtaaaagttcgtgttaactgctaatccaacatttggtctgcggggagtttgtcaagcgctctcaaattatacaacaatttacagatgcattgcctttagatagcggtctgtagtttcagagatcagttaaggcctcaccaaaaaatgtgaatgatacccgacgatcagttacctcaccaagctggtttcatggaagaacgccgtatttgtgacaaaaactgggttccctcacatcttcacctggtctgcgagttcacaggcacacaccatttggtctacctgtctgcccagcagttgcttgatggtaagaagacgcgttccccagctgtggctgaaccccgttgcaaaatatctaccatctatattagactttggtgtggatgatagtactaggcatgaaacagggctg

SEQ ID NO: 17860 - DNA, 75 bp, Oryza sativa
  Clone ID: uC-osflcyp022b12b2
aatttagggggttctgaaagataatatatattataattcaacggtaattaatatcattaagtgaaaaattataat

SEQ ID NO: 17861 - DNA, 452 bp, Oryza sativa
  Clone ID: uC-osflcyp022c01b2
gagaggcaattacttaaattgaagaaatagatggtcaccgaaaatgtgagtcaaaatctgggtacaatgtgacagcaccaagtgccaaaattttgtaccttcctgacagttaacacattcaccaaacctgcaagacatccaaccaatccaaccttattgtcctacactgtgggggcaaatcgctcacatgcctgcataattgcaaaccatattgattgcaacagcccatgtcaaggaaagatagcccctatgcctttattattgttccatacacttgtaagtgacagccatgacatgatcaccaaaaaagggaaagcaagtcaataacaccaggtacctatcctctctgttcttggcatgcctccattcttgtgccattcccattcatcgtctttcttgcaggtcttcagaagcaggcagcaagaacagctgcaaccatgagtggaggttca

SEQ ID NO: 17862 - DNA, 454 bp, Oryza sativa
  Clone ID: uC-osflcyp022c02b2
aagctgaagacattgtattataggatcaaaacatttctattaccacaactttttaaggatggaatcgagtagcaatactttcaccccaaaatacagtttagcgacaatatcttagaaaagccgcttgctttgccgccatggctggcaagctgagcagagcagctaacacaaagaacacgagatcactataaaccaaacggcaacgaacgaagaaaatacagggtcttttttgtctgaagatacacgaagcggttcgttttcttttatttttagtctcctctcctcctcgatgatgggtgtatggcaatggcaatggcgatgggatcttggcttagttgatgggaaggggctcgccgttccactccttgaggcagtcgagcatggggtcgatgagcttgccctggctgatgccgaggaacaccttgttgcactcctcgccgggggacttgagctt

SEQ ID NO: 17863 - DNA, 454 bp, Oryza sativa
  Clone ID: uC-osflcyp022c03b2
acaatgatatactactatcatagcagtttgctgttcgagtaaacaaattcatgacagaatagactagcacataaggaacagtacaacgataataagggcataggttcgattattagtaaggttctagggtgcgacaccatctaaacaatgaacgcgacgcctttccttccttccccctccaaacgtcagcctccaccattcgaagttgacagttactgggccttgccctcagcagttacttccatccctgatgcttccatgccctcggaggattttgtgggatatggagctttgctcaccaacctgtcacggcgtttctctaggaagcgctgaagggagtgcctcctggcaatggggagatcagcctggagcttgcaaattgagctagggtcagcggcaacttgaggttgtccagttgctacagaagtgctctgcaatgagagcgatcttgtga

SEQ ID NO: 17864 - DNA, 425 bp, Oryza sativa
  Clone ID: uC-osflcyp022c04b2
agcagcaaagttttttaacacgcaacatcaaagagacactaatgcaataagataacttgaagcgcggatcactagcaaatttcgcgcttagtcgacctcctcgatcttggggccagcaccgctgccgcctgccgggggagcatccgtccttcgtccatgccgccggccatgttccgcgccagcgccctggtacatctttggcgatgatggggtttgcagatgccctccagcctccttcatcttgtcatcgaactcatccagcctcggcgagctggttgccgtccagccactggatggcctgatcgatggcatcctcgatcttctttttgtccgctgccgggagcttcgaggcgatcttctcatccttgatggtgttgcgcatgttgtaggcgtagttctccagcgcattcttggactccaccttc

SEQ ID NO: 17865 - DNA, 165 bp, Oryza sativa
  Clone ID: uC-osflcyp022c05b2
gaaagaaacaacgttgttactgaaactttcatggttatttacaccttaatttgaagcgcacacacactttctcgacgtgcgctttacaccaacgtggttgcaacgggaatgtccgccggaatcgttaacacggtcggggaagaaaggtacttttcccggccatgg

SEQ ID NO: 17866 - DNA, 454 bp, Oryza sativa
  Clone ID: uC-osflcyp022c08b2
cagagtgtaagttcatgttcgtctgacagaaaatgagaatagtatattgtagcggttcttgcaggctaacatatatagaatctgatgttttacatccttgaattcattccccagacattgtgttggatctggagatatagacacccccggtggcagtaaagaggcaacaagaacaatttcctggatttttttttcttttcttgagagaggagactagcgtttcttttttgtacgaccgtacttcagtacatgtacatgtctgtttacaaaacgtgttgtcaacttctattacaaaaaagggtttcccttttgcttaccaaataaaatatcaaaggagattcgagtcaggtcctatatcaaactaaagggtcagttctagttgtcatacatcctgccttggtgtaagcaaacaaaaatatgatatggtctctccccaaccttcaaatgtacatat

SEQ ID NO: 17867 - DNA, 449 bp, Oryza sativa
  Clone ID: uC-osflcyp022c09b2
caatgctaaacaaataaggattcgcttgcccaacatatatacagatgccctgcaatatttacatcttctaggtctaggcatattagcaaattagcaaaacaggtggaagaaacactacttaaggaagcaggttcaaagcaataaattaaaccaaccaagacatctgctgcctgcaaccaaacagcagatcaccctaaagctcgaagaacataatgtggaaacagagatatctgctgcaaccaaacaggtgatcgccctaaagctctgaagcacatattttgtggaaatagatgacaaatggcatgcagttaatttgctgcaccgccatcagcagtggaaactgcggcaatacgtttccttagcctcccacgggtcactcgaatcgcctcctccattggtgtctcctctggagtggcaacaggctcatccatgtcctctataggaatgtc

SEQ ID NO: 17868 - DNA, 143 bp, Oryza sativa
  Clone ID: uC-osflcyp022c11b2
aggatcaaacgtgcgatccactagaacatggatacaaaacggcagcacatgacaagcaaattatgcccaataagttttcatgatgttcatgtttttggaacagctaaatcgtttgcccacaacaaaaaaaaccccattttgcg

SEQ ID NO: 17869 - DNA, 474 bp, Oryza sativa
  Clone ID: uC-osflcyp022d01b2
gtccggaccctcgcgtccaagctgctcgccatcctctccctcggcctcggcctgccagaagagacgctggaacggcgcctgagaagacatgatcagcacggcgtcgacgacgacctgcttctccagctcaagatcaactactacccgaggtgcccgcggcctgacctcgccgtcggcgtcgaggcacacaccgacgtcagcgcgctctccttcatcctccacaacggcgtgccgggactgcaggcgcaccacgccgggacctgggtcaccgcgcgctccgaacagggcaccatcgtcgtccacgtcggcgacgccctggagatcctcaccaacggccggtacaccagcgtgctccaccgcagcctcgtcagccgcgacgcagtgcgcgtctcctgggtcgtcttctgcgagccgccgccggagtccgtgctgctgcagccgctgccggagctgctcgccaacggcgccggcaag

SEQ ID NO: 17870 - DNA, 444 bp, Oryza sativa
  Clone ID: uC-osflcyp022d03b2
ctggggttgtttattttcaatgaccataaagagaagccggctaaaatgattttattaaagtccaggcatggggaatttggaagcgaacgcgtgaactttacttctcaaagctgcaatatctgccttaatagcttcgtcgccttcaataaatttcacgaagtcttcgaggctctttccagacttctcttgagccttgattgtgattttaactgcttcatccaaaaacgccgcaacttgtttgaaatcttcttccttgagtcctctgctggtaagagcaggcgatccgagccgaattccacttggacttgccgcagatttatctccaacaatactgttcttgttgactgtgatctctgccttctcgcaaagcttctcgacctttgagccagtaacattgagaggtctcaagttccacaacaacaagtggttgtcagttcctccagt

SEQ ID NO: 17871 - DNA, 461 bp, Oryza sativa
  Clone ID: uC-osflcyp022d04b2
gtaaggcaaagagataaaaatggaatcaagaaagctgtataaaggttacacaaatcctttagtatgatgataaagtcactcctataaaacggtttataaaggttccatttctacaaaaagaacttcacacatgagctctgaacgaataacaacaaggaccccaaaaattagtttcacaaggtgcacacaacatcccggtctattgtcgacagatgaatttataccgatctgtcatactgatacagaaaatagaggctctgtaagcttatgttgtctgctttctgtatgtgtcctttgctgtaccaaacaaacatctgtcgttccctccgtttgatgctcaagaaatattcagcgatctgactcttcatggtttccaagctgacggtggaggtgggggagttggaaacatcggaggaactgcagagaagatggtgttcttatcgattccacttttgacgtga

SEQ ID NO: 17872 - DNA, 464 bp, Oryza sativa
  unsure (1)..(464): unsure at all n locations
  Clone ID: uC-osflcyp022d05b2
aaagagcaaaggatttagcactgtaagtactcgcattccacaacaaccgaagggcaacaataagactcagagcatccaagtttttaaccgaatagaaataaacgagttttaaacgactaacatagtgcacattgcgagcagatattaacggttccatgcaacgagtgccatgngccgtgggcaaaacttaacgaacgctaangatatctcaaatngcagccagcataaccaccacttcaacgatgctcatttcttcttggcggcagccttggtcaccttggcaccggttgggtccttcttctccacgttcttgatgacgccaacagccaccgtttgcctcatgtcacgcacggcaaaacgaccaagaggagggtactcagagaaggtctccacaaccatgggcttggtgggaatcatcttaaccataccagcatcaccgttcttgaggaacttgggctccttct

SEQ ID NO: 17873 - DNA, 90 bp, Oryza sativa
  Clone ID: uC-osflcyp022d06b2
ttttgttttttttttttttttttttttttatttttttttttttatttttttttttttttttttttttttttttttttatttggacaaaaa

SEQ ID NO: 17874 - DNA, 384 bp, Oryza sativa
  Clone ID: uC-osflcyp022d07b2
attcgtctaatgccacttgaactttcaaattcaaaaaccacgatttataaagtgccggagatgaagtacacaaattaacattacatcgagttttaataaaacatcatgcgaaaagccagcaaaaacaaaaggcagcatacagctaatgaagctctactggagtagctcgcaaaaggtccgacttattttcagtagcactctactccatttcttccgaaagagtgaccatcttctactgggtgttgtacatgtgacggatcaggtcaacaacgcgagagctgtatccccattcgttgtcataccaagacacaagcttaacaaagttgtcattgagagcaataccggcctttgcatcaaagatgcttgacctgttgtcaccctgga

SEQ ID NO: 17875 - DNA, 451 bp, Oryza sativa
  Clone ID: uC-osflcyp022d08b2
aaacagccaaagagatcattgatattttaataagcatcatgcataaaccacgcaggttatcaagtcagttttaaggtccagcacaactcttgcacactagggactatgacacacaaagagcggcagcattacaaggtttgcgacaacataatagttattcagtattcactcatgcaccaacagaaacatcctgcatggtatcaaaagacccagcataggttacgcaaacattttggctttggttgctccaacactatgcttcagggcctaatagtagaacattatttcttgccgcgcagctttgttccaagagccctttcaagcttcccgatgatctgctggttcggaatagctttacctgactcgtactcctggatcacctggggcttctcattgatcatctgtgcaagctgtgcctgggtcatcttcttgtccagccttgcttgcatga

SEQ ID NO: 17876 - DNA, 415 bp, Oryza sativa
  Clone ID: uC-osflcyp022d09b2
ttttgtttttttttttttttttttttttttttttttttttttttttttttttttttttttttttttttaaaaaaaaaaaacccccccaattaaaccctgacccagaaaatcatggttaaaaaacatttgggaatttaaaagggaggaaaaccacaacgggcaaagggtttccttaaaacattccaccaataaaaaccccccggttcaacctttatccgggaaattatgggtaaaaaaattcccacattttaaagggatggaagcccaaacgagcaaggggttcccttcacagctttgcccggaagacataaatttcccggtttaataaaaagaaataggggggggaccatgggtcatccgggacttcccgggggcctcgtgggggcccttacaattttaaaaaagggtcctttgg

SEQ ID NO: 17877 - DNA, 483 bp, Oryza sativa
  unsure (1)..(483): unsure at all n locations
  Clone ID: uC-osflcyp022d11b2
cggcgtcgcccgccccttcggcgacgccgtcgtcgacggcatcgacttcttcatcgaccagggcgccacggagcactacgacgagctggcgcggcggctgtacgcgcacaacaaggactacaaggggaggctcggggtgatgctgacggcgacggcgaggtgcgtgttcccggaccagcggctgcaggcggcgctgtccacggggcttcttctcgcggatccacgtcaaggtgtttcggcgacgggngcggtgcgcgtcgaggagggaggagctggagaaggggatggcggcgtacccgcagagccgcgtcctcgtcggcgtcgtcgcgtcgccggaggctgaacagggacggctacgtgtcgcacaaggatctctactacgacgtgctgcagttcatcaacaagctgcccaactatgggggccataaggtctggaacaggtactgggacaagaagaccggatggacggctggtaatgagcct

SEQ ID NO: 17878 - DNA, 136 bp, Oryza sativa
  Clone ID: uC-osflcyp022d12b2
tttgtttttaaaataaaaactcttgttggaattcttgtatacaactatgttataaaacccaaagagaggggcaaaaattaatagagtaaatatcaactgttctttatcaatctagagcctccctttggggtataca

SEQ ID NO: 17879 - DNA, 71 bp, Oryza sativa
  Clone ID: uC-osflcyp022e01b2
tttggggttttttattttttgggggtttatctaaaacgtatctgtttgtgcaaataccaaaaacaggacca

SEQ ID NO: 17880 - DNA, 453 bp, Oryza sativa
  Clone ID: uC-osflcyp022e02b2
atattaattacggtgtatcgtttcaaggatgagttcggatgagtgatcgatcactctccacatacttggatcggtctctctcgcacacgtacaacgacaaggggagacggtacaacagcagcggcaacaaacacgcacgtacacgggtagtactacagaacgcgccaacgtcatgggcgattggtgagaaaacacgcacacctactagtactagctttatccttttttagtgtacaccacacggccgtcgacgatctcatcggctagcgcgatcaatggccgtccggccggccagcttcgagcgttatgcttccatcttcccgttggctgtcccgttggccacaaccaggccgacgccgttcgtcccgttggccgccatcgcgcagttgccgttggccttgccgttgctgttgccgttggcgttggcgtttgcgtggttggtgtggttggcgg

SEQ ID NO: 17881 - DNA, 443 bp, Oryza sativa
  Clone ID: uC-osflcyp022e03b2
aaaaagaatttacatcacatgcctcttttagccacaatagcaagacctctacgttctttgcccaatcagacagcacaagtgaattacacagggtttgaaaagtaattctgggaacactctcttcggaggccatgtagtacccaaccagcaatgctgtcagtactaaggtgtacctttaaaaatatttaactctacgatatcggaaggaaaccgtaaaatttacatggaacatatttggtgcatatgggaagtgagggcacaggcgaaattgtcccatcacaattcttgcccatccaaatctgtcctgacagggtaatcaaggccctgtagaactggcattcttctcaaatcctcttctgagtacgcagggatgaaccaatacctcttgtcatttccaaaaacctgaatgaaattcctcttccggccaatatcatacatccagc

SEQ ID NO: 17882 - DNA, 468 bp, Oryza sativa
  Clone ID: uC-osflcyp022e04b2
ttttggtgtaacagataatgcagctcaattagcagtgaaagaatcgaatcagctggttggctaaatgtcacattcctacaacaaatctgaaagaaaaataatacactcaaagtaggagataaatatatacccacaggcagtgggattcttcagccaacgatgaacaatgaaagaatattatctaagctcgaccatgttcgtgtgacctgccaatccatcgttgacctgcaacgatctcggatcatcgtttcgatacatcgcatgtacaaggagcccacaggccaactcaaggctgaagcatggtcagtggaagtggccgttgccgttatgcttggcagagtcgaccagtccatatccgttgtgaccattatgcctagtggattcagaaaatccatttgtgcagtggccattctgcttgggagagccaattgatccgtacgagtggtgtccgttctgcttggtggagtc

SEQ ID NO: 17883 - DNA, 452 bp, Oryza sativa
  Clone ID: uC-osflcyp022e05b2
gcaaatatcagctgatataggaaatagctgcgagttcagttattctcgtccaagcaaaaatagtacagcttaagttcaggacacaggatatgcgcaaaccaaaagtactatttcaagagacatactgatcgaacattcatgaaaagtatgtaacgcttgcagggagtaacaaaattaatttggccttggtgttgcccactcaacacgaaggataaggttatcataaccataaccattgagcttgctgatagccttctcagcgtcctctctgtgaacaaagttgacgaagccgaaccccctgcttgctccagtcttctgatccaccgcaacgtagacacggctaactggaccaaatgtgcggaatagctcaagtaggtcgggttcacgggtgtcctctgatagattggtcacacggacagagttctcatcattcctacgcctcatgtcatgtc

SEQ ID NO: 17884 - DNA, 449 bp, Oryza sativa
  Clone ID: uC-osflcyp022e07b2
aattaactagcatatttaaatttaaaacgtaactgtttgagcaaataccacgaaatgttcaggcgctaagatacggcaataccgatacatccagcatagcaaaaatggcgaagagcacagagtcagataaagctatagagaactagggctccaggagatgggggccgaatgacaaccatggcgcttagtcgacctcctccatcttgctctcgccggcgtcgtcctccagcggcggcatgtcggcgtcagcctcagcagactcgtcctcgtcgatgctcaggccgagcttgagcatccggtggatcctggtgccgaaggtgttggggtcctcaaggctgaagccggaggtcaggagggcagtctcgaagagcagcatcaccaggtccttcacagacttgtcgttcttgtcagcatcggcacgcttgcggagctcgtccatgatggaattc

SEQ ID NO: 17885 - DNA, 236 bp, Oryza sativa
  Clone ID: uC-osflcyp022e09b2
ttttttttttttttttttttttttttttttttttttttttttttttttttttttttttttttttttttttttttttttttttttttttgaggaaaaattaaaataaaaaaaaaaaggttaaaaaaaaaaataaaaaaaaaaaatattgaaaaaaaaaaaaaaaaaaatataaaaaaaataaaaaaaaattattaagaaaataaataaaaaaagaggaaaaaaaaaaaatataatct

SEQ ID NO: 17886 - DNA, 315 bp, Oryza sativa
  Clone ID: uC-osflcyp022e10b2
tttgttttttttttttttttttttttttttttttttttttttttttttttttttttttttttttttttttttttttttttttttttttttggggggaaacggaaaaaaaaatttgggggatgggccccgttttgtttttaaaatccaaaaggaacactggggggcccaaagggtttttttcataaaaaatttttgagggcgggggcccctccaccttggcctaaaaaaaaactcttagccttaaggggttcctagtttaaaaccccggggaaaatttagagctggcaaaaaaaaatttaaaaacgggttttaaat

SEQ ID NO: 17887 - DNA, 426 bp, Oryza sativa
  Clone ID: uC-osflcyp022e11b2
tttgtttttttttttttttttttttttttttttttttttttttttttacattgaacccagttcgattcaagggctgcaatctttttgcagccaaagacaaagttgcaggttcaatcagggaatcaaactggaacacatacacaaatagcacatttgacatctcctggggatgaccggaattgaaaacttaactagctacagagcccctaggttatgctacagttggcattacattagagggcacctttctttggggggaatttattaacaggattgctaccgtaaaaatctggaaaagactttgtcattttactgatcaaacaatggttgattacttgattgggcaagtattaaaaacaagccaatacaattcattgtgtattcacgtggcagttttgaacaaaaaatgtggatttgtggaaaata

SEQ ID NO: 17888 - DNA, 394 bp, Oryza sativa
  Clone ID: uC-osflcyp022f01b2
aaaaaaacatacctttgggggtcaaaattcaaaaaccccaccgggggggtcatccggggcccccggggttcaggggggcaaagcttttaaccgggggccccaaaaattcggccccaaaacccggggcagggcccgaaccggggaaggctttcgggggggggccgatggaattcggggggcccaggccttgggctggccaaaaacccctggtttttcgggggggggctggaagcgcccggccccgaacttggacgggggggcaaaaaactggggcttgatcccccccggggcgagcccgggggtttgtttaaacagcgacggggggggggggaccactttttttttgggaccggcgcagaacccctgggtcaagggggagccccccccccccccc

SEQ ID NO: 17889 - DNA, 441 bp, Oryza sativa
  Clone ID: uC-osflcyp022f03b2
gcttctaacagcctactactagttgctgtactaaactcaaagaacttaactcacaaccattatagcttccagcccataatttccttgaacaatcatctatactgaacaagaacatctctcaccgacgaagcaataagaaagaatgacacaggatgagcaaccaaaggtacaaatgaatacatcgactctgccacagatatggtggataaccccttgccggcttacacaggaggaaacctaaaagttggtagggatctaggagtgactagatgcacaaaaaggattacttgagtatacgtattccacttccaaacgattatagccactgacagtgctctacaagagccaacatcaccatctatggattggagcgtgttgtctaactcgacgctgaagcctgtgacatttgccttttgatagcttctttgtaagtcttgtgct

SEQ ID NO: 17890 - DNA, 463 bp, Oryza sativa
  Clone ID: uC-osflcyp022f04b2
ccaaataccaccaatttcctgagacatgccaaccaaccaaaccagaagacccacacatgtggccaacaaccccagatgtagtgttcgtatcatcccctagccggctgggacccaaagctgagtccaaaccccaactgaacccaattaccaacaaaaataattgaatggaccaaacatcaaaacctacaaatcaacaatgcatcacagctgcgacacgatccaccagattgaaaagaaaaatggagaagaagaagaattatgcgatgcacgggaagaggagcagagcaagaggacaagggaaaccagctcagaaagatgggaacttggcgcatcgctgcttgaggtacacggtgcagctgtccctcggcacgatggtcggcatgtacaccggctcgtcgcagccctccgtccggtctcgccggaagtccacgacggagacgaagagcgccatgaataggacgag

SEQ ID NO: 17891 - DNA, 455 bp, Oryza sativa
  Clone ID: uC-osflcyp022f05b2
aaattatgtaagaaaacatcaagaccgtattcataatttgtttcttttcgaaatcacacacacatactgagtcagacagacgcaacacatatataggtgctaatagtagtatatataccccgcaaatccacgcgatcatttatcacaaattcttaaattggccatcggcgagatagcccaattccccacccctagttcttaccgccgacgtactgttcggcgtcgtggatgatgacgtatccggccttcttggggctctcggagtcggacagctcgtcgtcgtcgtcttcgccgtagacctcgtcgtaggaaggagcgcaggtggaggcgaggagggaccagacgaggtacatggtcgcggcggtgagggcgccgcagccgaagccgaagaggaggccggagacgacgacgaggatgtccttggcgcgctcctggacggacgaggcggcgtcgga

SEQ ID NO: 17892 - DNA, 403 bp, Oryza sativa
  Clone ID: uC-osflcyp022f06b2
ggagaaaacaagaactctcccttcatgtagggacgtataaattttattcagtatttaattaattaacattagtccccgggatgaggttaaatacagttaaacacttttacatgagcaatacaaatttacaatccctggagaaactacaaagcattttcgaattatcatgcaaccacaactagagccacaaccgtacatatatggatactagctacatgcaatcaagcgtacgtaataagggtataacccatggcttgcaagcttgctatgtatatacgcacaggacatgggtagagctgggtaagctgcatctagctcgatcatgggtgagcttgttcgctcccaatggcatggccactccccggcatgttccccgggctgctccagctgtcgaactccggcc

SEQ ID NO: 17893 - DNA, 432 bp, Oryza sativa
  Clone ID: uC-osflcyp022f07b2
ataggatcaaaacatttctattaccacaactttttaaggatggaatcgagtagcaatactttcaccccaaaatacagtttagcgacaatatcttagaaaagccgcttgctttgccgccatggctggcaagctgagcagagcagctaacacaaagaacacgagatcactataaaccaaacggcaacgaacgaagaaaatacagggtcttttttgtctgaagatacacgaagcggttcgttttcttttatttttagtctcctctcctcctcgatgatgggtgtatggcaatggcaatggcgatgggatcttggcttagttgatgggaaggggctcgccgttccactccttgaggcagtcgagcatggggtcgatgagcttgccctggctgatgcccaagaacaccttgttgcactccttgccgggggacttgag

SEQ ID NO: 17894 - DNA, 453 bp, Oryza sativa
  Clone ID: uC-osflcyp022f08b2
ggggggtaggcgcctttacacacactagaggacagaaccaagagatctccgcactaacgctcgctcaacgctgcgtagaaaacaactcatccttgccaaccaaacagcaggaccactgaggtaccgtacatacactcccaacatgctgttggtacacagcagtagacacagacaaggtctgaagaccttcctgcactacatgctcagcacacgaacacaaagcagcagcccagaccagaactgcaacacacggcaacatgctgggctgatcgcagaacagcagcaccaggcaacaactcatgatgcaggacaactgccaaccatttcttccgagagcgggaaagccctgaaccctctcaggtggaaaaacgtgagacccaggccagcactgactggcgtagggcgtagatcacaggtgaaaggacggaagaaccaacacaaccgaccccttgg

SEQ ID NO: 17895 - DNA, 405 bp, Oryza sativa
  Clone ID: uC-osflcyp022f09b2
agcaatgtaaatactcgcattccaaaacagccgatggacaataatcggactcagagcatcagttttaaccgaacagaaataaacgagtattaaacgactgacatagtgcacattgcgagcagatattaacggtccatgaaacgagagccatggccgggggcaaaacttaacaaatactagaactagatatctcaactgcagacatgcaaaccaccatttgaacgaggctcactttttcttggcggcagccttggtcaccttggcaccggttgggtccttcttctccacgttcttgatgacgccaacagccaccggttgcctcatgtcacgcaccgcaaaacgaccaagaggagggtactcagagaaggtctccacaaccatgggcttggtaggaattattttggc

SEQ ID NO: 17896 - DNA, 467 bp, Oryza sativa
  Clone ID: uC-osflcyp022f11b2
ttgtggtttttttttttttttggtttttttttttttttttttttttttttttttttttttttttttttttttttttttttggatgcaagaactaggggctccattaataataattggatgccttgcaaactaatcaatcattttttcaaacataaaaagggggtggtccatttacaacaaaaaaaaaattcccgctaagaattattaccaaaggccattgatcgatacgaccacccccaattttttgatacaggaaaagaatgcgataattaaccccaaaccaaaataacaaaaaaaaaaggggattgcatgcagccctttgggcaactgaagggggggccccacctcccttagggaccccccctttggacagggccactccacctaattattccggccccttggattttagaagggtttcttcccacccaaaaaaaagcccacggttaattgaaccctgggcccca

SEQ ID NO: 17897 - DNA, 471 bp, Oryza sativa
  Clone ID: uC-osflcyp022f12b2
tttgtttttccacaggaataagtaacagtacctgaagcaaagaaaattagtgcctgcattagacatagcagccttcttgagcaggagcaggaggtgcaagcctaaatgctggtacatcatggattattttcactgacagttatttctgagactacatctccgaaccatcaaagaaatggattactgtgaatacttacagatgctgggatgaagataaacagagagtatccccacatgcaccaaaaccgaacaaggcttgggcgtgatccaaaatactgaaacaggaaaaagaatatagcaggcactgcggcagcataaccatacatgaccgatgctgcccagttgaaatagccaacatcaaagctccatatgttcaggtctgttttcctttgcatcagataagtggcaaagtttccaaatgcagctagcatgaatatcagtgttgttgtgatccataagggcccatacatg

SEQ ID NO: 17898 - DNA, 109 bp, Oryza sativa
  Clone ID: uC-osflcyp022g01b2
agtgataaatgatcgccaccgatactggttaaagcaatagccactgtatgggcgcttcttacggccgctaagacaggggttgagaatgtataggaacgattaaagactg

SEQ ID NO: 17899 - DNA, 486 bp, Oryza sativa
  Clone ID: uC-osflcyp022g02b2
ttcgtgccccgcgccgtgctcatggacctcgagccgggtaccatggacagcgtccgcaccggcccctatggccagatcttccgccccgacaacttcgtcttcggccagtccggcgccggcaacaactgggccaaggggcactacaccgagggcgcggagctcatcgactctgtgctcgatgtcgtcaggaaggaggctgagaactgcgactgcctccaaggtttccaagtttgccattcccttggaggaggcactggatctggaatgggcacactcctgatctccaagatcagagaggagtaccctgaccggatgatgctcacattttctgtcttcccttcaccaaaggtctcagacacagttgttgagccttacaatgcaactctctctgtccatcagttggtggagaatgctgatgagtgcatggttcttgacaatgaggcactttatgacatctgcttccgcaccctcaagctgaccactcct

SEQ ID NO: 17900 - DNA, 409 bp, Oryza sativa
  Clone ID: uC-osflcyp022g03b2
ctggtaccctcatcaggcatctgattaaatttgaataaaccgaacatatgtgtccaaaatcacaagtgagaaccacaggtagcaataggtattacagtctttgaatagaagaaaatgataacagataggccggttgaaaactttgtccacgctaatgaagaaacagcaacaaaaagagagaaacaagcaggaggacggcgataacagctcctcttggcttagcattcttgggtccgaagaattagaagcatttcctgtgcacaatggatgggccaaactcgtcgtactcagccttggcaatccacatctgctggaatgtgctgagagatgccaagatggatccttcaatccagacactgtactttctttcaggaggggcgaccaccttgatcttcatgctgctaggagc

SEQ ID NO: 17901 - DNA, 465 bp, Oryza sativa
  Clone ID: uC-osflcyp022g04b2
tttttgttttttttttttttttttttttttttttttttttttttttttttttttttggggggacccctttttttattccttcgttggggctcactaataaccaccacacgcacactcactcactcgctaactcactccctttttttttttttaacgcacacacaaggcacgtacatccatacacaacatcacgactttgttgttgccacggggggggcgtcctgcgcagaagcagcctaaaaaggggggggggccttttcccccgggctcacaaacaagcgaaaatgggatcgactaaaatcggcccagtggaggttccacccctttgagcccggatcctccaactttcccaaggcccttgggctaaatggctgggactgggccaccacatttgcccccgccccggactccagaaaccgggccttttccggggccccacggaaggccagagccgccttgaaaacc

SEQ ID NO: 17902 - DNA, 448 bp, Oryza sativa
  Clone ID: uC-osflcyp022g05b2
aaagcactgaactgaatggatggatagtcattatcgacagtcacatgttacacacaacagtttaactttaaccacaccacggtaacgggggttgactgactatagcaaactcttgctatagtgcaacatttcagtataacgcgatcatactgaaacattttccgtcagtatcatctaggaaactgcaaaggtgttacaaaagttgccggctttgccatctggacaaaacttgttcaagcttctgattcaatttctgtgaatgatccaacaattcttggttcttctgtaattgcgcaaattttctgtagcaaaaaatggcccttctggcctcaacagaggttgccttatctcaactagcatagtccacccaccttcagccaggtgaggaacctagagagtatgatcagtagactattgtgcagcttttctccccctgcgtttaggcctt

SEQ ID NO: 17903 - DNA, 448 bp, Oryza sativa
  unsure (1)..(448): unsure at all n locations
  Clone ID: uC-osflcyp022g07b2
agagatgaatcgaataatttattaatgaatgtttcgtccatttccaccccaccgaatcacacaaataacaatggtcgaaagaaattaatgaattattcacaaaaaaaagtttacttttaatgtatgtatacgaaaagaatgcaaagtggattattttaatttaggttttgtaagttatataattaaatatttatttacgtttttattttaccatcattaaatgtagattctcattttgtgagctatttgtttttattcaaaatttggttgcaagaatgttacgttaattatttgttttggaaaaaaattatttttctgtttgatttgaaaaaaaggcgcagtctattaatctattccaatttgaggagctcaacatcgaaagtcaaggtggcattcggtggaatgacaccncgatgacctctactaccggtagcgtagtctggagaac

SEQ ID NO: 17904 - DNA, 433 bp, Oryza sativa
  Clone ID: uC-osflcyp022g08b2
gacacatatttagatatgtatttgattccagaaacctactcctaataacacaaatgaatacatgaatgccatattctctataacactccaagctagttgtccaaaaggtgaactccaccttaatgctcatcaaaaaaggaacatgttggttatatgtaggtccagtcaccgctcccttgcttaaaatttgtggtcccccagggaacctatatcctaaatgctatgtacagcagctgcgaagcagtatggatggtgatagacccacacttgaaaaaatgaataaaatgaaacttaaagttgaactcatgagatgatttactgtatgccaaacaggcatttaaccaaaccatactcaacataagttcagccaccaaaagccagagtgtgttcaacgccttagaactcatcaactcaagcatctggaactgatagg

SEQ ID NO: 17905 - DNA, 431 bp, Oryza sativa
  Clone ID: uC-osflcyp022g09b2
tgtgtttttttcagctatactggcttcattgcttggctgtcttgtactaagcactagcacacaagagcaccagcccctttgacaaattactactatttctttcaggtacaccgacaaaacctgattattgtccgacacttgggatcccaattctttctagattggccaaaccgggccttgttgttaacttacccaaaccaataatgttaatattcagaagtcagatgcacaaagaataaataataataccgtcaaacatcaagcccacagagaggatcattcacccccaaggatgaaaaaacaaggcagatcatgacaggcataggccagcagcactgatgatcccagcatatgcattaccaatcattttcagcaaagcacagcagcatgtgatcagacatagcaaccatgaccagatttggagaataata

SEQ ID NO: 17906 - DNA, 468 bp, Oryza sativa
  Clone ID: uC-osflcyp022g10b2
ttttttttgctcaggtaggtcatgcatcaacaacgtgaaaatgtctagacatcacagggagaattacatgaccaaagaaaagacgatttatcacagcagtcgcacaaaaggagaacaaatttataggttcattacctgttcctatgaataatggcctaacctgaaacatggcaatctctagctgctcctgttgtgcgagagctaaccttttctatactgggacttcttagtggcaccaaaaaggagtacaactccgctgctctccagcctttgacaacagtattactcacacttgatggatttgtatatgtgacggacaaagaacaatgcggcacggaaaccgatcatgcccagcatcaggaagaaagcatagcagatgcaagccatgtagccgaagaagaatgatgtctgcataaatccagacatatctgatcgtgcataatagtagtacagacaatacccatagac

SEQ ID NO: 17907 - DNA, 467 bp, Oryza sativa
  Clone ID: uC-osflcyp022g11b2
gatatgaactgcatcttcacttctatcacacagttgacagaattcagagccttcccaattaaatttcttcagttgaacagccgattgaatctttccccttatagccagccataaaaagtgtttttgttttggaggaatcgggctagcccagataagttgaaaatgtgggtcaattatccctctaaatgtgggtgttgcaatgttgtagtatagcacttcttaaaaactaaaagaacagttataaagaaaaaaggagtcctttttgctcctctatctctcagatcttctgatcgagcagcagaattgcagctcaggtgctcgtcggcgtcatcaccgccttctcctccttggattccaccttctcatcttctccggcgccggtgccattgccagcgccaccgccaccggcagccgcctcctccctgaagcgcgcgtagatgtccccggcgtagaacttcctggtccgc

SEQ ID NO: 17908 - DNA, 471 bp, Oryza sativa
  Clone ID: uC-osflcyp022g12b2
ttttgtttttttttttggccggagaataccctgaaaccagcaaccagattatttgctaaccgctgggtgaaccaatcactatttaccacagcaacaggacagctagaagcctaacatccagagcagcagagctccttgttaaaggaaggaacaattctagtctagtttcaattaattttacagctcaacaaaaggggttggtcacactgacaaaagaaaaaagactggactgatcgattcactggtaaaggtttgatcagacgacttcgacctttcgtttggaagagactgatgacctccattactttgctcttgtcacgctatatgctgcctgctatacctttaatttcctgtcgccaggcaaacatgttttgaggaccaaggagaaatgtcatcaaactagccagcactgcaatttgcttcacatcccattttagtcggctggtctgttccttgatgcttgcttgcagc

SEQ ID NO: 17909 - DNA, 461 bp, Oryza sativa
  Clone ID: uC-osflcyp022h01b2
agtaatctcagtaactgatataacaaattctctacaacaaggtgtgtggatcaatacatctcaggttagtatgatctgttctctgagatcagggggcaaagagactaggagcatttggaacattttttgggcgttttatgtgtggatgcaaatacagtcatgaatcccaattaactaatcactacaagaaaccacccggccggcccgccggcgcaaagacgaaaacgttgaaacgccggcgacggccaagaaaaaaaaaatttgccggcttcccggcaaaatttacagtggtggtgatggcttctttcctttttatcaatggtggtggtgatggcggcttgacgacgaagacgacggcgccgtcgggtcgaaccggagggtggcagtgtgttgggcagcagctgctgtcgtggcggctttggagaatcctgatgatgctgcagcggaggacgacgacggcg

SEQ ID NO: 17910 - DNA, 461 bp, Oryza sativa
  Clone ID: uC-osflcyp022h03b2
gtcaagagaaatgccaacgaccaaaaatggttaaggcagcaaagaatgtattgatctctcctgcagctcctcaaagcactgcttgattgtgtcaaacattacagtttcaattcccgtcaacacaaaatcaaagagaatacctaagaataatttgagtgataggactgaatacttttgcaccaaaaaatattgcaaggtgtagctttagctatgtcactactgaaataccttagcatgccagcaccattgaataatcactgcgaaaaaaaaaaatactgcaaggtatagctatgttccatgcaggtcattactcgaatcatgccacgccaccttgctggctcctctgcaaaccagttcaagtgttaatttacgtgtaaagattagtatatatgttctaatatcagtaattcacacctaatttatattagtggctatgatatgttctaatttacacctaaata

SEQ ID NO: 17911 - DNA, 237 bp, Oryza sativa
  Clone ID: uC-osflcyp022h04b2
tttgggtttttttttttttttggttttttttttttttaaacacgaaaacacgaaacacaacaaaacaacgaaaaagcaaaggaagcacgccaaaaaaacaggggcacccgcccaaaaacaccggtacaaaaaaacaccggccaaaaaacgggaccagccctaaaccaaaagggcatccaacaaacccgacagacaccagggcgaccaggacacaccgacaacaagcaggacaagacg

SEQ ID NO: 17912 - DNA, 467 bp, Oryza sativa
  Clone ID: uC-osflcyp022h05b2
ttttgtttttttttttttttgggacacaaggaacataactgaagggcaaagtgtttacattattatgattgagcccagcttgcaacaagtactaaaagtttctactgaggatttggtggcctggagttggcagcagaaaccctcgatccccattccagcagctctttgctggtgtcgtccttgtgcgcgatcacctcaatgaagcacaggcagtccttctcccccagcgccatcccgatcgcctccgtcagctcctcctcgcacttcaccttagaagtccagcatttgccctctccattgtggatggcatccacaaggccagtgtagttccagttcttgatgacgttgtatggaccgtcatggatctccacctcaatggtgtacccgccgttgttgatcaggaagattatgctgttctgtgcacagcgaatcattgttgacacatcctgtgccgtcacctggaaact

SEQ ID NO: 17913 - DNA, 430 bp, Oryza sativa
  Clone ID: uC-osflcyp022h07b2
ttttgttttgaataaaatcaggggtgatgaacaatttttccctgcttcctttttcccaagtccaggaagaatgaattgaacaacaagattaacctaaggctagaatgaaatcgcccaaatcgcagcatcgatgcgtagtcatgatcatacacattgaccagtactgatctaacaacaaccatgatcagctggtgctcgaggtccacgaaaggaaccatcttttttgctcggcaataatggccgtcatttcgcgccgacgccgagcgtgagctcgagctcctcggcggcgacctcgtggatcctctcgccctcccatggcgtcaccctccccttgtcgaactcgaactccgcgccgcctcggccggccgtcccttttatctccatggagttggaggtggaggcgcccgggttgacgaggttgtaggtgggc

SEQ ID NO: 17914 - DNA, 232 bp, Oryza sativa
  Clone ID: uC-osflcyp022h08b2
gtttcataaacaacggatgtatctttttctttcttgttttttccttctttctttaaaggaactgtaacaccgggagtagtagccttttcctcatacctatctccccgtgcaaaaaggacacgatctatgtacacctagtttgatcaatcctggcaattaaaccggacgatttaacctctttactattacaccgtcgttctagactttttttaaccaaggattttgtgggggg

SEQ ID NO: 17915 - DNA, 477 bp, Oryza sativa
  Clone ID: uC-osflcyp022h09b2
tttggtttcagtctcagatcagattggattgataagccaagcatcccaaattctcaatgtcacaatgtacaaattggcttacggcacagcagcagtaagcaacctgagcttcggcgagatcctcacgaggccagggtggtggtggggcagttgtcgacgccgcaggcgaggatgtcgcggtagtcgcgggagacggtgaagctgtcgtgcacgctgccgtcgcggctccggacgtactcgaacagcagcgccgtgtggttgaaggccgtcagcttggcgaacccgtagtcccggtcctggacgtggttccaccgcgcccgtacgccggcgtagtccgccaggctcgccccgccgccgcccaccaccacgtgcgtcgtctccgtgaacgcgccgctgtagtggctcgccgtcttcgccacgcacacattctcgtaaactgggcaggttctcttgtaaccatggacattggcgtacatg

SEQ ID NO: 17916 - DNA, 458 bp, Oryza sativa
  Clone ID: uC-osflcyp022h11b2
aataaagcacgtgtttcctatgtttttgtttattttgtgtacttagttatactagtgcgctcacacatatcattgtttttttttgcgctaaacactagtatactgtgtcattttagggtatgacttatgcaagcgtaagtgactaaacaaacacgaagatcaggtaaaatagcaaaacacaaaaatgtgcctagctgaccattttccaccacacagaccggggcccatgtctagctttcttctgcgttaggttgttcctccttggcctcttccataggaggcgttgcggaattcatcttggccctcttcatgatcagtgtttccactaaaccttccaagcattcgtctgcgtgtctcttcctgttgcaccgcagcatgatgctatcatgatcggccggttccccgtcgatctcgtcatgcagtggaccgatttcaccgttcctcggcatgagcttatt

SEQ ID NO: 17917 - DNA, 481 bp, Oryza sativa
  Clone ID: uC-osflcyp022h12b2
tcgcgatctagaacgtcgattgcttctccctgctctcgctactagactagagagtaggtagagctagctttctagctcgtggatcgttaagtttgtagtcctgcccgggcgccggcggtgaggtcgcgatggccggcggcgcggtggtgagcacgggggcaggcaaggactaccctggcaagctcaccctcttcgtcttcttcacatgcgtcgtcgccgccaccggtggtctcatcttcggatatgacatcggtatatcaggtggtgtgacgtccatggacccgttcctgaggaagttcttcccggaggtgtatcggaagaagcagatggcggacaagaacaaccagtactgcaagtacgacaaccagctgctgcagaccttcacctcgtcgctctacctcgccgccctcgtctcctccttcttcgccgccaccgtcacccgcgtcctcggccgcaagtggtccatgttcgcccgcggcct

SEQ ID NO: 17918 - DNA, 397 bp, Oryza sativa
  Clone ID: uC-osflcyp023a01b2
tttggtgtttttttttttttgggtgtttttttttttttttttttttttttttttttttttttggggaggcgggcctcgttgcttatcgtccctaaattaaatgggggttccggcttaacccctgaaacctccctcgttttaaaaaccgattccaaacccctgggtgttcacttcaccccccccacaagctggggggggagcctcttctgaaacaaaaccacccgcggggaactttatttttttgaaaaagggggaatcttaacccgggaaaactcatcatcatggccaattgctttatcaaccccttccagcccttatcccccaacaatgggtggtcaaactcctttgaattaacccgttgctcccgaaggagccccgggcttttatggcccccccc

SEQ ID NO: 17919 - DNA, 411 bp, Oryza sativa
  Clone ID: uC-osflcyp023a02b2
tttgtttttttttttttttttgggaatggcaccatctctgttgcataaagcttgaagaaatgtagagatagttggcagtttctcttcttttgcattaagaagattcttgcatttgccgttcgtttacacggctcccggatgcgcccacgcgaaccgatcaatcgatcggtccggccatgtggtccggttcagttttcaggggacgtagtacatggggttggggatcttgaaaacgcggtcgccgacgtagtcgccctgcagggcgctccactggtcgccgacgttgccgcggatcctgtagcccttcttctccaccagcccgtttctcatcgccgacttgaacaccgacgagctttgcccccggtactccgggctccttatgatgagccctctcataccccaagaacccct

SEQ ID NO: 17920 - DNA, 453 bp, Oryza sativa
  Clone ID: uC-osflcyp023a03b2
tttggttttttttttttttttgtttttttttttttccgagctcaacatcgccgttgtattttttacctgggccctcacgctcacaaaataccgggacgcccagttacactaactataccactacctacaccaactataatcacggctacgattacaatagcatgcccactaccggtggcgattcctcgtacgcgtacctttaagcattcgcccccctgggggcatcggatgccccggtcaccggggggggaacgcagacaacagccacagaccccattacagacaccgtcgaagatcgacatatcgcgatcggacggggtatagcatccattggacaacaaatccatggataccaaggggggggattcccattttccctatctggggggttttccacgcaggccgatgggcaatggcagggggagtgtttttacggggacgatgggaccgttt

SEQ ID NO: 17921 - DNA, 399 bp, Oryza sativa
  Clone ID: uC-osflcyp023a04b2
tttgggtgataaccgcatatggaaatatcgatccatgagagtatgtatgtcagttcgaaccacttcactcgcggcagcgaggaagtcgaaaagcttattcacgactcatctagcaaaacttgacgataagcctatctcaagttcttcatacaagcattgacattgcaaagttacaccgagaggtctgaaacaaaagtgcagactgctgatggagacaagccgaattagcttacgcttcatcaagggcaagaacacctgggagggtcttgccttccagcaactccaagctagcaccaccgccggtggagatgtggctcattttgtcgggcagcccagccttttcgaccgcaagaacggagtcaccaccaccgatgatggtcgtggcgccctttgggggag

SEQ ID NO: 17922 - DNA, 307 bp, Oryza sativa
  unsure (1)..(307): unsure at all n locations
  Clone ID: uC-osflcyp023a05b2
gggcgctcttgccggacccgggcaccgtgcagcgcttcccgccgccgtgcgccacgcagaagctggtgccgccgtggacgctcttggggcagagcccgccgccctcgaacatgcaccgcttcccgccgccgtgcgccttgcacagcggcgtgctcccctccgcgcccttgaggcacccgtcgaacacgcaccgcttgccgccgccgtgcgccttgcaggacagcgtgctcccctgcgcgccctttcggcagtccgggtactggcacccgncgnccgtcgtcgtgggagatgcagagcccgacccttc

SEQ ID NO: 17923 - DNA, 463 bp, Oryza sativa
  Clone ID: uC-osflcyp023a07b2
tgtttttttttttttttttttttggcgaacagcccaatggtagacggtccatgggccgatttattccaaataaatttgaaggtacactgaacatgacactgactgacagtacagatgcttcatggatcgacgatcaatctggaccgtgcacacacgagcatactgactcaaaattcagacagatgcatagctgcatatactgtactgaatcgaaaaaattggaaaacgaagaatactcaacacatatttaccttacagtttatgtgcggaatcacgcacccaatcccaacataatcactcactcactcacacagcaatatatagctacgtaccatgcaataataacacatacctcacaaaattcaccaataatgcaggagaattaatcaatgtaatccaccatatttcatggcttcctgatgacagccacatttcgaatgataatttattccattggtagctt

SEQ ID NO: 17924 - DNA, 393 bp, Oryza sativa
  Clone ID: uC-osflcyp023a08b2
tgtgtttttttttttttttgtttttttaatttaaaaaaaaacagtacaattggtgactttattatgttcaggggtagcttctagttttaaattacatgaaaaacaattgaacacacatgtacactgagccactttacactttgacttgagtttccaaatccaaaggaccaaaccctgacattgcaaaacacacgcacgcacgcacgctcgcacacacataaaatgtttaaattaagatttgatgaatttgaaatcaattaattaaaacacccaaattaattaataatttagtcgtcgtctttaacgactatctagtgcttgtgctcgaagtcctaggtggcgcgggtgggctgttagccgttgccatggcggttgttggggaacaccatgaag

SEQ ID NO: 17925 - DNA, 269 bp, Oryza sativa
  Clone ID: uC-osflcyp023a10b2
ggtggtttttaaattttggggggttaaaaaacacctagctattgaccaaaaaactgatcacccggggtcctattggagcataacccatgtaataatacatactggccaatggttttttcccacaccttgtacagctgcgtgctcatatacaaagacaaaactaactggttgaacactcaccggttgtcaccctggtgcgagtttaccaaccaactaaaacatttatactacttgtagcactctggtaactggatgatcaatctatcggc

SEQ ID NO: 17926 - DNA, 344 bp, Oryza sativa
  Clone ID: uC-osflcyp023a11b2
tggggttttttttttttttggggtttagctagcacaacaatttcatcattatctttctccagccatcacaaagcaaattaatatcgttccaaacatttaaggagctcatgaatccaataatccggaggtttttttaaaaggactcatctcaacatccataacaagcaaacgatagttgtttccgacaccaacattagaccataacgaggcaactgacaaccatagactagaccaaaaataccggggactgcatagataaaacatcagtggccagcagaaggaaccgctcagcacttgaccttcttcagcccatgagagaagtaaaggaagggtgggtcgggggc

SEQ ID NO: 17927 - DNA, 396 bp, Oryza sativa
  Clone ID: uC-osflcyp023b01b2
tttgtttcagtgaatgcagatgccggggaccttccagcgcacgggcccctggcggcgctgctcgtcgggcatccgccggtacgcgcgccactcctcgagaaggttgcggaggtcgtgcagcttggcgccgaggccgacgcagcagttggcgtgcatggtgtagagcgtggcgaagtcgcgcgtgttgctgcagaacccggcgacgtgcgccgtgtccaggaactggatccgcacgccgggccgctccaccagctcccgcttgatctcgttcagcacctgctgctcgtgcctccccgggtacgacgcccgcgcggggcgccacgccttcatcacccccaccgggcggcggctcgaccgcacgtacaggaaccccgtgttggggaagttggccgggtt

SEQ ID NO: 17928 - DNA, 503 bp, Oryza sativa
  Clone ID: uC-osflcyp023b03b2
tttgcggcccgccgacgaagatgtcggccgcctcaacgatcttgccggcgctgtccttggtgaggcagcccatgaagccgatgtcggcgacctgcacctggccgcagctgttggggcagccggtccagtgcatccgcaccgcccggggcaccgacacgagcttctccacctgcgacgtcaccagcagcgcccgctgcttcgtctcgatgatggcctggccgcagaactggttgccggtgcacgcgacgaggcccttgagcagcagcgacggctgcggggagaacttctgaagcagcggctcggagagcagcgcctccaccttctcgttcttgacgttcgggatcacgatgttctgctccacggtgaggcggagctcgccggagccgtactcgtcggcgaggcgtgcgagctcgaacatgtccgccgcctgcacccggccgacgggcacgtgcaggccgacgtaggacatcccttcctgcttttgcgggtgcacgccgaggtag

SEQ ID NO: 17929 - DNA, 193 bp, Oryza sativa
  Clone ID: uC-osflcyp023b04b2
gcaaagaaaccaaacagattggattacagttaatggcatgttgaaaaggcaggtgccctgtctaacaggtaatgcggtgttgaacacattagaccgcaattgtggaattgactagaaaattgaacttagaggaaccatgtcatggaaattatttagcaaacataataacttttcctgtataatttaaccttgc

SEQ ID NO: 17930 - DNA, 450 bp, Oryza sativa
  Clone ID: uC-osflcyp023b05b2
atcatgtctaggatcagagatcctggaggcacccagtaccacatgcatttctgtatatcccttttgtgcacacaagactgacatattgaggagagcagtttgaagccggggtatcacaaaaggttgttgctctagaactccagcatgcggcctcggaggatagcctcagcttttctgacttcctgcactggtccaatgatgaataccctgtctggaggtccctttgcaccaccaatatggatttcaacattgcaagatgctttcacttccattattgatgatccttttctgccaataacacgccccattttgccaggaggcacatccaagactgacaggatatccacctcaggaacataaacatcaggttcaatttcatcagggacagttggaagaggtggccaatccgcatacttgttgtcatttatgcaaaagcacctgcagtatagc

SEQ ID NO: 17931 - DNA, 368 bp, Oryza sativa
  Clone ID: uC-osflcyp023b06b2
ggaggcgaaaattttcaagctctaatagagaggaaacaaaaaacattgtcttcttgcccacaaacgcatgtaggtaggtagaaaggatccttcaaaatatctttcagaaatgacacaattaagttttgctagtctcagtagagaagtgactactaattactgtcgattgctcaaacagaacggtcgcacaatgccgatcgcaacacttgcaaacaggagctgacttagaccttgaatccacggctgttcctcctgccacgggccttctcgaacttccttcccttggagcgcacatatggcttcgtgtggctgggcggcacaccaggagccttaccaaagtgcctgacggcctcacgggcattttttgg

SEQ ID NO: 17932 - DNA, 457 bp, Oryza sativa
  Clone ID: uC-osflcyp023b07b2
aagaggaatggaccacagtctcactgataaactgtttcatataccattacaaaaaaagcatggatatgactagatctcactggaaaatgaacatgcccacatgatgcacaagctggctgcttgctattcattcctccatggacagatggactaatctagtgttacatcagagggataatacattaatccatgcaggggtcctgtagtgacagacagcacaatggcaagaagaatatgtgaacatggatgagcataagaagatgccaatcatctcgggctggctgttgcatacttgcattgtccaaagtccaaacttgcagtgcagcattctgcttggaaattatcagcatctggtgcgcctcacagaatcttgcactgatcatcgtcatcgttgtgcactaggagtgcatcctggagacttgttcagacaatccattgaccgaccctttcttttttt

SEQ ID NO: 17933 - DNA, 445 bp, Oryza sativa
  Clone ID: uC-osflcyp023b08b2
aacaatgttgcctggtacaccggtcagtttccagctcccggacttatttttaataattcttgttttgacaggaaatagtgacaatagtatcttgcatttcaccctccagaaatcaggtgacaagattgcgcaaatttgtttgcacaatgcaatagaaatattatataagggttttatttcactttgacaatcacattttcaacagaaaagcaaccacgaagcatgactgccagagagaatttcggtggcgatgaacaaagaaccatatcatcagttacaattgtcttccaagcaaagaataacacattaacaactagcacacttcctctaccactatgtcatcatcatcatgcatccaaggggggcaaagcaccgaattaacagtgtcactgaaacatgaacaagaaagaaacaagaaagaagaacaaattccttttacaaacac

SEQ ID NO: 17934 - DNA, 482 bp, Oryza sativa
  Clone ID: uC-osflcyp023b09b2
gtctaacacgcgcttttattaatacaggcattaacgtcagccatcccaaatttcaccagacgtggctcaagttcacaaatcaaatggcgcaacaggacacatttcacaaatcaaacagcgcagcaggaaagtcataacagtacagaacacaggaataacaccatgggagtagcttttatttggggcaatatagtgacgagaagcatacgtagcagtgacatgccacagttgcatttcttcgaaacgaagagcagcggaaagctcttcagagcttcgagatgaggccgttctggatggctttgggcgactcggcttccttgatgtcagcgtcggaggagccgggaggcacgtcgaccgccggcgagcagttgaagaacccatgtggcatgagcatgaagccgatgcgttccactggcatgacaggccagtcctccagccttgggatatgggtgagcccaaacacataccagagaacaatgtca

SEQ ID NO: 17935 - DNA, 508 bp, Oryza sativa
  Clone ID: uC-osflcyp023c01b2
ttttgtttatcacacaaaatggacagtattttaacgttgccacacatagtccagcttccgatttcgagtttccaacaggaaacaaaaatactatacaagtacaaccatttggaagaaatactaccagccattgctataaaaactctacatcaataatgcatcaagacaaagctgcacaatctcttcgcggacatccgatataaaaagaagccaaagctgtacataaagttttgagaactaaagcacacaaaactacgaaagaacaggtgaactctcgtcaaggccagacactccataaaggctgagtaagcagtctacgcatgtgcattctgtaactcctgatagagcaaattgatgaattcgtcgttctgaacaagcctcaggagagcatctttaactttatccctcgaaataacaggctcatcgttgtgtacaggggtaagtgatgcaagtggtgttggcggcggaaggggttgaagaaggggtgtaccatgtccatatgcttgac

SEQ ID NO: 17936 - DNA, 69 bp, Oryza sativa
  Clone ID: uC-osflcyp023c03b2
gaagttgcaaaccaaagctttattagaagttggtaccggcacacaagctagcaccggcccttacaacaa

SEQ ID NO: 17937 - DNA, 493 bp, Oryza sativa
  Clone ID: uC-osflcyp023c04b2
gcagctccggtgctgcgcctccaccgtcgacgacggcgtcgtctccgccgcggcggcccccaagccccgcctccccagggtcgtcggtatgggttcaaaactcattggatgcggatcggccactccatcgcttagcgtttcaaatgatgacctttctaaaatagttgaaacatcagatgaatggatcgcagcacggactgggattcggaataggcgagttctttcaggaaatgagacactgcgcgagctttcagtacaggcagcaaaaaaaagctcttgagatggctcaagtaaatgctgatgatgttgaccttgttctcctttgcacgtctaccccagatgatctgtttggaggtgctgctcagatgtgcacaattttgcattaaaaacatctggtaaaaatataaacaggtgctggcggaggtgggatgcgcaaatgcatttggctttgatatcactgctgcatgtagtgggtttattattggttaattac

SEQ ID NO: 17938 - DNA, 399 bp, Oryza sativa
  Clone ID: uC-osflcyp023c05b2
aaggctagacctggtgcatgcatgtatttcatcgagaatacaatcgggggttttctttaccacaaaaaagttggggctaatcatgtaaaagggggtgaagggttatggacagcaaagtagggttagctgattacattgacaggtaaacctacaggtaataacaaaagaggatttaacctaaactagatgcaactttgtgggtgacttctactggcgtgcaacaaaagctcagtgtccgccaagatcacatgggtggggtgacgcacgtgccgtgccgccgtggcgcgccagagcggccgaaaggttgggggaagactacgacgacgacgaggagcttggccacgcgcgacgcgggccaggctggctcttaggacagcaggacatggagcgaggcgttct

SEQ ID NO: 17939 - DNA, 442 bp, Oryza sativa
  Clone ID: uC-osflcyp023c07b2
aatacacaaggaaaagaagagccgcgatgagaaatgtgtacattacaaaggcagctgggttctgcttttaacaaccatgtccgtgccctactgaaatctcagttttctccttatacttcatggttgctaatttacatggataaactctccagctctttgagaaagcggtttcaaagatcatatacattgctaaccaatctatcactcgtgaacaaatatgtttgtagttcaattcgtcaggcttccttacagaacaaaccacaaatcaatttgagagctggaatcttcctgtcggtttcctctttcgccatccaaatattgcatagtaaaagagtgtgagtatcgcaagagccacaaagccatactggaaaacattgtacttgtagagatacttaattccacggagagattgcagtgtgtggccaaagatctcctgagctgc

SEQ ID NO: 17940 - DNA, 410 bp, Oryza sativa
  Clone ID: uC-osflcyp023c09b2
gaagcattccagatgtcaaattccattatttgtagcgaggatgatgctaaggcagaatcgaaaagtagaggagacacacgatcgatggtacaacatggacaaacacctagaagtgacattgaatcgagctgaactgaatagctgatcaggtgaagcgaagagagcagagcgatttatgtacggtccatggaggcgggtggcgatctcaagatatcaactctacgctcttagaagcctgtcatctctagcaggtaggtgcagagcttgctgagcgcgctgacggtctccctgtacgggccgaccaatgcgtcggcgacgaactcgtcgagctccttcctgccgccgcagattccgccggccttgccgacggccttgatgaccacgagcgtggggccctggaatccgatgcc

SEQ ID NO: 17941 - DNA, 483 bp, Oryza sativa
  Clone ID: uC-osflcyp023c10b2
ttggttttttttattttttgggtttaattttttttttttttgttttttttttttttttttttttttttttttttttttgaacccacggggaaaaatttaaaaaccaaaatcatttacattttaaaaaaatttcccctaaaaaaaattgtccagcaggtttatttaataaaaaagccaaaaaaacccactttccttgggggggtttgccccaaataacaacctatttttaagcaaggggaggggggggaaacagaggggggggggttatttctctaaagagctttttgaacaaaaaccttttttgggggaagtttgtaaaaaaaaacaggtggttgagaaggccactgattttttggggaaaaaaaaaatttcggggtgcaatccccacccctatcaagggtccttggaaccggaagcccttaaaaaagaagaacctttgaatttttccctaaaaaaaaaaaaagggggggaccctcacccttt

SEQ ID NO: 17942 - DNA, 407 bp, Oryza sativa
  Clone ID: uC-osflcyp023c12b2
ttggtttttggaagtaattgggtatgctttttatttgaacgagatgatgcaaaagtttctgctgttttgggctgaacatggtccctgtttaatcacaagttgcaagtatggtggaagggggtgtgagttcacagccgaatcagatggacaccatgctttctgtctacttgacgaatccatcaccggtccagtccttgtctgtttccacgcccttcctaatagccttcctttgggtgatcgcctccctttgccgatgtaccaaaacggtgtgtgtggtgaaataccgaagagaggccccctttaaattttgtattgaagaaaaagtcggttggcttataaaattctgcagctttgctcaaaggtttttttcaaggggctaaccctgcattattttgccccttcctacc

SEQ ID NO: 17943 - DNA, 527 bp, Oryza sativa
  Clone ID: uC-osflcyp023d01b2
ctccttcaaatcggccatgttattgcatcgcaatatagtgtaggtttacaaaacattaattccaagcatttgaattacatacattatcataggataggtaacacccatcgacatgtactaattcaacctcttctctaagaaaattttgaatggatacagaaacagaagcgttaaacaattaattcacagacgatgataagcagcacatcttagacattggcagcccagcaatttcgagtgtgcgtcctgagaagacgagcagcaagatcactggggattaggcggcctgctgttggcagccgagaccctggatccccactcgagaagctctttgctcgtgtcatctttgtgcacgatgatctcgatgaagcagaggcagtctttcttggcgcccgtcgccgtcgcgatcgcctctatcagctcctcctcagtccggaccttctttgtccagcagttgccgtcagagttgtggatggcgtcgatgaagccggtgtagtcccagttcttgatgacgttgtaccgcccgt

SEQ ID NO: 17944 - DNA, 525 bp, Oryza sativa
  Clone ID: uC-osflcyp023d03b2
cagaataattcgacggaactcaatgtaatagctgtttaattcagaaacatgttaaggctcaaagtacagtaaaccatttaactgtgaaatcataaccaaagctcaataactattgagctccggaattacaccttacatattgggatagcaaccacagccctaaatacccatcgatccatccaaagctcccctagcttatgcaaatcttgttaaaatttaggccttgctggcaatgttgctggacagccagtccaggccctcgtacaatccctcacctgttgtagcacaagtgctctggatataccagtgtcgctggcgaagggagtgcagtccaagcttatcagtgatctcagcagcattcatagcgtttggcagatcttgcttgttagcaaagacaagcagcacagcatcacgtagctcatcctcgttcagcatcctgtggagctcatccctggcttcgacaacacgggccctatcattgctgtccacaacaaagatgagacccctggtgttctggaaataatg

SEQ ID NO: 17945 - DNA, 396 bp, Oryza sativa
  Clone ID: uC-osflcyp023d04b2
ggatggataagaggatgcacatccacatccaaccttattcatagatagctaatcaagtcattacacataatacagcacaggtacaaacacagacagacggacggacagacgacggtatatatgtcctaagattaatgtgcttacagcaagttaggcatgataagagatattatgagcatgatgggtagggtacacgtatgtatgtatgtatgttgctgtgccacaccacaatcataccatacatacaagcaagctaaactgatgcagagcctaataaccggctgtcacccagcaacgtcagttccttggtcgatttgattacacaatgcaaatgcgaatgattcctaaaaggcgtacatcacggacaaggggaggaggatgatgattcgttggggg

SEQ ID NO: 17946 - DNA, 424 bp, Oryza sativa
  Clone ID: uC-osflcyp023d05b2
ataatatgaaacggagggagtagctctgaagctgctgctgatctccatcttcaaattaattcagaatgttcctcttgtgcctgtcatcatctccacaagatttgaaataccgggggtctatcaccatctgcacaagtcttgggcataagatggtcctggcttagttagcttacaaaatgcaaacgcacactttattttgagcagaaatttcatagacacagttgagctcatatgcatactttacagatgatgggcacaacaacgttttctactgactgtcagcctgaccactacgaaacggctgctccaggtcttgcagcttcgagcagtgcctgatgtccacattctttatccctgcaatcgactctgatcctccaactgtaaccagtccctggcaacagacgatcttcaaggtctctattga

SEQ ID NO: 17947 - DNA, 463 bp, Oryza sativa
  Clone ID: uC-osflcyp023d06b2
ttttgttttaagtacgagtaggtaaaagtggccatgggtaccaacagaacgggaagtatgacagtttccatagaaatggatccagtccacagcaattagcaaaaataacaatacatgctcctaatcgatacatgtgctgttccatgttacatcatcaccaagaagggaagggaagggaagtgagccaagccaacaaagtcctggctggctggtgtctaattcattttcttcttatcacgacgatgatagtagatgtaattattacttaatcgaaggaaggagcatatatatatagcgaaagaaggataaggcggatatgaatgatgatggatgggctactcggagcgggcggcgaagcgctccaccttaggatcggagaggttgatgccaaccatggcctcgccgagcccgctgctgacctccggcaagatcttggggtcgctgtagtgggtgacggcctgca

SEQ ID NO: 17948 - DNA, 436 bp, Oryza sativa
  Clone ID: uC-osflcyp023d07b2
aagtacgagtaggtaaaagtggccatgggtaccaacagaacgggaagtatgacaggttccatagaaatggatccagtccacagcaattagcaaaaataacaatacgtgctcctaatcgatacatgtgctgttccatgttacatcatcaccaataagggaagggaagggaagtgagccaagccaacaaagtcctggctggctggtgtctaattgattctcttcttataacggcgatgatagtagatgtaattattacttaatcgaaggaaggagcatatatatatagcgaacgaaggataaggtggatctgaatgatgatggatgggctactcggagcggacggagaagcgctgcaccttaggatcggagaggttgatgccaaccatggacttgccgagcctgctgatgacctccggcaagatcttggggtagctga

SEQ ID NO: 17949 - DNA, 458 bp, Oryza sativa
  Clone ID: uC-osflcyp023d08b2
tgtttttttttttttttttgttagaatataatgtagcattattattctttgagacccagaaggggcatccctcaaaagttccactaggaaaaacacagaccagcaagatctttggtacatacactttagtcagataaaaaccaagaaggggaaaaaaattatcatcctgataacaacagctagcacacaatttgcaaaacgctagagcaggttctactattagaacaaaaacccaaaaaggggggcctatatgggggcagcgccgccgtacaactgaacactcttcagatatatatatcccgcagtcttacttcacatctcaaccaagaaaaaacacaaggttgccaaaacctaaactcgctgtagaaatccgaaaccacaatctcaaaccttacataaaatggaaatacctttaaatggtcttctgaggatatatatctgatctcattgaccaaatc

SEQ ID NO: 17950 - DNA, 484 bp, Oryza sativa
  Clone ID: uC-osflcyp023d09b2
tttgtttgaatcttccactaacaagataatcattataatcatcattataatcaaagagttaggcggaacacggtaacgagaatttggcctcatcagggtgacgccagacatgcgtaggagtacaatacaactcaactgtacacaagtctctgtcaaggtcctgcagagaattgttgtttgtactataaaacggccgcccgtggccaattgggaagaaagaacaggcaaaggattttgttctcatctgaacatataaaatgatctgttcatcctgggtcaagtcatttcgtcacgcgctaacatatgaaatgaatccacgatgcagacagcaaggacagaaaaaattgcaacaccaattttgctgcagattacggtattccgttcgtgttcagcaaaatttctgaagacgtatcgttgctgcgacgtgcatgggttttggattcagagaatagatcagcataaaaaaaaagagaggaaaaattat

SEQ ID NO: 17951 - DNA, 430 bp, Oryza sativa
  Clone ID: uC-osflcyp023d11b2
tcgcgatctagaactagtggccgccctttttttttttttttttttttttttttttttttttttttttttgggttaaagcacgagatgtaaatttatgtagctcaactaatcttgaaattgagcaacgtttgatgacggaagctgtcaaaacagaacaaaaaaatggcgtggcgtgataacatagccatagacgtgggcatcggtatctgctgaattaccctccagtagcgcagctaaatgaaaatagcaacaaaaaaaataagtctgaacaaatatgtgactgatagttgttcaggtgctacatctgcttcgggcaacggcagatttttcacttcatcgagcttcacttatcgttcacgagggggctgtaaatagggtaccacattttccgagccacaaagtcgactgtgtccgcctcagtcatgctttt

SEQ ID NO: 17952 - DNA, 350 bp, Oryza sativa
  Clone ID: uC-osflcyp023d12b2
ttgtttttgatctcaactgtaacagtactgcctcaacaatgtcaatcaatgtataatgtagtatggtaacaacaatacagaatacaaacacgatccaccttgttttatttgtaaccaagttcaagaagcggctattcaacacaccagaatacaacagctctcaacgctgcgaagtgtaggcgtataaacacgaagttacctctatgcaagcttctgcaactcctaaccgaaaaccttggagtgctgagccttcacgcactgcagcaccaacctgattccctgctacggcttgggcggctttaagtaaacgacggacggcacaatgttcacatcatcattcagggtgaaca

SEQ ID NO: 17953 - DNA, 407 bp, Oryza sativa
  Clone ID: uC-osflcyp023e01b2
aaattgctcgatttatactagaaacgcaaaggatgcaatgattaacagagtatatcgctcaacggcaatacatcccgcaacaatatatggcttgataacagcggggaaaatctcaagcgtcaacagacatacaacaagcgtcagaaaatgagggcagctgaaggatatcaaatgtggaacgcctagatgcctacctcgcaacaatacaaaacaaattacctattgcacttcctcagacaccggaacaccatcagcagcttcttcagacggcttggtttgctcatcgctgattggctcgttaatgccaaggacttcatccatcagctcatcttccacggccatatcgtccatatcatcctcatcgtcattgccaccctcaagaactcgtcgagtttttggaccatgct

SEQ ID NO: 17954 - DNA, 528 bp, Oryza sativa
  Clone ID: uC-osflcyp023e02b2
aaaggaagttttcacagtttttgctgatcataaatagcaatcgagcaacaccacagaatggtcctaaccactaacagtttcaaccacaaaagagcaaattacaaagtgtgtggtatgcaaagacaaagaggagactaatcctatcctactcctcctttttggaggtatggatggcagtcactgaggagaccatggaatcaacaccgcacttgttcttgtcatgaggtcccctgcagatcttgtagtaccccttctccccccagttctcgccccacgagttcttgatgatccagtacggcttctccttgaagcggatcggtgcgtatcctgccgatccgtagccaacaaggaggacaccatggtcaaggtgcctcccacagatgaaggggcacgacacgccgccgatgtatgtctgcatgtaggccgcattgattgcaattgcaagagggccatgtttgacgaggttggcagcaatttgatctttgttgaccgagatcacactgaagttctttacttgggcaacgattt

SEQ ID NO: 17955 - DNA, 435 bp, Oryza sativa
  Clone ID: uC-osflcyp023e03b2
gacaaaaatatgcacataaactgcagatgaaaaccatctggtcactttatacaagccgtacatcagctaaaagaagttcacgatgcctcagggctcaggcagacagaaactgaaaacgacgcagcaggttaaaaacaaattacaaaacctacatgagacaaaattaaatcgtagagatagggtcccactaccaccaaagcaacattatttgcagaggttcctttttttcagcccacatgatcccggggtctagttattattcgaaaatctccgtccgtcctcaaattcgatcgaattttaaatctctctctcctagaagagcttgaatagaattcctccgtgcgtggcgaagaatggcgcgaacaccagcgactcgacggccatgagcttgatgaggatgttcagcgacgggcccacgtgtccttgagcgggtcg

SEQ ID NO: 17956 - DNA, 382 bp, Oryza sativa
  Clone ID: uC-osflcyp023e04b2
tttggttttttttttttttttgtttttttttttttttttttttttttttttttttttttttttttttttttttttttttttaaagggggcaaaaaaccctccaaaacattgaacagggaacatttttccaaaaggggggggccccccctaaaaaaaagggaaaaattcccatttccgggctggccaaaggggccgggctttcgcaaaagggacccccccaaaaaatgcaaaaaaatttttaggcccaaaagggtaaaaaaggggcccaaaacaaaaaagaatccgggttttattgggcatttgacctgggcgtaatggcaaacaaaataagggcccccaaccgggaaattgggaacaatttgggcccaaaaaaggggggggg

SEQ ID NO: 17957 - DNA, 400 bp, Oryza sativa
  Clone ID: uC-osflcyp023e07b2
gacgagagcggagcacactaagattcattcattcattcatttgatcaaagcaaacgagacgagctttcttcttgcgatcaaaaacacagatgggcaaccacacagttaacacaaactagattgctccacacaaaactaacgatgataacgatcggatgatgatgatggtagctcgattagatagatagataacttggccatgagggccccaccgttcagttcctccagttcccgtcggagttgccgccgccgcggctgccgtagccgccgccgtagccgccgccgtagccgacggcaccacggccgccaccgtagccaccgtcaccggcgtagccgccttcacggcgctggccgtagccaccgccgccgacaccaccagcgtagccgccgccaccgtagc

SEQ ID NO: 17958 - DNA, 480 bp, Oryza sativa
  Clone ID: uC-osflcyp023e08b2
tttgtttttttttttttttttttttgagatcaattgaaatttgatattcccgttttaacttacaacagtgaggtgcatacccacaaacccactcatatcttgggtcaaaatattctacaagcatgagggctcgggaattgtctaaattttaatcataaactcactaaagttaaggccactttgttctgtaacaatgctggcctgcaattttgtcaggagaccaggagagcatccgtcttacatattaccagtattgtgtatgatctcatacagttgatcagatctatggtattatgataagataaactcaaaaaaaaaaaagagacatttccatataaaggagttatacaaagccataatatagtgtcatggaatacagggttcttgagaacaaaacaatggacaagatcgtccacaaaaagcggcaaaccttaagaatattgcgctgctgtctccgagtaaaccaagaaaagtagctta

SEQ ID NO: 17959 - DNA, 557 bp, Oryza sativa
  Clone ID: uC-osflcyp023e09b2
tcgcgatctagaacgctcatcccctccccagatctccagccccaggagctccggagggttcccaatggcggtgaaggtctatgtcgtgtactactctatgtatggacatgttgctaaactagctgaagagatcaagaagggtgcttcatctattgaaggtgttgaggctaaaatatggcaggttcctgaaactctccatgaggaagtacttggaaagatgggcgcgcctcctaagccagatgtgccaacgatcacaccacaagaacttactgaggctgatggaatcctgtttgggttccctacaaggtttggcatgatggctgcgcagatgaaagcattctttgatgcaaccggtggcctgtggagtgagcagagccttgcaggcaagcccgccggcatcttcttcagcactggtacccagggcggtggtcaggagactacaccgttgacagcaataactcagttgactcaccacggcatggtgttcgtcccggtcgggtacacctttcggtgccagatgtttaacatgggagaagttcaggggggcagcccgtacg

SEQ ID NO: 17960 - DNA, 452 bp, Oryza sativa
  Clone ID: uC-osflcyp023e10b2
agctcgactaattaataaccaagtgatggagacatatgctccacttatttcttactccatttcgtagtagtttgcacatcaccaaacattcaaggccactgacacacaacaagcaagctaggcggcgccggcgccgtcgacacaagcaagcaagcaagccggcgagctttatatcttggcgtcgccggagccggcgaggctgctgccggcaacgtcgatgacgaagcggtagcggacatcgttcttctccagccgctccatcgccgtgttgacgtagtccatcttgatgacctccacctcggcagtgatgccgtgctcgccggcgaagtcgagcatggcctggcagtccctgatgccgccgacgcagttgccggtgatgcccttccctccgggcacgatggcgtacgccggcagcttcagcggcctggtcggcccgccgacgaacaccattt

SEQ ID NO: 17961 - DNA, 522 bp, Oryza sativa
  unsure (1)..(522): unsure at all n locations
  Clone ID: uC-osflcyp023f01b2
tttttgtggaatgaagcagatgcggatgagatgatgaaggttttccttcttgcatcaggaaaatcagcctccgcttagatgacaattttgaacgaataccaactctattctgtgaaggtccgacaactctaaggcctaagctttcacatactcacgaatgaactcctcaaccgctgaaacattaccggtcagaccagcaccttcagtaactgtcaccttgttctggcattggctgaaattaaatgcttctccagggttcccaagcttgacttcatcagtgatgtcagcagatgatatggcgttccttgattcccggagcttgtttaattccttttccaatcgcttcttgatgaattcttttgagtgagctgtaactgtatctggctttgtgcagaatatcagaacaggaaccctntttttnactacagttgcctttgtcaggatgtcatacaagtactctgcagcagcatgcatggtagacaagaaatcttgagcatcaacaccataaactattccagctgt

SEQ ID NO: 17962 - DNA, 482 bp, Oryza sativa
  Clone ID: uC-osflcyp023f03b2
gctgtattgaaagataaggctttatttatctgtagcatccagacaatacaaaactttcccatccttcattattaaggcaaaaccgaatgcaaaactgtcacacaaattatatctataccgcgtcatctaagagcctagcatgatctcatatgaagctccagttttccattggacaagaatagcagtattcagttagaccagaatagtcagctctcttataccctgaaaaagctcaaacaggtcagctcctgtcaagtaggagctgactaataaaggagctgaggcatctcaggatttcaggaagatgacgggacatctatacgtttctcttgaaactgtgtcagcttctctctgtactcatgcaatttgcatgtgagaacagctcgattcagcataatctcatcactctggaagtttaagccggtcaaagagtaccaagaaactctgctcaggcacgctgtacaggaaaccaagctccgcac

SEQ ID NO: 17963 - DNA, 405 bp, Oryza sativa
  Clone ID: uC-osflcyp023f04b2
gatcataaggcaaagctgcgagcgccagatcatcttattactacagcttcttggcgatatgctacagtagcttcttcctcccttgcaaaaagaaacccaaaccttatctacaacgcaacacacacaccggacacagagcgctcgatcgatcgaagcagacgagacgacgatggcgaactactactaggtaagcgacaacacctaggctatacagggatacagcgcgcggcggcgacgggcggcgagacggcggcgatgatcaggcgctggccttgttggccttcttggagatggcggagcggatggatttgggcggctgcatcggcttcgcgggggcggccttcctcgccctcttggcgcgggctgggcgggcggggggaaccgccttctttgcctccgccgacg

SEQ ID NO: 17964 - DNA, 367 bp, Oryza sativa
  Clone ID: uC-osflcyp023f05b2
gtgttagccacaaaattattcagatcttgggttaaataccacttaagtcctgactaagttcagcaacttgatcaagggtgaaagaagtaccaagagcagacggacgacgatgacaggattacaaagtgctacaaacactgcacatcaagttctaagcaaaaggatagttcagatgaaaaatcccatttggaatggggagaaaacccggacgactaaaccatcaaaggtctcaacgaaattacgcctcatcagcgtaggctggctcgaggatggcggcctcggcttcctgcacctccttctcagtcttccttcccttcttggacttgtagtagacgctcataaaggtaccgacggcaccatacttttg

SEQ ID NO: 17965 - DNA, 428 bp, Oryza sativa
  Clone ID: uC-osflcyp023f06b2
tttgttgttttttctttgaatgtgttaaccaagcatcaatattgatcatacaaagttttacgaagacaacagtagataacgacaaagttgtacaatgtgaaagaaacagttcaaaatagaatgtagtaagcatgtgagtacattgtgcaactcattatgaaagcagttaatagtgcacttccctgctggacatttattttaaaaatgatgcaaaattaaccaacatcataagaacattgttaagataagatgccccttcaatttgtaaacatgatgttttagatgttaggtcattcaggtgaaacatcatatatacagcagcgcccacacaagaagctagatcaagagttagcaatttcctttgataagtgaaaactgtgaatatgccgggtccttaattattttagaaacttattttaaaagcaaag

SEQ ID NO: 17966 - DNA, 475 bp, Oryza sativa
  Clone ID: uC-osflcyp023f07b2
cagcgaactgctatcacaaagacgatattattgatgtccaaggagtttcacacgggcacaggatagctatcacacgatactagacggcaacaagtaatggtcttgccaaacaaacatccacctttattatctaatagaatggatgcagtataaagaggtcaacgaaggctagtcccagtgtcccacgaagaactatgcggcgattgtcgtctttgcagaactggcaattgctccagcctcggtcagcagaggcaccagcttcccttcattgttcaatgccaaagtatcatcacagccaccaatatgcttcccattgatgaagacatttggaacagtcctttgtccagtccattcagcaagcgccgactgcagctcagatccatcaccttcatagaacagattgggttatgagtactttctttcgcaatcttctttcgcaattcaatagtagttcttttctgagtccaatgatgac

SEQ ID NO: 17967 - DNA, 170 bp, Oryza sativa
  Clone ID: uC-osflcyp023f08b2
tttttttttttttttttgggttctagtttgatttagttgggggtgagttcagtggaatgtggtgtgtggttggtgctctgtctcctcttgttattgggatgttacctatgaataatagaaacggccttggtgccgtttctgcaataatatattgtagcatccttgtttcc

SEQ ID NO: 17968 - DNA, 369 bp, Oryza sativa
  Clone ID: uC-osflcyp023f09b2
agaaaaaaaattttaaaatgatccatcaaataaaaaatcttattaaataaagttttatattattataatgaataatttgaaaaatttttggaaaattaatcaatattttaaacatattatttgctccaaagtattcacttcacccctgggcagaaatttttattaaacctcctacatataaaggaaatttattaatataaataggggataaaaaagggataaatcatataggtataaaaaaagtttttgggttaattaaaattaatggtttattataaaaatttaaagaacattgcgatgttaaataacccgaaattccccctataaaacaaacaatttatggaaatatttttattttaaaatttaaac

SEQ ID NO: 17969 - DNA, 422 bp, Oryza sativa
  Clone ID: uC-osflcyp023f11b2
gacagaagagattccaagcctcaataattgcaatacaaagaatgaatcaattgtacaagagataggaagagtggaagaccccgacgagcctgcctacagtatgagatcgatcgatcaagaatccttctttaatctatctacagataaacagaatatgtgtttgcagcatcatacaggattacgcaaaaagaaaaaaagtacagagaaaatttgttcatggcctccttgtatttctcagttcgagcaggtccatctggaggttggtacacagctgaggtagtgacaccagtggcagctgtcgttggcgttctccccgcggaagagcatggtcataccaaccgcgaatccgacaatgacgagggcagtggcgatggcaagcaagatccactggtagacgaggtacttctttgagctgcacgggc

SEQ ID NO: 17970 - DNA, 484 bp, Oryza sativa
  Clone ID: uC-osflcyp023f12b2
tttgttttagcccaaagtgaggcacaaggtgcgtcaacaattgacgagtgcactacatacaggacaacacactcaacactgcaattcccttgtatctcaacttttaacacaaccaccacaagcacctatcaacccagagagagcatcaccagctctgcacatgtaatgcacagtcagcacagcatcaggcaccccatcgcaggcgtgcagcattgaggaagtgatcttccagaacattaccacaagcaacacaaactgcacatgtccacagggtgtcggcacccccacaccttcacaagaaccaacttttcagcctccccagaacatcactggcctatgcgccaagacagtacatgcataccagagtcacccagtgatgcccactgccaagtagtctcagtgaggctgcaaaagcccctgggagcagcagctgcagcagctccaatgcacacccgacagcagcacccatgcacccaacagcagc

SEQ ID NO: 17971 - DNA, 436 bp, Oryza sativa
  unsure (1)..(436): unsure at all n locations
  Clone ID: uC-osflcyp023g01b2
gccgtgtggcactcgcttgttccgcgcccggcgtcccagtcgtcgccgtcgtcgtcgtgctcgtcgtccgacttcccgtcctcgaacaagccatcgggcaccgcgaggccgaacggctcaggaggcggcagccgcggcaagaagagccccggccccgcgggggcggaggtgggcatggaggccggcgtgcggcggtgcacgcactgcgcgtcggagaagacgccgcagtggcggacggtgcccctgggccccaagaccctgtgnaatgtgtgtggtgtgaggtttaagtccgggcggttgatgccggagtacaggccggcggcgagccccacgttcgtgctgacccagcaatccaactcccaccgcaaggtcatggagctgcgccgacagaaggagcttctaattattcggggaggcaccgggacgccgccgcggc

SEQ ID NO: 17972 - DNA, 469 bp, Oryza sativa
  Clone ID: uC-osflcyp023g02b2
gggcttggacttaccgaaaatagcaacttcttgatcttattactattaaaatagtcctgccttaggttatccaaatctattggaggtaaggttgacaatttctttgtagctcactgattcacgtggtcctggctcatttctttgaggctgtggaggtggttggatgactggtggttgaggctggattattggtatcatcctaggctctgatggtcttggcttctcaggctattagatccgagatggctattcatgttcttcttcgggaatagtttgaaactgtttgtaatccttgccttttgccaagcgaagtgccagttcttcttggaaagaaagacctcgctttatatgagattttggagcttcattaagttgctaggactaatagacaggccgttctgtaaaagaagcgcttagatttatcttcggctattcggcattgcttctgatttatatgaaggattaggta

SEQ ID NO: 17973 - DNA, 280 bp, Oryza sativa
  Clone ID: uC-osflcyp023g03b2
tttttgtttttttttttttttttgttttattttttttttttttttttttttttttaaggatggaaattagtttcaatactttcacccttaaattaaatttaactttattttttaaaaaaagccctttgctttggcctcatgtttgacaatctcactaatgaactttttacaaagaacaccagaacacgataaaccaaacgctctagaacctggaaaattcaggggctttttggtcagaaaaaacaactaatccaggggtccaaagcttgacttaatcacc

SEQ ID NO: 17974 - DNA, 471 bp, Oryza sativa
  Clone ID: uC-osflcyp023g04b2
tttgtttgtcagatataagagggctcaataacgatataatccacacaatccaaaccatcctagctcctcaaattccacgtgaaaataaggaccggaactttaaatgaccgttacaagttctacgcaaaacttatgctaagcagaaacataatctaaaactaaattccaatagtgtgcaataataatgtgtagtccaagggtgctactcccgccccatgccgatcaatgtcattaggtacctaaaaaccaaattaaacacaagagtgagtaaagaatactcagtaagtacaatattgaactagtaaaacatacgcaggtttagtgcaataagaaaccaatatgaagcatttgctttccattaatttaaaacaaaggagacaaaaaatagtagttccctcccgagcaggtgtgaatatcctcttagcattaccggaagccgagcaagcggatcagcgcttttttaggatcatg

SEQ ID NO: 17975 - DNA, 480 bp, Oryza sativa
  Clone ID: uC-osflcyp023g05b2
tttggtgatcatgaatatcatgatatcagtcagattaattagtattgtcataacagaagctgactcagagcacagagcagcaatgccaattagtaaacacttgtagtttggaatctatggagtgctaaaagaccacgaccacaacaactcaacataatttacagcaggatgacaccaaaaggccaaggcagtgatggcagctacggcactcattctgtaacccccctagcttcaccatggatctccaatctcgttgttattcccgtgttgtttggagctgaagaagaactccgagggctggtagccgtctcattcttcttgtagaactggatggagaacaggctgccatgtgatcggcctgatgatataggtgatccatgaaagataatgcccgccccatactttgagaaaacccagtgaattcatttcatcggcaagccttgccaaagtatgacgaggcagaagataatggtaataatc

SEQ ID NO: 17976 - DNA, 465 bp, Oryza sativa
  Clone ID: uC-osflcyp023g07b2
tttgtttttttttttttttttgtttttttttttttcaggcaactctaaatttatatattatgctcatctctgttcaagatcaggataaactagaacaaatgggaaccttaggataggcacaagttacaatgcacagcgtgaagtgcagacagataaattacagggagataaatttacaagatcaaaccgaaaaaaaagtacccgtaaaaagcaggagttcagatccattaccttatgaagcaaaagtttaaaagcatttgcttatgaccagccaaagaccaagtcgaggatgtagacgacaacgagcgaaagcgggtaaagcatgtaccccaccaaacaggtccagagcgggaatgtggttctgaagcttgggaagagtcccatgatgacccagacgagcagtatgatgagccccttcgatgagaagtcccatgtcaggttcctgatgtaaatgagcgccaaaaa

SEQ ID NO: 17977 - DNA, 497 bp, Oryza sativa
  Clone ID: uC-osflcyp023g08b2
cagcgaactgctatcacaaagacgatattattgatgtccaaggagtttcacacgggcacaggatagctatcacacgatactagacggcaacaagtaatggtcttgccaaacaaacatccacctttattatctaatagaatggatgcagtataaagaggtcaacgaaggctagtcccagtgtcccacgaagaactatgcggtgattgtcgtctttgcagaactggcaattgctccagcctcggtcagcagaggcaccagcttcccttcattgttcaatgccaaagtatcatcacagccaccaatatgcttcccattgatgaagacatttggaacagtcctttgtccagtccattcagcaagtgccgactgcagctcagatccatcaccttcatagaacagattggtttatgagtactttctttcgcaatcttctttcgcaattcaatagtagttctttctgagtccaatgatgactcagccatcactatgtatgggac

SEQ ID NO: 17978 - DNA, 436 bp, Oryza sativa
  Clone ID: uC-osflcyp023g09b2
ataggatcaaaacatttctattaccacaactttttaaggatggaatcgagtagcaatactttcaccccaaaatacagtttagcgacaatatcttagaaaagccgcttgctttgccgccatggctggcaagctgagcagagcagctaacacaaagaacacgagatcactataaaccaaacggcaacgaacgaagaaaatacagggtcttttttgtctgaagatacacgaagcgggtcgttttcttttatttttagtctcctctcctcctcgatgatgggtgtatggcaatggcaatggcgatgggatcttggcttagttgatgggaaggggctcgccgttccactccttgaggcaagtgagcatggggtcgatgagcttgccctggctgatgccgaggaacaccttgctgcactcctcgccgggggacttgagcttt

SEQ ID NO: 17979 - DNA, 419 bp, Oryza sativa
  Clone ID: uC-osflcyp023g10b2
tgtggttttttaatttttgggggggaaaaccacaaatttaaacagcaatttgcaagggatcaatggtgttgctacaaagacagacgatcagttagtcgactacggaatgcaatacattagccttcaaatgctgcagacgcaaaactacgtaatttactcataccttgaactatccacctttgctatttgctacaggtcacatctgttctactagcttacactacattgcccccaaatgggcaaatatttacctccttccaccccgttttgccgccgttgtcgtcgccgccgtttttttccgaccggttcaccttggcccttttaaactgcggtggttttttgcggcggctgcacctttctttgacggtggccgtcccacgcttttttttggcggggcgtttttttggacatttttggag

SEQ ID NO: 17980 - DNA, 498 bp, Oryza sativa
  Clone ID: uC-osflcyp023g11b2
gaccacgacccctgccaccgcgtgggccaggtcccatgccaggaggtgggcccatgggtgggccggggatcatcaggccaggtgggccacgtgggccacggccttgccccatgcggccgggcccacctgggccgaccattgggccatatggcatcatgccaggggggccacgtgggccagggccgccaggcatgcctgggtagaacatgtggccgggggcacctgggaagggcatgcctgccatggggcccatggggccggggccgcgcccaccctgggccaaggccatgcgctgctggttgagctgctgggccagctgaacacggcggacctccttgcgctgtgcgagtgcgacatagagaggcttgcccttgagcatcttgccgttcatctcggtcacagcgcgggtggcctcttcgtggctggtatagcacacaaagccaaagcccttagacttggccttctcatcggacatcacctttggctgaggtgattgag

SEQ ID NO: 17981 - DNA, 341 bp, Oryza sativa
  Clone ID: uC-osflcyp023g12b2
tttgtttttttctaaggagcggaaaagatttagcatccctttttttactgaacatacaacaaatttaacaatttgtatgatcatagtgtgtgaaaaaaaaaatccagaacgaatcccttttaattttatggcttccatgtgtggtgtcggcaggctggtggcaatgagtactcatacaccggaagattccacttcaccggtgatggaggcggcagtgacaggtacctgttctacggcgacacctcgtactgcggaggctgcggaggcgtttattggtaggctgtaggcagacgttgacaacaggtacctgttctgccgcgacacatcataactcggctgtg

SEQ ID NO: 17982 - DNA, 227 bp, Oryza sativa
  Clone ID: uC-osflcyp023h01b2
tgcacccctccgtcagcttgtatcctcttttttggccgtggacctgcggtgcgaggggtttttaaacgccggcggtaacaagccgggcgctggtgcgaaaataggggcggtggcggtggcatgactaacactacgactaaggtgatgaagcgtgctatgagcgccaatgcgtggacattgtcggtcggtggtggttgtgtgcatcggagcgggagcaccaagactgt

SEQ ID NO: 17983 - DNA, 387 bp, Oryza sativa
  Clone ID: uC-osflcyp023h03b2
tttgttgtttttttttttttttttttttgggcttggacttaccgaaaatagcaacttcttgatcttattactattaaaatagtcctgccttaggttatccaaatctattggaggtaaggttgacaatttctttgtagctcactgattcacgtggtcctggctcatttctttgaggctgtggaggtggttggatgactggtggttgaggctggattattggtatcatcctaggctctgatgggcttggcttctcaggctattagatccgagatggctattcatgttcttcttcgggaatagtttgaaactgtttgtaatccttgccttttgccaagcgaagtgccagttctttttggaaagaaagacctcgctttatatgagattttg

SEQ ID NO: 17984 - DNA, 326 bp, Oryza sativa
  Clone ID: uC-osflcyp023h04b2
tttgtttgttagttataagaggacttaaggacttggacttacccacaatacaaacttttcgagcttattactattcaaatgaacctgccttacggtattcaaaactatcggacgagggtaccaatttttttgctactcactgacatacgtggacccggattattaattttgggctataaaagtgggtagatcactggtgcttctggcgtccttatcggaacaatgtctatggtgtcatagaatcggattttaacgctataatatccgaagaggactttcatggtccaatttgggactagttaaacactcgcaggattactgccctt

SEQ ID NO: 17985 - DNA, 435 bp, Oryza sativa
  Clone ID: uC-osflcyp023h05b2
ttagcggttctagatcgcgagcgggggccctttattttttggggttttttgtagctcctatttacccacctggaatcctttggttgtcctttaatgtaaaaaactttgcagggtttccttctcagcacctcttttacacctaaacatcgagggctgaactccatatgtgaactattccacccaaagaatgaaatggaaaaagaaacttcaaatccacaaggcaaatggtaagccgattacgatatttgcccaatatgtcaattttttctaacactttatttcacgttattgctattccttttcttccccgagtgtccagtatgtctttacaacaaggaggagcttctcccggacgagcgggccatcttcgtgatcaacgatttggctgttccatctcataccgtcggtaatgctctttattttcaccaacatatc

SEQ ID NO: 17986 - DNA, 282 bp, Oryza sativa
  Clone ID: uC-osflcyp023h06b2
tttggttttttttatgtaactgcagaactctccaatctccaataagaccgacatggtgttacaaggaagcagggtagcctgatgcttaaacagtgactaatatcgggacagctacagcaattgcagttagactcttctgcctgaagatggaaaacctactggaactcagatacatcttttacaagtcagaaagaaatgaagccatctttggccgccaccggcgatcatggtgtgcggctgcagcagtgacagaccaggaatttcatggatcctggtcagttc

SEQ ID NO: 17987 - DNA, 404 bp, Oryza sativa
  Clone ID: uC-osflcyp023h07b2
tttgttttttttttttttttgggttttttttttttttttttttggcaacataatcagaatgccataatacactaatactttcatttttaaaaagacagattacataatattccgcctatgttgattggagcaatgatttagttattataccggacatttatccatccaggggcccgcctcatctaatatattttttattttttctttgggaagagaaatctcatataaaaatttcaggccatgctagcatttaccaattctgaaaataggcacacactgggacacatgagactttatttacagggacatttaactcgctgtctatgacatgggggccctcatgtgtctatgacatatgggtctagtagcaaataatttagccccccttcgaagagggggaaaaa

SEQ ID NO: 17988 - DNA, 99 bp, Oryza sativa
  Clone ID: uC-osflcyp023h08b2
aaaatggggggggtaaaaaccttatctttcttaaaatatgcaatttttcatatttttacatttaaaaacagcttcatccttaagttaatcaaatctaat

SEQ ID NO: 17989 - DNA, 420 bp, Oryza sativa
  Clone ID: uC-osflcyp023h09b2
tttgtttttttttttttttgtggtttttttttttttttttttttacatcactctgaaatagcttttaatatatatatgccaccatcctcaaaatgggcattttgttcagttttactggacaagactaggtaacgagagataccatattttaggggtaatttatgatacttttggggactttacactagagaaggcccatgggggatcaaaaatttaccctaaaataaggggtaccttgcgaaacatccttgaggaacataaaaaatcccttttatttgggttccattaagacatactactactattcaattaaaaccaaaaattaatttggccctgcagcagcaattttattagccagataactaaaaccaccttttttgtgatttgcaaataccttgaaatttcttttgaacagatctg

SEQ ID NO: 17990 - DNA, 156 bp, Oryza sativa
  Clone ID: uC-osflcyp023h11b2
tgtgtttttgaaaaaaaggggggacaaactaagatggtcaaacttgcatcctcgcactacaaaaagggggcatgaaattggctatttatctaaatgtaatcaacctaatctgacattaatacatgtcaccattgaaaatctttatagaagtcatca

SEQ ID NO: 17991 - DNA, 312 bp, Oryza sativa
  Clone ID: uC-osflcyp023h12b2
tttgtttttcacataagaggggcagtatcccactgggcagttcatcacaagaccatatacagtcatggcagttattaaggccaagggtcctgatcacagtctcagcatttagcgacacacgctgggacacgatatccacacttggaagtgtaagcagtaacatggtcacacggttaattaagcctaagcagcagcggtgtccttgggagagcacggcgtaggctgggcatcaggcgacaggttggagatggagatgagctttgatctgtacttttctgccccgtcatcgtcgggggggtggccattcaccat

SEQ ID NO: 17992 - DNA, 434 bp, Oryza sativa
  Clone ID: uC-osflcyp024a01b2
tttgttttactcaaaaagacaagttgtatcatatttccggaggcaatttacacaatcatgtgtctgttacattttcatagttatgtcgcctgacaaataaacaaaatcaagcttttgacagccctattccacctttgtacctgactgcaatgaatgtaatagaatgaaaatatacatgtatgcaaccttggaaccatatggaagaactactttccctgctccatttcagtgcactatcgtgatacacctctacaattacaacggaagaagtgactttctcatgaagattggaagatcggttggtcagcgaaaggaccatatacccaacctctggcaatgtgaccgtaagccgcctctgtcaggtgaatgccatcccagctccaatgggttgatggatcatcacacgcggttgcaccagcctcaccacatttggc

SEQ ID NO: 17993 - DNA, 412 bp, Oryza sativa
  Clone ID: uC-osflcyp024a02b2
acggggaacttaatttgtaaaggagtgccggtttacatacgacccctatttgaccctgacttatcaatcaaccaatttactcaatacaacacagattttttacatgcacgaaacagaaggcagtcgctaactactaacgatacacaggtcgtagacactagctagaatggaccgttagattctttgtaaacaacattttggagaaatggccctatcttgatgcaattggtatcgacacatactaactattatgccgcgctaccttatgtgcgctgatggtaaggaccggggctaggacacaaacagttatatacgtaacgcggggacccattggtatagcatccactcggagacatgcccccggccgtacgagaacactgccaagttgagtaacaggagggtggagcccaac

SEQ ID NO: 17994 - DNA, 115 bp, Oryza sativa
  Clone ID: uC-osflcyp024a03b2
ggctggggggtgggggttctttcacctgcaggggttgcggtgtcaggttgctcctcatgaagtttttgatctggatcgctgatgatcgatcctgactggagttcgtgattatctg

SEQ ID NO: 17995 - DNA, 371 bp, Oryza sativa
  Clone ID: uC-osflcyp024a04b2
tttggtttttttttttttcagagtagagatggagcatcactgatcaattcactgctacacacccaacgtaaaatgcatgatcccgtgttcgacttatacaggcaatgcttcgtattgagtcggaactattccgtcctctaagaattaattaacttggtacataattaagcagcatcaatccgaaaatcggatgagagcagacttgagacggtaaaccgatcgacacggtaaaaattaagaagtcgcaattacgaagtggaccataataatagtatacgatccccgctgcgcagctgacttgctttagcagacgccgttggtttttttttcggccagcacggccctcttccagagggagaccaccctgagct

SEQ ID NO: 17996 - DNA, 426 bp, Oryza sativa
  Clone ID: uC-osflcyp024a05b2
ttgtgggtagcagaaagtgggggattggatacatctctttattaagctaatgttaccaaatgagccatggagtgaatgttctaggtattatggggacttgttaccatcgaaattacatatagaccacagcaagcatacagtcttagttacagtgaatacacaggatgaatcaacacctgagtgtatgcaaatccttcaagatctttatatccatatatcagaggtgcaatctccaccaggatatctcatctcatgggccaaggagggaccctctggctcagcaccaaaatctacaaagaagttagggttgatcgatagtcctcctttctcagtgtcgacgtcgatctgcaacatgtgggagcccttcttgacaagatcttggccatagaactgctcgtcccatcggctgaaaagagagttggtcac

SEQ ID NO: 17997 - DNA, 358 bp, Oryza sativa
  Clone ID: uC-osflcyp024a07b2
ggaaaaaaaaaaaaccggggggggggtttatttttaaaaaaaaacccctacaaacatgggggtcccaaacatgttaaacacaaacaatacagccgatcgaggggaagaccccctcaaattaaaggcacagaggcccaggcccaaatctgctccctggccggggggaacgggcccaggcccaaaaggtcggaaagggaaaggcaccccgggccttgaaaaggggggcctggccacgttttccggtgaaacggcccccgtttcaaaggggcccggtgggccctcaaagggttccacggatgccaggtgtttcccgcccaattttatgggagcaaaaacttttggggctcaatagggggga

SEQ ID NO: 17998 - DNA, 435 bp, Oryza sativa
  Clone ID: uC-osflcyp024a08b2
ttgttttacgacaaaccacggacttggatattaaagatgccacaaagaaggttcacataaacaacacaggtcacagcagcgaaagctacaagcaaaccctgcataatcgaaaagcaaatgtttttcaaaaccagacacacaaactgatagatagaagcccacacggacagatcataggatagcagcagtaatcaagcattgccaaggcaccaggcaagaaccctgaacctctctagtactcgtcaccctcatcaccctcgtcaccatcgtcgaactcggagccgacctcctcgtagtccttctccagcgcggcgaggtcctcgcgggcctcggagaactccccctcctccatgccctcgccgacgtaccagtggacgaaggcgcgcttggagtacatgaggtcgaacttgatgtcgatgcgggagaacacctcga

SEQ ID NO: 17999 - DNA, 403 bp, Oryza sativa
  Clone ID: uC-osflcyp024a09b2
atgagatagggccaaatgaattattatcacttgcttgcacaaactagcaagcatgttccaacaatgtctcaagaacccaagatactgtgatatccaaccaggggaccagggaaaagcttttgccaagatctttccttgaacacaagttcaacttcaattttgtaagagaacgaaaagaggaagaaacatacaaggcacacagtttgtatgaccttgcccttctcaggcagcaagttaacgaaccctctggataggaggcactgcagaaaaatgagcttttattattcgttagagtagcacttctcttcatcaaaagaccaggaaactggaatcagctttaagatttttgacccaaagcaggaatcttcttacaagccgggattgaaaccaaaacacccatttc

SEQ ID NO: 18000 - DNA, 459 bp, Oryza sativa
  Clone ID: uC-osflcyp024a10b2
ggtgtttttatggggccaggatcacatatggttccttcatattgaaagagacagtattacagatgcgggtacacaacaacctgaaaaaaaaaaagaacaagacaaactgatagagcaaactgcagagctctcttgcagtttcagctgactcaaaaaaatgaaaaaaggataaaacgccgaagatatctgaacactaaaactctggctgctacaccgatatcactagcaacttcgcaagtcgatttcaaccctttcatcatcttcccatcttcttcttcttccatggagcaaccagtcactactgatcaaagacacatcaggtaggcggcggtggcgccgacaacggccggcaatggaggtagatagcgagagagagacccccctttataggtatcatttttatcttcttcttaggaagaaggcttttatacttgacccgctgacaacctccatggaagt

SEQ ID NO: 18001 - DNA, 411 bp, Oryza sativa
  Clone ID: uC-osflcyp024a11b2
ggtgtttactttcaggggggggtcaatttatatattatgctcatctgtgttcaagatcaggataaactagaacaaatgggaaccttaggataggcacaagttacaatgcacagcgtgaagtgcagacagataaattacagggagataaatttacaagatcaaaccgaagaaaaagtaaccgttaaaagcaggagttcagatgcattagcttatgaagcagaagttcagaagcatttgcttatgaccagccaaagacgaagtcgaggatgtagacgacaacgagcgaaagcgggtaaagcatgtacgccaccagacagggccagagcgggaatgtggttctgcagctcgtgaagagtgccatgatgacacagacgacccgtatgatgagcacctccgatgagaagtcccatg

SEQ ID NO: 18002 - DNA, 423 bp, Oryza sativa
  Clone ID: uC-osflcyp024a12b2
ggcctcccggggctccaccggccgctgggccgccgcaatgttcgtcctcggtacgcccaatctccccctcctccccgaaccccaactcccgaggatcgattgagtgaaattttgtggattttggatgtgaaaaggggtggagatcgcggagaggttcgcgtaccacggcgtgtcggcgaacctgatcagctacctgacgggaccgctgggggagtcgacggcgggggcggcggcggcgatcaacctgtggagcggcgtcgcgacgatgctgccgctgctggtcgcctgcgtcgccgacgcctggctcggtcggtaccgcaccatcgtgctcgccctcctcctttttgtcgtgagcatggggatgttaaccctctcgtcggcgcttccggcgttccacggcgacggcggcggctgcagcttcac

SEQ ID NO: 18003 - DNA, 329 bp, Oryza sativa
  Clone ID: uC-osflcyp024b01b2
ttgttgtttttttttttttttttttttttttttttttttttttttgaccataacaataaacaccaataaaaaggcaaacagaaaaacaggaagtgccaccaagcagttcaagaggctcccccacccccaaccaggcctggttccacagacccccacctgtttttgtacgagtagcttaaaggggagactgtaaaaccattgttagcaaccttacatacgggggagccccaaatttcccggcaacaattacagccccataggggtcattacacagtagcaaaggacttgcttcaagcttttagggcacataaaggcgggtttactggccc

SEQ ID NO: 18004 - DNA, 431 bp, Oryza sativa
  Clone ID: uC-osflcyp024b03b2
ttggttttttttttttttcggggaatgattggtccatattttattttggatcgggctgcaaaagccaaataagtccccccttgacatttacatcaagtacacaaccaaaagaaaacgtgcgagcaaaaaaaagtctccagaattcactagcatcggcgaacgtactagttaaacatattcaccatctcatcatggaaggagttattgatgattgattgattgcacctgctggaagcattcttgtggacaatctagcctgtgttctgcatgccggcagcaatgcccttcatcgtcaggatgagggtgtcctccaggccaggtgcgtactcgctcgcagcgttcagttggaccagctcggcaggctggttgctgtcgacaaactccttcgacaaggccggctgcgacatcacctcgaagctagggtcccttat

SEQ ID NO: 18005 - DNA, 403 bp, Oryza sativa
  Clone ID: uC-osflcyp024b04b2
ttggggtttttttttttaaggggttgaataatactccacaagaatggagtattgattgagtttactctgatgtgtgttacaacaacaagatacagggctgcttgcaaatcagttaacacaacaatgtgtaatcatctcagattatcctcccaatttatgtatgattggctcagatcgaaatcgcagcatatgcatacatacaaacatgaataagcaacaacttgtcccttgttatttttcaggttgagaatgcaggttgaggttcagaaactgagtgtacttgtttgtagtacgtttagagcttgacttggctgacgagaggctttcccgagaagaaggcgtcaaggttggtcttgataaccccccccccttttggatggactccggttgatcaccgtgcggt

SEQ ID NO: 18006 - DNA, 405 bp, Oryza sativa
  Clone ID: uC-osflcyp024b05b2
ttgtggtttttttttctggggaggaagcgcattttttacatttttgttccttcccgccacgccttggagggttcacggtgtgaaggaaatacaagctattttttcagcacttgaaaactaaaagatcccgattaacggagcaggaaggacctacataatgctgttgagaatagtcccacattgaaaggttagggggagaggcaccaacttaaaaggggaggggtccctaacctgatgagctagcttttggggtgttgaaaggctttatcccggttgggacaacgtctaccggtcttaggccaacaaatgctaccataaactttacttattaatgtggctttaatgcccgcccttgcaaaggtatctacatgaagccatccaaacgattatctacaggtgatcatg

SEQ ID NO: 18007 - DNA, 436 bp, Oryza sativa
  Clone ID: uC-osflcyp024b06b2
ttggtgtttttttagagttagggaagagagcacttcatacattcaccggatgataaagatacaaaccacatacccaaacaagcacaggtgacttaacaaccagacatatgaacagcatttaactaacaaattaaactagaaataacattaagtttccataggaggtttactggctggacggacatacatgtataaaccagttccaagttccagccattttgcaactaatgcaaaacctatatgagaaagacctatagaattaccgggttcacaggagacgcttccaccatggaagcagagggatgaccatggtgaactttaaaagcttaaggtgctctttctttaaacgctacaagtttattcttcagtactctcagtagtaccaattcgagccgtcatttttctgctggccctgcattgcgccggggtattcgac

SEQ ID NO: 18008 - DNA, 419 bp, Oryza sativa
  Clone ID: uC-osflcyp024b07b2
gtgttttttaactcaatggggctatgcttcatggatctgcattataaaggacacatgctttcgaagttccgagtacttttgtgcagcacaatacaatgtcactgcggttccttattaggggtaaaaggagaaaaggaagacaaaaaaacatcgctcatcagaagatgtcacccctgcttgtaatcacgtcctggctacagaacgggcatatagaaaccagaatccaaaaatttaacttgtacagaacttaacaatgaagagatcttatgaagccgactccttggcgatcttctcagctttagcaatgacttcctcaatgcctcccaccatatagaatgactgttcgggaaggtcatatattttccatccaaaacaccctggaaactggtgacgctctcttcagctccacgtactttcca

SEQ ID NO: 18009 - DNA, 355 bp, Oryza sativa
  Clone ID: uC-osflcyp024b08b2
gggcccaaaagggcccaagggctttttaacaacccgggcccagacagaaaactccaatccccccgcccaattttccaaacccccaaaaacaaaaatttggggaagaacaaacttgccaaaaacaaaaaaattcaaacctggggggggggaaaatgaaaaaaaaggaaaaaaggggaaaaaaaagaaaagaaaaaaattggccgccccggggtgggttccccgaccaatggggccctcccccggtttccaagggggggccaaccccgggggggagcccggggacccccccccccacggccctggggttggggggcccccgggggctgggtccctcccccccgggggggccggaggg

SEQ ID NO: 18010 - DNA, 402 bp, Oryza sativa
  Clone ID: uC-osflcyp024b11b2
gtggtttggaacggtaaagcgggatcttcgttaatgtattcttgagatgataaattatatagagtacaaattggagaagataaataagagtacaaattggatcgagctatgtacacagatcactgtaagataaaaggcaggcagtagagtaaataagctgtcccctcaaaatgcgacaacgatatatggaggcacggaagcagaaatttcagaaaggctccacgctgcctcatcccctctcctcgccgattacatgttatcgatgagctcatgcggtgttcagcttagcgagcgtgcgctttaaagccttcacgctcaatgggctgttcttgctcgctgagcaggttccagcccgggtgttgcagacagggtagtcaggcgggcagcaactggcatgatcct

SEQ ID NO: 18011 - DNA, 64 bp, Oryza sativa
  Clone ID: uC-osflcyp024b12b2
gggggttttgtttttttggggtttttttcctttttttttttttttcttttttttttctcctttt

SEQ ID NO: 18012 - DNA, 421 bp, Oryza sativa
  Clone ID: uC-osflcyp024c01b2
agagaccttaatcagaatttttaaagtttactatataaaactgacaatgatggtgaatattttcttctgaatctacatgtacaaacaatacacaaaagtaaatcatagttcatcataaataggaggagcaggagcaggagcagcaggtgctgggacaggcacattcttgacttttgctacaacgtcttcagctgatattgagcctgatctgatggcatcggccagcttcctttgcagtgtcaacaggccaatacgtctcgagacaacatatagcaccgccaaggagaaaatgagaaaaccaatggtaaggatgatcctatcaagaacatcttgccgttgcattgtagatagcaaaccacgagtacgcatcagcaaagagcggtgtccttgatattcaccttcagccttacgaagaacactt

SEQ ID NO: 18013 - DNA, 445 bp, Oryza sativa
  Clone ID: uC-osflcyp024c02b2
ggcggaggcggagagagggagaggatggggtacgtggggcagcacggggtggcgacgctgcggaggtacaagtacagcggcgtcgaccactcgctcgtcgccaagtacatcctccagcccttctggtcacgattcgtcaacctcttcccgctctggttcccgccaaatatgattacactgacaggcttcatgtttctattgacatcggcattccttggctttttttattcccctcatctcgatacagcaccacctagatgggtgcaccttgcacatggaatgcttctcttcctttaccagacttttgatgctgtggatggtaaacaagcaagacgtaccaactcatcaagtcctttaggcgagctatttgaccacggatgtgatgcgcttgcatgtgcttttgaggccttggctcttggaagcacggcaatgtgtggaaaagctc

SEQ ID NO: 18014 - DNA, 434 bp, Oryza sativa
  Clone ID: uC-osflcyp024c03b2
ttttgttagcgaatcatactgtgcaactttacaacaattaatcagaacatttgacatttctagattctcaaaacaaatcctattttcaattacccctctcaccaaatctgaaaaaagaaaaacagcccaatttgatacaccttagcgtcatgcttgcatcaagcttctcctcgcaaagcagtgtgtgcctcatgctgcaactgtacctctcttcgtgacagtatatgggttggtctcgagcagattctccagggattttgccttcctgcttctcccccgaccagcctccttgagtagctctgcaagcctccgcttttcgtcatcgacgtctgggttagctgtgcccagcttttcttcgcgcatcccaactacatgttccaagatctcaatggcctcatccagccttcccatggcatcataagttccagcaagat

SEQ ID NO: 18015 - DNA, 448 bp, Oryza sativa
  Clone ID: uC-osflcyp024c04b2
ttttgttttttgggaaaagggtgaccggctatatttcattcactcgaaaaaaagagagaaactgataccacagttacaaagctcaacagcatcgacagatgaaacaaaacacccgcattgcatcatacacttattcaggattctacaagtaaaagaactacacatgtttggagatcgtaaggctacagagtgcgaggaaagctaacaaacgattggacgaacgaacgaaatcaagctgttcagagatcgagccattcctttgggtttatgcacgcgtcaagaagtttccgttcttcagttccctcttcaggtgtatgatcatactgccatcgtgcagtcagtggaagagaaaccagaatactctcaatccttcccccagtcttgaggccaaatgtggtaccgcgatcatatacaaggttgaactccacattgcgacctctcctcagtt

SEQ ID NO: 18016 - DNA, 401 bp, Oryza sativa
  Clone ID: uC-osflcyp024c05b2
ttgggtttttttttagtacctgacactgctagtagtttattacgattgatcagaatggtactaatttacagggtaaaactggtgaaaatctgctaagccacaatgctgacaataaacaagatcaagccatgaaaggagggagtaaacagagctgactccacacaagccctgtctcacgaccattattaaacttaaatggaaaacctcaaacttctcatccattttttgctttcatttttggtttcttgtatgcactgaaactgctagagagagagagagagagatagatcatcattatttttactcatccatccttatgacgcagcggagactctcccccttgagcatgagatcgaacgccgtgttgatctccgagaacggcacgctgtgcgtgatgaact

SEQ ID NO: 18017 - DNA, 380 bp, Oryza sativa
  Clone ID: uC-osflcyp024c08b2
gaaggggaaacataattttccattgaagggaaataagaaggaaaagaataaactgggggggattacatcatgtctacttatgaaacagggataacaagaattttttttttcaaacacaggaaataccatttaggaaagttacctaattgccacgacttgtcagtcacacgagataatcacaagggagaaaggagaaaatgaaacaaacgggtcgcttattgcctcgacaaagaggccttgctgtagttgccagtaaactaggatccccggaccatgaatgctgtttcgctgaagcaagacgcaacaataataaagcctggcaacttcattgttcttttttttgggcgtctctgaggtctggacccaaatggagcccgccc

SEQ ID NO: 18018 - DNA, 419 bp, Oryza sativa
  Clone ID: uC-osflcyp024c10b2
ggctcgcgccggggcctctcgccgccggaggggcccggtgttcgtcggcgccgccggcatctgcgacggcaccggccccgggtgcagcggcgggttcggcccctgcggcacctgcgtcgactagcgtcgcgatgtcgcgaggcgagtactagtagccttttagctctagctgatgctgctgcgagccatggggattttgattaggtgtgtgtgagatcatcagctcccctttgtgaaggcaataagagggagctcgcgtccaatcctttgctttagccgctgcagtaatcaagctctaagctttctccttttttttctcccaaatcgatcgatcctatgtaaatttcttgaaatcttgatctttgatgctcttgctttgaactcgcgaacatatgtaaattggacgatcaagctgatgt

SEQ ID NO: 18019 - DNA, 371 bp, Oryza sativa
  Clone ID: uC-osflcyp024c11b2
gtggttttttttgatttagggaaacttgaccgattcacaaactcctttttattatagtttatgcatgtctttgtacacatgcgcgtgtgcttaatatataccattatttatttacttaagcacatgggtgtaccataggtaaccatagttacgacacacatttgagtactcaagaaaggtgacaacacgtgtacttattatgcatgtgtatgtgagtggagctatatgatctgtattggttcggccggttagtaggaggcgatgatagtgggagggtttgcggggcaaggacacttttttgtaacgtatgggggatacgtggggatgccacatagaccccccggggtttccacgttacgctttatacggat

SEQ ID NO: 18020 - DNA, 436 bp, Oryza sativa
  Clone ID: uC-osflcyp024c12b2
gtgtgtttctagctggggggggtctttataccacttattattctctttctctgcctatttcagtatacgctctcgctaaagttacaattgcatcttctaagagggtttgacgaattgacacaccgagtacgtatacatatcccaatcacgtgtatctatgtatgtagggttgtatgtatgtatgaatgtatcgcgccccgccgcctgatctatcaattgaggccgctggtgaacggcacgccggtctgcggcagccataagtcgccgagcaccatgttgcccacggtgaagttgccggcgtcggcggtgctgttgagcacggggtaccccggccaggtcaccctcctggtggtgtccgccccggcgccggagctgttgtactcggcgttatagaacgtgctgagcgcgtattcacccgtcccacggtatccacccc

SEQ ID NO: 18021 - DNA, 396 bp, Oryza sativa
  Clone ID: uC-osflcyp024d01b2
accgctcgcctgaggtccgcgtaggcgctggcggtctccgcctccgatctccacagggcgggcggaggagaccgcataggtgggggggagatggcggcggcggaggggagcgaggcagccatcaaggatgctagctgaaaacctcttgcaggtgtggcataccgccgagtatcgccacacgaacagggtataggcgtctatcaacatctacatcacctcggctattattatagaaggtcactggtgagacaaataccaccaatacaagctggaccgatgtacatggtgtgaccatttaaaatgtaccacactcttgatgatgggaacagaaaagcagcttgttgcacggaccgaacctgacctattggcgagccttttatccacgaatctgatgct

SEQ ID NO: 18022 - DNA, 407 bp, Oryza sativa
  Clone ID: uC-osflcyp024d04b2
ggggtttttgattttttggggttttctttttttttttttttttttttttttttttttttttttttttttttttttttttttttttttttttttttttgggaacccagggaaaagccggcccagttttacaaaaaaaaaacaccggggccccaaagggccccccttccaggtcgttaaacgcccaacgggcccaaacaaaaaaaacagggttggtgaacccctggggcgaaaaactaaacggggggaccgggttcggaaaccgggggatcatggccaacgggggggggggggaaaaaacctaatattcgggggggggggcacccccgggggggggggaaaaaaaaaggaccctcaaaatcacccccgggaggcccccccccttgggggggccacccccaaaccccccc

SEQ ID NO: 18023 - DNA, 452 bp, Oryza sativa
  Clone ID: uC-osflcyp024d05b2
ttgggttaagataaccaaaggtgcactgatgtgttgaatgaaattcaccactgcgaggatctgatacatagttgatttgattacccgataagatctatatatatcttacagacgaacagaaagataacacctaacataacttaattactgataataagaactatatatgtcttgcctttgacactggacataatacctaacacgaatttagtgctactattcttcacctgacattgaactcacgctcaccaaaccacaaatcacaatcactaccgacgaattattcatctaaccaaacctctactattattaccactactgctgtactaacagatcagcaacaccaagccagcctaaatttccaccaaactaaccccaatttttcccaaccaagacaccacctaaaaaccaaactcaaaagacaaagaactaatcaacctagtgttgttctt

SEQ ID NO: 18024 - DNA, 453 bp, Oryza sativa
  Clone ID: uC-osflcyp024d06b2
ttgtgttatacaggttcaggggttcttataaaagaagtaataccctactcttgtccggggatgaatccgccgagtgtattattgattgtatgattcgggaaaaatcagcatatgcccctagaggcgcccggaccccccttatatatgggaaggagtccggattacaaaagataatctatattcctaacggaatatgaagatagaggtaaaatacagccataaccgactaagtctcagggtgtttccttgatacacaagttaagaaacaaacccgagatacagataagatattctatctacattaggtatcctgtacccagttcgaataccgtcgccgtgtagatatgggatacccataatctccacagtcgccgtctctctcgtcgccaccgtcgccggcttcacgagagaaaagccatggctgcagcctcgccatcagcgcgcgccaaggtg

SEQ ID NO: 18025 - DNA, 433 bp, Oryza sativa
  Clone ID: uC-osflcyp024d07b2
agggcgaggagggttcggtcgtcgctggggtcgccgaagccggcgacgcccaaggacgcgaggccggccaaggtgcaggagatgttcgtgtacgagatcaacgagcgcgaccgcgagagccccgcctacctccgcctcagcgccaagcagacggagaacgccctcggcgatctcgtccccttcaccaacaagctgtacagcggaagcctggacaagcggctggggatctcggcggggatctgcatcctgatccagcacgtgccggagcgcaacggcgaccgctacgaggccatctacagcttttacttcggcgactacggccacatttccgtgcagggcccgtacctgacctacgaggagtcctacctcgccgttaccggcgggtccggcgtctttcgaaggcgcctacggccaggtcaagctcaaccagatc

SEQ ID NO: 18026 - DNA, 354 bp, Oryza sativa
  Clone ID: uC-osflcyp024d08b2
ttgtttttttttttttttggttttttttttttttttttttttttatttttttttttttttttaattttaaaacaaaaaaaaataaaaaaaaaaaaaaaaaaaaaaaaaaaaaaaaaaaaaaaaaaaaaaaaaaaaaaaagcgagcaacaaaaaaatttaaaataaaacaaaacacttcaaaaaccccaaatcatgggggctacccacgaaaacagataaaaccaggaaaaaaaacaaaaatgcgaaacctaaaaaaaaatttttcaggttaaagaaaaaaccccaaggtcaaaaaatacaacaatgtctaaaaccaaagaaaaaaataataaaaccaaaaaaaaataacagttc

SEQ ID NO: 18027 - DNA, 438 bp, Oryza sativa
  Clone ID: uC-osflcyp024d11b2
gtgttttttggtaaaagggggaattaacctatgagtgctgttgaaaatcacactgaagagatcgcgtggaattaaagacgctggtacaagttaccatacgcatgatttgattacgggaattccaaaaaactagtaccgctgacaggactcaattattaaaaagtacaggcttagattattgcgacaaatgcttttgataccggttggattggacgcttgataggcaaaccacactaaaaaccatagatatggatacgggggatgtccaatgggaagtttagcactgaccaaaggtagaccagcgcttgtagttcttgacctgaagggtctccaggcaccctcggcgagccagcatgaccctggtatgtccaaaggatgcctagagacgggcttgccctggcgtgaaggacctctgcgcctcccaggttcttgacttgc

SEQ ID NO: 18028 - DNA, 68 bp, Oryza sativa
  Clone ID: uC-osflcyp024d12b2
gggtgtttaactactaaaggggagattacccccctttctattccttctccatctctaattccccttca

SEQ ID NO: 18029 - DNA, 375 bp, Oryza sativa
  Clone ID: uC-osflcyp024e01b2
tttggtttttttttttttttgggtttttttttttgcttcaaatccacaatcattttttacccacgagccaactcactgatccggattaatttaccggcatcgcttgatcagcacgtagctcgacgagtacagacaaacgcaagcaaaaccgagtcattcccgctgcacaccattggccgccgccgccgccggggggccgtcagacctcctccggccggctcgccttttgctgctgccgtcgccgttggcggcgacgtcgtcgggcggcgcgacgtaaacgaaggtgccgacgaggcagtcgtcgtcgagggcgaggagcggctcgagcgccttgaccacgggggacatgtgggggcgggacttggggttgaggct

SEQ ID NO: 18030 - DNA, 441 bp, Oryza sativa
  Clone ID: uC-osflcyp024e02b2
tttttgttaagatgacaaaaatgtgcacataaactgcagatgaaaaccatctggtcactttatacaagccgtacatcagctaaaagaagttcacgatgcctcagggctcaggcagacagaaactgaaaacgacgcagcaagttaaaaacaaattacaaaacctacatgagacaaaattaaatcgtagagatagtgtcccactaccaccaaagcaacattatttgcagaggttcctttttttcagcccacatgatcccgtggtctagttattattcgaaaatctccgtccgtcctcaaattcgatcgaattttaaatctctctctcctagaagagcttgaatagaattcctccgtgcgtggcgaagaatggcgcgaacaccagcgactcgacggccatgagcttgatgaggatgttcagcgacgggcccgacgtgtccttga

SEQ ID NO: 18031 - DNA, 440 bp, Oryza sativa
  Clone ID: uC-osflcyp024e03b2
ttgtgtgtttttttttttttgggtttttttttttttttttttttttttttttttttttttttttttttttttttttggaacaaaaaaagggggaaaattttttttgggaaccccattaagggggacccccaggaatggcggcccagagaatcccaaggttggtccctaaagaccgggggaccgggccctggttttttggaagggcaacccggggccctggtagcttggcgggggacctttaaaagggggacctcccaaaacaaccgaacaaaatagggtccccctggcccgaaaatgggccgacataaaacgggccctactagaaaagggggggacacatacttagcccccccctttttttaccaccccacaattttttttttaccccctgaaaaccccctgggggcccgggccattggtccatttggggggtggggggg

SEQ ID NO: 18032 - DNA, 457 bp, Oryza sativa
  Clone ID: uC-osflcyp024e04b2
ggcgcaggtgagggggctctttaagggtcggggggggcatagctgtaggagcgcgggcactccgacttgaagacctgggagtaggcggtggggcggcaggtgttcgggttggcgtacgcgccgctgcagcagaactcgggcttgccgaacgcgtcgcacgcgctccggcacgccgcgccgtccacgagcgcggagctcggccgggcaccgcgcgttcaggtcggccgcgcacccggcggccgcgcacgtcgttgccgtcgcgccgagggcgcccgagggctccaccagcaacggcaggttgtacccgtccacgaggctgacgtcgtagaagtcgttgcggccgccgtcgtcgagcgtgaactccgccagcgtggtcgggggcgccgcgccgcggtcggcgcactccaacgtgcccgagccgtaagtcgccgttgtgcacacgaccttcccggtgccg

SEQ ID NO: 18033 - DNA, 442 bp, Oryza sativa
  Clone ID: uC-osflcyp024e05b2
ggcgaggccgcacgggcattcgccgctggcgggggtgcccacgcggctggtggccgcgctctgcaccgcctgcttcttcctcggcgtctgcgtcgtcaatagatattgggcggttcctgagcttcccgattgccgaaccaaggtgaattcggataatccgggggctgtaatgaaccaagtgtcacaaactcgggaagtcatcatagctttggatagaacaatatctgaaatcgagatgcgcctggctgctgctagaaccatgcaagctaggagccagggcttatctccgagtgattcgggtagtgaccagggaagcaccagggctagattgttttttgtcatgggcattgtgaccacgtttgctaatcgcaagcggagagactccatccggcagacatggctgccacaaggcgagcatttgcaaaggctggagaaggagaag

SEQ ID NO: 18034 - DNA, 304 bp, Oryza sativa
  Clone ID: uC-osflcyp024e07b2
ggcggcaggtgcggctgccgggccttggggggcgccgccgccgctttcttggtcttggcacggatggcgtcgagggcctcgacgtacttctgcacccgcttctcctgcactcggcgctgctccttgacctcgccgtcggcggcgatggagtcgagcttgaccagctcattcatcagcgcctcggtgagcgccaccacgtgggcgtcaaccaccctcccgcccttgctcacgatcgcctccagcgccgacaccttggaggcgagcttgtcgacgtcgagggcgacgcgggagacggacttggcgg

SEQ ID NO: 18035 - DNA, 423 bp, Oryza sativa
  Clone ID: uC-osflcyp024e09b2
ttgtttttttttttattggtgagggatttttgttctaaaacaactgattagccttgtctgattggcattacatgtaaaagataatcatacacccattgcaatgcatatttgcttatgtcctttactgcagaaattagcacaatgaatcctttctatctttgatttgtgccttggactgctaactttggaatgtacggcaactgcgaccacatcctttgggaccaaaacttctgatgattaggacataatttacacatgtactaaagaatcaacaaggacgcagtcacagcaacaaaagccatcttgtgggcatcaacggcctcttttggccccaagggaggaattgacgacaacatcctgcaccatatctctggttgcatgtgaaggcacgcggccttcaagagcgaaccaaaaacaataaat

SEQ ID NO: 18036 - DNA, 439 bp, Oryza sativa
  Clone ID: uC-osflcyp024e10b2
gtggtttgaaataagcaggggtggccaagcatttgtatattcagtacttaggtaggtttttttcccaatgtacaaatagttgagatgccaggctatactaaagctaccaatacatttccagccttaattgaggcctcagcaggaaataaacagcacactacaccaccctatagctaaactttgcttcaacatgaccggaggacgtttcctcttaaaacatgggaaccgtgtatctggagcttgcaactcttagccttctcagttgagcagagacaaatacaaagccaaaaaaaaaacacgaaaacgaagaagaagaaaagattagggttcaagcagaaaaccgtagaaacaaatctcaaacaaggcctcgcttaggatttgcacaactgctaatcaagtgtggatgacgttgccatttgcaaagtatccgtttaccaag

SEQ ID NO: 18037 - DNA, 443 bp, Oryza sativa
  Clone ID: uC-osflcyp024e11b2
ttgtttttttttttttttgggaaacggaggaagtacgtgaaatggcattttctcagctccgctccacccacagagtaggagctggaccaaatgggacagcaccaagtttcagactccactggtctacacacacttgtcaccaccatcaatttcaattacatgtatagttgatgctgctactactactactgatggttaggaacttaggatggatgatcatttggtcatttctgctgcaaattgtgagcaggcaacctcgggaaggagaagctgtcatggcgctccggtggtgtcggcgtcggcgtcgagtcgacgtccacgcgcacctccgccctcccggggtcgaggctccgctgctttgtcggcggtatcaggagcctcgtcggcgacgcgaacggcgtgtccgtgtcggagcagtccgagtcggacagcgttcccgtcgc

SEQ ID NO: 18038 - DNA, 394 bp, Oryza sativa
  Clone ID: uC-osflcyp024f01b2
ttttgtttctacaggaatttagagagataaagaaacaaatgtttcacaaaattttgaaggcaatcaccataatgatacatataaataccccagatcaaaacgtctgctgttatgatcacctctccagcaaatcaagctggctcccctacctcaacagctgtttgaattgttcctagaatctctgatcgcaattgcatcagcaatctacccaagtaattcataccttcgccctcgcgcccaccgccccaaaataaatcgtggggcgacgcctcaacaagaacagagccagccgttgacaacagcatgtcagtcagatgggaataagttgagaacttgcgctttgtagctctgtacatcacttcaattttgatggaatcccaatctggtcgtacca

SEQ ID NO: 18039 - DNA, 378 bp, Oryza sativa
  Clone ID: uC-osflcyp024f03b2
ttttgtttttttatttttttggggagaacaaatccgagtcggagactcggattccgattaatacatgtgagactcggattccgattaatacatgccaactattttttttctcccttgtaggtttgcaggggatgaagatgcaacatactgccattggcacttgtgtgttcaaggaacagtgcaaatcaactcgctcaggtaactaactgttcaaacgctaggtctttgattctctcgtcaatcctgataattgcagattttgcaaaattttatcagatgatcagctggtgcagaattgtaagggttgaactttagtttaccctcataccctgtctggtggcattaagggggcatcccaggggagaaggccttgaactt

SEQ ID NO: 18040 - DNA, 442 bp, Oryza sativa
  Clone ID: uC-osflcyp024f04b2
ttttgttttttttagcgacaaggtcttaaaaaagccgcttgctttgccgccatggctggcaagctgagcagagcagctaacacaaagaacacgagatcactataaaccaaacggcaacgaacgaagaaaatacagggtcttttttgtctgaagatacacgaagcggttcgttttcttttatttttagtctcctctcctcctcgatgatgggtgtatggcaatggcaatggcgatgggatcttggcttagttgatgggaaggggctcgccgttccactccttgaggcagtcgagcatggggtcgatgagcttgccctggctgatgccgaggaacaccttgttgcactcctcgccgggggacttgagcttctcgccggtgaggaatacgcagccgagctcctcgcggacgaagcggtagagcgggaacgaccggctctcgacga

SEQ ID NO: 18041 - DNA, 146 bp, Oryza sativa
  Clone ID: uC-osflcyp024f07b2
gatacatatatttttttcatattaaaaacgttagtgttatgatcacctttccagcaaatcaagctggcctaacaaaaaaaaaaactattaagaaaggggaactagaaaaccttgatcgcgaattgcatcagcaattctacccaagt

SEQ ID NO: 18042 - DNA, 426 bp, Oryza sativa
  Clone ID: uC-osflcyp024f09b2
ttgttttgaagtaagcaatggtggccaagcatttgtatattcagtacttaggtaggtttttttcccaatgtacaaatagttgagatgccaggctatactaaagctaccaatacatttccagccttaattgaggcctcagcaggaaataaacagcacactacaccaccctatagctaaactttgcttcaacatgaccggaggacgtttcctcttaaaacatgggaaccgtgtatctggagcttgcaactcttagccttctcagttgagcagagacaaatacaaagccaaaaaaaaaacacgaaaacgaagaagaagaaaagattagggttcaagcagaaaaccgtagaaacaaatctcaaacaaggcctcgcttaggatttgcacaactgctaatcaagtgtggatgacgttgccatttgcaaagta

SEQ ID NO: 18043 - DNA, 443 bp, Oryza sativa
  Clone ID: uC-osflcyp024f11b2
gacggaatctgcaggccggggggcggaggaactccggccaaattttattaagggaagggaattcacaaggtaaacacacaacaaagcataggctatcctatccgaatggagacaaccatgcatggccacacccaccaagaagtaacaaatacccccatacaaatgcatgggctgacaaccatagtaaaataacttggataacgcgataattaactttcacccaaacagaaatgctcataatttttaatcctggtgaggcgtcttgatctcctcatgcatcaaccaccacgtactgtgtgcagtcttgttcatcgaagcagcgtgagtggcctgatcatggcgttgtcttcgtgatccaggatatggcagtgatagacgtatcccggcgctgccgtggcgtcgaaggggtagggcatgttgttgtggacaagcctgaacgccac

SEQ ID NO: 18044 - DNA, 446 bp, Oryza sativa
  Clone ID: uC-osflcyp024f12b2
ttgttttttagaagaatggggggacggaactcaatgtaatagctggttaattcagaaacatgttaagggtcaaaggacagtaaaccatttaactgggaaatcataaccaaagctcaataactattgagctccggaattacaccttacatattgggatagcaaccacaggcctaaatacccatcgatccatccaaagctcccctagcttatgcaaatcttggtaaaatttaggccttgctggcaatgttgctggacagccagtccaggccctcgtacaatccctcacctgttgtagcacaagtgctctggatataccagtgtcgctggcgaagggagtgcagtccaagcttatcagtgatctcagcagcattcatagcgtttggcagatcttgcttgttagcaaagacaagcagcacagcatcacgtagctcatcctcgttcagcat

SEQ ID NO: 18045 - DNA, 347 bp, Oryza sativa
  Clone ID: uC-osflcyp024g01b2
ttttgttttaaccaaccccagggtatttcatttacctacgcagtaagtagtaattaacatagtagtagtactaaagttgtatatcttgctgctgcatgcatgaataagcttggatgcatgagcatggcaacgctgccattcccggcgagcctactcgagcatcatgtcgacggcgtcccatggctcaccggcgccgccgtcgtcctcctcctcctcctcgaggcccaagaacgcctccagcccggacatgcactcgcggagctggtgctcggcggccggcggcggggtgggaggcagcgacgacgccgacgaggagcctgagctctcctgctggtggtggtggtggt

SEQ ID NO: 18046 - DNA, 337 bp, Oryza sativa
  Clone ID: uC-osflcyp024g02b2
ttttgtttgcagcaaataagagggcaacttgaccaccaaggacaagcaccatctacaaatagggtactttgagcttatccaatacatcaaagggggaaaaaaagcattaactccactacgaaatgcattttcttataacgatgcatcgcgttcttgtctcccatgttacttcaaaagacgttaccagatgggaaagcattagcagttctcagaattaagagacgaggttgacaagcagcctcgcatttctctgccgactgagcccctttccattgaattagcatgactatcttctgatcttgagttcagggttcccggattcatccgctgaaccttt

SEQ ID NO: 18047 - DNA, 444 bp, Oryza sativa
  Clone ID: uC-osflcyp024g03b2
ttttgttttttttaaattaggggtgatactacatagacatttattcagtgcatccaaggagagtctcatatcccttcgtaagtctataaagaaggaagctcttatagttccatcctgtcaaagggagaaaggggtcgaaacaacggcattagccggctgtgggcaagaaaagacggattctcgttatctctagctcaggtccatgccgtctccaacttggcttgggattggagacacagcggtgtaggacctctcgaaagaggatggatgcagttgtgcaccacgcctgcgcttaaaggagcacccttcgttgctgtcgacctcatgcttcctccggatccccctcaccgtctgctgctccagcggcgagagcgggaacagctgcccgctgacccggcagagcgagctgtggttgtcgtagaggatcctctggttacagttttt

SEQ ID NO: 18048 - DNA, 431 bp, Oryza sativa
  Clone ID: uC-osflcyp024g04b2
ttgggttttttttaaattagggctgatactacatagacatttattcagtgcatccaaggagagtctcatatcccttcgtaagtctataaagaaggaagctcttatagttccatcctgtcaaagggagaaaggggtcgaaacaacggcattagccggctgtgggcaagaaaagacggattctcgttatctctagctcaggtccatgccgtctccaacttggcttgggattggagacacagcggtgtaggacctctcgaaagaggatggatgcagttgtgcaccacgcctgcgcttaaaggagcaccctttgttgctgtcgacctcatgcttcctccggatccccctcaccgcctgctgctccagcggcgagagcgggaacagctgcccgctgacccggcagagcgagctgtggttgtcgtagaggatcctct

SEQ ID NO: 18049 - DNA, 441 bp, Oryza sativa
  Clone ID: uC-osflcyp024g05b2
tttgtgtttttgaagtcatagggtaatacatcttcaggaacctcttaaaaacatttaaacacttacgtgacgggaacatacgtttcaggacaacacttgcaggataggtaggagtgctcaataatagcggtagcgcactgcataccaaccatttacatggatggaaatactacacatacaaagacacgtgcaaccgaatagagcgtacatctctaggagatgttgcaaacctaacataacagagtcttaaaagagtttttttttttacttgcagaatagcaaaccatgtaatacagatcatatggtgatcctgtaaaactattaaattatggttttgaggaactgccctgcagttaattaatatctccgttttgctttcaactgtgggcaataaccattctagttcctgttcttggactttttccctgctcttggggcaag

SEQ ID NO: 18050 - DNA, 415 bp, Oryza sativa
  Clone ID: uC-osflcyp024g07b2
ttgttttgtgaacatagggagcttcatagaaatacttattcggtcactctggtgcacatgtaacaacaacaggggtgtattacagggcttcagaccagacaaaccagcgaacactactactttggttttacagcacggtaaacactaacacgatatggacatttttcctgctcttttgctctgctgttttcctcatgctcggatggcaatcccgccctggacctcgccggcctcctcctccgtcttctcggcggcgagcaccggcaggtggcccttctcctggaggcacttcaccgtctcgtacagcgactggctcgccggccggaacttcagccccaggtcccggagcttctggttcgacatcttgtacggctgcttcctggggttcttctcgtcggagcacctggtggggaca

SEQ ID NO: 18051 - DNA, 449 bp, Oryza sativa
  Clone ID: uC-osflcyp024g08b2
ttgttttcaatggaagggggataattcattcatatcagataattaagaatacaaattttacatataactaccaacaaaagtacataatccaccacacaattaaatcacaagcaattcagcatcgacacacaattgccaaacaccttttcaccatgcaaagccatccatccacccatatgaatgcacctgcatgcaactagcttaattagctagctaattaagcacactgatcaatgagagcgatcattcatgatcatggtgatctcgccgagccgacgcctcggtgaccttcacgacgtgctcctccaccttgatctcgtcgtcgacgaccaccgccccggccgtcaccgtcttcgccaccaccgcggtggtgccgtcactttataccgcccgcgcctccgtcttcgagccgatggccccaccggccgccacgccggcgaccccggcct

SEQ ID NO: 18052 - DNA, 450 bp, Oryza sativa
  Clone ID: uC-osflcyp024g09b2
ttgtttttttatcaaactgggcagtcattttatgtgtagaagatataacaagttcctatagtacccaattctgatgataatacaggatgacattcacaattaacctgcttggtgaaacttgaactgttctacaataacactgagacaccacctttatttggttgtacaaaatgaacatatacagacagaactttccttcccaaaaaggtcgaggaacaaaagaatggaataaaacgcattaactagatgcaaatgcaaaaggaaacattaacaaggaatactggtacagggaagatcagaaggcacagtgaggtaaggactaatgagagctttggaccgcagaaatatctacatcagccagacggtctctgataaatgtgttttgttcttgggtcaacaattaggcctttcccaccgttcacctccaaatcatgctgaaagacaaaatca

SEQ ID NO: 18053 - DNA, 433 bp, Oryza sativa
  Clone ID: uC-osflcyp024g10b2
ggtggtttgtgacgtcagggggcaagtgctctaagaaaaacacgagcaacagcaccgagaggatttgccaccggtgcatgacggacactctgcaaagccagcaccacagccatcgcacagcaacagctccctgcagaaggaatccgctttctgtataagaatttatctcatcaagtttagcaggaggctgttgggatgctgcgctgcactgatcgatccatgttgacaacaccatccctttgatgccatgatgcttccgctggttgcgacatagctctctcgctttctatcagcttgggggtttctgatgttctcccaactccaagcagagggtgagtcggagaaggagcgacgcaggagaggtgttgttctgttggagagcctgaaaaggacgacggcatttcagtagcagcatctcttgtcagatggctag

SEQ ID NO: 18054 - DNA, 375 bp, Oryza sativa
  Clone ID: uC-osflcyp024g12b2
atgaaaacgggggtacccacacttgtttactggcattgatatgatcagtccacaaaatgtattttgtaacagaacatgttaaatcccttgcattattactatggtctaattctgttggacaaatcgaaatcaatgctgattaagatacttaatctgctcctgtcacaaccataatttaaagggattggttgagttcatgcagagaagggggggaaggcgacgacggagctgcttggcgatgtggagggtgaactgaccgcctttttcgatcacgtacagtttgtacacgcacgggcggtggcaccatctcgaagcttctcaccaggttgccgactataagcgccagaatgggcagagccaggatgatccccgggc

SEQ ID NO: 18055 - DNA, 318 bp, Oryza sativa
  Clone ID: uC-osflcyp024h01b2
gacaggatcggcaggccggccggcggaggaactccggccaaattttattaagggaagggaattcacaaggtaaacacacaacaaagcataggctatcctatccgaatggagacaaccatgcatggccacacccaccaagaagtaacaaatacccccatacaaatgcatgggctgacaaccatagtaaaataacttggataacgcgataattaactttcacccaaacagaaatgctcataatttttaatcctggtgaggcgtcttgatctcctcatgcatcaaccaccacgtactgtgtgcagtcttgttcatcgaaac

SEQ ID NO: 18056 - DNA, 167 bp, Oryza sativa
  Clone ID: uC-osflcyp024h03b2
ttgtggcctcttgcataacgcgggggaatcaccaacatgtaacatagggattatcaggttaattcttcgacccggccgctgccgtgaaaaaatacaactcggcagcctcaaccacggagatcatgatcacctgagtacacccatacgacactttgcacgatcgacgt

SEQ ID NO: 18057 - DNA, 318 bp, Oryza sativa
  Clone ID: uC-osflcyp024h04b2
caagagttctgccagaggatgtatcttgaggggggatcattctcaaaagtgatatcaaacatctttgcaaagttttgaccaagacaatgtgatgttgccccttgtacaccacgtctctgtgtttggaatgaaaggcctcaacacttgttgtatacagtccaccagcaaatttttccatctcactttttctccctttagaaactggaactgctaaaaattcttcataaatccttcggtagagttccaaaatttggagaacctctttgtcagcctcctctttagttgcaaaagctggatgccctttttgccaaaggaact

SEQ ID NO: 18058 - DNA, 385 bp, Oryza sativa
  Clone ID: uC-osflcyp024h05b2
ttggggtttttttaatttttgggggggaaaaattccgattaggcgcttaattcattcaaaaaaacaaaaacaaaaaaaacaacagttgactcatatttgtactccatcacatagcttcaccacatatatatgggggcaattaaactcctatttacatcatccataatttggtcctggcagtaaacaaaattcaaaacaaaaaccaatacgagattatacgaagatcacccattgcatcgatctgggtcatctagaaatcgaagccaccgccgtcgtcgaaccctgcgtcgtagccggggttatacgccgacgcgttggagatggcgtctccgatgaggaggccgacaagggcgccgcctagcagcccggctccaaaatccattcc

SEQ ID NO: 18059 - DNA, 340 bp, Oryza sativa
  Clone ID: uC-osflcyp024h06b2
ttttgttttttataatcttttgggggtttcttttttttttttttttttttttttttttttaaaaacaaagattttcccccccaaacttttggataacacgggcatgacctggattttgcaaccccatggtggtcaggcaaatatgaggcaatttaacccaacttttaaacggaaattttacattcccaaaacttctctaatctttcccgaaaaaagggacaccccccttttttagcatcccaaggttgcgggggtaacaggcgttaaaaaccaaaagggaggggacccccccagggtccaacaccccatttgggccggccaaaaaatttggggggggttt

SEQ ID NO: 18060 - DNA, 395 bp, Oryza sativa
  Clone ID: uC-osflcyp024h07b2
ttgtttttttttttttttgggacattgaataatactccacaagaatggagtattgattgagtttactctgatgtgtgttacaacaacaagatacagggctgcttgcaaatcagttaacacaacaatgtgtaatcatctcagattatcctcccaatttatgtatgattggctcagatcgaaatcgcagcatatgcatacatacaaacatgaataagcaacaacttgtcccttgttatttttcaggttgagaatgcaggttgaggttcagaaactgagtgtacttgtttgtagtacgttcagagctgcacttggctgacgagaggctttccggagaagaaggcgtcaaggttggccttgaccacgtcgacgacgccttggatggactccggggtgat

SEQ ID NO: 18061 - DNA, 320 bp, Oryza sativa
  Clone ID: uC-osflcyp024h08b2
gggtttgtacaagtactggggtacaaaaaacaaacacaagctaggaatatggactattttacaaaccaaaccattcagcaccctcgcaaattaacctcctacagttccaagaaaactgaggaaaatcaaatcaaaacagactaaagaccaaaatcaaacgcctaaaaatttcgccactccttcgaatcgacgatcttaattcttccgggccaaactactaatcctatttactctgaatgttctgaacatcaccaatcactagctgaatctacgtgcagggcagcaagagtcaggactcaggaggacgcttgatgtgcgct

SEQ ID NO: 18062 - DNA, 369 bp, Oryza sativa
  Clone ID: uC-osflcyp024h09b2
ttgggttttaacgtacatgttctagttcattagttcaaccatgaaacattatatatcactgagaggataacgttgaatttccggagatgtgagacaacagctaacatatacgggcggcaagcactaaaaaaacatcacaccacccaaatgtttcaaacacttagggacaaaaactaattaaacacaagaatccatccacacacggacggtcgatgcgacgacggaagcaagcaactctacggtccgggggcggcggcagcaaacaagttcatggggaatgaatcaacggcttccgcggtagagggagtaggcgttgaggaaggcgaggaggactagaactatggcggcgatgagggcgaggaaggggga

SEQ ID NO: 18063 - DNA, 422 bp, Oryza sativa
  Clone ID: uC-osflcyp024h11b2
ggggggaaagaatatgggatttattttggtggaacagcatattatctgttggctcgggacaaaatttcttcttcggctatttacagtttggtcaggtttcaacagagggatgcatcaaaattacaacaggaggacggagcacttgttcaaaaaggctcaggaaaatttggggtgattaggggtttctctattgatacagggatcacataactctgaaataggatataggtgaaaaggaaaggaggcgggcacatcagagaaagaagcgcctattgctggcttcctatggctaaaggtggagctcgctaatgatgcagatgatacaatgtgagaactaaaaatactgacagaacaatgttagctgccgaacccaaatggggatttactcctgcttccaccttccccgtactgttcgttccata

SEQ ID NO: 18064 - DNA, 469 bp, Oryza sativa
  Clone ID: uC-osflcyp025a06b1
ttcgcattccgcgccggagctgaggagggagagcgagcgagccagcgagggaggtggggcaacccagcgaggggccagatcgtgccgccagccccgctccgtcctctctccggcgaccctccgccccgcctgatcccgtggtggatcaactacaactcatctttaggaaagcctcttgaacattagccttgtgtgcctttcaacagtatggcctcggtaggtgtggtgcgttcttccttggggtttcagaacgaaacaagtacaagtggcgatgccgaccgacttccgaatgagatgagcaatatgagtataagggatgataataaggacattgacgacatagttgtcaatggcaatgggacagaacctggtcatattattgtgacaagcattgatggaagaaatggacaggccaaacagaccattagctacatggccgagcgtgtcgtaggtcatgaatcctttgaac

SEQ ID NO: 18065 - DNA, 488 bp, Oryza sativa
  Clone ID: uC-osflcyp025a07b1
tttaaaatcatatatagtcctagctggtctggtagactcctagtcctagctgcaagaaagccacattggccatgggatcgttgggtccaagcgtggcggggctgcagcccaaggccgagaagacgacggcggcggtcggcggtgagcagcagcacggcggcggcggcggcgggtgtggcgggtcgtcgttccggatgccgctgcactacccgcggtacaagaaggcggagtacgaggcgatgccggagtggcgggtggactgcctgctccgggagtacgggctccccgtctacggcgacctcgacgccaagcggcggttcgccatgggcgcctttctctggcccgaccagtactagctctagctagctacatccatggcatcagctactacgtacgttgctgcagctaagcttctcttcctctccgtccgaaatttgaagagcctaaaatcgaagggatattttctaatccacgaatccggatatgct

SEQ ID NO: 18066 - DNA, 474 bp, Oryza sativa
  Clone ID: uC-osflcyp025a11b1
ttcgtccttttgaggtacccttagattgcagcaggacaaaagagcactgctgctgtatttgtagtactggttcttacctggcaagtaatcccccttgcattcataaggttgcccttatcatggtcatcagatgtacctggaatcatgatgttgccccgatggatgggacaatgatccaagagcaacggttgctcttgtcagttttgcttggttacatcctatgtctcaatgggactgcgaccattgctgcagcttgaagctctagatacagcattattgatcctgtatctgacagctcattagcccatggagatatactggatgctggaatggagtccagcactctgtaagatgactaatccccttggattagtcatgatgcactcatatgattgttcacctaaactcctgaagaatcatcaagctactatgtggttgattatatcccagtgctgaagtctggcacaagtccaa

SEQ ID NO: 18067 - DNA, 358 bp, Oryza sativa
  Clone ID: uC-osflcyp025b10b1
tcttccttgcgttctgctccccaggggcagggggggggtcagattactctcagtgtccactcccaccgaagtaccgaacaccacgtcctcatcatcacctcatcatggcggcagagggagaggaggcgaggcgcccgcacgatgtgcttttcccctccctcgcgcacggtcacattccggccttcctacgcctggccggccacctacagacgctccgcccgggcctcgtcgtcacgctcgtgttcaaccccacgcctcctcggctccctctccctcccggccacctctcctcctaaccggctccacgcgcttcccttcgcgcccgacgaccacggtctgcccgacggtgccgagtccc

SEQ ID NO: 18068 - DNA, 506 bp, Oryza sativa
  Clone ID: uC-osflcyp025c05b1
ttcccttcatttcctcttctccaccgcctccaagaacagcaaacccaactcctcccccctcctctcctcgcatttcttcgacctgccattccacacccgcgcgcgcctcaaactctatgtgagggaagggaaacactcgacttgccagctgagaaaccaagaagcagcagcagcagccatgcgtccgtccttgctgctgctcctcgtcgtgtgtgccggcgtcttggccggcggggcgcgcgcggggccgccgttggcgggcgagaatctgccggggcagctgctgccgggcgagaagccgccggggcagccgttgccggggcagccgttgccggggcaaccgctgccagggcaatcgttgccggggcagccgttgccggtgcagccgttgccagggcaatcgttgccggggcagcctttggtgggcgagaagccgccggtgcaacccgtgccggggcagccgttgccagggcaatcgttgccggggcagcccgtgcccgggcagc

SEQ ID NO: 18069 - DNA, 507 bp, Oryza sativa
  Clone ID: uC-osflcyp025c11b1
tctcagtgctagggctagcttgcttgtcgccgtcgccgccgtcgtcgccgccgcaatggatctcgtgtcgccgtccgagcacctgtgctacgtgcgctgcacctactgcaacaccgtgctcgcggtaaactcctcgagaaaccggagcagcggcttagcttcgcatgcagagaacgatcgatatatgctgctgctagctgcagctgcaccatggccttcgttctttggttatcttttgaattggacaagagagcaaagaacaaagtgttggttctgtctcgtgatctcctgctgctgcagattgcagagagggctctcactttggtttggtccaatcctttggcttgcttaatgtgcatcatggcatatgcttactctcacacaggacacagtgagagagagctagctagatagctgggaccaaatccagcttcttgcttgctctctctgtgtcctgaggagctagctgctcagctagtggaaacttccactgggattgttcatgac

SEQ ID NO: 18070 - DNA, 502 bp, Oryza sativa
  Clone ID: uC-osflcyp025d03b1
tgtgggttggcttctcctccccctctttaccttttcctcctcggttcggttccgtggttcgtctagggtttagtgggttgagatggcggcgccggatgtcgagtaccgctgcttcgtcggcggcctcgcctgggccaccgacgaccgctccctcgaggccgccttcttcacctacggcgagatcctcgactccaagatcatcaacgacagggagacggggaggtcacgtgggtttggcttcgtcaccttctcctccgagcagtcgatgcgcgacgccatcgagggcatgaacggcaaggagctcgacggccgcaacatcaccgtcaatgaggcccagtcccgccgctccggcggcggaggcgggggctacggcggcggcggtggcggctactgcggcagtcgtggaggcggcggctacggaggaggtggcggttgcggctactggcgccgtgagggcggctaccgtggcggcggcggcttccgcagctgccgtggctgcggc

SEQ ID NO: 18071 - DNA, 265 bp, Oryza sativa
  Clone ID: uC-osflcyp025d09b1
tttgttctgtaaaagtcattgcacatcacaggggaagggtgggtttatactgggctggttcgttctacacacatgaaatccataacctgttactggtggcatcgattcgtggggatcataatgcggtagtcattggaaggcagtggtagaatggaatggtgctttctaatcctaatttaattgggcattaggtctgactctattgctgtaggaattggtaattcaattgggttttctttattaatgtaccatgtgaagttatgat

SEQ ID NO: 18072 - DNA, 327 bp, Oryza sativa
  Clone ID: uC-osflcyp025e03b1
tgagagcggcggcgcagcagacggcggcggctgcggggggcgagaggccgattcgccggaggagagaaggagagagagagagagagagatggctttcacgatgcgcgcggtgaaggtgccgccgaactcggcgtcgctggaggaggcgcggcaccctatgttctactttttcaggcatgcttgttacgctcttctctccatcatgtagatctactatctttgcgacttttattatttcttttcagattcgcttcaccattttcattgagattcgtatagatccagtgttatactcaatccctaatgttattgttatgcttccttttt

SEQ ID NO: 18073 - DNA, 503 bp, Oryza sativa
  Clone ID: uC-osflcyp025e04b1
tagactttagggctatcatatgcagggggggaaatgctatagctgtttcaaaagatcacaagcctgatcagacagatgagcgacaacgtatcgaagatgctggaggttttgtaatgtgggcaggaacatggcgtgttggtggtgtgcttgctgtttctcgcgcttttggtgacaaactcttaaagcagtatgtagttgtggatcctgagattcgggaggaagttattgatcactctctcgagttcctcattcttgcaagtgatgggctgtgggatgtagttaccaatgaggaggctgttgacatgacccgatcgattcatgacccagtagaagctgtatagaagctcttgtcagaggcctacatgagggagagcagtgacatcataacttgtgttgtcgtgcgctttttgcatgggtaaggtagttgggtatttgcttaaaaaacaaccggtaaaatgttcccactggtgttgtttacaccatggtttcttgttttttttaat

SEQ ID NO: 18074 - DNA, 534 bp, Oryza sativa
  Clone ID: uC-osflcyp025e12b1
tcattccgatccatcaaatttctcttgagaccgtagagagagagagaggcgccaaccatggccggcatcatccacaagatcgaggagaagctccacatgggcggaggcgagcacaagaaggaagacgagcacaagaaggagggggagcaccacaagaaggacggggagcacaaggaaggcgtggtggagaagatcaaggacaagatcaccggcgaccacggcgacggcggcgagcacaaggagaagaaggacaagaagaagaagaaggagaagaagcacggcgaggagggccaccaccacgacggccacagcagcagcagcagcgacagcgactgagccgccgcgcccccacaccggcgccgtgcgtgcgtgcatgcaggtgatgctgcagatgattggaggagttcgtagcaggattaattagtatctgtgcaatacgtgatgcagtgatctgtctcatgcatgtatctgtgcttgattgcaagaaaaaaaaaaggcatggtttgcctttgtgatgtactgataataatggct

SEQ ID NO: 18075 - DNA, 453 bp, Oryza sativa
  Clone ID: uC-osflcyp025f01b1
tataccttatcatgcctaaatggatcgctgtgagttgtgtttggtggatgtggaagacagggcctgcttaatgacgtgttcacattggatttggatgcaaaacagccgacctggcgcgagattcctggagttgcaccaccagttccacgttcatggcacagctcctgcactttagatgggacgaagttggtggtttctggtggctgcgcagactcaggagtactactcagtgatacatatcttcttgatgtaacgatggacaaacctgtgtggagggaggtacctgcatcttggacgccaccttcgagattgggccactcaatgtctgactatggtggcaggaaaattctgatgtttggtggtcttgctcagagtggtccactgcgactccggtcaagtgatgcgtttacaacggacttaagtgaagaggaaccctgctggcggtgcctcacc

SEQ ID NO: 18076 - DNA, 483 bp, Oryza sativa
  Clone ID: uC-osflcyp025f02b1
tcttgtgtgctgaaagtgaacatccactgtgatgggtgccagaagaaggtcaagaagatcctccacaagatcgaaggtgtgtaccagactagcattgacgctgagcaggggaaggtgacggtgtctggcctggtggatccggccaccattatcaagaagctcaacaaggccggcaagccggcggagctatggggttccaaggtcggggtggcggcggtgaacaaccagtttcagaagctccaccttgacggcggcggcggcggcaagggccagcccaaggatggcggcggcaaggggcatcccaaggacgccggcggcaagggccagaagggcggcggcggtggcggcggcaacggtggaggcggcagcaaagacgtgaagatgatgatgccgccgcagatgccgcagccgacgccgcagcagcttcagcagctgcagcagcagctgcagatgaaggggctgaagctgccgcagttcatggac

SEQ ID NO: 18077 - DNA, 412 bp, Oryza sativa
  Clone ID: uC-osflcyp025f03b1
tagcgcggcagaggaaagaggagaagaaaagatggcggctttcgcctccgctctccgcgttctcccctcgccgccggctgcggtgcctcgtcggcttcgctcgagagaacaaaggcagggctgtagatctcgaaggtattcaaaagtcgtggcttactacgctctcactactccgccgtataaacttgatgccctggaaccttatattagcaagaggacagttgaacttcactggggtaagcatcagcaagactatgtggatagcttgaataagcagcttgctaccagcatgttctatgggtacactctggaggaactaataaaagaagcatacaacaacggcaacccattaccagaatataataatgcagcacaggcatggaaccatcacttcttctgggaatcaatgcag

SEQ ID NO: 18078 - DNA, 493 bp, Oryza sativa
  Clone ID: uC-osflcyp025f04b1
cacaattggagagatgatagaccatgcaaaggctaaggagcatatggatgcgtactttgatataatgctgaagctttcaacaagtcagcaattatcttcccgtgttaggttcatgctgagagattcaattgatctcaggaaaaataaatggcagcaaaggcgtaaggtggaaggcccaaagaaaattgatgaggtgcacagggatgcagctcaggaacgacatgctcagtcgagtaggttagctcgcggctcagttgttggttctggtccaaggcgaggagctgcacctatggattatggtcctcgcggctcagcagcagcattggcttctccaagttctcagcaagttggccatagaggaatgccttcgcattcccgagggtttggtacccaagatatccggtttgaagaaaggagtcctttggaccatagaacaactgtccttcctccgcgtaaggatgaagccatcactcttgggccacaaggtgggcct

SEQ ID NO: 18079 - DNA, 386 bp, Oryza sativa
  unsure (1)..(386): unsure at all n locations
  Clone ID: uC-osflcyp025f09b1
cgccgctactcccccctcgccgagagagctctagggtttccgctgccgaatttttttttaattcggggggagagatttgaagaggcggcaccatgttggtctaccaggatctgcttaccggtgacgagctcctgtcggattcgttcccctacagagagatcgagaacggcatcctctgggaagtcgatggcaagtgggtcgttcaaggagctattgatgtggacattggtgccaacccatctgctgagggtggtggcgatgagagngcntgcngatgaccaagctgggaaggtggtcgccattgtggacacctttcgtcttctggagcagcctccttttgacaagaagcagtttgcgaccttcatgaagcgctacatcaagaaccc

SEQ ID NO: 18080 - DNA, 500 bp, Oryza sativa
  Clone ID: uC-osflcyp025f11b1
ttcgtcctgcgattagctatctagcttagctactcgatcatcagttcatcgatcatccgacgatcaaatcagtaatcttgaatatggcggctttgaacggtaaggcggtggtggcggcgatggtggtggccatggtggtggcggcgccgggagcgtcagcggcgatcacgtgcggtcaggtgggatcggcgatcgcgccgtgcatctcgtacgtgacggggaggagtgggctgacgcagggatgctgcaacggcgacaaggggctgaacaacgccgtccgcaccaccgccgaccgtcaggcggcctgccgctgcctcaagagcctcgccggcagcatcaagtcggtcaacctcggcaccgtcgccggcagtccccggcaagtgcggcgccaacgttggatttcccatcagcctctccaccgactgcaacacggtcagatcaatcaatgctgcttggatcgatcgatcgagctaacatgctagctcaatccgagttgatca

SEQ ID NO: 18081 - DNA, 365 bp, Oryza sativa
  Clone ID: uC-osflcyp025g06b1
tctagatttgagagccgactggaacaatgagcgaaggctcgatggcgctattctcctcgtcgataggccgagcggcgccaagaccctccttggcgctatcatgacaggggcggatgagcattcgcatgaccgtgacaatgcccaggctaacagtcacgacaagaaggccatggctcgggaccaaccgcgtcctatacctcgtgccgatctcctggaagacggcgagctacctcaccgattaagacacccagagagtacggacgtgacaccttgggcttctccttcgagcaggagaccatagacaagaaccgacagttgcaggcgagacactcacgctggacgacgctggctgcgctaggatggat

SEQ ID NO: 18082 - DNA, 526 bp, Oryza sativa
  Clone ID: uC-osflcyp025g10b1
taaaaaatgttgcaggcggaggaggcgctggcggccgtgctgaccgcggcggcggcgagcgcggcggcgcgcgccgtcgaggccgtgccgctgcacgacgcgctcgggctcgtcctcgcggaggacgtgcgcgcgcccgaccccctccctcccttccgcgcctccatcaaggatgggtacgccgtcgtggcctccgacgggcccggggagtacccggtgattacggagtccagggccggcgacgacgccctcggcgtggtcgtcacccccggcacggtggcgtatgtcacgaccggagggccgattccggatggtgctgacgccgtcgtgcaagcggaggacacggagcacctcgacggcgcgccggatgggtcgaacagggttaggatattgctgcggccaactcaggtgcaggatatacgcaatgtgtgatgtgacatacaaaaggagtcggtagtgctgaagactagcgagcacataagtcctgcagcaattggagtacttgcaaccgtgggagtgactactg

SEQ ID NO: 18083 - DNA, 269 bp, Oryza sativa
  Clone ID: uC-osflcyp025h06b1
tcttcttctcgctgcccatctctctctctctctctcttcccctcgacgcggcgagatcaggaggaggaggaggagagggggggacgggaggaagggttgcccatatcctctggtccctctctctattctttctttcctttacctcttcctcatttccctcctgactttttatttttttctctttctccttttctcgcttctctccctttgccctttctttccctctcccttctcctctctctagtgatttcttcttttcttctcctctt

SEQ ID NO: 18084 - DNA, 478 bp, Oryza sativa
  Clone ID: uC-osflcyp025h08b1
tttaccgtgcctgtgggtcgtgttgagactggtgtcctcaagcctggtatggtggtgacctttggtcccagcggtctgaccactgaggtcaagtcggttgagatgcaccacgaggctctccaggaggctcttcctggtgacaacgttgggttcaacgtgaagaacgttgccgtgaaggatctgaagcgtgggtacgtggcctctaactccaaggatgaccctgccaaggaggctgccagcttcacctcccaggtgatcatcatgaaccaccctgggcagatcggcaacggctacgccccagtgctggactgccacacctcacacattgccgtcaagtttgctgagctggtgaccaagatcgacagacgatccggcaaggagctggagaaggagcccaagttcctcaagaacggtgatgctggtatggttaagatgattcccaccaagcccatggttgtggagaccttctctgagtacc

SEQ ID NO: 18085 - DNA, 545 bp, Oryza sativa
  unsure (1)..(545): unsure at all n locations
  Clone ID: uC-osflcyp025h10b1
ggaagaagaagaagaactcactcgcaggagcaccaatggcgaattctgcgtcagggctggcggtgaacgacgagtgcaagttcaagttccaggagctgaagacgaggagggggttcaggttcatcgtgttcaagatcgacgacaaggccatggagatcaaggtggagaggctcgggcagactgccgagggctacgaggacttcgccgccaccctccccgccgacgagtgccgctacgccgtctacgacctcgacttcgtcaccgacgagaactgccagaagagcaagatcttcttcttctcctggtcgcctgacacggcgaggacaaggagcaagatgctgtacgcgagctccaaggacaggttcaggagggagctggacggaatccagtgcgagattcaggccacagaccccagcgagatgagcctcgacatcatcagagccagagctcactgatgatcatatcatttcatcatccaacaccaccagattaattaattcattcccaacgtcgatcgccttattaaccncagattcatgcatata

SEQ ID NO: 18086 - DNA, 339 bp, Oryza sativa
  Clone ID: uC-osflcyp025h11b1
ctgcccatttgtttgtggggtgcaccccccctctggggacggacagttgaaaattctaggggtagcaaccaaccctatcattcagacggcagtgcggggcaatcctgacaacgtttctggtcattgacgtaacaagcatggtgagccgacataccgacgctataatacatgaacggatcatcccggcccctctcgccggggctggcatcactgcgacggcagaaaatcccggcacccaatcctaaagatcacaccttgctcaagtattgcctcgctactgcagcatcctacgcccacaaccgcgccgccagcgtcagcgcaaacccgaggggccgcgga

SEQ ID NO: 18087 - DNA, 311 bp, Oryza sativa
  Clone ID: uC-osflcyp026a02a1
aggatatgtgagtttttgagggataaacccagccgaagaagtgggggagaggacgtaagtaaatataggaaggggttttttgttggaacataaacaactaggagtgcaggacaaagaggaagggcgccccgggctgggggtagggcgacccagaatgaacataccacttataaatcaggagactcaaatataggggaataaccaggagagaaaaatcgggaagccaacaagaggcgatacaaaaagcgaaaggggaaagaagaaagaggtcaggaacatttggatatggtccggggcggtttttgggggac

SEQ ID NO: 18088 - DNA, 441 bp, Oryza sativa
  Clone ID: uC-osflcyp026a03a1
ggcagtacaaaatcaatcacaacttttatttaatgtggatccatttgaaaatgtagacattaccagcatactgcaattccaagtatgatatgatattactaagtagtaattagctgcggcggcgacaacgattgagacgatataagcttgatggatccttcagctcgtgggcgatggcccgaagcatctgaatagaaacccgcggttcgtgttgattgttcctgagctttgagcagcgctgccgctcggggtgccactagtgccagtagcgagggcgttcgtctgtggtgtagcaaggttgggagtactgggagcagtactaggagtagaagcaggctggctgctgtttgcctgaacatcagggaagccaataatttcgccacgatacggatgctcacctttccgtctcggtgaaaaagctgcaggagtgaaagttgcatt

SEQ ID NO: 18089 - DNA, 456 bp, Oryza sativa
  Clone ID: uC-osflcyp026a04a1
gtttttgaagagtgaaaagctcatggaattccctttattatttagtgtgtcaaaggaaacagcagcacaccagtctcggctctagtattagcaaaatgaaagttacagcattgccgcagcggttgcgaaagaaaatcagcacattctggttccccagtgtgccagggagctcgaagcagactgttaaactcgttcaatccagcgtcaagagtgagtaggtcagaggagatctcatctcttccaccgccgagcttgctatcttgagtccacaacagtgccctcaggaagcgcagacaggtgtacgagagcgtgagatttttgtgggctatcggagccagtgatcttctccttcggccggctcaacaccttcctgacctcgttagctagctcgatgattgaatcatcttcatggcatatgttggacaatgccttctccattgagaacaggtaatccct

SEQ ID NO: 18090 - DNA, 455 bp, Oryza sativa
  Clone ID: uC-osflcyp026a05a1
gtctgtcaatctggtactttcttttgcagaatagtatttatacagaaactgaaaacaacagataggcaggcggacacagacacaatgcataggaggctgatacggggaaggacctcatccaatatttgttgggtggcgcactttcacaacagatgactccagatcagcaacccattcataactgctccaatatttatatcacatatgcatccagctagcgcatgtaatgtattacaccagctgtgccatatacatatactatcagttcatcatcgatcgcatcgcaggcgtacactacaggttgtgtacgtacataggatcccctattctgctaagactttttgtctggatcgatctactacgtacacgtacgtatattatacggaggtaggacaagcatgcatacgtatataagttcatgtcaagctagggcccgacatgccgacagtacatga

SEQ ID NO: 18091 - DNA, 288 bp, Oryza sativa
  Clone ID: uC-osflcyp026a06a1
agaaccccggggccgacgcggaaatttcgggggaaagggggggggaaaaaaaacggggggaaaaaaaaaaaaaaaggggcggggggggggaaaggccttaaaacgggccgggggaaaattggcaaccccccaaaaaaccaaaaaaaataaacgcccctatttggaagaaaaccttcgggaaaaaccccacgggggggggggaaccttttggaacccaaggaaaaatccggaaggggattttaaacaaaaaaaaatttttgtttcccaaaaagggcaccgcaactgggg

SEQ ID NO: 18092 - DNA, 490 bp, Oryza sativa
  Clone ID: uC-osflcyp026a07a1
gcctggattgcgagtgcggtcgcccttttttttgttttttggattttttttggttttttttttttttttttttttttttttttttttttttttttttttttttttttttttttttttcttgaacaaaaaaaaattttttttttaaaaacaaaaaaggacccaagaaaaaaaatttttgaaaaactgggcaaagggatcgggaaaaaaaaatttttgggggggacccccacaaaaaaaggggccaaattaaaaagggtaaaggggggaaaacttttttttttaagggggccggggatttaaaatgggggggggggggaaaaaaatggaaaatcctagaaccccccttgggaaaaatggcccaaagggggggggggggggggaaaaatttcaaggggggccccccaaaccaaaaacccgggtttaggccccggggggggccttttggggaggaagaccaaacaaagggcctgggcattcgcctgggggggga

SEQ ID NO: 18093 - DNA, 390 bp, Oryza sativa
  Clone ID: uC-osflcyp026a08a1
ggtcaatgcaacataaattccgtactttatttgggttcatacaaaaaccatacggttcaacccagtcaaagagtgcggtccttcccataaattaaacaaatcgataattcgatgcggtcaagatgggaggccaaaagccgtgcgcgggcgattgctggggatcagcttagctgtggaggactttcactaacaaaaatgactcctgctacgactttatgtagtgccttttaatatggcagtggaaaagctgtttcatgccatcctgatgcgtgaaattcacctgctttgccagtgctgggactgaaattgaatgtgcatgcttgagtgacgattcccacaggaaacggttattttcgatgttatagcttgggacactgttggcattaaaat

SEQ ID NO: 18094 - DNA, 363 bp, Oryza sativa
  Clone ID: uC-osflcyp026a10a1
gaagagtgaaaagctcatggaatccctttattatttagtgtgtcaaaggaaacagcatcacaccagtctttggttcttgtttttgcttattgttttttacagcatgggcggacttttttcaaaagtaaatcagtacattttggtttatttgtggaccagggaacaaaatttttttcggtttttttttatatttaggggccctttttccaaaaagcaaatgaagtggatttttttgtaacgccccgcaaccaaacttttggggccatgtttaacattaaaatacgcttaccggggggttttggtggggttttagtttgccctatgcgcctttttttttttgactgcaaaaaactagtacctaca

SEQ ID NO: 18095 - DNA, 414 bp, Oryza sativa
  unsure (1)..(414): unsure at all n locations
  Clone ID: uC-osflcyp026a11a1
atgggctgataatatggttctgtctttcgcagaatgacctttattcagaaactgaaaacaacggttaggcaggtggacacagacacaatgtataggtggctgctacggggatggacctcacccaatattcgttgggttccccactttcacaacagatcactccagatcaccaacccattcataacttctccatatttatatgcaaatgcaaccaacccccaccaccagtgaatcatcaggtaccttatcgcagccaaacgattgtattgatggtaaacgctaacccaagctcattgacacaggtacatagcggtatggcatgggtaaagagtactatttgacgcaagtacagcaanaccgttctgggtccttcatactgcatangcaatcacacgcatccatctatctgtatct

SEQ ID NO: 18096 - DNA, 366 bp, Oryza sativa
  Clone ID: uC-osflcyp026b01a1
aacagttgttaatttttattttttttggagcaacagtttacacaggtgctggaaccacaaacattactagtacttctactaagctacaaaaattccaatggagaggaaatgaaagccctccatatttttttaaaaaaaaaccaccatgaaaggaaggaataaccaatggtctttacaggaagatttccaggcagtgttcgacctaatcaagcatgccggtggaacaaaccacaaatccttacgttgttctttccttgttcccaccacccgacatttatgcaatgcatacagacagatttcagcagacctggttggctgggcgtgtctcatgatttgagccgagtagccaacaaatctggttctggg

SEQ ID NO: 18097 - DNA, 455 bp, Oryza sativa
  Clone ID: uC-osflcyp026b02a1
ggggttgggagagatagtcataaatcacccactttcttttgattgacaatatgccagacaaaccatacttttcatatgacgtgcgggtgtcccgaggacacacctcgtgcaaagcgcaaatgcatctatcaaactgacatagcctggtgactttgaatatagagaacagtgactcggggactcacgaggctgtccaataactgaccaagcactaaatactaacctggcgcttataggcagcttagaaacccgctatgatgacggtgcacgtaaagaacgcccagcctgaactaggaacgagataacattgttgccattgtccactttagcctgaatgaccgggccatccctccatttggattgaacctcactcgcagcagaacttctttcacagatccttgaagatcgggcttaactcgtgctcttgtataacaccttggacaggagttccattt

SEQ ID NO: 18098 - DNA, 446 bp, Oryza sativa
  Clone ID: uC-osflcyp026b03a1
aaaagcatcacattcatcttcatgatcataatgagatggataacaggagtactaacactaccatcagataactggatattgtttatgtgctaaaagcatggctgccaacatatattcatataggatggctgcaatcctaataataagaaaaaagaagtgctcaatacatcgtattggcaatttcagaccattgtattcagctgaacaaaagccatgttcaccaataatcaccacaagagcacttcccatccttgaaatggtggaagcgcttattatctcttacgataagctctctccctacaatcctcgacatgatcttgatagcattgtggcagtctccacagatcctgaggttcttaatgatgcgaagcggagtccttgctggggtgctaatcaaaccataggcaatcgctagcctctcactatggtacagcagtgcctgctcc

SEQ ID NO: 18099 - DNA, 501 bp, Oryza sativa
  Clone ID: uC-osflcyp026b04a1
gcagtgcagcaagcttggatgcctgtatagctggacggccttcgtttttttttttttttttttttttttttttttttttgttacaaagtttattttttttcattttttacactatgcacaatgctggaatttttctatttaaggaacacatgacaacaatggggagggttggaaacggaaaaattcgaaaaagcaactcgcatatataaaatgggtaaaatactcatgacaggcagtcggtggaggaataattcttaacttacacatggccacctgctgctaatgatgaattaatggctaaaatgcttttctaaaatagggaaaaaggtgatggcttgttcaaaaattaaaaaattaaaaaggtggggaggggcgccttattaaccgccgggaacaagccgaactcctgcaaaagcgggctaagcttcaacggggatggggacacaaggggggatttatgggggataaggttttttttgccggaccccttagccagggacg

SEQ ID NO: 18100 - DNA, 390 bp, Oryza sativa
  Clone ID: uC-osflcyp026b06a1
gtatacatgatttattttcatttttttatatatttttaaaatgttaacacatttattttatataaaaaggagagaagggggaaacagaaaaaatgggaggaaaaggtatagggaaaaatggcaaatatataaattggccaaaggactatgcgggttggggaaacggaaataaaatccacgggggaaaaaaaaataagttcacgggaaccgggggaaaaaccaaaggttaaaattaaaaccattaaaaggccgaagggggttggttttctagaaacacaaattgggggcttccttcccttttttcaaggatgggaaaaaaaaaccgggcacccaaaaaaaaattgggaatttcctaattgagggggggggaacaaaacccttggaatttga

SEQ ID NO: 18101 - DNA, 451 bp, Oryza sativa
  Clone ID: uC-osflcyp026b07a1
atgcaacaacaacagaccatcattcatattcagccacggtttagctttaccgcggaaggagtacacacttacataatccataatgacttggaccaaagctactgatgctactggtcacactgctgattcagctttcagacaagcaagcaaaagcagcactacttaactggctggctagttgcagtagtggtagtgggattaatcacgcaaacctgaagcagctcagttgagctgagcggctttagcccataagcaataaactatagctagtgacttcactcagtgcgtgcgcttccgtttttatttatttagctaatcactattgataagtatcgcttgattttttttatatgtgattaatttagggaagctttttgcgccttgagttcttgatgtcttttgagttcgttcttagatggcgaggacgaggcccggcagcgacttgtgcgcg

SEQ ID NO: 18102 - DNA, 442 bp, Oryza sativa
  Clone ID: uC-osflcyp026b08a1
agtcaaattgcatgtacttttattagattgacaatattccagacaaaccatactcataatatgccggtagtgcataatgaggacacaacttgcatcaagcaagaatcgctttaatagcaacaaatagtcttatgacttcaaatatagagaacagtaactggtagcttcagaggcttcccaatatctggcagcacacgatattgcatacgagcatctataggcagcttagaaaccgtgaatcttgatgttgtccttcttagcaatcccagcctgaactaggaacgtggcaacattcttacgctgatcaccttgaagctgaatgacctggccaagctctggatcttggactacagtaccattgcagcagaactcctttttcagatccttgaggatcttgttgtaactgtactccttctttaagccctgaacagtagttagactc

SEQ ID NO: 18103 - DNA, 439 bp, Oryza sativa
  Clone ID: uC-osflcyp026b09a1
atccggaacaagcgatatatatttcataatgaacataaatctgcttctacaatatactccatcagtaacatgagcaccaaccacaaggtttattagagacaatgccagccccatgctaggacaagcttatttcagctgttcttcctcttcatcttcttcatcatcggcctccttttatcggcataattttattcgcctttttcgcataccgtccataagattatacctatttctttccccagttctgaaatgtccaaacatcttatgggttaacaccccgcgggcgttttgatcggcgtgacgacgggcttgacctgcaggtaggtctttaggctgtcgatgcccttctccctcccgattccgctctggttgtattccgccgaacgggatcgcggtttcgaagacgttaatccagtttacctcacacggtcccgaccct

SEQ ID NO: 18104 - DNA, 387 bp, Oryza sativa
  Clone ID: uC-osflcyp026b10a1
acactatgcacaatgctggaatttcgctatttaaggcacacatgacaccaatggggatggttggaaacgggaaaatttgttcatgctactcgcatatattacatgggtaaattactggtgggaggaagacggtgctggacgaagccaaaatatacacattgcagcttgctactaatgctgaatttagggctaaaatgctttcctcgtctcgcaaccgcaagatgacaatagtactagtagtaaaccagagcagcaggcgaccggaccgggtcaggttgcaacttgtgattactggtatggatctgaagcctccttagccggtgatgtggctcagcatccatggtggcagcccaatgcgaacatgctggggctgccctgctgctacat

SEQ ID NO: 18105 - DNA, 409 bp, Oryza sativa
  Clone ID: uC-osflcyp026b11a1
ggatcctgtttatctggactgcgtttgttttttttttttaaattttttttttgttgtttgttagtaaacacccaatacctgtacctttttaataatttcaaatccggcaaaccggaagggccgaacacttaccactaccaggtaaagcccggtttcgagaggtacttatttatttcatatatgtacagtatgaaagaacaacccatcacatatgtcaaagctattcacaaacacgacacaaaccctcctgcaagctcatatttgtcaaggacggacggtcttattcccgaaccacctctatatcttctccgagaacagacacctacaagcgtacagagcttctgctagctgccttcgacggacaaagctgctgctgctgaacacctgatgggttccatctacattacct

SEQ ID NO: 18106 - DNA, 461 bp, Oryza sativa
  Clone ID: uC-osflcyp026b12a1
gttctttttttgtttttgttttttttttgtttttttttttttttttcttttattttttctttttttaaaagtagaacacatttattttatagaaaaacgggagacggagggaacagaaaatatgctcggatatgctaagtcgaaaaatggcagctctgcaaattgccccctggattaggagggcagaaggaacttggattggatacacacattcccaattaacactaacaaaatatcattctaacaacggcagcaggcatccattctgcaactacatgtcacatgcagtctcaacgttaagccttctgacggtatatagttcccagggaacgaaaatcgggaaacatgcagacaatgctaaccattcctggagtctggcctagatgttgtgaacttgcaataaacctaaatctcagatgcttatgtactgatttccgtaactctgaagaacttcaaaaact

SEQ ID NO: 18107 - DNA, 454 bp, Oryza sativa
  Clone ID: uC-osflcyp026c02a1
gttagcacttagaacagatataatttcatcaaagaaaaccaatacaacatataacaatattacaataataataaaaaaaatctccttttcccaaaaaaataaaataaaataaaaatctcccatttggggccacatgccatctctcctatatgggcctcatttcttgatccgaaataatcctcataaaccatactaatatttttccccttttccccatacaccattgtaataattatgtcaatggattttctacgtaggcttaatgatcaacccatcataatcttcgctagtgtcaacggattattcaaagaagactggagaaaaagaaatggtgatatgaagaaggaaaaatctgtgtagccatgcatgcgccgtacgtcgctcagtactcctcggaatccggtgcgctggcgccgggtcccggcgcgtcggcggagccggacgacgacggcga

SEQ ID NO: 18108 - DNA, 438 bp, Oryza sativa
  Clone ID: uC-osflcyp026c03a1
gatgtaaacataccaattcacactggtaaaaccctgagtacatacgtaatcacctagatatagccctataggcacatacagatgagacaggcgcccgtgaccaagttttgatgtcacgtataccttattgcacagatcggaaagctacaagcccacaagaggacaccgtgatttcagaaagggaaaagaagagaatacatagactgcacaagccgttctcgtgcatttgctagcagcagattggctctagatgagatagcggtagatcatcttaattaatcttaattcttaattagttgcaggactccttggcgaagcctacgcgggagttggcgacgtttaagacgacccggatgttctgctgctgcaggttggcgatgacgttgacgacggagttgacgttctggggcgccttaggcatggcgaggcaggccagcg

SEQ ID NO: 18109 - DNA, 422 bp, Oryza sativa
  Clone ID: uC-osflcyp026c04a1
aaattaaacttttcaacatcatattatcataggtgcatcttaaaatgtgaaagttaaccatggaacaacatattctaaagcacatggaagaagtccacaacatgcagatacatgcttccgctgcttcagcgatgcagtgaaagcttaggcttttaacacgtgagcttcacttccagagcttccgtagggacatgttcttttccgtgtctttcttcatcaccttcgccactgccatctcaaagtcctcttgtgttacatgcacccttttctcacgaagagcaaacattccagcttctgtgcagaccgccttgagctcggctcctgaagccccattcatcttttcagcgatctttttcagatcaataccacgcatcaagttcatttttcttgaatgaatcttcaagatatcaaagcgtgaatcc

SEQ ID NO: 18110 - DNA, 438 bp, Oryza sativa
  Clone ID: uC-osflcyp026c05a1
aagcctcgcacatgacccattttataatataatttgaggcaccaactgactccctggggcttagtccagagttactagaccagatcgacgctagaacctaccgaaaaacaagcgtaggaccaccactacaatctttctgaccaccactgctcggatctcactacttatcttacctaaagctaagacgctgccacaatgtatccatgttacaacaggaggacatgccaatcctagagatagtacacagcaaggcaagaatgtacagaaaaaggtttaacatggctaattgatacagatcttacaaaccaaatggcatgcatatcttggagcttacagctttacctagggttgctcaggagtgcaattgctggaaaaaaatacactgagcaggattccattcagtttagatcaccctgattatctagaagcttgacagca

SEQ ID NO: 18111 - DNA, 108 bp, Oryza sativa
  Clone ID: uC-osflcyp026c06a1
cgtccttttttttttttttttttttttttttttttttttttttttttttttttttttttttttttttttaaacaccccacctgacaaaaaagggggagaggggaaggg

SEQ ID NO: 18112 - DNA, 440 bp, Oryza sativa
  Clone ID: uC-osflcyp026c07a1
agatggggaaagaaaggatactaactaggaaaggaaaacgaagggagtgcaaattttttttatctgcacaacatgcctagaccgtcgagtaacggaccgaactaccactaccatgcctaaaaactgcgcattctttaggatctcctctggccacatggaagccatagagctcgcccccttaatgtgaacctccttaccgtcgacgacaaccgacccttgctaacacacctctcctgaggatgtgaggagggcgctggctggttcctttgatactgcttgcgcctaatctcctgttctatggtcacatcatgcatggcagtttcctcacattgatccaggtccatatctgataattggtgcccaggtttaggtgcgaggatcatctcaagtgcccggcattggtcaccggagagtacaccagactcagggaactcaacatt

SEQ ID NO: 18113 - DNA, 438 bp, Oryza sativa
  Clone ID: uC-osflcyp026c10a1
gaactctgaatgttaaggtgcataaacagtaagtacagacattattaacctcgccagaagttttaggcccatcattatatgccagacaaaccattacctatatgatgagatcagattaaaaagccctaattctcatcgtgctcatttgctcattacatctgcattgcaccatccaagatccatatctgcatatccatagctgatacagctccatcgtgaaaacgtttattcctctacaaggttttgcatgctactactaatgcactatacctttagacattcccaggttacaataccgagtaaacaagctgcctaacaaacattacaatacttgatatgttgtatgatcctgaaggccctagccaagcaattcaagcagactcggcgaacccaatcctgtttttgccaaagtcgaagacagtgtggtatgcagccatg

SEQ ID NO: 18114 - DNA, 437 bp, Oryza sativa
  Clone ID: uC-osflcyp026c11a1
aggaatccacaagaacatatatttatttcagcatcatccatggacagacacactggagactggagagagatgggagatcagatcgagctcgtaggctcacgaattccaagcatataacaacaactacaatctttttcaccacgacggcccggatctcactacttacttaccgctgctaaaacgcaacgcccatgtcttcttggatcagttggtggcggcggcgtcggcctcgtcggcggcggcggcgtccttcttctccggctccgggggcgccgggttgagctggaaggcggtgacggggagggcgcggccgaggccggccggggtgcggaagacgagcttggtgccggaggggctgaggacgatctcggagatggagacccagatgaggagctccttgctcttcaccccggcgacgccgtgcatccgcccctgct

SEQ ID NO: 18115 - DNA, 316 bp, Oryza sativa
  Clone ID: uC-osflcyp026c12a1
actggacaagagcatgttggacgcctcgcattatcgcatatagcggatgaaaaaacgtcaggccagcctgcgcgacaaccggtagttacagataagagcagaactgcaagccaaatacactcttttctctccatagcagagtttgagcagcgagcgggcaaacataaattattcaattattaaatggaatgaccactcttgatcatctaacccttttggaacaaaacttcgctacccgggatttacctttttagggggccaccacctcaaagaggggtgggttggaagcaggcaggaccctcaaaccctgggaggt

SEQ ID NO: 18116 - DNA, 459 bp, Oryza sativa
  Clone ID: uC-osflcyp026d01a1
gggagcctggattgcggcgcgcgcgtcgtttttttttttgtgttttgtttgttaataaatgttaatttcacctttgaacgtttttggttttttttttggatagagaattacaggagaaggtggatgtgaggagagaatcaggagctgtcacaaagctatatacaaggggggaagctgaacgagaagagagcatatgcttacctcctacaggaagcattatgacttgccggaacaaaattacaaatatgggggaaaaacggaagaaagtcatgcgggagcagctagaggtacttctgggacttgggatccctgggggagagtggagatgaaagaagagaatccccggacacagtggccacgcgacatgttgttggccagaacttggcgccccgaagccaggctgtatggaacgcagcatactccctggagtacggattaaaccatgagtcgctcatcaga

SEQ ID NO: 18117 - DNA, 524 bp, Oryza sativa
  Clone ID: uC-osflcyp026d02a1
aagagtttcgcgtccccgccgctgcctcgctgggagcctgtattgtggctgcgttcgccttttttttttttttttaaataaagctgcatgctatcatagcgtgctattcacggaggagcacatgtttacatgttacaccgacaccctacacctatgcattttcatgcaggggctattcttccggccatactttcccatatcgagcacacgcacgataggtcgtccaaagttgcagccatacatacgtacacacatgtacgcatacgcacgtacatacattcataattaaaaactcgaggttaattaaatacgtagttgatggcatctgtaatggaacttgaggctggggaggatgttgctgtggaccggatcagcgaggtgatcaagcaggttctgcacggggccaaccccggcgaagagcgcctggacggagaagccgaggaaggcgagcatggcgagcctgccattcttgatctccttgagcttgagctccttcatctccgcctcgctcttggtcccgaagc

SEQ ID NO: 18118 - DNA, 418 bp, Oryza sativa
  Clone ID: uC-osflcyp026d03a1
gagacatccatgtaatatgagttgcactttcagtattcccaattatatggggttaaaagcatacaaataaccgaagtgtgttaatttgggagctaggactctgaattacaagatacttacgcatcgataaaggttcttgatcagtctacgactactagccacaggatattaacaaaggtcagtctagattaactgaaatagatcaaggtaagagagccttgttcagtgctagtctagctactagaaacaggacaattgctgggcgtcctgcaagatatcatcagaattccccctggcttttccagaaggaagcaggtcatggatcttcacctatctgtatctcaatatgacttgcgtttttcaggcgccttctgaaaaaacaggtcagcatcagctgcaaaggggaggatttgcctcc

SEQ ID NO: 18119 - DNA, 519 bp, Oryza sativa
  Clone ID: uC-osflcyp026d04a1
aagagctctgacgtctcccgctcgcctgcgtgagcttggatgctgtattatgcggatttcctttttttttttttttgttactttacattttcatgtggcatcaagctcaatagatgaacaattgaacacatgacagtagatggcacagcatagccaaattaagttgcaaacatgatgtaatctttggacgtgaatatcacaaagtatgcaaattcacttgaagagaaaagtgccatactacaatttcacatgagcaacccctaaaactcaacgcgtaataacaactacagagcatttcgcaaagagtaaacaaggaaaattctcacggtggatatgctccatccagtttacttcaagatcgtattgatgacgccggcaccgacggtctttccaccctcacggatggcaaacctcattccctgctcacaagcgacgggctggatgagctccacaaccatcttgacacggtcaccaggcatgcacatcttcgcctcctcgtccttgtcgttcataatcttt

SEQ ID NO: 18120 - DNA, 425 bp, Oryza sativa
  unsure (1)..(425): unsure at all n locations
  Clone ID: uC-osflcyp026d07a1
aaatcaaactgttgtttatcatagtaaatcttcccggagaatcagatgctcacaattcatagcgttcttcagcatcttacaacttacaagatggcgcagatatacaagcgcaactatcttaaagtaagctgtaggaggaaatggaaccatttctaacaacgggaaaaatataggttatagaaggaaaccatttgaacaaattaatagggaaataaattaggaggatcgtttccgtccgatctcaatagaactggacgtttgatacgtagatggcgtctggcatccagttgaccgggatgacgtctttggcgatgaggctcttgccggactcggtggtgacgcgaatggagaagggtgccttgagtggcgtggcggtgtccatcctccagatggcgccccacgacagcttcatgggcctncacgct

SEQ ID NO: 18121 - DNA, 385 bp, Oryza sativa
  Clone ID: uC-osflcyp026d08a1
catatcacctatttgtgttaaaaagggaagcttaggattatgagggacaagaaacataacggcatagataaaggttcatggatgggaatacagactatctaaccacgggagaggaacaaaaaggaatctgtgtctgacccgataaaaagtaacaaggagatgattggccgggataaaaaggtagccatatattactacaaggcggggggggagggactgggccgtcctgcaagaaataatggggaagccccggggtgactttccagagggaagccgaatacgcaagggcaccgagcgggaccaaaaaagaccccacggtttttaggcccttttaaattacagggtcagcatcatttgcaaaggggctggatttgcctccgggact

SEQ ID NO: 18122 - DNA, 395 bp, Oryza sativa
  Clone ID: uC-osflcyp026d09a1
aattgattaaatgaattgcactggctggcgacataaatcaaccgatctgatgggcaggcttacaggcttgataggtcaaggtccaaaccgggttttctacgctacacttcggcctaacgaacttacaggtgacatgaatagagagatcaacgactaatttgactggggatcacctatacatgaacaacaacagaagagctatttcttggctatctcccggaccgctttacgctaatgcttatggtggatgtacataggctagcgataggctacatgaagtagcttaaagaagtcttcttcctggacccgccttctccatatagaacggtccactgaataagctcaggcatatttctcgaatcagatggtatacttgcacatacctgctcatgggc

SEQ ID NO: 18123 - DNA, 376 bp, Oryza sativa
  Clone ID: uC-osflcyp026d10a1
ggggaaaaacaggagcaacgtttgcaacaccagactcagcaacataggaatccaaaggatgaaacggggggatgcagggtaacggggaagggaaacagattccaaatggggcccccaaacatagccaccattcaacgaagggccccccccccccccaaaaccaaagctaaaagaggcgatgatgattggggtatgcagaaaaaatctgaaccggaaagcgaccagccggggatgatgagcgggagatttggcattggtttttttataggaaaggggccatttcgggcaccttggggacctcatccggggtggtcagctgggccacctcgagggggggcttcccgtccagattttggggggggacaacagggccatg

SEQ ID NO: 18124 - DNA, 439 bp, Oryza sativa
  Clone ID: uC-osflcyp026d11a1
acaaaagacattaattaataatactagtatttagcacaaatattccagcaatgtgaaaaatctaatggtacaaaacttagtcttacggactacatggggtctcaaagtcatacagtcgaccaaaacgctaggctcctgcttcaacaattgtatcagcagcggcggggtttttcccgaagggtacacaaatgcttccgaagaacatactcaatccctatagcttttcaagactccataacacaagcgcttacaaaaacacaccgagcccccctaacatttccagcaaattggaactaggcgggttacgcgttatttgcgtagggggactcctcgcggttggctggctgtgctggtgatctgctgtagcttcgctcacgaggaggtggaggtgatcggctgtagcttcgtgcacgagctggtggtggcgacctgctgtagc

SEQ ID NO: 18125 - DNA, 311 bp, Oryza sativa
  Clone ID: uC-osflcyp026d12a1
gattggcaaatgggattttgctaattaggccacccccaattactctcttattattgctccgaataaatagttttttttcctgtacaaatctgaagcagaaaataaggattaatctaggctccccaatgcccccatctgatctcactcactaatcttgtttactatagcaccagctgcgccgccttctgctgcttctgatgttgctgctgctgcggctgctgcgatgactgaagcctccccttcagaaaacccctgcacaccttcttccacaaatccttgtctggttgccgcaagtcgaagctcgccttcgc

SEQ ID NO: 18126 - DNA, 280 bp, Oryza sativa
  Clone ID: uC-osflcyp026e03a1
ggttttggttttttttttggttttttttttttttttttttttttttttttttttttttttttttttttttttttttttttgggggggggaaatcccaaaaaaaataaaaaccctcaaaaaaaaaaaagggggactcaaaaatggggacccaagctttttgggggaagcgggcataaaaaagagcgaaaggacagagggggtttttggggggggagacacgggagttttaatataaaaaaaagcgggttaggagggagggaacacaaaaacaagggggggg

SEQ ID NO: 18127 - DNA, 59 bp, Oryza sativa
  Clone ID: uC-osflcyp026e04a1
ctataaatatggccaaaaactaaacaaaaacccggaaaacgccgaaacgcggggccaaa

SEQ ID NO: 18128 - DNA, 423 bp, Oryza sativa
  unsure (1)..(423): unsure at all n locations
  Clone ID: uC-osflcyp026e05a1
aagggaactctcacaatggcacaaggaatgtttcgaaccaactgtgtacaaacattcacaccaaataaaaataaatgagatcacatgaatcaaaatccaagaaaaagagcgtacgtggattgaaccacatacacttttgaatcagaatagtgcatcaacctgcctactcaaaataactccaggtacagggtttattttatattttttttaatcgaacaaaacaatcaggcagacaatgtacatcgcgagagcgggctggttacgatcgctttgctttgatcacaaagcgaggccttccttccgaaatgagattctgctacacctgtgcaccgcgccggttttcacaggcccatcgaccgttttcacgggcttttcggcgtaaattatcgcggnggtattttgtttggagtcgattgccttttg

SEQ ID NO: 18129 - DNA, 436 bp, Oryza sativa
  Clone ID: uC-osflcyp026e06a1
atatgatatccaggatccagcttccatttccttgattcagattgcactgtatattacaacatagataatacagctaccaataaaaaaacagtcttctacagaagacatacgagtatgaagcgctgccacattagcaaaacatcaggaaaaaaaataaacataatacccaccagattaaccagacatggttcctattgtagtttgtgcagatgtaagatatacattacaagatgcgtttattttgcttcagatctccttccgctttgtggggcttcgggaccgagatgatctgtcggttcttgacaaccgcctacccttctgatcttgtttggaatctactaattcagccgaaagctcagaggtagtttcaggccatggggtgcgcttggcgggaacaactatgtccaaaggtggctcaattacccacccctgagga

SEQ ID NO: 18130 - DNA, 459 bp, Oryza sativa
  unsure (1)..(459): unsure at all n locations
  Clone ID: uC-osflcyp026e07a1
aagcagaaagcatntttaggtttcattttttgagcagtcaatagaacaattcgaaccaccgactgaaggtcaaattagccaacacagatgaaacgaagaaacgacgagactttnangtcacaatcaccgaaccgactttgtatcagtacaacgtcagaatccacaacgttggaataaagagtgaccaacataaaagataagacaactaaaattcttttcacgcgccaaaaaccaattcaactagtgccgctggagtttaatcaacgttgccaccttcaagggctttctggccatcttgccgcttcttgtcattaggttcagaagagctacggtgatcatgatggtgatggtggtggcggtggtggagaccatggtgcccggtcttgagaggccttttaccatttctcaccttttcatattcaccggcagctgcatcatgggatgactcctccagggagc

SEQ ID NO: 18131 - DNA, 298 bp, Oryza sativa
  Clone ID: uC-osflcyp026e08a1
cttaacggggcagcaaatccccccaagtatagaaaacccgaaaaaaaaaaacagggccagacactgttctgggtccccacccctttcagggggaggtggaccaaaaagagcgaagggggcaaaggcgactcggagggggggcgacgggcgaccaacccaaaaaaaagcgggggcagccaaaaagaacaccggggggggggggggaaccaagggaaaaacccccacgggcacaaagccaaatagggggcgaacggccaaaagcgaagaaaaccggaggaacgaaaccagagccagaccc

SEQ ID NO: 18132 - DNA, 379 bp, Oryza sativa
  Clone ID: uC-osflcyp026e10a1
ggccccaagcaacatgcttaaattctataccaaaacctggcaaccggggtccgggagtatttacgggattacacatgaacattacccagcattgggatttccaattgccggaaggggataataatccgggccggacagggaaaagtcagatgggggggggaagaaaagcaaagaaagaaacaagaaactgggtggggcgctcgaaacttcgaaattctcattacaaaggatcggggggaaaaaggaagaagtctggggaaaatttttggagcgggggggggttacaaagggagcagcagcagcagcttttacggtctcacttccactggttggggaccatgtcggcgagggcgaccaccctttgggaggatccccactc

SEQ ID NO: 18133 - DNA, 435 bp, Oryza sativa
  Clone ID: uC-osflcyp026e11a1
gaagttaaagctggagcagtacacccatgatgatattaatttcctctaggtagtagtggtcggtcggttgtctgtagaggacacaacttgatccaaaccacaccagctaaatttacatagattggaagggagagggaaaaaccaaacaagacaagatgtgggggttcagagaggacacatcaagcgatgaaaatatgagctaaagcgaggataagcctctgcttaggcccctagtgctaatgccctacttcgagtggagcttagagagagagatcgagagatcgatacacgcgcgtgtaagcgtggctcgtacatttggggagggacatacgacataaatattttatatatgtagatatatataccctagctaaatgctctctggtggccggagaatggcgccggcaggacgtacgcttgattaattggcgccgc

SEQ ID NO: 18134 - DNA, 383 bp, Oryza sativa
  Clone ID: uC-osflcyp026e12a1
cccaaaataaaggagcacaactcccaaaacagggaattagtagccccatttaccaccctaattaaacagcaacagggccacatgatacattcatcaggatccaccacacaatccctgtcaaaaatgctaaactagactaataaactaatcaatgaggggtaataaaaggaaaaacaattaaagatactgggatcaatccttggtgaaagatcaattttttagagccaactgaaccatcattaattcggcttaagccggagcatccccgccggcatggccgcccccctccaccggaggcggtagggcgttaacaactaggccgcgcaggccggccttgagctcgatgtcgcaaaacctgcggacctcggcggggccgccggcct

SEQ ID NO: 18135 - DNA, 358 bp, Oryza sativa
  Clone ID: uC-osflcyp026f01a1
cttgggggaaacgactgaaatatccccctccccccccctataaaaggggggcaaaccccaagtgccacccccttttaaaaaaaacaacaaaggcttaaatacctcaaacacaaaagggggtgcccaaaaaacccgggtcaaaaacccttttgacaaaaaaattagggggggtgttatttggccaccccaaaattcccccaaaacttgttttctctagaaaaggcctttttgggaataaaacgcacggaaaatgggccagggggggccctctgagagcccctcaacacccccccggggggggggaaaatgatttcaaccccaaaaaaaaaaacctttttgaggaaccaaagcccccggg

SEQ ID NO: 18136 - DNA, 393 bp, Oryza sativa
  Clone ID: uC-osflcyp026f02a1
gtaattaattcacaacaccatatttcattgatcaggttcagaacctgcacagaaatacacactaccggtacagatctcaccttttaaaacatactcgtacatccatccacgcttggcaaacgaatacgtacatatattcggtacatatacaactacatctactggaccgagtacacgcacctatatactcctgcagagacccgcatcgaaatcaacctagctagcttagctgaaggcgatgcgtcgccatggcagcacggcggcggcggcgctcacttgccggggacaaataagcaggcgtaggcccaggccttgccataagcttggtcggcgaggtggccgtcttttttttctgggggcccttgccggtgacttttcttgttccgaagaagc

SEQ ID NO: 18137 - DNA, 466 bp, Oryza sativa
  Clone ID: uC-osflcyp026f03a1
gttctttttttgttttttttttttttttttttttttttttttattttcttttttttttttttttttttttaactttgtacaggacgggtcactacctgcacagaactgaccttctctccaatacgaacacacgcatccacgcggcccacacgaatacgtacatttgtacgggacacggacgtacatttactgcaccgggtacacacaggcacactcttctggagagacgcgcatcgacgggaagggagctagcttagccacagggaatgccgaagacatgacggccagtcatcaaaaggagaaacctgccggggacgaagttggtggcgtcaacccaggccatggtggtgacggggtcggcgagaaggcccacgaggaaatcgagggggccctcgagggccggggggcaggggaggaacaaccactccttgtcaatgatagcagggtgacatctttgccaaggaaa

SEQ ID NO: 18138 - DNA, 452 bp, Oryza sativa
  Clone ID: uC-osflcyp026f04a1
cgttctttttttttttttttttttttgtggaaactttttttaaacttattaaatattcgtggggttatttaaaaaaggaggagcggcttcgtacccacacacgggtaattagatccaatcgccaccacgcgaaatcaatcgtccaccagctagcttatcgtgggcggcgatgatcaatactcaaatacacatgtataattgcgacgcagcgcgtgccgtacgacagccgagggaccggttgaacctgctgcagccgcgagtgtacgggttggcctcctgcatcttcgagacccccaggagatcgacggcgttgatggcggcattgacgacctcgccaacggggggggcaatggagggggagaccacggcgggcagcttttcgggccgcgcggcgtgggccgtggaaaccaggatcaggcccacgagcaccacggacaccagcgccaccctta

SEQ ID NO: 18139 - DNA, 363 bp, Oryza sativa
  Clone ID: uC-osflcyp026f06a1
agagaaagatttatgcccaatgactaacactagcgattaacaccgtaggcaggggggagaccatcgggaggtacctaacctaaaacgctgatgttttcatggggggggacatacataacgtccaaaatttccaaagcggaaagccttcctttgcaaataaagggtccaggagggagccccacagaggcacggcaaaacagggggactggaacggcaagtggagagggctcacggcggccagctcttttgtccaccaaagcccaaaggaccttccttcccgggtggggacccaaacgaacaacaagcctgacttgacctagcttggtttggcagcccaccattgctttgaagtaataagcaccc

SEQ ID NO: 18140 - DNA, 143 bp, Oryza sativa
  Clone ID: uC-osflcyp026f07a1
acaagaaaacaatagccattatagaactggggggtgaccggaaaattgaatgggataattgaaaacaggaacctggaatacaccgggtcattggaaacacaggtagggatggaaatatcagatactataccaccggtgctata

SEQ ID NO: 18141 - DNA, 416 bp, Oryza sativa
  Clone ID: uC-osflcyp026f08a1
ataattaattcacaacaccatatttcattgatcaggttcagaacctgcacagaaatacacactaccggtacagatctcaccttctctccaatactcgtacatccatccacgcggtccacacgaatacgtacatctatacggtacacgtacgtacatctactgcaccgcgtacacacacgcacactctcctgcagagacgcgcatcgtcgtcaacctagctagcttagctgaaggcgatgcgtcgccatggcagcacggcggcggcggcgctcacttgccggggacgaagttggtggcgtaggcccaggcgttgttgttgacggggtcggcgaggtggtcggcgaggttctcgagggggcccttgccggtgacgatggcctggacgaagaagccgaacatggagaacatggcgaggc

SEQ ID NO: 18142 - DNA, 466 bp, Oryza sativa
  unsure (1)..(466): unsure at all n locations
  Clone ID: uC-osflcyp026f09a1
aatgttcacaagaagatatacgttttttagtgtctcacagcaaaggctacaaaatttaagtgtcctgtagcaaaatttgccaaaaatctttggataaaataaggtaccgacatcacagtacaataaaaaaaaataccgattctacagcaaactgtactgcgctatcaatccgaatcctgatacagccacacataacaagagaaaaatcttattacaattgcaggaaaacgagttaggcagagagattatcaaagaacttcatgtagtcatcaaatgactctccacgccgaatcttagcaatggacccatcatcttctacccaatattcaggtggtcgcaacttcaagttgtaggttgaagccatgctcatgcagtaggctcctgcgtcatgaaccaccaaaccagctcccttatnangngttggaagttccctgtctttgccaaggaaatctgcagattcacaaac

SEQ ID NO: 18143 - DNA, 314 bp, Oryza sativa
  Clone ID: uC-osflcyp026f10a1
gtcaatgagacaaagttcaattcaaatatggacgatccaaaaaaggattacatcaaaagtaaggtacactctctgcagtatgatcaaatttctcaaatcatcagcaaacatacaatgcctaccaacaaaagaatcagttggttgaagggatgaactgaaggagcccagttggagccagggggagcaggggagtaatcacctgaacccgagctcgtgctgaggaccacgaccacccaatcttcctcattcgcgatcccaacaccagagaacttggtgtcattcagatactggttgtactgtgacttggtgtattg

SEQ ID NO: 18144 - DNA, 368 bp, Oryza sativa
  Clone ID: uC-osflcyp026f11a1
aaactaaaagttaagttttagaaacagcagggccagatttaagcatccacaaacaaaaccaacagtcagttgatcattgcagggcttttagttccaggaaaactaaaaaggggcccccacatgttgggcccattgggggaaaaaactactttttttttccccaaagggttttttaaaaacccagggatgaattgcccccagcggggagggggccaaagggagggggctgagctaaacccatttaaccccttttaacctaacctaataagggaacccccctggggaagggggttcggaaccagtttccaatctcccccattttggccttaaaacctaatgggggaaaggaacccacttgggggaaaggg

SEQ ID NO: 18145 - DNA, 386 bp, Oryza sativa
  Clone ID: uC-osflcyp026f12a1
gggctcaaataacatgccctgccattcacaaccataaaccattcaccttaacccagcatttgatacactaaattagcagatataatatttttgcgattcatagggaaagctaaaataatcattacttttaacgattcctttccattcaaatgttacatgaagcaatgccactgaactagtacatattgggggaatgagaatgtaaagggttgaatcatttgggcgagcaactgttttgtccagcaaggtccagcttaactttcatccaatcattgttcgctttctgccacgttgcctgacttgagctagcttgttcgaagtagcccaccattgctttgaagcttttttgtaccccgggagaattttctccatcacatcaccacatg

SEQ ID NO: 18146 - DNA, 486 bp, Oryza sativa
  Clone ID: uC-osflcyp026g02a1
cgttcttttttttgaaactcaacaaaagcgtgcgacctgaaacatgcgtcatatccaacttgctccacactgctcacattacaaattaatcaagacgaaactaaacatggatcgatcatcacccaagtgtcacatcctcgcaacaaaagccttcttccccatctgaaccaaatcagtccttcacaacacatcctcacaagattctgacgatggagtgaccaccatttttatgcgtgttgccgatggcgaaatgggtaattagaactcgctgctggcaacgggggcgtggtcgccgcacatgtagacgtaccggtagacgaggccggcgaggccgccgccgacgagggggccgacccagtagatccagatgttggtgtagtcgccgctggcgacggcggggccgaaggagcgcgccgggttcatggagccgccggagaaggggccggcgacgaggatgttggcgccgacgatgaagccgatggcgat

SEQ ID NO: 18147 - DNA, 443 bp, Oryza sativa
  Clone ID: uC-osflcyp026g03a1
caaaaccatccattttttttattgtcgacaaatttatcagatatgctctagatacatatctcgggtgtatatagccggagctttgcatttcacatatcctgacccagcgatcagttgggcactcttacaataaaaccggtcggagagggagggaagagattattacatatgtgttaagagcagaggccattgagatggtacataaccaaattgcaaaataaaaatatatagcatattatatattgatatatcatcaacatagcccaaaacaaagctgcatactattattataggcagcaatccaccagcgcgatgcttgatcttagcttagctgccaccagactccttgcaacctgggggcttggaggcgatgaagctaatcaactgcacctgcctgaccgtgatcaagccaatgatacggacaaaggcatcagggtaggcct

SEQ ID NO: 18148 - DNA, 457 bp, Oryza sativa
  Clone ID: uC-osflcyp026g04a1
cgtcctttttttttttttttttttttttttttttttttttttccgaaccttgcaagtggcaacttgcattcgtcgggtcagttcgaaaagcttgcaaaatgccacgaaggagggaaggtggagcaacctggcaagcgcacatcacaattgacagggtgacaggatacacccgcgtctctgttcttactgcgttcagctgccttggcgaggattaattactgcctccacatcctactagacgccattgttgacgagcttgaccgtgtaccggagctcggcgacctgcctccggatggcgtccaccgtcgccctgacgctccggctgttgatgtaccacgcgtcgtactgcacggcgacctgctcgaggctcaggaggttggcgatgcccgacggcacgctctcatggctcgccgggcccgtggagagcttcagctcgaggtcagttagcttcggcatg

SEQ ID NO: 18149 - DNA, 275 bp, Oryza sativa
  Clone ID: uC-osflcyp026g05a1
attatagccatagcttcgtattcattccaggtatcaaagctcaaagtgaacggcgaagatggcacgttatgactttacaaaggaagacttagactacatataccattgcatagtgggctggccatgctatgataggaagagccccttgaacatatgtgagttggttgaacccaaggatcaccgatgatgtggtaagctgcctagcataagtggacgccggcccagcacaagtgataacacccatctggtcgtattcatgcaagaatgtggccagc

SEQ ID NO: 18150 - DNA, 423 bp, Oryza sativa
  Clone ID: uC-osflcyp026g06a1
gaagaaactatgatgatgatgcatggttaatcggcaagacttaaattaatgacaaaactctgaccgatcttgaaacagttaaaaagaacagattgatgctctggggccatttcaacattgggacaagagaaacctcctgaacagaagcttcagaagaatctcttctctctctgtttttttttcatggcgtctttgcagagcacacaggggaacaagcaaatgcctgacacctaatttcaattctaacttgctaaggcagtaaggctaatcatctcctaaagccccaaatgtttagcttcttgtttgaggcagcagcagaagaagaagaactatgtccaagaattgagaaagccaccaaaaaaaatcctaggagttaatcatcctctccatgatccaacatggcgagcgagcgatcatctgata

SEQ ID NO: 18151 - DNA, 436 bp, Oryza sativa
  Clone ID: uC-osflcyp026g07a1
aagacatgtaacaggttccaaaggtaatataaatatgcttagttgggtactattgtgcaactagacagccaacagatcgaacatcaacaaaggaaaatgaagacgagatggaatagagagggcgttacaatatacattagaaaagagctcataggcttcttttgacagcccggtctgaaccagtacgaagtaaatagaccaaacacgagagcaggacgcctggacgagcatgctgttctaaccaaaccacaaacgtgggaactcggggtcgtggtggtggttcctctcgatcgatccatggactcttcgaaatgtctagtacacacctgtacttgtatatgtagtatcaccccagttgaacgcctgtgtgcatgcatgcgtaacaaggagcgcgccgtgagtatgcaatccggcaaaaaggggccggctacgagga

SEQ ID NO: 18152 - DNA, 409 bp, Oryza sativa
  Clone ID: uC-osflcyp026g08a1
accatcaaatccttctattatttattccattgatattgttatgtacataaataaaggcgtgtctacaatgttcatatggagcttccatgtacaattctcacttgagtaaaggggggcacatattaaaaatgaaacctctccttatcctcaggagagctcctggagaacccagtacacctacattacatgagctatatgcacaaaaggaaaataattatatacaatttaccctcgggcaaagggttaaatagattccacggcgtgccactcttgcggatatcttgtcatgatgatggttctatcaacttcaagaatgctaccatatgccgtgttggttgaaccaatcacaaattggcaggttccccttgaatcagcgtgtagtgagacacccgactattcaagatgatct

SEQ ID NO: 18153 - DNA, 439 bp, Oryza sativa
  Clone ID: uC-osflcyp026g10a1
cggtacacaacaagaacgaattttattcaaatatccatccgttcagcagtttttttcataattttttttgaacgaatcgatgagaccgccaatttaattgaatagaggagttttttctccacaattttactcggatcatctgcaaggctgatgttccttcacgaaggaaaatcgaccaacaactaacattacatgtagttctttttaaaaaaaaaactagcattacatgtgtgtatccgacgttcgtgccatatcaattttaggaggtagctcttgcagataaggttatggcatgaagccaatcatcggcgatgtagtggtaagctgcctcggttaagtggacgccgtcccagtacaagctcttggatggatccacacaggtggtcgcaccttcatcgccgcagattatcctggtgttgtagtggtattttccgggacc

SEQ ID NO: 18154 - DNA, 445 bp, Oryza sativa
  Clone ID: uC-osflcyp026g11a1
gcccaaatcgacattgctataagtaaagagcaagagagtagaatacagcttggaattgaggtaagaaatttgcggggaaatagcctgaaaaaataaactgattttcaacaatatgatgtgtacaggagtaggcaaatttccccatagcttcatattcattccaggtatcaaagctcaaagtgaccgaagtagcgggcttgctttttctttatatatttggatattgtagacacatcaccttgaataattgtctggccatcttccatataaatagcaccatcagcatatctgagttcttccagtcgatgggtcacccacaatgctgaaacctccccaccagcacctacagatttccttaccgccttgataacacccatctggtcgtattcatccaagaatgtggtcagctcatccagtagtagtactttggatgcttcagctaaag

SEQ ID NO: 18155 - DNA, 506 bp, Oryza sativa
  unsure (1)..(506): unsure at all n locations
  Clone ID: uC-osflcyp026g12a1
gaggaaacttttcctttatttatagaatatactcgcgtatgtatcgttcaaaaaaaggaatatgactctcgtaacacacgtacgtgatatgataagctgacaggcagctgatcaacaccgtcaataaggcccatttcttgaacacctagttttgtgaatggagggagnnccgccaatgnnatttccatannttctctgaatcatgnctataccacncnnaccaccgtcaagcnnnttcatgacctattanngattggttaacactgggcagatcnnngaagtccaatgggataccgcatcnnncaattctttgcnttcctgnncatttcctgggttgttttacctgnnagttcatgaccannccccttcctttaggtcatcagaatcagcatgaaccaacaactgcccttcccaatatggaatgaggcccgcttagtgaaatctgtaggtcctttatgaagatatctgcaacaccatctttgttggctactatgtttcccaggtcg

SEQ ID NO: 18156 - DNA, 352 bp, Oryza sativa
  Clone ID: uC-osflcyp026h01a1
gctctagaatggcacacatatcattacatcaagtttagtagaaagctacatcatatgattgaggaccaacacttaacctgcgattgcaagttgccctcaaacaagatcagggcaacgcaagcaacgaaggagatggcaaaaaacacatcccccgacaagttacaatgttcagctacagcagcatccacagatgacacttatgacagatgcatcatctgcttggcacaagacaaccataaggtcgaagaaacttgcaagagcaatgaagaaacgtgtgtatggaagagagctatgattgatatgttaggaggcttgatcattcgtcggtctctctgcaggtgatctcctgctc

SEQ ID NO: 18157 - DNA, 364 bp, Oryza sativa
  Clone ID: uC-osflcyp026h02a1
gagccgcgtcgtccttttttttgtttttgtttttttttttgttttttttttttttttttttttatttttattttttttttttttttttttttaaaaaatttttaaatttttgttgtttttaaaaaatttttttttttttaaaaaaaggacggacagggggccatttttttttaaaagggggggggaaggttaaaaaaagggggcaaaaaaatttttccccaaaaaaaaaaacaccatgaaaaaggggcactaaaacccgggggaaaaaaaaaataacaccagctgggaagaggggggtaaatggaagaaagctaaaaaagaaatggggggtttctttttggagaaaaaaaaaaaactcccaaaa

SEQ ID NO: 18158 - DNA, 402 bp, Oryza sativa
  Clone ID: uC-osflcyp026h03a1
gtattgcggattgcgttctctctttttttgtatgtttatttacaaacatatacacaattcttctctaattaagcataacaggacagtacatgacaagcggctaccaatcgatcgtttacatactttgcagaaattttggtagcagatgtaaactgtaagacagttgatggcacggtagaagcatgtcttatgcagcaaaaagaagagaaacaaactatctgcataaacatgttttgcagctaccattagtctgtccctatgaaagtaagagagcagtaccagacttgatctagtattcatttaatcatcctgttttgtgtcccagacttttatcttcttacttccctttggtttggcaataggagcattcatgcctgcctttttgcattgaactttgttgca

SEQ ID NO: 18159 - DNA, 385 bp, Oryza sativa
  Clone ID: uC-osflcyp026h04a1
ccgagaaaagggggatattgcaagaaagccagatggcaaaaccagcataataattctcaagttggccccaaaaaaaccaagttggccaagatgctttactcaagtcaagggaaaaggggactaaattaacccatctatgtaaaaatggccggggaccattaacaacatgaatatggcaaattcatataaaacttgaaggcccatgtttttgagaaacacccattgccatggggcccaggccaccgaaggggtcaccaaacggattggaaaacccaccctggggggcagggaactgatgctgccgctgctgctgttgtgggaaaatctgattttggggaaaacgggcctaaaaaaacatgtaatggcgatgttgaggaccctggaa

SEQ ID NO: 18160 - DNA, 421 bp, Oryza sativa
  Clone ID: uC-osflcyp026h07a1
cctcagcttggatcctgtataccgttttgcctcgcccttttttttgtttttgtttttttcacgggtcattacatcaagtttagtagaaagctacatcatatgattgaggaccaacacttaacctgcgattgcaagttgccctcaaacaagctcttgttaacgccagcaacgaaggcaatggcccaaaatacattccccgactcgatacaatgttcacatacggggacctccacttttgtccctataaaaaaaggcaccttttggttttcacaagacccccctcccgtcccatgaactaagaagagcaatgcacaacggggtgtatggacagagagctatgattgatatgttaggaggctttgatcattcgtcggtctctcctgcaggggattctcctgctccagaaacggacgacgaggca

SEQ ID NO: 18161 - DNA, 97 bp, Oryza sativa
  Clone ID: uC-osflcyp026h08a1
aagtagttagtttggtttttgaagtgtaattaattttttaacagatagaattatttttaagaggaaatttggatattttgataggaacgagaagaga

SEQ ID NO: 18162 - DNA, 153 bp, Oryza sativa
  Clone ID: uC-osflcyp026h09a1
cccccgtagcttggatcctgtttgcggttcccttttccttttttgggttaggctgtaaggggttactcccacaacatccgatgggcaacaataggactgagcatatccaagtttttaacctcgtacgaataaacggtgttgtaaacgatttac

SEQ ID NO: 18163 - DNA, 400 bp, Oryza sativa
  Clone ID: uC-osflcyp026h11a1
tttttttttttttttttttttttttttttttttttttttttttttttttttttttttttttttttttttttatataatttaatttaattatttcaaaagtttaaaattaatttatcttggaaaacaaacaaaaaattagagaaaaaaattgggggaagagaaaacaaaaaaaaaaggggagaaataggaggggcacaaaagtgaaaatagaagaaaaccacaagtgttaataggaaaaggcacccacaaaaaaatgtgaggggaaccaaacaaattaaaaaacaaattgtttttttcatacgaaaaaaaaaaaaaaaccggaaaaacacctgggggggaaaacaacccaaaaaaaaaaaaggaggggaaaaaaataatttctcaaaaatttaaccccccc

SEQ ID NO: 18164 - DNA, 432 bp, Oryza sativa
  Clone ID: uC-osflcyp026h12a1
aagcctctaacattccaattaaaaagataaatattatcttgtgacatgggcacacaagttgctgcaactactacaatggttggaactaagcatcatacatcctttgccgaaacacacccaacattgctgggagaaacacagacaaaagagagtaatgcatctctggtagtagctagcttgaagacattggggaggcaagctaagacaacttgggaagcaaaagaggatcaggacaggctgctgcttcattgggagcagaagaggttgcttcttcatcgaggtacagcacagcacagggacttgcttcatgggggcacaaccgccgccttcttctttggagccttcaggcggatgcttttgcaccctcccttctccaccagctcggcaattgtcttcaggctgccgggggacaggggcttcttgtagcgcttg

SEQ ID NO: 18165 - DNA, 313 bp, Oryza sativa
  Clone ID: uC-osflcyp027a02a1
atccaaaagggttttcccttaaaaaagggggccccccccgggggttttaaaaaaaaaaacccccgggccaaaaaatttggggaatttgggggaaggggccccaaaaaaaggccaattggccgggactaaaaggcccctcaaataatttaaccccggaaataaatatttgctccccggccaaaataacccctcgaaaaaacaaaatttccaagggggggtaattgggggggaaggggccccccctttaaggtggaacgggggaaaaaatggggccccctcccattttggaattggggccttggttttgaaccat

SEQ ID NO: 18166 - DNA, 413 bp, Oryza sativa
  Clone ID: uC-osflcyp027a04a1
gtaacagtgcagctgtgtaggctatttcttcaacagggcagtcatgtaagcatagtacaatatggactaaatggaggcactgtctcgactctcgagtcgacgaaagcaagatccattatgtaacatatatttaggtatacatacacatgaaacacgacggcactactagccccacaagcggcctctagtttgtcgagcaaacaaacacgcaaccaggggctttttcttcgctgcctttcagactataaacaaagcaaccaaagcccacagcttcctcctgaagctgaaccttaccggaaattccgggatgagaactcctgatcccgaaagggtttcttcttcattatcatcttcatctttcttcttttcacagggagttatgtgtcagtaacatcgcacaagttatgtgcagc

SEQ ID NO: 18167 - DNA, 380 bp, Oryza sativa
  Clone ID: uC-osflcyp027a05a1
ggataatcacaattcacaatttcacaagtcataataatcaatcataatggtccagatacataatgcagtttcagcttttgaaacactcggtacatactacatacacttcagttgtttgttcaagacggtcagagggagaaagacagagaaaatgagatgagtcactcaattatggcggaggcaatggcgatggtgttgctggagagctcggcgaggatcttgtcgaggtcgcccatgatcggcttgagcccctcgcgctcgctgaagccgtcctcgcaggtgtcgacttcggtgcgcgcggagtctagcatggtgtgcgccgtgtccttgtccccctttttgagcgccgcgcccgccgagtccaggttggatttcatgtc

SEQ ID NO: 18168 - DNA, 316 bp, Oryza sativa
  Clone ID: uC-osflcyp027a06a1
gaaaaagaggacccagtgaatgttcagtttcctatgaaattcttatgaaatcataggtgaaggaaaaaaaatcttccaattttcacatgcccaattcctccaaaccgaattgagtgaacaatacttaaatcctgtaggaattggatcctccaattttcttctaaagttcctacgatccgaagaaaccctgaagatatatctgccctcatttagtccatgattgcatatcttttttttttcttgcctcttttcctaaattttatttaatttgtcaattattcccaaagtgggctgtaccggtgctcgacatgtgagc

SEQ ID NO: 18169 - DNA, 407 bp, Oryza sativa
  Clone ID: uC-osflcyp027a07a1
tttgttgtttttttaaaatttacttatgtttcttcttcttcttcacagttcacatggaaatcagaaggaagtagcaaaaggaagagctgttctacactcgacagagtaacaaactaagagagcaacacaagtaacaagaggagagatttagtctcttttctggtgttctgcaaataaaactctcccctcttgctacccctaaaccccaacccaaggtagtagtaagtcaccccactaaaagtaaccggccatctcttacaaaaattggctgtctcctttgaatcaatcgaatcagatcatcatcatcatcatctacagctcgtcatgctcgtcgtcgacgccgccctcgccgtcggcgccgccacccggggcgccaccggtcctctggtagacggcggagatgatgg

SEQ ID NO: 18170 - DNA, 133 bp, Oryza sativa
  Clone ID: uC-osflcyp027a08a1
tttggtgttttttaaaaaagggggcatgattcttctccaacttcacagtacacatggaaataataaggaatgcccaaaaggcatagctcgttcttcactcttactgagcaacataactaatgagggccaacac

SEQ ID NO: 18171 - DNA, 378 bp, Oryza sativa
  Clone ID: uC-osflcyp027a10a1
ttttgttgtatagtcaaatagcggggacttttattagattgacaatatcccagacaaaccatactcataatatgccggtggggcataatgaggacacaacttgcatcaagcaagaatcgttttaatagcaacaaatagtcttatgacttcaaatatggagaacagtaactggtagcttcagaggcttcccaatatctggcaggacacgatattgcatacgagcatttataggcagcttagaaaccgtgaatcttgatgttgtccttcttagcaatcccagcctgaactaggaacgtggcaacattcttacgctgatcaccttgaagctgaatgacctggccaagctctggatcttggactacagtaccattgcagcag

SEQ ID NO: 18172 - DNA, 417 bp, Oryza sativa
  Clone ID: uC-osflcyp027a11a1
ttttgtgtttttttttttaaccaaaacataggaggtttcatttcttcttctcaaagtagtgtagcatctttccttctttcaccattacataagcttaagcaataacagataacaaatcctcctcctcctctaggtaaaatattcaaacacaatacccttataagtacttattattaggaaagtagcgtgcatgggcataaatggcagcggggggcaggttaagaatcacaatgctgagcagcgaggaaacaaaacaccataatgggacagagcaaaagcctccgaaagggagcttttaggcagaaggcttctcccacttgaggggcttcaccacctcccaggtgaagtctgggtcgtccctttcgaagtgaccgtaagccgccgtcttgagggagcggccggtgccgcctttcttga

SEQ ID NO: 18173 - DNA, 345 bp, Oryza sativa
  Clone ID: uC-osflcyp027a12a1
gtacacacattatccagtgcatgatattattcatgaggtagtcacaaatgttgtcaacaacaaggaagtcggatacagtggttggagtacacagggaacaagccttgtgcacaaactcaattcttatgtaagtaaagaaatgctataatggttccctagaaataagaacatactaactggttttgtttcttaaatcataggttgctcatggaccatcctctaattctgcatggccgggcctctttgcggaaattttatgaattttgacaaaggagggcccttaatgcacttctatggtctatactggcacttgaattttattattgctgtacattggtcccatta

SEQ ID NO: 18174 - DNA, 393 bp, Oryza sativa
  Clone ID: uC-osflcyp027b01a1
gattcgaatggtgtgtttctgacgatgattcgatggataagtgtcttaacaacttaactacaaggttaaaaagggccaaaactctagcaaacagtacaaaaagaaaagaccagcacactcaatattgactaatatagccacatggtgatagtattttttttttcataatcatgaactattgtagaagggtaaatccaaaacctaaatagctcattttccacggtatccttgctccaacgacgcctcacttgaagcatttcgcatccagcaacgactcgccctcaaatggctccaggtcctcaatcatggcgctgacgcgctccttctgggcctcatctgagatgtcaaccttggtccactcatagagctccatgtcatagacttcatccatga

SEQ ID NO: 18175 - DNA, 400 bp, Oryza sativa
  Clone ID: uC-osflcyp027b02a1
caaaaacttctgtaaaaattcaccattttgaaggtgcgtacactgatagaagaccaaaaatgaattgggaaaaaaatacaaatgttacacatctatgtggccggccgaccaatccggcccaattaacacaacacaaagaacaaacgggcctccaaaacagaattgattgggcccaattaaattggtaatagttactccgaaatatttgaatcactttggtggcgggaggatccttcaatcgccgtagatgaagttgtgacttaccgcgccgccgttgcacttatctactcgcctttgccggtgtgcttgaagcacttggcgtcgccggtggacccgagtaactcttcgtggcaggtgggtttgaactactcgccgtcgccggtgcagttgaaatacttga

SEQ ID NO: 18176 - DNA, 391 bp, Oryza sativa
  Clone ID: uC-osflcyp027b03a1
acacgcatagaatgcacttcagataacagtattctgggtttcttacaatagtcctctttttcagaacacaaatgctcgattctgacaaagtttccatctactacatgtttattaattttacatgatgacaacgggctgataaattatgaaatctcaggggtaagagagatggaggcgatctccatcctcatcttgatcatgttcttgctatggcttgatatggcagcctagttgcagcagcagcagaggcagtcgaggcagcactcgcaggtctcgtagcagcagaagcagcacagtgcagtgaagatgcatgcatagaggcaacccttctcctcatggcgcctctgcacatgttcatagtaggacatgtcctgtgccattggagcgttat

SEQ ID NO: 18177 - DNA, 392 bp, Oryza sativa
  Clone ID: uC-osflcyp027b06a1
gtgtaaatatatatagccggagcttccatatatttcattcacatatgcctcacccaacaacatatagtcgtagcagataccactcttacatcaagtcagagagagatcaggtgaaacaaaaacaaaagcagagcacggccggtaaaatcaaaagacgatgaacaaactgggaacacacgaaacaaggggggagacatcatcgaatcagagatgaacaattaaacaaggctatatatgacgatgacggcttagttgccaccagactcctcgcagcccgggggcttgtaggcgatgaagttgatgagctgcacctgcctgacgttgtcgaagccgatgatacggacgaatgcatcagggtacgccttcttggcctcctcgagctccttgagcac

SEQ ID NO: 18178 - DNA, 154 bp, Oryza sativa
  Clone ID: uC-osflcyp027b07a1
tttggggtttttttttttgccgagggtgagaattaacctggcagaaaatttttcatccattatttctccatcttgcattccgcaagaagaccgctcgttagggggaaaagagtaaaaaaagaccaaaaacgatcacaacacgttgtcgtactcc

SEQ ID NO: 18179 - DNA, 406 bp, Oryza sativa
  Clone ID: uC-osflcyp027b08a1
tttggtgtttttttgcagcacagaactttattgacttatatgcttgatgctgataaatacttatttcctcccagaacattatttcttcgatatactacgatgtcgacctatgtccaacagtcttctccaggctgagataatgagattctcatcataattctttctacaggacggttaaaatttaatggcatttacagaaaaatcttatgaccaagagaagggccttcatggattcatccactctgtgcttcagagaacatcagatgtgtgaagggcatgtcaaaaagcagagcttcaggcactcacagtctcaaacacgcgacctaatcatggcactaacatcatcgagcaattgggactccttgcagctgggataagatttgattcttgataataagatgagatc

SEQ ID NO: 18180 - DNA, 352 bp, Oryza sativa
  Clone ID: uC-osflcyp027b09a1
ggaagtaatttggtatgctttttatttgaacgagatgatgcaaaggtttctgctgttttgggctgaacatgggccctgtttaatcacaagttggaagtatggtggaagggggtgtgagttcaaagtcgaatcagttggacaccatgctttctgtctccttgacgaatccatcaccgggccagtccttgtctgattccaggcccttcctaatagccttcctttggttgatcgcctccctttgccgatgtaccaaatcggggtgggtggggaaatacgggagagaggccccccggaaatcttttattgaggaaaagttgtgttgtctcataaaatcctgcagctttgcacaaag

SEQ ID NO: 18181 - DNA, 390 bp, Oryza sativa
  Clone ID: uC-osflcyp027b10a1
acacacaatctaactaaccactatcatgtacacaagagattacagttgagttcaagcatccgctacaaagattggcttcacaaagttaaaacaggtggggaggaaaaaagagacccacagcccacagcttacccgaaagccaaataccacgtagcattgaaatgatgcggcaaaaaagaggaaaacaaactattggctactatgctcttcacacaaatcaatgaacatctcactcacattcttcactagtcgagggtcgtcaaaacaagatcccgtgacgagtcagatatcctagcagcctcagcaatcctgagggccataacagatttgtatgccaccagctcagcctttgccatgagacgctgagctctactgcgcagacgaacagct

SEQ ID NO: 18182 - DNA, 394 bp, Oryza sativa
  Clone ID: uC-osflcyp027b11a1
agatcgaaaagcacgggatgatgatgatattgaaaaaagaaaaggcagggctagctgtatttaacaagagcaggcagtcccttctcctgaaaataagacaggaaattacccccaatgggactgacaatagtagcactgcacttgagagtacatataagaagtgcagcttaaataggtcttcttttgctctctgccatactaattaacagcagcggattaggcagggtgatggtgattagattagctaattaatttgagacaagtaataatatccttttgggaccgctttactaaaaggtgacctccattttgttggaggttaatgaagggctcatcggtggccaagcctcctgagtgactggctagctggagaagtaaagagggcggcgtgagc

SEQ ID NO: 18183 - DNA, 367 bp, Oryza sativa
  Clone ID: uC-osflcyp027b12a1
cttcttcttcttcacagttcacatggaaatcagaaggaagtagcaaaaggaagagctgttctacactcgacagagtaacaaactaagagagcaacacaagtaacaagaggagagatttagtctcttttctggtgttctgcaaataaaactctcccctcttgctacccctaaaccccaacccaaggtagtagtaagtcaccccactaaaagtaaccggccatctcttacaaaaattggctgtctcctttgaatcaatcgaatcagatcatcatcatcatcatctacagctcgtcatgctcgtcgtcgacgccgccctcgccgtcggcgccgccacccggggcgccaccggtcctctggtagacggcgg

SEQ ID NO: 18184 - DNA, 382 bp, Oryza sativa
  Clone ID: uC-osflcyp027c02a1
gtaaccaacatacagtattaattaggaactcgcccgaaatgaaacactagtagcaaacaattcgagccggacttgcagcagcaacacgggataaaaggaaatttaaggaaacgaagccggccaccaccaccgatgaatgcatactgtagtactctacaataaattgcatcatcgagatgaatggatttaataatggactacatacagctctggtctattcagcacagcggcaattgatgagagaatacatgtatgtatgcatcatgatgatgatgattcgatttatttcttggtgaggtcgatgccggcctttttggcgacggcgtcgaggccatgcttctcgatggtcttgagggctttggtggagagacgcagcttgacg

SEQ ID NO: 18185 - DNA, 402 bp, Oryza sativa
  Clone ID: uC-osflcyp027c03a1
ccgtaccatatgttcattactaggccatacacacgcatacaccttttttttttctttcaagatgacagcacatttattcaaaaatgtttgccttcatccttatgatacatgctgcatagagtttgtgagcgttacacactatttcccgccagcaagaagcagagcagagacttcttcatgacaggttctttactacgagtacgcagggcactgcaacattcttcatgacagaacctctggcactcatgcttcggcagccttctcttcacccttttgtgctagctttgccttctttgcttcatagtctttcacggcagctttaattgcatcctcagcaagcatgctacaatggagctttactggtggaagtgacaagtgcttggcaatctcagtgttttttat

SEQ ID NO: 18186 - DNA, 380 bp, Oryza sativa
  Clone ID: uC-osflcyp027c05a1
cacgattgattcattgtttgtgtgtttttattttttaaaaacaataccctttagaacatgtaattagagcaggatcatggtaatgggggggaacacggaaactacacaccctggcttgacctgccacgtgttaaggggagcacaaagggactaaactaatacagcgtttcataaaacatgggggagcacatatgcacgggacttgacggtaaaagcagtcctaggttcccaagagagagtcctggacgacaactccgacggtctgccctaacacctgaaacaagttggcaacaactgacaagctcgagaaaattgggggtgctaaaaatttccatcggcagggcgttggaaagaaccggctatacgtgggcgaactttac

SEQ ID NO: 18187 - DNA, 99 bp, Oryza sativa
  Clone ID: uC-osflcyp027c07a1
gaggttaataatcaaacacatctccacaaacaaaaccacatgacgaccccacattaggcggaacagaataaaaaacaaccacacccgaccacaacccgg

SEQ ID NO: 18188 - DNA, 413 bp, Oryza sativa
  Clone ID: uC-osflcyp027c08a1
ggtggtgttttcggcggccccgccgccgaagggcgcgacgacgacgccttcatcggctgcgcgcgcgggccgagcgggccggcctgcgccgcctgccgctggaggtggaggcgggcctggatgtagtgcatctgggccgggctgagctctggctgctgggccagcccgccaccgtacgcgaacgcgtgcgggaaggagaatggcgaggtgggactaaactgggaacaaaccggaggcgagccggaggcatctcggataaaaggctcgagtgccctcattagctccttccctgacagatctatagctgcagccatctactcactcttttttttgggatttttttttctgatactaaaacagtcattgcaaagattcggctgggtgcgaatccaaaatcaagaacaggcaggaag

SEQ ID NO: 18189 - DNA, 386 bp, Oryza sativa
  Clone ID: uC-osflcyp027c10a1
aagcctctaacattccaattaaaaagataaatattatcttgtgacatgggcacacaagttgctgcaactactacaatggttggaactaagcatcatacattctttgccgaaacacacccaacattgctgggagaaacacagacaaaagagagtaatgcatctctggtagtagctagcttgaagacattggggaggcaagctaagacaacttgggaagcaaaagaggatcaggacaggctgctgcttcattgggagcagaagaggttgcttcttcatcgaggtacagcacagcacagggacttgcttcatgggggcacaaccgccgccttattctttggagccttaaggcggatgcttttgcaccctcccttattcaccagctcggc

SEQ ID NO: 18190 - DNA, 377 bp, Oryza sativa
  Clone ID: uC-osflcyp027c11a1
aattgtggtgtttttgtttttgagttttttccccccacgcaggatcaacataaattatccctcgttcggctttattttgatacgaacgaaaaagaagcccaaccagcgaaaaaaaaagtagatcctggggggggggataaaactctataacaaatgctccacattaaatcgcgcgtacggaatccagggacccctataccgttggggtgggcatcaatctttcgctccaaagccacctacgctagcttaacctgactggccgtcgtaccctagcagttgatggaaacaccacccgccttgaccattgacaggttccccaagccaacgaccgttttggcagcaccattcttcctgcacgccggcacgccgaattggac

SEQ ID NO: 18191 - DNA, 126 bp, Oryza sativa
  Clone ID: uC-osflcyp027c12a1
tttttggtttttttttatttttgttttttttttttttttttattttttttctttttttttttttcagtacccaactaacagacaaggaccaacccactcccagcaaggacacaaagctatcgcaat

SEQ ID NO: 18192 - DNA, 399 bp, Oryza sativa
  Clone ID: uC-osflcyp027d01a1
cctcatcctttttattcattcctcccagagagacggatccatggaagttttcttgccctcatcaggcaagcagagcacacacacacggtggcagtggaattgctatgaacaagacgctaatcaacatccagagctaaaacaaacaaggggatcaaagcaaatcccgaaaaaaaaaacacaggggaaagtccacatcttcttctcgtccccaacgcctccgtgtcaccaccacgtcttgcggatttttttttaccctgttctattcgctcaggcgtccacgatctcgccgtcgtccttcgacgccaggatcagctccgggtgcgccgccgtcgccgccgccttcttgatcgtgccgtcgatggcgttcggccggccgagcgccttcagcgccaggtgcgc

SEQ ID NO: 18193 - DNA, 331 bp, Oryza sativa
  Clone ID: uC-osflcyp027d03a1
ccccaaggggtcattttatttattctgcaaaaaggacaagtgggggcataaaaagttcactttgaagttcaaaggggcccttattcattttccaccaaatcattgaccagggggaaacaaccaccatttcctccctagtccatgccaagcctagtagtccgggacaatttgcgggttttaggacttttgacagaggccatcactgaagtttgaagctccaagagggggtataatgggcccctacccccttaattctggggggccctccccttctaaaccctttgttggaacttttccttttgggaatcggactcccccaccactgtttcct

SEQ ID NO: 18194 - DNA, 415 bp, Oryza sativa
  Clone ID: uC-osflcyp027d04a1
cctctttttttttttttggaaaataaaaacgagtgggttatccttttggtataacatgtagccgtcatgctgtttacacgacccaaattacagccatttaccttcggattgacctcaagaaaacaaacctttcgcagcagagacggaactgttatccagaacctccatggtgcttaactcttaccgaagaaatttataatgatacatctggcaattagtccaaacaaggttggcaccccagactttaaagctgtaacagcttaatccagcttaccggaaagtcggtccaacaattaccatgaaaattgaggagcaccaacaattaccaacattagacaagtcattcctgaagcaccatgtaatgagcacaggtgatcacagcaaaacatcatcatcttgcttcagatgtgaagct

SEQ ID NO: 18195 - DNA, 361 bp, Oryza sativa
  Clone ID: uC-osflcyp027d06a1
aaaaccaaccccaagaaggatcgcagatccaactccaccgaatcgatccaagaactccgcctaatccaaccaaaccatgggcgatcttatttcaccaacacgacacgaacttataaaaagactaacaccaccaccaccttcttcttatttagggactcgacgactcaagacgactgatactggcgaaaggcgaaggggaacagcacaaatctaggagagctggccgcagtcggcgatgacgaccggcttgggggtgctcccgccgggggatcccacctttttgatgggcttgacgacgtccatgcccttgacgacgcggccgaacacgacgtgctttccgtccagccagttgcagggcacg

SEQ ID NO: 18196 - DNA, 391 bp, Oryza sativa
  Clone ID: uC-osflcyp027d07a1
ttttgtgtgtttttttgtttttggttttttttttgtagttttttatatattttttttccatacgattatgtttttttttgaatttaatttagattgggttaaaaagggaaaggggggggggagaaaaaaaaaaaaaaattgggggggaaccccagggggaaaaaaaaaaaaaggggaagaaaaccccacaaacggggggcctaaaaaaaacaaagaaaatttcccccccccctcctgtcagggaagaaaaaaaaaaaactttattttgggaaaagggccgcaaagtttgagtgggagggggggaaagaacgccaaaagtggctaggggtggggaaaaaagggggggggcttaacggatgggggttaaaaggggggggggtctttggggggg

SEQ ID NO: 18197 - DNA, 375 bp, Oryza sativa
  Clone ID: uC-osflcyp027d08a1
tttgtttagcaatcacgtgacataagttcaatatgggttgaataatcatgaagatacattattcatcaatagcaacatgaatacatcaccatgtgaaacaaaaggggaaacacacaccaaatgacatgttgaaagtagcatagatgtaacactacgtaaaaccaaagctactgcagaacaccgggaagcctctggcattcaaagattatatgctgaataaatgaacttcttggcttctctgatcgccccttggatgacctcccattatatcagtagtatgctttccttggattgttcagtgggtttggcctataacggtagccaagcatcattcgcttcttgtattgctcatagatatcatcttcagatgtgacc

SEQ ID NO: 18198 - DNA, 392 bp, Oryza sativa
  Clone ID: uC-osflcyp027d09a1
acaataaaactggtgggattttattgagggaatgggtttacgtacataaggccataagggtttaattaagtaccctagacaaaacattggaacaccctaattaacaaaaatggactcgatcctgtcatctaccgcgagatgacatgacacgttcttcttcttcttcttcttggatctcagaattatagcattaattcctatcaaaaccgacgatactaccgaccgacagagagctaattaaacctctccaaataacctcaaaccaagatgaacacggagacgacacacacgacgagaagcgctgctgccatggagaagcccgtgagcgcgcggccagatgcaccgttcggcgcctgtgccggcccagggctgggactcgggctggttctggc

SEQ ID NO: 18199 - DNA, 394 bp, Oryza sativa
  Clone ID: uC-osflcyp027d10a1
gaaaaaactggtacataatttgtattgagacaatccaaattattccaaattaaacagtaaaaaggtacggttgagagtagggcatcggcgatcccctttctgcttgatctctggcagaatctctgcaacctgcatgttgcccccggcccctatgtatgtacttatatatgtatgcatgtgtacatataaatataagtatgcatacacatgttgtgctctctattgatgcattatttatgcagaaatatacccaaaagccaattaacctatagcaatgtcctcaccggcgcaacatctaatccaaaagctgcaacgccggcaggagaaaccccaaatcgatcgagctatagatctcgatctagtgatctgtgcatgctgatcatttgtgtgtaca

SEQ ID NO: 18200 - DNA, 285 bp, Oryza sativa
  Clone ID: uC-osflcyp027d11a1
aatatattaaaaaaaaatactaacaaacaaaaaaaaaattaaatcctgtaagtgtgtatataacaaaaaaacaggcaaccaaaaaaaaacacaaagacaaaaaaaaggaacgccaaaaaaaaaaaactgccaaaaaatctctggcttatagacagccaaaggtagatggaaatgaggggtcgggcaaggcaagaaaaagaaagaaaaaaagcccgtaaaaaaaaaaaaaaggaggcaaaagaaaaagccccagtgggaagcacctattaaggagaacgccagccc

SEQ ID NO: 18201 - DNA, 416 bp, Oryza sativa
  Clone ID: uC-osflcyp027d12a1
tttgtggttttttaatacttgtgttttattcttttgttttaacatgttttctttttgttgtttacactacccaaattacagccatttacctccggattgacctcaagaaaacaaaccttccgcgtcagatacggaactgcgatccagaacctccatggagctcaactctaaccgaacaaattcattagtgatacaatagggcaaattggaccaagacaaggcctggtacacccagactgtcaaaggctgcaacagccttaataccagtatacccggaagagctcgggccaacaataaccatcgaaaattggatgagcaccaacaattaccaacattagacaagtcattcctgaagcaccatggaatgagcacaggggatcacaggagaacatcatatcttgcttcacatgtcaagc

SEQ ID NO: 18202 - DNA, 401 bp, Oryza sativa
  Clone ID: uC-osflcyp027e02a1
gggttgaattaaaacagttgtgcgtgtatgattgcaatggaaatgagacaacacttgttattatcgtcctgttgtgtgtttcatttacaacggctgaaaaatttgtgacatagccgcaaactttacagacaccattagcagcttgagctctccctatacaccctatttggatgattatccagacatgatacaaaatgcctctacgaaaccagcttaaggcaatcgcaaagtttaaaatatgagcaaaccaggggtgagcaccgggaccgcatgacaatattttgctagaaccggggtgcatattgagcctatcagggagtgaagttggagctcccagaatcttgccggccacggcaggaaagcaatacggttctgggaatggaccaaccttaccgtaagcc

SEQ ID NO: 18203 - DNA, 373 bp, Oryza sativa
  Clone ID: uC-osflcyp027e03a1
aacaaaaaagctttcatcattttatttattttgcccaactttatatatattagaaaccatataattcacatgataaagaactccatacaaaaccatacacgggtttttcttaatttggaccattagaagttctccttggggaaatcaaattttgggtttgtcttgggggtgaaatatgttgacaactgccttagttggggaaccagcacaggctgaccacagtagaacacacccacgcgctggttctaatgggtgaccgcaaccttgttgaagacgctttgccaattaggttcgcgcgaaaggggttttcacactagttcccgacaagatattgacgcccttttttgcatggtgaagcttttggagcatgaca

SEQ ID NO: 18204 - DNA, 395 bp, Oryza sativa
  Clone ID: uC-osflcyp027e04a1
aggattcataaaaaggtagccttagcctttgctctcgtaacattaatgcttcttgcatactccctccgttcctccataatattgtaaccatctacgatgggatgagcagattcatagtcctaggatgggtctcatgggtctcatcctattctaggttgggacattatgggacggagggagtagcttagcacagcacagctttatacacccgtgattgtggctcatggctcatgggtggatctacacaaacctagcattcgaattcaagagccatatcacaagctacactccaagcagcacgtgctgacacgcgcgtcacaacatccatcattttcagtccaaatcttaagcacgcacgcagctctaaacaccacgtaggcgtaataacacaagag

SEQ ID NO: 18205 - DNA, 345 bp, Oryza sativa
  Clone ID: uC-osflcyp027e05a1
agcaaaccacaaccgttcattgcctttagcgaggaaagggggctgaccactaacccacaaacatgctatttaagggggccaacccaccaaccacggactgcatctttggtataaaaaacaaacctagaattagatatgacaaattataggactgggaaactggacaaaaatatggctagaatcggagaatgaagggggggcacatccgaacctagaaggggttttttaccagagaagggagttttaaaaaacctattttgggggggttggacaaaaacctacttggatccctaattggattggaaccccacaagcgtggacacaatttttcctgcctttaggggc

SEQ ID NO: 18206 - DNA, 185 bp, Oryza sativa
  Clone ID: uC-osflcyp027e06a1
gccctctttttttttttttgggaaataaaaacgagtgtgttattcttttggattaacatgtaatcgtcctgctgtatacacgacccaaataacagccatataccttcggtttgaccttatgaaaacatagccttgcgcagcacgagacgggacttggatccagcaactctccatggtggctcaac

SEQ ID NO: 18207 - DNA, 376 bp, Oryza sativa
  Clone ID: uC-osflcyp027e07a1
cgtcagaaaagttttatcagtcgttcaaatgcattcaattgatatagtgtcgaccccataatgttgcacaagcaagtgagatgagcaaaaccaggaaatatgtggcccctcccaacgacaataacgccttcctcctgctgtccaccctaacagctcaccatgacactccacatctctgcatccggcatcttagtagaaggtgacggtggcaatggcagccgcgacaccggcaacggcagcgcacctcttgagagcaccggcaccggagaaatcggcgtcagccgcatcggcaggtccatcggcgacgggagacaccacggtggcgaacggcgtaggggggatggacacctcgtcgccaccagcaagcgcggaggta

SEQ ID NO: 18208 - DNA, 404 bp, Oryza sativa
  Clone ID: uC-osflcyp027e08a1
attataaaatgacttgtattatattcccaacattaaagtttgatattcggatacattttgctcactgtggcagacaaagcagaccacctagagcccttttattcagaatatattcaagataataaagaacattggtcatagcatatactagtactatatgaatagtctggctggctgcttcacaaagtaacagagtgatcgctattggagttttgagtattctttaatcttcagtgcgcttccctcatcagcagctcctcatcttcttaccctctgtgccatctatctcctcgacagcatcgtcttcccagtagagagcctccattttaccagctttctccgtgttttcatcagcaaagcaatgcagaacagatcgtggcgacccggtggcgatttcagcagta

SEQ ID NO: 18209 - DNA, 110 bp, Oryza sativa
  Clone ID: uC-osflcyp027e10a1
tttgtggtttttttttttttggtgtttttttttttttttttttttctttttttttttttttatccaaaaacggaaaagggaaaatgacgaaaaaaacgggcgggcggata

SEQ ID NO: 18210 - DNA, 395 bp, Oryza sativa
  Clone ID: uC-osflcyp027e11a1
aacacaaagtacatgagtaaaatatgtaaatcgtacgtttattacagtcaagttcagtacgtgttgagatacgacataaagtatcttgtaaaattttaaaacatgatatgctctaaagttgtaagcataaaatatcctgtaaaatcgtgatcatacttttgggcaacaaatggtaagttctatctgtagatgctgtttgaattcacccaagtttcagacttccagtgctagcttgaatagagtcaatgggctgggaaaaataattaaggcaccaatgcacggtaacaatctctaacacaggtcttgaatttgctcaaggtgcagcatcactaggaagatcaagtccagctggaatacttccagggtagttgtaactgggggaatcagacccaagc

SEQ ID NO: 18211 - DNA, 400 bp, Oryza sativa
  Clone ID: uC-osflcyp027e12a1
aaaataaaaacgagtgtcttatccttttggtataacatgtagccgccatgctgtttacacgacccaaattacagccatttacctccggattgacctcaagaaaacaaaccttccgcagcagagacggaactgttatccagaacctccatggtgctcaactctcaccgaagaaatttataatgatacatctggcaattagtccaaacaaggttggcaccccagacttcaaagctgcaacagcttaatccagcataccggaaagtcggtccaacaataaccatgaaaattgatgagcaccaacaattaccaacattagacaagtcattcctgaagcaccatgtaatgagcacaggtgatcacagcaaaacatcatcatcttgcttcagatgtcaagcttcaa

SEQ ID NO: 18212 - DNA, 381 bp, Oryza sativa
  Clone ID: uC-osflcyp027f01a1
gaaacaaaatcccaatgcattttataacttataaaggaaacatacaactgacccaatcggaagaacacacggtgtaccaaacaaaaacatccgtgctaaccaaaacaaataatacaccacgatgccgtcccttgctttaagagggaagggaaacaaacaaaacaaagacccaaactgtggaaattataagagttctagttaagatgccgtgaggcatgtccgcatgatgacacgccaggctaccccatggccgaatacccaagccccaagttcttcgctattcattcaaccatttacctttgaattttgtttggaacaaccacaggtattattcggacagctcaatttttcaatcaagccgacgatgagctgttgaccccc

SEQ ID NO: 18213 - DNA, 349 bp, Oryza sativa
  Clone ID: uC-osflcyp027f02a1
gaatgccaccaaggaaatttctttctttcaaattgctcgaaggaattaattaacatctcgaacatgcatgcatgcttacaagcattcagccgaaagatcgtgcgatatgatcaaggaaggggattaacttttacattccattttccatttcatttggtggtcactaattaacatatgagatggccagcgcagggcgatggaggagggacccctggaggtaattaagcttcaaaaaagggaagctgattagcaagcacggcggcgcctcgctgagccgccggccggagctcgagcatgggagggggagcatgtacatggacgtcgatccgtcgccgttgccggtctagct

SEQ ID NO: 18214 - DNA, 411 bp, Oryza sativa
  Clone ID: uC-osflcyp027f03a1
cactgaaaccgagctcaacttaaggtgaagccaaattcatttacaagctacaaacagggctcagtggttggatgctaccagtgcatctctgcattcggtcaccaatcaccatggccacattatttcttattgctcatcaccatgagaagaactcaagctaaaaataaaacattggtgccaaggccatgtcacccctcacatcaactgtttgccggactgcggggcgaaattgatgaggaatgtgcgtatctccatggggcccagatcaacgacgagcttggaaggatctacggggcctccccggacgatcttttcatcagcaggagggccttccaccttccacttcagcctctttttctccatggctgaacgttcttggttcgctgataggcttgtctcaacaatcttgac

SEQ ID NO: 18215 - DNA, 300 bp, Oryza sativa
  Clone ID: uC-osflcyp027f04a1
ataaaaaaaaaatttaaaaaaaaaaaccaagaccttaaaaaaaggaaaaaaggggggggaaaaaaaaaaaaaaaaaaaaacggccaaaaaaggggaaaaaaaagggcaacccggaaaaaaaaagaggggggagtttaaaaggggggggggcccctaaaaaacccggaagggggttttgtggcaaacacccggggtaaagggggaaagggggctttaaaggccgccaacgggaaccaaaaaggggccccccccccctctttaggggggggaaaaaaagggccacattgaaaaaaggggggg

SEQ ID NO: 18216 - DNA, 361 bp, Oryza sativa
  Clone ID: uC-osflcyp027f06a1
atagtatgtttttatttccacgcataaccaacaggtagatgctagattgatacataacatagccggagatgacagcatcatgtcaaacaaaaccattcttcgacaggaaccaaaccacacaccaggctcctcgttgctcacttcaccctcactggttggaagcagctgtatttcgaacatacacactctcaaagatcaaatattatccaaacatataaagggggcataggcatgatgaccatttaattggaagcgtacgggatggcgatgaggtaggcctcggcggtcttgaagatgccggggagggactcctgatcctaggagagatcggacttcacctgcactccggggaggagcttgt

SEQ ID NO: 18217 - DNA, 385 bp, Oryza sativa
  Clone ID: uC-osflcyp027f08a1
aacagaaatcaacaataggaatatgaattatattctgaatccattacaatcactttgctttgcatagagcaaggctagagccaaggacaaagccagatgatcagaatttcagaagatacatatatgtttcctttgcaataactttttaccttagcatggccattttcagagtcaccatgtgttaacatgccaaaacttctctcaggctctcggcactggtcgacaatgctactacctttttcctttacattcagaactatgtgacaagtgaacaacatagaagcacgaactaaagaaaaaacactaaaacatggggtatgagagaacatatatgatttggaactctaacggcaagcgcatttcatatatttttgaagagctttgg

SEQ ID NO: 18218 - DNA, 385 bp, Oryza sativa
  Clone ID: uC-osflcyp027f09a1
ggactccaccaaaaacccagttgctatttgatgtttataagttgtgccaatacttttttgacatgttaatacagcacatagagacttgacaaaaactgacacaaccatgaataaaccctatctttcaaggttctttttacctcaaaacagatgataatataattcattcatgctatataggaggcaaaagccaactggtaacttttttccgacaacacctgcggttttggacgccctttcccccatgctcccaccacaggtgagacagagcccaagtaaatccaactggatgaccttcaagactgaccactgaccaagctgcaccactggcgatgatgcaagcccaaggactgggactgacattacgactgcctgagaccagacc

SEQ ID NO: 18219 - DNA, 395 bp, Oryza sativa
  Clone ID: uC-osflcyp027f10a1
aattaaataattaatttactgtatataaattattgataaaaggtgtgcttacaataatgatgaagtatcaggagaaacgtgtcttcaggttacagattattacatgatggtggtacacgaattgtgcggtgatagaaatcatatatgtcctctttccaaaatagactcgatcgatcggtattgctagagtatgagtagcaattattatccgatagagtgaggctgaggccttccgtgactgaagcagattgcaacgctgatcgatctccttacatgctcggcttcgcgctgagacggctcgccagtttctgacccagagacctgtcagcctgagaccagtaggagagccagatgctcctgatctcgtgggtgaggcgagggtcagagagtgcgtc

SEQ ID NO: 18220 - DNA, 387 bp, Oryza sativa
  Clone ID: uC-osflcyp027f11a1
gtgtgcataatatttccattgctgtcaaagaaaccagttcttttctacagtaacttaaagcaattctccctccactcgccgctcagaacagacgacctattgcacggaacaccccttgtacatttttcacccttccatggataaataagggaaattacttggaaacctaatgcccatgaattttatattttactgctgctagctcctatagtccctctggtgtgataatttaacagttccaacacagcattctcaccctgtgcttttcaattaactgtatggaacaagggtaaaggaacaaccatagttctcttaaaaaaataaaaagctccagatatgaggattagcttctaatgataaaatctgagagaagcaacaaaagaaagg

SEQ ID NO: 18221 - DNA, 391 bp, Oryza sativa
  Clone ID: uC-osflcyp027f12a1
atcaatcaagaaattatcaaaccatccaaatgaggaacatagataattttccagtcggacgctaactgatagggataaaacaactatcagcaatgacagattgttctatatatcctttatttgggaggtcccgtctacgtgatatcagcatctatggactgcttggatcgacaacaatttgtaccgatgctgtaaatgttcattcagtccagaatgagaactcgaatggtaatggtgatacagccaaaatgactttaaaagaagggaaatgaagcactgaagttggcaagagtatcttgtaaaaagctcagttggctgccagtcttgaccggagctccgcagcaaccgcatcaatgaactctccagtgttcaggtaatggcttcttgtgac

SEQ ID NO: 18222 - DNA, 411 bp, Oryza sativa
  unsure (1)..(411): unsure at all n locations
  Clone ID: uC-osflcyp027g02a1
ggtagtaaactaactctcaaaatattgggctaaccctaaaaaacaatttgccttccggggtactaaaaaatgcctcttccagcttacaaactgtcctctccaccacaaaccgaaagaaaaggaaagagaagccctacactgcctagatcaaaagtaaggaccacctaaccaaacttgtacagatgctcaatggagatgaagcagcgaaaaatgataaatcattcaccctctccaagctgcagctgctgcagcagcctgttcatactgaatcatgctccgtttgctgtataaatacgaacaaatcaacaaataacttgattatataccatggaggtatctacagaaggattgagttgttgctcctgatcatcatttcttattgntgnggacagaatgtcggaaatgaaacca

SEQ ID NO: 18223 - DNA, 410 bp, Oryza sativa
  Clone ID: uC-osflcyp027g03a1
gcgacgcaattgctcgaatcacttatgttttgtacggttcagtgcattgtacagacggcaagtaggttctccaatcttattagtgctttcgacaattttttccacgataagaaatgaaataatggtactataagggtctcgtctgtcaaacggacggagcagactgcgaaacagtgctgctctttgtaagaaccgaactctgctgttggagggatgagtgcacacgctcgacgcgctccagatacagtgaggtctgcatttctatgagacgggatatcgccctacggaatgcaaacatctcttcttggccagacaaaattgccactaggcctgtaggagaaggcgctgcaccaacattaccttctgctaaaacatccctcctaagctttgccccttcagcttcaccttcg

SEQ ID NO: 18224 - DNA, 379 bp, Oryza sativa
  Clone ID: uC-osflcyp027g04a1
gaagaggagtacgtgtaggatgtgtagtatatatgtgcgtgtctgtacggtgcgtgcttaattatacaggaggagagatcggagaaggtaattaaggagaagataacgatgatcattaggtcacatgatggcgcaggcgtaggaggggtcctcctcgcagacgatcctgtagccgccgcaagggtagggctgctgcggcgggtagcaggggatgtactgcggcggcggaggcgccggtgccggcgccggtttcggcgcctttccgcaggagcagcagtggcagccgccgtggccatggtggcagcagtagtcggacggccacgaagggaacgggtaggggtagggccaggggtaagggaccttgattacctttggcggc

SEQ ID NO: 18225 - DNA, 351 bp, Oryza sativa
  Clone ID: uC-osflcyp027g05a1
ggggggcaagatttattatattcatcataaaagacattaccacccaggagcaataatacagacatagtcagcactgggtagccagggggggttcacaaaagaaggaacaatttcacattagcgttgataagagttgctttagcttacaaatttacaaggggggggctttgcctgttgctaaagggttgtcctaactacggaagtttttgtctaaaaccctgtcctaaatcataacttaaccaaaaccaactcctttggacgttatacaacaacttaatgatggaatgtaaaaggatggggggggaaaaaaaagaaaatcctatggctggtttcactaggagcttgcagact

SEQ ID NO: 18226 - DNA, 368 bp, Oryza sativa
  Clone ID: uC-osflcyp027g06a1
atagaagggttttattcccacgcaaaaccaacagggggatgctagatagatacataacataagctgggatgacagcatcatgtacaacaaaaccattctttgacagcaaccaaaccacacaccaagcttctcgctgctcacttctccctcactgcttggaagcagctttattttgatcatacacactcgcaaagatcaaatattactaaacatattttgggggcataggcatgatgacgatgtagttggaagcgaccgggctggcgatgaggtagggctaggcggactagaagatgccggggagggactccttagccctggagattttgttcttcaacgagaacttgaaaggcaggaccatcgggttg

SEQ ID NO: 18227 - DNA, 354 bp, Oryza sativa
  Clone ID: uC-osflcyp027g07a1
gcagaataagatattattaattctatcatcaaacatacgtctattgagaacacatcagggcatcatcatacaagaaggtgaggtcctacattctagctccagtattcttaacccccacaaaactgaaatcgactcgtccctcgtaactcgaagttgctcaagaaaaatggtcagaatatcaaagcgaaggtgctaaaataaggaacctaagcaacttgtgacgcttgaaaattttgtgattcggaatactcctctttggatcgtcctttcaagcagtcttctgtttcgctgacgtggaggaaagggaagaaagagccctatggcccacaaacacaaggaagacaccaagggagc

SEQ ID NO: 18228 - DNA, 302 bp, Oryza sativa
  Clone ID: uC-osflcyp027g08a1
ttttgtttgtttgaagtgggaatgtatactctttaataacattccatagtatgtgtaacaactgcccctaaaacgaatgactaaaaaaacggttgtcacagacgaagaaactacttcacacttaacgttgatgggatggcttattcgtaggccaaatggggattaacagagtcatagactcagcaggtagcgccagcactgtagtcactcaaaaacagtggtgtaactcagattaagaaggcattaatctacacaaaaagaagaacccgttctagttcgcatcaggtatttacagcaggggg

SEQ ID NO: 18229 - DNA, 320 bp, Oryza sativa
  Clone ID: uC-osflcyp027g10a1
gatctagagggggggtaccaaggtcccagagacgagtgatgggtgtaggattgcgaggaaaggctacagtgagtgtgaaataagcatagaaccggggattcccgaatcggttaatcttatgaactggctgctggattcgtgagcaggtaagagacaacctggcgaactgtaacatattagttgccagaggaagagaaagtagaagctaatcccgtagtatcggccagcgaaatgggagcaggctaaaccgtgaaaacagggttgtgggagagtaatacaagtgatgagatgctaggctaagcgcttgaacggcgcaccct

SEQ ID NO: 18230 - DNA, 397 bp, Oryza sativa
  Clone ID: uC-osflcyp027g12a1
gtgaacagcaaaccactacatgttcaaagtctcaagaactcaacaaattgtacatggaggagaagaaaagagcggaagagctcaagacctcaaaaagagaaaaattcatgtcggacggacgccaccttgcccgggccagccttttccaccagcaacgccaccgccatcgccggatccggcggttgtccgccggccgtcacctagaccgcgccagactccaccaccactgctgacaccgccaccaccgccaccagcgggcaccgttgtcgggtcaccgacttccctaccactggatctggcggaggggagggtgcagctcacgctgccgccttcaccggaggctgctcggcctccacatccagccggcacccttccgccgttgccgactttacctgag

SEQ ID NO: 18231 - DNA, 429 bp, Oryza sativa
  Clone ID: uC-osflcyp027h01a1
agttaatagtacatggtatataacattaaccatgaaagctgcatcaataagaagttcagaactatggaagcaggttaaaaaacacatgccagaactataaaaacaggtatgacacatgccaggtaattatacatatgctatatatactattaggcatcaagccttgcagccttgcacatgttccaagcaggatgattacaacagataacatacagcaggaacatgcggttgttgcaacaagagccctgcatggtgtttttttgttgtcaaagataaaaagctaccgctaatacattccagtctgacgatagatactaggtattgtctagggtaaacgaagagaacgcgcgacgccaagtacactcagcttgggctttcatcttctctgcagaacaggcctattaatatgataggtacacaggacttaaa

SEQ ID NO: 18232 - DNA, 407 bp, Oryza sativa
  Clone ID: uC-osflcyp027h02a1
gtagaaattagggatttcaaccttgtattgattttggccctaaatggcatatatgtacacaagagaggggaacacaagagaggggaaagtactctaatacccttgacatactactacacttaacacccccactcaaatgcaatgtgtatgcaataacattgcatttgaagggtaaactaaacactaggacacaaactaaatattagcctatctccaaagtcttgatgatgtcgtcaaagtgtgccaattcttggatgatgacgatgaagaagaaaaagatccatctcctcttcaatgaagtggacctcggagccttcacaaactgttcttcggccctcggtaccttgaagccttcacaactcgttcttcggctcttcattgatttagagatgttgacaatgatggaa

SEQ ID NO: 18233 - DNA, 325 bp, Oryza sativa
  Clone ID: uC-osflcyp027h03a1
acaaaacattccccggctaacagattattggtaagggggaacatttatcccccgggcaaaataactaagggaaaagaaacccccccttcccccaactttaaaggcatcacctataaaacaaggctaaaacaatacgcaaaggcaaaccattccttggagacgggggggtatttggtttttcaggaaaacttaggggggttttttttgatttaagaacaccaatttcccctccggacagacaatggaaggaaccttggggaaaaacaaggggggggggcaccaaaaaggtccatgaaaaaactttgcatgaacccgcccgttttgg

SEQ ID NO: 18234 - DNA, 193 bp, Oryza sativa
  Clone ID: uC-osflcyp027h04a1
ttttttgtgtttttttttttttttttttttttttttttttttttttttatttttttttttttttaaatttaataaaaatattttcaaaataaaaataaaaaaaaaaaaaaaaaaaaaaaattcatataacaataaaataattaaaaaaaaaaaaaaggttcccctccccccaaaaaaaaaaaaagataatctc

SEQ ID NO: 18235 - DNA, 394 bp, Oryza sativa
  Clone ID: uC-osflcyp027h05a1
atactctagatgtataatcttgaacattttcttccgaaaaggagcaatcacgcaggcaaagtctcaagcttgaatttgaagcctgacaacagcggttagatgaattgcagaaaaggaaaagaagcaaaaacaaatatggtgcgattcttcctgacgcatctctatacaggttcatttttgcaacaaagaatggcagaaatgcctgaggacttcttcaccaatgcttatttctccaggctatcatatcatattagaagaaataatgccgccatcttctcgttgtcagcctatggaagagtagctctcaattccttcctgtctgccccaaatgactccacaccaaaacccttgacatatacattcgtaaagagctcagaagtatcaggcataggac

SEQ ID NO: 18236 - DNA, 380 bp, Oryza sativa
  Clone ID: uC-osflcyp027h06a1
aataacaagttgggtttatgcagtataagaactgaaccttggatctaataacaacaacaacatggccatgggacacgaaaaggtttcacctttgcgggcacagttcacaccgcggagggctcctcgacatctctgccccttccgccgacgccagcggtgctgtggtgcggcaggtcaacgccagtggcgccctcgggtatcagggacgcggggcggttctcaattacctcttcgatgagcccccaatcgcgcgcctcctcggggtccatgaagaggtcgcgctccatgcactgctcgatcttgtcgatctcctggccggtgtgcttctggtagatcttgttgaggcggtcgcgcagcttgagaatatccttggcctggat

SEQ ID NO: 18237 - DNA, 204 bp, Oryza sativa
  Clone ID: uC-osflcyp027h09a1
tttggggaggcaaaccacacgagatacacgattgattaatttcactgagaatagcacgggtacatcacatcacacaaattcatacgatgacgcacgcataggcgccgaagcgaccagcacaccaaacaatatatgccacacagggtagagacccaactgttgcttatacaagcaaaccacactccatggggggcaagtgctgga

SEQ ID NO: 18238 - DNA, 93 bp, Oryza sativa
  Clone ID: uC-osflcyp027h10a1
tttgggggttttttaatatttggtttatttttttatatttttttttttataggttttttttcttttttaaagtattatttttaaattcttatc

SEQ ID NO: 18239 - DNA, 400 bp, Oryza sativa
  Clone ID: uC-osflcyp027h11a1
ggcaaacaaaatggaccatggaagatttactgaaactctgcagcaagaatagtctcagaaacaggacgtgtgtaatctggattctggacaaccagcgtactgctatatgtttggtttccacaaaagaattgaattacaaggcagatgtctcacgtatacacataccgaatgaaaaggggtataacagctaatcaagcaccccaaaagttttgtccctctatcaaaggaatgcctatagtacatcaaggtaatcaagcagtgccgatgttacatcaaggcacagctgcctgttctcaggtgacgaactctgtgatttgcacacttgatctaacacaagtttgttctcgctttatgtgttccggatctcccatgtattttagaggtatggaactggccagct

SEQ ID NO: 18240 - DNA, 89 bp, Oryza sativa
  Clone ID: uC-osflcyp027h12a1
ataaacataatgtatgtaatatggttaaaggacaaacaataaaatgcaatggggaagaaaagcacaaaagaatagaaataacagaaaaa

SEQ ID NO: 18241 - DNA, 258 bp, Oryza sativa
  Clone ID: uC-osflcyp028a01a1
ttttggggttttttaattaaatgcggctttaatttttgtgccattaagattgtgacacccatttttttttaagaaaaaaaaaacagatgagctaatctttaggcttaacattttttatggactgtagccaggatgaggaggacaaggtgttcccggacgggacggtgctgaagaaggggacaaaggtgatctatgccttgtccaccatgggcaggatggaaagcatatggggggtggacttgaaggagtacaaatccc

SEQ ID NO: 18242 - DNA, 417 bp, Oryza sativa
  Clone ID: uC-osflcyp028a02a1
ttttgtggttttttttttaaggggggaataaccgtaggatataattcagttagccaaggtatcaagtatcaacaatgcaaacctcattagacactttctcttctgacggaaacactcttgacttaacaaaatacctttaagtgatataaacatagggtggctgcaatctgcaaacttaatcttagcaagcactaacttctccagaagaaatatatatgtacacgagactacaagagtaagataggtacagtagtaagaatattacaaggaccaacaaaagttcaaccaaatgaactaacatttccagagtcatggatggaaggaggggtcctccttgttctgatatattgaaaacaaactgttttgagtaacgtgcggcgagcttgtgacagaattcaagagctaacgatcgtactg

SEQ ID NO: 18243 - DNA, 444 bp, Oryza sativa
  Clone ID: uC-osflcyp028a04a1
aaaatcattaataatataaatatatcgaaaacagttggttaaacagagtagtcaagagtcgatcgatcgatgtacacggagacaaaatcaaagacctctctcatcacttggattaattaatactagtaatatttagagactcttgggcaagcatagaaataattagcaaatgaggatggtgatgcaggaggtgtagaggctaggcagcaagggaggggtggtggtggcacagtggggatggtctccttgtggagatgaccgactcccttggggacgatgagaccgaagcctccttccttcctcttgtacaggacgttcatctccccggtcttctcgtctctgaaggcgtagaagttgtggtccacattcactagctgctccatcgcctcctccaccgacagctgcggtatctcgaacaccttggtgcgcaccaccttggtgagc

SEQ ID NO: 18244 - DNA, 394 bp, Oryza sativa
  Clone ID: uC-osflcyp028a05a1
aacatatgtttttctttttgtattaaagattcatcttgttcagagaacactcttgctcagaactacacatcaccaaaattggagcaaggttgggggtacatattcgcttattcaggggaggatttattttttcgattctacgagctttttaactagagttcgaccgggaagtcaattacggatagaaatgagcatcctgtcttcacaaaacccatgcacacaacagtgggcatgaaccgcatgatattcaccattaagtttagtaggctccacgggtgcgcggaacttggcaccagcgtagacagcagccgcaccaagctcctcctcaatcctaagaagctggttgtatttggcaaggcgctctgatcggcaaggtgctccagtcttgatctga

SEQ ID NO: 18245 - DNA, 428 bp, Oryza sativa
  Clone ID: uC-osflcyp028a06a1
gctcccctccttcagctgctagcactcctctactgccgccgtccttttttttttttgaaataaactaaaaaagaatttaccattcatcacttgtttcttcttgggtacatcctgctctctctatatacatcatacatgcctatctgaataaagctgcaattttgggatgaatacaaaatataaaaagaggacagactgtacatatggagtgtgtgaagtgtgaactacatacatgcactaaaaaaggtattctttcaagctatcccatcacttctggcacatctatgctttgctggtatttaaaatcttttttactcttccgtttcctgtatacttgaataaataatcaactggagatgcagatctcaaacaataataaatggacctgcccctcctgcttccttttctatgaatgatggctgcataca

SEQ ID NO: 18246 - DNA, 353 bp, Oryza sativa
  Clone ID: uC-osflcyp028a07a1
gtcagcaaattaaatcctcctttaagttttgagccataaagattgtgacacccaattttttttaagaaaaaaaaaacagatgagctaatcttcaggcttaacatttctcatggcctgttgtcaggttgtggaggacgaggtgttcccggacgggacggtgctgaagaaggggacaaaggtgatctatgccatgtacaccatgggcaggatggagagcatctggggggaggactgcagggagtacaagccggagaggtggctcagagacggccgcttcatgggcgaatcggcctacaagttcaccgccttcaacggcggccctcgtctgtgcctcggcaaggacttcgcctact

SEQ ID NO: 18247 - DNA, 392 bp, Oryza sativa
  Clone ID: uC-osflcyp028a08a1
aggggggaataaccgtaggatataattcagttagccaaggtatcaagtatcaacaatgcaaacctcatcagacactttctcttctgacggaaacactcttgacttaacaaaatacctctaagtgatataaacatagggtggctgcaatctgcaaacttaatcttagcaagcactaacttctccagaagaaatatatatgtacacgagactacaagagtaagataggtacagtagtaagaatattacaaggaccaacaaaagttcaaccaaatgaactaacattaccagagtcatggatggaagtaggggtcctccttgttctgatatattggaaacaactgttttgagtaacgtgcggcgagcttgtgacagaattcaagagcataacgatc

SEQ ID NO: 18248 - DNA, 437 bp, Oryza sativa
  Clone ID: uC-osflcyp028a09a1
ttttgtttttttgttttttttttttttttttttgattagggatcacttattcattatagttcttccatgctgctctaccacagcaaaacgtttcagacaccatcaaaccagacttaaggatacacattacaggtaaatagtacacaatgaaacgggacacgaccaaggaccagaccagacaaccatagctccattggggaagacaaataggcagacttgtgaaccctagaacagcagcagctccatggctgaggacttactggccaccacggaggcggagcaccaggtggagtgtggactccttctggatgttgtaatccgcaagggtgcggccatcctcaagctgcttaccagcaaagatcagacgctgctggtccggggggatgccctccttgtcctggatcttcgcctttacgttgtcaatagtgtcggacgac

SEQ ID NO: 18249 - DNA, 477 bp, Oryza sativa
  Clone ID: uC-osflcyp028a10a1
ttttgtgttttttttttttttttttttttttttttttttttttttttttttttttttttttttttttttttttttttttttttttttttttttggaacaaaagccccataaaaattaacccaagggggggggcttgcttttgcctattggccaggtttacaaaaaaaaccctggaaaatacccgggcatatgccatttaaacaatatttaattggccaaaaggaacccccccccggggggatttaaccctaaaaacccttgggccccaaaaaaaacaaggggaaaaataagggttgccccgggaccagttgtttttggggaaaaccccgaaaaaaaaccctttgggcccggggggacacgggggctttggaaaaggaataggcccccagggctgggggggccctggcttaccattagccccgggcttagggggttttggttttggttacgcccctggttttggagggtttggcttcg

SEQ ID NO: 18250 - DNA, 360 bp, Oryza sativa
  Clone ID: uC-osflcyp028a12a1
tttttgggtcatctaaaaaagcggctaccactaatcacttgttccttcacgataacatctttatttaaacttataccaaataaaagtcttccatggcacagcgcaagtcatagataaatgaggaaactactcttggttcttgcggaactcatcttgatcccagtacacaacaaacctaaccctccacactatgtgcaagaacaaaaccaaaccaaactgaactttgcgaaacaagagctattttcctttttcaccacccaaagggtgtctaatgccacattccattaaatgaaacataaaaaattcaaacagcgccttagccccaccacttggggccttttcgatcaggcaaaggggcaa

SEQ ID NO: 18251 - DNA, 368 bp, Oryza sativa
  unsure (1)..(368): unsure at all n locations
  Clone ID: uC-osflcyp028b02a1
gggggggaaaaaaacaaaaaaaaaaaaaaggggggcggggggcccaattaaaaaaacggggccaaaaaaaaagggggggtcaaaaaaattggggaaaggagggggaacaaaaaagggcccaaaaaaaaaaaaaaattttcccccaaggggggaaccccaaaaaaaaaatttttaggggttttttggggaaagccaaacccaattttttgggggggggggccccggntttttggggcccccaaaaaaaaaaaaaaaggggggggggaaaggaggacccctttcccggggggatttgggcccaaaaaccgcccttttaataaaaaccccccggttggggggggaaacacccccccccccccgcggggggt

SEQ ID NO: 18252 - DNA, 435 bp, Oryza sativa
  Clone ID: uC-osflcyp028b03a1
ggcggcaggtgcggcggccgggccttgggcggcgccgccgccgctttcttggtcttggcacggatggcgtcgagggcctcgacgtacttctgcacccgcttctcctgcactcggcgctgctccttgacctcgccgtcggcggcgatggagtcgagcttgaccagctcattcatcagcgcctcggtgagcgccaccacgtcggcgtcaaccaccctcccgcccttgctcacgatcgcctccagcgccgacaccttggaggcgagcttgtcgacgtcgagggcgacgcgggagacggacttggcggcgcgctcggccttgcaatggcggcgctcctcgaggaggcgcttggcctgggcggaggggtcctcgaggaggagcatcttggagcggtccttgacgccggcgatgtcgaggaacgccttggagtccctcttc

SEQ ID NO: 18253 - DNA, 232 bp, Oryza sativa
  Clone ID: uC-osflcyp028b04a1
agaggggacactaaaagcatgcagggcactaaaactttggtttacattacaaacatgtaagggcttcggaatcactcaccactcataaaggttagggataaaagggataaaacacagggaagccctgttttttttttaacaacaaatgtttgccaggggttgggttcatgaatgccctgaaaaacgggctcctccttgttttcctgggcttcaacgacaacatcgaatgggg

SEQ ID NO: 18254 - DNA, 465 bp, Oryza sativa
  Clone ID: uC-osflcyp028b05a1
agtcacaacagtgatatgcaaagtcaaattgatgtgtatacagtggctagtagcttcaggtgcttcgactgcacccagtttgaagaaattgtataaacatagtgcgagctagatctctcacaacagtgatatgcaaagtcgaattggaggatatacagtggctagtagcttcagtttcgcagcagtgacatgaaccgagtttaaaactataatatactcttagtcataacaacagcattggataattctgccatgttatgagccgtctgatagtgaggcatgaaatatagaattggtaccaggcttgcgattataaccgacaaaaaacaaacctcccacaacctttcttgctattggttgaagtgtctccgcctttccttgccattgttgcctagcaggttgcccttgcccatgtggttgtcttcttgaagcatgagatcgatgtctccttcgatgacctgaact

SEQ ID NO: 18255 - DNA, 420 bp, Oryza sativa
  Clone ID: uC-osflcyp028b06a1
ggagagcaaaacaatcttcagataattgatccagtgcttgcagaagagagcacaatgatcttaagaaaaatcactacaggatgtgtatacacagacagactgactaacagtatttacaacaaagagaagaggcttaacaacacaaccgaggtacaagaataaacagtactagtattttctgtaccatagatgaacagacagacagtattaacaagaagtcaacaaagaaggattaacaacacaagcgagatccaagaataaacagtattttcggcatccatagacgatgattcacatacttaattacattttcattcacatctgagattttcacagacgcagaacaaaaccttcacaccaccgtatgcagataagctatcgctagcctacacatctactagtactaggctggatcaggtg

SEQ ID NO: 18256 - DNA, 465 bp, Oryza sativa
  Clone ID: uC-osflcyp028b08a1
agcaaaacaagagttcacagggtagtagtagtacagcagtagtagtagtacacaacataggctcttataacaggctcaggtctgcacaacaactcttgatagcttacaagcttcatcaactttgccgcagattgttttcactcacttgttacttacttagtagaacagttcactatcactgttttctgcttgctaatccttcttggtaggttgtacctccagattgggcaactttaagaactcagacgaaacgcacagttattcgcaagtgtaagtgcagagccatcttatttgcagcagagaacatcatgctgctagtaaggacctccaggatatgttcatcaggttcaggtaccagcatgagtagcacacctgaaggagcgtgcaactctatgccacaggtaaatgcagcgaagagtggcgtttggtaagtgatctacttatggccctgatggtgtttggagt

SEQ ID NO: 18257 - DNA, 281 bp, Oryza sativa
  Clone ID: uC-osflcyp028b09a1
ccccccaaaaaaccgggggggtttcccgggggaaaaaaaaaaagggggggccaaaaaaaaaggggccaaaaaggggggccccccggggggggcctaacccccgggggggaaatttttaaaaaaagggggccccccctgccccggttaaaagaaaaaggggggggggggttttaaaaaaggggcccccggggggggacccccgggggcaaaaaaggggggaaaaaaaaggggtgggggcgggggggggggaaccccaaaaaaaaggggggcccctcgggggg

SEQ ID NO: 18258 - DNA, 286 bp, Oryza sativa
  Clone ID: uC-osflcyp028b10a1
aaagggaaaaaccgtggggggaaacaaaacccccaagccattgaggtttacccccctcgggaaaaaacaacaaaacgtggggggaggggttccctcaaaatcttccttcccaaagggggggggccaaaaaaaccccaattttaaaggggaacccccctggggggggggaaaaaaccaaaaaagtccccaaggggggaaaaatcattaaacccgccccgggtggggggttccccccccctaattcctccccccatgggcgggaggcctttggggagccccggggttg

SEQ ID NO: 18259 - DNA, 519 bp, Oryza sativa
  unsure (1)..(519): unsure at all n locations
  Clone ID: uC-osflcyp028b11a1
gatgtagcatgccactttattgcgtaagtgttaagcatacaaattacagaacaacctaaaattcccgcatttcatactatgtacactccattcagtgacattgtctccaacacaacacctaaaagaagattagatctttttgacaccaccttagcaacagtacatatccatacctcattcacctcagtgtacaaattccgacaccctgaaatgtggtgttgttgctggattagtcacgtaggatgacagagtctgcaatctccatcagtggctcaaggcactcgggagcaaacttgcgggcgaacatgtacgagtatgtcccatttgatttcctcagctccttgatcaggcttgcagacacctccccaggccggtatgtgtgagggtggccctcgacttgatccgtccagttcacccttgtcagagtatacccggtgcagccttcggggtcttgcatatccagcaatgtcnggaagtagtgctcctctggatagcacgagtctctgcgcttgatcaggc

SEQ ID NO: 18260 - DNA, 222 bp, Oryza sativa
  Clone ID: uC-osflcyp028b12a1
gaaggaaacggagacaaatacgccaaaaggtgttctcaattgaagtcaaacaaccaccgatggtttttaaggttgtatctaacacaaggtacccacaaacaggttacatgcgaaactggtgcaagtccaccccccccattaagggacgggccttgaaccacgcatgtgtgccggcccacatatgcgccaaatatccttgttctttcggaataaattgccccc

SEQ ID NO: 18261 - DNA, 475 bp, Oryza sativa
  Clone ID: uC-osflcyp028c01a1
ttttttgttttttttttttttttttttttttttttttttttttttttttttttttttttttttttttttttttttttttttttttttttttttttttttttccccccaaaaccccccccatttttaccctccaaaaaaggggcgcccccaaaagcccggcaaattcaaccgggaaaccccccctttttgcccccccgggaaagggaaattgtctcccccccaccgggatccttaaaccggaacccccccccgggggtttaaccgtatccaaaaccccggggcttaaggggcaaagggccccaccaaaaaacaggaaatggtcccaaaaaaaattttcccgggcccctatttggggattttcccccccccaaaaaatgtcgaaaaaaaaaacatttggcaccccgggggtcctttgggggaaagaacccttggggccccccccaaaagaaaaaaacactgtggcccccacccttcc

SEQ ID NO: 18262 - DNA, 417 bp, Oryza sativa
  Clone ID: uC-osflcyp028c02a1
gcatatgaaccaacacaaactttttcctttattttatcaacgtatatatcacccaactcgagatcatacagtcgaacaagcgaaacattattacattacaaactgggactaatgcacacttcacacatacaattaagcacgtaattaacacactaattatgcatggcaataagattaagatcgatcgaggagtcctcgatcatggcgagaagtactcaatccttgttcgtcgggaggatgtgcgcgttggcgacggcgcggcaaacgggggcgccgccgggcctgacgccgagcagccggaacgcggcgtggtccgggtcccagcgggacgtgtcggcgtggcacacgacgggggtgatcaccgggtccccgccgccgtcgccggccgagtacaccgagtacgccctcgccgggccg

SEQ ID NO: 18263 - DNA, 383 bp, Oryza sativa
  Clone ID: uC-osflcyp028c04a1
acagatgttggatatcattctgcaaaattggggatctttcattctcaatatcatgatgggagtacatgtatgtacaatggaattatggcaaaaggaatgatgggctttgcatcattctcatcttggggcaaacataaacatattactcacattgcaaacaaacagttgccataacacagcaacccacacaaaaaaaaccattacatcaatttgatcaaacaataaatctaccaagttgggagtgatcgatcctattatttttttaccaagacagactttacagagttcagaactatactactaaatcgccaatactaactcatccagttctcattgactgcatattcaaccagatccactcttgcatgccttactctggagca

SEQ ID NO: 18264 - DNA, 467 bp, Oryza sativa
  Clone ID: uC-osflcyp028c05a1
agagtgggaaatagaagtgcttattccagtacatctcagctaccagtagcttattacggtacatagcagctagccatctagagttctagacccatacaataaccacatatcaacatatcacccaaaaaaggcaagaggcaagaacgaagcagagagataccatatcggtatttacagtcacgcaggatacaaaggaaccacagatcgtgggcagtccgacctcttcccggcaagggagtagtatgcaagtatctgagcttgactatctacacaaggttcaccatcttctctcattcgatttgcattctcagaactgggaggtgtaaactctatgttccagaagggcctggccatgagcatgagatcgtgaccagtcttagaagccttgtagccctgtacccacacgtatctcagggaaggcatactccgtatagcgcgggctaaagcttgctcactgaagcaacaac

SEQ ID NO: 18265 - DNA, 450 bp, Oryza sativa
  Clone ID: uC-osflcyp028c06a1
gaataaaatttgtatgaaataaaaccgtacgaagtgatcatggtttttcacaactcatttcgaacttcaaccctgctatctgttatgccctagcccttatatatattacgactcatagattctgttttttattatcttctcaacctgagcagccgacaaacgccttataccatactccctcagccgattgttatcctgacaagctccatctcttagctgcttctcatcaatatccaataacttcaatccctcagacagtcttggaaagaagccttcaggcctcatacaccacgcagaaaaagcagcaaacaatatactcagatcaccatgaagtctttccaccccgccattactaaactttgtgctgccactgaaaattccagaaaagagcagctggtctactccacttgccacagttctccacacagacacaaaatccaagacatttag

SEQ ID NO: 18266 - DNA, 421 bp, Oryza sativa
  Clone ID: uC-osflcyp028c07a1
ttttgtttttttttttttttttttttttttttttttttttttaagagagttctttaatttttgatcacaaagtttgttcaacaaccttatggttcccatcaaaacttaaacatgtttaataggacggtactccgaacaaaagctaaaccacataaatgtagtattatactaaaagatccatttttttggttcaggcggagttctaaggcttaacggcgaggcaaaatggccttcagcggtacttgatgaagccaatatccttggcgttgctgcggaagcactgcctgcagcacatgagcccatacttcctgagcagcccatgagggttcccgcatacccggcagactcgggagccgggcccgtatttcttggggtgggagttccacacgttggagtggcccatcgctcgccgccggggagg

SEQ ID NO: 18267 - DNA, 515 bp, Oryza sativa
  Clone ID: uC-osflcyp028c08a1
ttttgtttttaaaacaaatgagcagtgatatctctgaactttcgcttacacatagatagcaagcagtctagtagtggaccaatccggccttctgcacgcatacagtcactcacacgctactacgctatctttacatggagaacatatacatatattgcgacatagaagtgcatatgacatataattagtgtgcacatgtgtgcatgctgctgctgcatgcagcgctagattattcgttcgcagcaggtagcgaagttgtgtgatcagttttgtcaggcgtggtccggctcaccaggaagagcagcgagaacatcaggaggagcagcgaatacatggcggtctatgtcgtcaggtggactagcgaacacttggtccggatcatggtctacgtcatcatgggggctagagaacacgtagcggtggtccggatcatggtctacgtcatcagggggactagagagcacgtagtggccggcgcggagaggccttggcagtctggccgccgccgtggtctt

SEQ ID NO: 18268 - DNA, 471 bp, Oryza sativa
  Clone ID: uC-osflcyp028c09a1
ttttgttttttttttttttttttttttttttttggagcccataaaaaggagttccagtatatcattaccatagcatttccactctggcaagacagttcatgtgtgcaattcctcccattctccaattttcatagaccactcttgaaatttatgcagttccgtgggcacatctgtttcagagccattagagcagaattggcacaaggtaattaatcaatagggccctttcgtttggtttctgtgaaatattcttccagtgatcgatcacatctcatgatgaagttcttaaactttcattctgtcagcccctatatatacatacatcatgatgatggttaaacttcaatttggagtaataatacttatgttacgttacctcaataggctttttttcatcggagtggaggaagaatgcgtaaaacccttcaagcacagttgctgcggccttggcccaaaccagcacctgaaccg

SEQ ID NO: 18269 - DNA, 447 bp, Oryza sativa
  Clone ID: uC-osflcyp028c10a1
gagaaaactacttgacagtacactttattcactatagctgtatgcacatgcgactcgcatgcccccaccggacgggtataaatgtaagaactaatgtgtccagaaccaaaaatacgattacataggacacgaatcctgtacaggaatggagaagtttagaagtgtgtcttcactgcctctgcaaatagcaacctagcgtcagcaaaccaatttacagggggtggtcaactaggccgtgcaagtgcaagggcgcaaagaagaatcctccacgatcatgtgaaacttgtttcaaaaggtgccttgggcagagcttccacaaaatcgcagtctttgggggcacttcggtgcttcacaagtatgccagttgttattttgttttccttgatgcggccccaggaaaaaatcacctggaaagtaccaaagaacaccatcctgttgtctaatctg

SEQ ID NO: 18270 - DNA, 230 bp, Oryza sativa
  Clone ID: uC-osflcyp028c12a1
cttcggggccaaccgccttttttttttggggactcggcaacaaaccagggcagaatgttgaaacgggacccccgagggtaaaaacggtcttagggaacaaggggagctggccaccccccacaaaggctgtttccattgacacccccaaaaaacggcaaaaaaacgggggtccttcttttcgcggacaaaaaaaccattaaccaacttgacccgtttagaaaaaggggggg

SEQ ID NO: 18271 - DNA, 326 bp, Oryza sativa
  Clone ID: uC-osflcyp028d02a1
ccaaaaaaaatattttttttaatccattaaaattagaacaaaaacaataaagaaaaaaccagactgtaaagaagaaggaggggactgaaaatagctccccaaaaaaaaaaacaaaaaaaaaagggaaaaaccaaacaaaggggaaaggaaagaaaacgagaccaatccggaggggacgccaagaggagacggcacaaaaaaagtgggggctccttttttcgggaccaacaagaacatcaaggggggggggcccaggatctaacagtccccctcaagctccaaaggggggggcaaaaaaaaaatggagggaccagaaacattgcccc

SEQ ID NO: 18272 - DNA, 512 bp, Oryza sativa
  Clone ID: uC-osflcyp028d03a1
aatgtaagcctgtggttttattgcatgatttgtcgggtaaaaaaaaattactaattgtacatcacttgacaggcctctctcactgaaagctgaaaccccctaaaccccgaagaaattaacagttgaaacgaatgggtaaataataaactcagacgaggccgacgagcttctcgctgaggtcccagagcttcctggccttctccgggtcgctggcctcctgcgagagctggttctcgaacgacgccgagtccttgttccagctccagtacacgccggacttggtcaggctcgggtcgcccaccacctgcgccagccgcttcccggactccgcctccgacacgaaccccttcgtcacgaaccgctggaacggcgggaacagcagccggaacagcgggatgtgctcgcggaacaagcccgtcgtcgcgatgcaccccgggtacagcgacgcgaacgtgatcccggtctcctcgtggaatctccggtggaactcctgcatcgtcagcatgttacag

SEQ ID NO: 18273 - DNA, 479 bp, Oryza sativa
  Clone ID: uC-osflcyp028d04a1
gaaaaattgcttgaatttctagtagatcagattgcatcaaagatgacagtgatgatgtacaatgggctagtatgctagtatcagaaggccgcattttactagagaatcctaccattctattcatcgatctcctttacagcatcctttgcaagtcgtgttacatatgtagcagcaatggctgtaaataatagcccgatgcccagtgtcagtagctggctgtttcctcccaaaccgatctctgactcatcttgaattatagctcgtccaaatgcaccagcactgacataggcccatgatcctggaagcattcccaaccaacttcccaagacataaggcaagaacttcactgaagtcaagccatacaagtagttcccaagagagaaaggtaataggggactaagccgcagcagagtaacaaccttaaatccattttcacctattgctttgtcaattgccagaaacttcttgttccttcacca

SEQ ID NO: 18274 - DNA, 440 bp, Oryza sativa
  Clone ID: uC-osflcyp028d05a1
ccagtacaagcatatttttatacatggtaaactttaaataaacattatcccaggattggtacaacctgtacgcataaaccaaagaacagaaaaataaacagaaaacaagaaacctgtggatttatgccgctatagcaccttccacaaaactcgtcattttcttttattgcctaccgcagattccaccatataatatctaaagttgaatggtctttcattcaacttattctaattactgaatcttctatattatcaggtgcaggcagtgtggtaataaaatgataactggataactatcgaaaaatgtgagagagacattaactttttttaagaagggttttattaaaaaagatgaagccgttatcagtgttaccactgaactcttgtgctgagccaaagaatgtctgtaccatggactcatcagtcatctcaacattctc

SEQ ID NO: 18275 - DNA, 277 bp, Oryza sativa
  Clone ID: uC-osflcyp028d06a1
aaaaaaaaaggatttaggaaaccccttaaataacaaaacaggcggggggaacaaactcccaaactgaaacgggcttcacagggggggggccatatgagttaaacggggcacaacagccctaaaaaggccattcatacttcgttgggggggggggggggacttgatgggtatttaggggaaaaccccggggggtttcgacacccccaccagttggggtgggtttagcccagggggtacttttggggccaggagcgggggggggattaatactgggccc

SEQ ID NO: 18276 - DNA, 487 bp, Oryza sativa
  Clone ID: uC-osflcyp028d08a1
ggaaaactctgtaaagaaattatgtttacaagagtatattcaactgttgcttttttttttacaaagaaaatagtatatatcatgcaactaattttagtatataaacttttaagaatctaccagactgtaaatttgatcgatatcactgcaactagcttcagatatgagcaagctgatatcattaggcatgaagcagccaaacttgtaatttcattatacgagacaaaacctgtgaatatgtactgatgagttgaaagttcagtatttccccctccatttttcccctttccccatctgcatcaggttctaggaaccaaacatattacagtcaccagagagataggatgcaggttcaacacaagatctgtctcaacatgttacacgaactcctggtcctggtcatctggtcttcgagaaccctcttcgccgtcgatcattctcctagtcatgttggccctctgaacaaggcggaccagcgcttgcacca

SEQ ID NO: 18277 - DNA, 488 bp, Oryza sativa
  Clone ID: uC-osflcyp028d09a1
ttttgttttttttttttttttttttttttttttttttttttttttttttttttttttttttgatgaaaaccacttcgagacaatttactcagggggcaaatttttctcagccacaaatccaaacacttggtccttcctatcagaagatcaaaatgaacaggttttcaaattcatctcccaactcgacgataatttacacgtacatttaacacatttttccacccttttaaaactcctcccttttttttcccgggtaagattaaaattaacttggggccagccagcgtcgccgggggcgaaatgtttacagggtgggcgtcctctcggcggccccggaaatgacggtgagcaggttgttgcccaaggggtcactgaggtgcttggagaggttttcgacggggccctcgccggtgacgtaggcctggatgaagaaccccagcatggagaacatggccagccgcccgttcttgatctccttcaccttaaaa

SEQ ID NO: 18278 - DNA, 420 bp, Oryza sativa
  Clone ID: uC-osflcyp028d10a1
agactctaaacaaatacattggatagtagcagataaaactcgatgcagaataacgtttgcattgttgacaaaatttggatattcttcagcccatgttgtcatcagacaaatgaactaccaacaagagcatagttacaagaccagaaatacagaaaaaaaaaagatggtggaatacaaggtttaagcttgcatgttcatcagatagtgtaagcagagataataacttggctagcatatacaaagggctcactcttgaaagaatttctgctccagaaaattctctatccctatcaccttttactcctggtcatcgtcgtcgtcatcatcgtctcccttcttaaggcgggtagttccaccctctttgcatataggtattttcatgtgtccaaaaggagtattgacatcaatgtgcccctttat

SEQ ID NO: 18279 - DNA, 127 bp, Oryza sativa
  Clone ID: uC-osflcyp028d11a1
ccgcgtcgaagcttgatcctatttagcggcccctttttttttttgggttttttttttattcttcaaacatagacagtggatgttactatataaaaaatattggttaatctctctacaacaagatcag

SEQ ID NO: 18280 - DNA, 501 bp, Oryza sativa
  Clone ID: uC-osflcyp028e01a1
gtaagtgtagcactgctggaagataatgacatagcagaggtgatagcaaaggaatttacacaaaataatcctagaagatcccttcgaccgtgaagatagatagatctttagaacatgtagatcaactcgacgtagcagagtatgatataaacaaaaggtggttgtcgaagaacaaaccttcaacttcaaaaatatatggatttagaacgttgagatgaattcaggtgcatcacccctcggtccagcaactgtcctgtaaatatacaacttcttcaccttctttgcatcattagcattgtctgcctcattgatacttgctgctctattcatgacctcgatgttgaggtttgccatgcttgctgcaagagacttgcaaccccccagggtgacattacacgacgacaaccagagtgagcgcattgcctcgtactgatgcatgcctgcaagaagcgcgctgtcaccaaaaggactgtccctgatttccagcttcttgagattttt

SEQ ID NO: 18281 - DNA, 505 bp, Oryza sativa
  Clone ID: uC-osflcyp028e02a1
ggccaatggaatcaaacttgttgcctgcaattttcagtaatggaaatatacaattctgagcaatggaaaatccaagcaaatttaacaccttaatcaccagtaatggatacccacctccgcaagaccaccacaacatcttctataactttgcatgatcaaactgtgcaaaccaacattaggatggtctcaattcattcacaggaacagagtatcgtgccttccatttcatccatgtaaaaaaatcaattgcactcctaggactgctatgggaatacgtgtactacatttttctctataaatggtgcatcttgttctagaaattgttacaccatgtccactttgtcagctgtgtgcttcaaaatcttaggtgtcgacactttctctggatttgccgagttcgtttcctggttaacaacaataattaggtatgatatccatgagtgttccactttgttgatcatacacttaaacccgatctgcgcaaatgaaagcaggctctactaca

SEQ ID NO: 18282 - DNA, 476 bp, Oryza sativa
  unsure (1)..(476): unsure at all n locations
  Clone ID: uC-osflcyp028e04a1
accacaatatcaatttaaaccgtgaaccagagtctgaaatacaagtgaatatccttctagctctagatatgaatgaaatattacaattggtatgtagcacatcaaatatcatcgactgtatcttcttgccccttccatttttcctaccagagtgggtaggctgccaatcagtctttcgaagaactgctgcctgcgctcttcttcccgccatatttctgcttcccaacgctgaagggaacatatttgtattttatcatgtgcacaatctggcgcttcatcgtgaggacaaaaagaacaacccagtagcagagaagtatcggccagaagacaagaacatcaaatacagagaagaaagtcatcacaaaagctataagaaaagcttttgtgattgcataccagaacttgaactcggggaggcgcctgatgaagggcttgaactcgtcngagccgcgggtggggagggcgggcccgtcgag

SEQ ID NO: 18283 - DNA, 449 bp, Oryza sativa
  Clone ID: uC-osflcyp028e05a1
ggaattaattcacaacaccatatttcattgatcaggttcagaacctgcacagaaatacacactaccggtacagatctcaccttctctccaatactcgtacatccatccacgcggtccacacgaatacgtacatctatacggtacacgtacgtacatctactgcaccgcgtacacacacgcacactctcctgagagacccgcatgtcgttaacctagctaggttagctgaaggcgatgtcgtcgccatggcagcacggtggcggcggcgctcacttgccggggacgaagttggtggcgtaggcccaggcgtttgttgttgacggggtcggcgaggtggtcggcgaggttctcgagggggcccttgccggtgacgatggcctggacgaagaagccgaacatgggaaacatggggaggcggccgttcttgaactccttaacttgagcttccg

SEQ ID NO: 18284 - DNA, 421 bp, Oryza sativa
  Clone ID: uC-osflcyp028e06a1
ggacagaataaattatttatttgcatcctgtacagcaaacggcgtcaagccaccaataaatttacaccacaagcttgcaagaaaaaccttacgtggtttgcttgcacgaacttccccatagaaacgggaaaactgcattctccacaaagcaaatttcagtagacctgttgcctcgaccaaaatggtggacgattcatcaggtctaatttgagtagatactgggtgcttccaggaaagcatcaggcatgatgctcttcatgatcaacttgatgcaacggtgacggcgggagtgaaaatatacattttgcagtcatgcacgtcaacttgcgccccaaaagttccaacaacgttctctgatagagtttcatgctttcacagatttctaacataatagggagatgaaccatcaaggcctacagat

SEQ ID NO: 18285 - DNA, 564 bp, Oryza sativa
  Clone ID: uC-osflcyp028e07a1
gggatgccgcgtctgcagcttgttcctctaatcggccccctctttttttttttgtggttttatactgctgggggataaagacttatctcaggtgatagcaaaggagtgtacacaaaataattctggaagatcccttcgaccgtgtagatcgatagatctttagaacatgtagatcaacctgacgtagcagagtatgatataaacaaaaggtggttgtggaaaaacaaaccttcaacttcaaaaatatatggatttagaacgttgagatgaattcaggggcattacccttcggtccagcaactgtcctgtaaatatacaacttcttcaccttctttgcatcattagcattgtctgccttattgatacttgctgctctattcatgaccttgatgtcgaggtttgccatgcttgctgcaagagactagcaaccccctcagggtgacattacacgacgacaaccagagggagcgcgttgcctcctactgatgcatgcctgcaagaagcgcgctgtcaccaaaaggactgtccctgatttccagcttctttgagaatttttgagccatt

SEQ ID NO: 18286 - DNA, 341 bp, Oryza sativa
  Clone ID: uC-osflcyp028e08a1
acatcattaattcgatcatcccttggatgcggcctggggcttacattaaatctcgatccaaagaagcaaagatgatgacagacagaaattaattaagctagaaatttccttgatcgatcacacacccccacacaattaagggacatacatacatgcactggtgcaactgcaactgcagggtcggggcgtggctactacaagtgtacacatggtacgttggttggcaccatttcgatcgggtcgttgggctcacttgccggggacaaaattggtggcgtatgcccaagctttgttggcgacggggtcggccacgtggtccaagaggttcttgatggggccct

SEQ ID NO: 18287 - DNA, 458 bp, Oryza sativa
  Clone ID: uC-osflcyp028e09a1
gaagctcaagtaatatatatgtgtagtatatatgtattttatttacatctcacacctccaaaatcttattctactacagtaaactgggtacagagatataataatactcatacaaatatgtacaacaacaagcacaccacacactgatcaacttttccttggattttttgctctgcagcaaaacaccaaggcaaaagcttatcactgctcatatgtatctcatcatactgaattatactaagtagtagtagtaactacatggctgtatagctatatgcagaccaaatctcgtcaaaattaaaatcctaaaatccaagaagaaaacaagaaggagtaacaaatcgaatgaaggtgtgcagtgcaggtaggaggaaggtatcaacggtgacccaaacacaccaagagcaagaaggatgacgacgaagaggagctagctcgagctcgagctctagccatgg

SEQ ID NO: 18288 - DNA, 58 bp, Oryza sativa
  Clone ID: uC-osflcyp028e10a1
atatatgaatgaaaaaatacaaaaaatacggcgcccataaaaaaaaaccacgggaaaa

SEQ ID NO: 18289 - DNA, 438 bp, Oryza sativa
  Clone ID: uC-osflcyp028e12a1
agatacaacagcagaaaaggatatacctctgcttccccggttaccatatggaaagatttttacgttacagacatacaagttacagcacaagcagttttcatatgcttgaacatctaatgtcagcggtagcacattaaccaaaagtaaagtaaaaatcacatcttgggagcaagccccgtatcatgcttgggaacatcagctaatatcagtcttaaatcacatctcaggaaactgaccggcaagtcatcctttcctactcgctgatcctacagcagctgcttgcagtgacagtcatggtgtggccttgtcagcaagtgagtgggcagccgagctccttcgccgccgcggtgaggaaggcgagcgtcagcccggtggcgcggcggctgtgggcttcccactctatgcatctctccacatcggcttgccagttgatgatgc

SEQ ID NO: 18290 - DNA, 440 bp, Oryza sativa
  Clone ID: uC-osflcyp028f02a1
gtgcttaagcaagttttatatgtttcgtgaagctctcaaaggcgagtggaagtgcagtaatttgttattggcagtacattattagaaccgcagagagcattcacaaggcatacatttaacaccatccagcacatacgcagggagaatagcaatcaggcaatatctttgatatactaatatttttttagctttacttctttggcgtgtcagcatacttccaggtgtaatgtgcaaatgaggtatactgtcttccaccagcgacatcttcttcgcgtacctggctagagatctctttcaggtcatcatccgtgaggttcacctttaaggagtcaatgttggcatctaggttttttatcttggttgttcctggtattgggaccacatcatccccttgatgaagaacccaagctaaagctagctgagcagggctgcactggtgc

SEQ ID NO: 18291 - DNA, 368 bp, Oryza sativa
  Clone ID: uC-osflcyp028f03a1
ccattgtgttgttcaatacaaactcgtttaaaaatatccattgacaaataggccgcatcacgactggagagcaaccccgcatgcaaacaaagggcgagtctatgctgaaaattggcacaaatatagggaagctgtgcgagaaataaacaccgggctttgaaaaaaacaccattttttttcatatatatggaaacatcaaagacataatatccttccctgcgaaccacgaacaatgagctgctttgaaaaatgaggttcccaacagaacactccctgagcaggggagatgatgttgatatcctcagcaccagcaccgtgtccatccccgatatctgatgaggtgttaatcaagcgcctggaacactgct

SEQ ID NO: 18292 - DNA, 283 bp, Oryza sativa
  Clone ID: uC-osflcyp028f04a1
gggaccagacgaagaaacattaaataaacccccaaaatttcatagggccgaacggtttgggttactagttaagcaacctgggggcatacttgcatatctaaatgatcggtcaaacaggggggacaagcacaaaacatccgatgattccctagggggaattaaggtgcgacgccccaggggacccgacattctaagggtttttttggggggatttttttttttaaataagggagggggggaaaacccgggtacttggcccggaactggggttcccagagggggg

SEQ ID NO: 18293 - DNA, 429 bp, Oryza sativa
  Clone ID: uC-osflcyp028f05a1
acgaacccttcggccacccacagccgcaccagccgctgcgcgtcgacggtggcgctctcccgcatcgccgcgaagtagaggaagcacgacttgaggtggtgcggcaggtcgtcgaacgccagcgacatgatccgccggctgttgccgttcttggacgacggctccctcgccgtgacaagctgcgacatcacctcgtcccactccgccgggagctccttggaacgcagcacgccggcgaggacgacgatcgacagcggaaggccgcgggtgatctggaagatcttctggtagtacctcgacctgtgctggcgcgggcagtcgccgccgcggccgaacacccggcgccggaacacctcgtacgtgttctccgggctgagccgttccagctcgatccggctgtgcatcggcccggcggtgtacgcgaccacc

SEQ ID NO: 18294 - DNA, 311 bp, Oryza sativa
  Clone ID: uC-osflcyp028f06a1
atcttctgtttggggtttttattcattcattttctttcttttgacaaaaacacaaccccatgggggacataatgaagacccccaaagatggccccagggtgcagcaaaggggagcatcagttcccctaaaaaaaagggttaagaaaaaaacggggccaaacacatccaaggggggttaggacatttaaaattgtttcaagggtacaagcaaccccccaagtggttaaaaacctggggggtgggaaaaactttcatccttttttggggcttgggaaaaaatccccccaggatccatgacattgacggggaac

SEQ ID NO: 18295 - DNA, 499 bp, Oryza sativa
  Clone ID: uC-osflcyp028f08a1
gacctactgggataaaacgatttctatagcattagcaagctcattgctacaaattattaacagtaagatctcaaaatatagaacataagggagtaaacaaaactgaacaaccaaacaactacagtactgtacatgcctggtatcctacatgaggcgactgatctaggagaatgctgataagcatagatactgggcaagggaagggagcctgggcagtcagactcgcgggaagcgagaaggtcctctcctccgaaggaactcaggaatctcaatcatgctgccttctgcagaggatgggcgtcgaccattgtctccttgcgtttgttggccaccctttgtggtgcgaccttctggttcatcttgacgtttgaagccagtggcaatcaaggttatgctcacttggccattgagtgatgggtctatgacagcaccaaatatcagattagcattttgatcaacaaggtcatagatgatctcaacagcagaattcacctcaaac

SEQ ID NO: 18296 - DNA, 412 bp, Oryza sativa
  Clone ID: uC-osflcyp028f09a1
ttttggttttttttttttttttttttttttttttttttttttttttttttttttttttgttacactttatttacataaattaatattcagtatataaaaaaaaaaagtgttatttaaaatgaaaataaaatatacccatgcaaatattattgatgcccgaggggaaagcagaactccacgggggggggggaaaaacaaatggattttggacggtgggacaaaaggaggggaagccccccccctcacatttggtggactgaaacacaccgcccattaaatgggcagtggggggcaaagggtgggtgacaaaaaaaaacaacggtggtcctggagagaaatggagcctgggacggccatgaaaattaaaagagacacgggaccgctcaaggggaccaggcacgagggcttctac

SEQ ID NO: 18297 - DNA, 423 bp, Oryza sativa
  Clone ID: uC-osflcyp028f10a1
atcgtacaatgtcctctccgcttgtcgaaatgcaaataacatcatcgggggatatgatcatcagttcacgagaacagaggaagaaacaaaagctaaaaattaaaaccatcaacagcccgatcgagtttgcattactagatacacacattgcagccttccttccctctctccatgtatcgatatatcaacccggccacgcacaaaacatttgttcattccctactcgagctgcgcgtaccacaccccttggatcttgacatccttgggcaccttggcgccgaggtctgtgtccgacggctgcacgctctcgaagacgccaatcacctcgccggtctctggcttgctcttggtgacgctcaacgtgatgttgcccgtcgacgacgaggcgttcttgacgttctccttagcgagctcctcctcgtc

SEQ ID NO: 18298 - DNA, 355 bp, Oryza sativa
  Clone ID: uC-osflcyp028f11a1
aatgcttaataccacaatgtaaaatattttatttttattgacagcgcatagcacgacagtagcacgagctagtacacgttccgtcttacatagtacttcatttgacaatgggtatgtccatgcatgttgcagaatatacatatactaatattagcatggatatatcagtatatgccaataatccaatatctacttggcctttaacaacgggatatatatggtgggcttgtataccaaaggtactccatcttgacttttagatatggtgaaatccctcctttgggaacaattattcttttctcatatatactcaagcagatggagccgggcaagaataaaggggcggcacaccacc

SEQ ID NO: 18299 - DNA, 383 bp, Oryza sativa
  Clone ID: uC-osflcyp028f12a1
agagacaaagcttatagctcccaccaaagcaacgcctgctgcctgtccctatacatacatatacatacattgctgaagtcacaaccaatggtttgacatctgtctcacattgcttgatggatccagaatatattgcacgactataccgattgctcgacagcagacagggttaaactaaagctaataatagataccacataatagtcagcctggcataaatgtattgcacaaaacaccaccagttcgaaaggtgtatataccattcgagatttggtatataacttttggtatggcatgaactctctgcttcaaagttggagtttctccaatataatcaatggacgatagatggcatcagttactaagttttaaagtagagagaa

SEQ ID NO: 18300 - DNA, 210 bp, Oryza sativa
  Clone ID: uC-osflcyp028g01a1
gcgccgctctttttttttttttgggttttttaatttttgggggtacattttaaattgttcttatatgttatgacttttaatttggaacagaacatgatgcacaaatgtcatccgaactatccaaaaacaaacacgcctttgaaggcgccacacaaatagtcaccaatgaaaacaccacaggaatcgtgataatcacaagggatctttaaa

SEQ ID NO: 18301 - DNA, 411 bp, Oryza sativa
  Clone ID: uC-osflcyp028g02a1
ctcaattcaccacacaaatcaaattcatccagtatcaaatgggtttgggtagtacaatatgcaacaatgcgtgtaacaacctgcatgtcttgcccagcatgaattggcaagctatgtgatattaataaaaaaataaaagctacgagagtcatagtcattattacatttcatcagcatgcatatattagatatgaatggtgcttgcagaaaagtacagtaacaatgagtctaattagctagtagaagaaaattaacaatgtaattaataaggggacaaactaacatattttgcgataaattgagatctgcttgttctccagatcaaatcctatgttgtggtcaagttggggtgataagcccagtaccgctgtcccatccaccgtcttgtcaacgataaggcacacatagcgc

SEQ ID NO: 18302 - DNA, 438 bp, Oryza sativa
  Clone ID: uC-osflcyp028g04a1
gaaatcaaaattccagatcaactttatacaaaatcacacaggaatcagaggaacatccccaatgtgtgttccagaagttcactataaacaagataattgaacttacgaaaagcccatggcatcaaactggcaacattcatgatccatgcaatttgggccctccatggtaaataaaccctgtgcctaatccaaaaaccacaacactggccaccccaaatccgctgctacacaaccctggatcaaccgagcaaaaagaacgctaatatacacctactggatgagggtctgccgcagggccaccacatgtggctgtgaaatgtcatttgaatcaacacatacagaagggagaagatgagggtgtataataaaacaaacaatattggtaataacaatacaattgtaattatggtggaactttcacttcatcgtttcatgggt

SEQ ID NO: 18303 - DNA, 515 bp, Oryza sativa
  unsure (1)..(515): unsure at all n locations
  Clone ID: uC-osflcyp028g05a1
gacgtcccagatgcgcacggtgcagtcgaaccccccggacgcgaccgtgctgttcgtctgcgggttgaagttggcgctaaagacgaagttggtgtggcccttgagcacgcggatgcagcggtcggcgttggggtcggcgggctgggcgccgccgccgccgccgccgctgccggggttgaggccggcgaggacggggcggacgtcccagatgcggagggtgcggtcgtcggaggcggagcagaggtagaacgagtccgtggaccaggagatgtcggacacgccgtcggcgtgcccccgcagggtggcgatggcggcgagcgacgactgggagagcagcgcgaccgtgccgtcgagggacgccgtcgcgaggaggcgcccgcatggggagaacctcacgcacgagacggcgcggctgtgcggngtagccgccctcacctgccggtacggccggtacggcggcgccggcgcctgctgctgctgcgacatcagcggcggagcccccgacgcgtgggtcg

SEQ ID NO: 18304 - DNA, 426 bp, Oryza sativa
  unsure (1)..(426): unsure at all n locations
  Clone ID: uC-osflcyp028g07a1
aggttcataacattatttggccatgcattattgcccactttttttcacacttttacactgctgcatgcactgcagccatcttttacatattccacaaaaacaggggaaaaacttctctcctctccctcttttctggagacaaagaaagcagaggagaagcaaacagatcagtcgtagtactagtacaacattagcacactctccctccagctagcgcatgtaatataatacaccagctgcgccatatacatatactatcagttcatcatcgatcgcatcgtgtacgtacactacaggttgtgtacgtacaaggatcccctcttctgctaagactttttggctggatcgatctactacggacacgtacgtatattatacggnggtaggacaagcatgcatacctttatacatccttggcttcaaaat

SEQ ID NO: 18305 - DNA, 378 bp, Oryza sativa
  Clone ID: uC-osflcyp028g09a1
ggctggaaatggatatattccccaagcgtgacaacaacttttgagtgccagtgtgtgtgtgtgttcccctcccctccctgcttaattacatcatctctaacgtaaatgattcgtgatcttcaacgggaggaaaatgacgctctcttcgacctccagagcggttttcctcccgagacaaaaagcacaaatccaaagctccccaaaaggctgtacaaaatggcaaaaagaagaaaaaaaaagggagatcgaatgatcccacatcggaatccgacctcgaggcgacggtgtatatgagcgtctgaccgtgctagctccggagcgcgaccgcggcctcgtgcacgagcgagccggtggcctgcgcgacgccgtgcgcggcgc

SEQ ID NO: 18306 - DNA, 335 bp, Oryza sativa
  Clone ID: uC-osflcyp028g10a1
aaaccagcaactaaaaatacaagtttttattatacaaacaagagctggctactccagcaactgaaaatacaagttttatacttaatacattgttgatgtcgacggatttttttccctagttccaccaccactgaccccatatatgtacaacattcgggcaaacgcatgcaacatacagaagcacccagtttctgaaaatatatacagcaaattcatcctatatgtacatgaagatatgaaaatatcatcagcaaggcttccaaaccaacaacagaacagatatgaatgagctccaagaatatgatcttcattcttctaacatcatgaagcacata

SEQ ID NO: 18307 - DNA, 317 bp, Oryza sativa
  Clone ID: uC-osflcyp028g12a1
aacttcaaaattataagggtcacttccaatttccaaatgctggattataagcccagaacattgatataaaagtccatgattcatgtctccctggttgcaaattacatgatgggcatgggcctcatggcagaccttatgaactcaaactggaaaagatcaacaacattggggcttggtaaagattgctccaaccacttcacctcggggaggcggcgcgggtctccgcgcgtggccgccgacgcgatctagtggtggtggtggtcgcccgaggggcggtaaaggcggtttgtaggcggcctcccccacgaggtaaatcc

SEQ ID NO: 18308 - DNA, 343 bp, Oryza sativa
  Clone ID: uC-osflcyp028h01a1
gggtggtgaaaacttttgattacttaaaaacgattaagcgcattttcccaagccctttgaagggtcgaaccaatactttttaacaataatttcaaagaaaagggggaagaaaaagcaggcaagtggacacaaccatgcttaactgggtacttcaggaagaacaagcaagcccataaaggaagggtggttcagggccagattttccaagttggggctcaggaaccacaaaaggggttcatgaattcacagcaaacattataatacttgttgggctactatggccccaacagaacaaaggtttgcagggatttcataaaaaacgaattcaattttttgttggctt

SEQ ID NO: 18309 - DNA, 358 bp, Oryza sativa
  Clone ID: uC-osflcyp028h02a1
ggggaaaaaacgggggcccaaaaaaattggttccctggccccaaggcccaaaaaaaaaccctttttcccccccccgggggggcccccccccccccctttttgggcccccccgggggggggggggccaaaaaaaaaaaaccccccaggggggacccccccccccccctggaccccctttccgggggggggccggaaacctttggaaaaaacccccccccccccccgggggaaaaaaaccattttttcccccccccaattggcccccccgggggcgggaaaataaggggggggccccccccccccccccccccttgggaaggggggccccccccccaaggggggggctttttccccccgg

SEQ ID NO: 18310 - DNA, 73 bp, Oryza sativa
  Clone ID: uC-osflcyp028h03a1
ggttatcataatccatgacacaaaatacagatcagtacatccagtgcggttgtgatactaactatcgacaaaa

SEQ ID NO: 18311 - DNA, 396 bp, Oryza sativa
  Clone ID: uC-osflcyp028h04a1
gctatcacaaagacgatattattgatgtccaaggagtttcacacgggcacaggatagctatcacacgatactagacgggaacaagtaatggtcttgccaaacaaacatccacctttattatctaatagaatggatgcagtataaagaggtcaacgaaggctagtcccagtgtcccacgaagaactatgcggggattgtcgtctttgcaaaactggcaattgctccagcctcggtcagcaaaggcaccagcttcccttcattggtcaatgccaaagtatcatcacagccaccaatatgcttcccattgatgaagacatttggaacagtcctttgtccagtccattcagcaagtgccgactgcagctcagatccattactctccccatccaacttaat

SEQ ID NO: 18312 - DNA, 504 bp, Oryza sativa
  Clone ID: uC-osflcyp028h05a1
gcacatagtaaaagagggatacacaactgagtactgaaattacaagtctgtgttcagataaaaacagtagtacaacaaacttgaagaggaacgtcgactccacaataattactaacaaagcaggcagcgggaaacagccgcgcccatcagaaacagcttgctctggattggcatcttgacagtgataatagctgatgcaggttacgacctgctcttgaatggaattgccctgatgaccacctggtggtagatggcagcaagggcagcgccaatgaaggggccaacccagaagatccaatggtcatcccaggcatggcccctgttgtagatgatggcagcgccaaggctcctcgctgggttgatgccggtgccggtgatggggatggtggccaggtgaaccaagaacaccgcaaacccgattggcagtggggcaaggatcggaacgtgggagtccctggcgttcctcttggcgtcggtggcggagaagacggtgtagacgaggat

SEQ ID NO: 18313 - DNA, 323 bp, Oryza sativa
  Clone ID: uC-osflcyp028h06a1
ttttttgggtttttttaatttttggggttttttttttttttttttattttttggtttttatatttttattggggggttgagttttgtttggggatgagaaacgcaaaaaagagcacaaacgcgcagaaaaaggcacaaactggcccgatactacacatatacaaatatatagacaaaaaaatagatataaaaaaaaaaaaaaacacacaaaaagagacacaaagggggaagggtcagaaaaaataggagcagaacccaaccccaaaagacaaatacaaacaaccacaaacccccaaggagaaaacaggcagacacattatatc

SEQ ID NO: 18314 - DNA, 463 bp, Oryza sativa
  Clone ID: uC-osflcyp028h08a1
gatgattggtaaaatagcagaaatcctgcagcatcaaattacagatgcatgaactgcagaactggcaagcttaactgcagaactgcagcactcttattccacttgcctcaccccacaaacaaacggatacttctgaggggcaaggaaaggcaattacatcacaagataaaaatagactcaatatcaactctcaaacatacagagatactggtatagacacaaattttcaaaagcaatgaacaatcagaaacacatgcttggtgttggtgcagcaacgccaccagaagcccgtccagccatcttcatcgcgagcggatcccatgccttgccctcagtgtcactgcaattgccagacttgtttggatacatgtcagccacggtggtggaatcggcgtcgccctttgcagccaatgccttcagacgaatgcgctcggccctcgacccgaatgtctggccataatgg

SEQ ID NO: 18315 - DNA, 390 bp, Oryza sativa
  Clone ID: uC-osflcyp028h09a1
aaagagaattttatgcgttacatggaaaatcattctcataagccatgacattaaattccgatcagaacatcctgcacaaatgtcatctaaactatcgaaaaaaaaacatgcatctgaaggtgccactatcatcgccaccatcttccacattacagtcatcatcatattcacaagggatctttagatgacagttggccaccttgcagttaaccatattgccccagatcatgatccatttatgttgccaacctgcaactgtgcgtgttggatcacagcttacaattgaagcaacaaccacatttttatttcgattctatcagcttttcaagaattcattagttcctatctccaatgaattggcatccctaatgaccactatgatgcactgca

SEQ ID NO: 18316 - DNA, 284 bp, Oryza sativa
  Clone ID: uC-osflcyp028h10a1
ataacacttatatcatttgttttctaggggttttaacataacaaggggtgtccttactaccttacaaaacacaccaccaggggggggggagttaaacaggcacagccattttaaacagcacgcaaaggatcggcatcatgacagaaacaatagctgatgcaggttaccaccttgtgcttgaagggaattgccctgatgaccaactggctggaaaatggcagcaagggcggtgccaaagaaggggccaaccaaaaaaaaccaatgggcatccaaggattggcccc

SEQ ID NO: 18317 - DNA, 220 bp, Oryza sativa
  Clone ID: uC-osflcyp028h11a1
gtaaacctaaactcttcctctttttttcttaaacgttggaactgtcaaagcaaaagcagttctggtgcaagaacataaaaaggagctttcttgctgtccttgtttccacagcattaaagaataagcacagcacccttaacagccaatgacactaacacacaaacagttcctcttgttttcgaaggttggactaaccatgctacctatttctagcctaaat

SEQ ID NO: 18318 - DNA, 297 bp, Oryza sativa
  Clone ID: uC-osflcyp028h12a1
cgggaaggggaatatcagaaaactttctccaagatttccttcgttgggggaaaaattaaaaaaatggtttttcccctgaaaggcccattaaatcccacccaagctgcccaaaggggttatttttacagccccttccccccaccatttcaggaataaaaaaatttacccccctttccacctttcagtaagcagcacctggggcaacaaaaaaagggggatggggcacccggcagtgttcggagggcgacggggcccatttggcctttgatgggatacaaatccccatcggtttttccg

SEQ ID NO: 18319 - DNA, 483 bp, Oryza sativa
  Clone ID: uC-osflcyp029a01a1
ccaacataaatatatatttcagtaaagaggttacaattaataattagcatacaagcaattcatggttcatgacagttaaagcaataaccaaagttacaatagctaggaacatattatttggttgatcaatcaataacagaaagatgatattaatagatggtacagatcctgaagttgatgcttgaatgtataattaaaccagcacagatgcttcactcctattcatggatgttctgaaaaacacaatgtttgaacatcttaattaggaactgggaagccaacatttatataactgcaatccgttctttgctgcagtttgaatctaaagaatctacagagacacaggaattagaccaatttgtttcatgcacaacagaatgaatgagccttttgttttgatgcctcaaaccatgaggtctctttagagccaaatcacagtttaaactcttttgaacacaatatccttatactctacaaaaagag

SEQ ID NO: 18320 - DNA, 498 bp, Oryza sativa
  Clone ID: uC-osflcyp029a02a1
gctgaatagttgaatcaattagacgattgaaacaacctcttccacacttcaaaacctgtcttatctccacaggggttaaaaacaaaaaagaaaaaaaaaagcgaacaaagaatcaagaaataatagatgtagcaggtacagtaggcaagcaccaacacctcccctccaacctcacactatggaaactactaattttttacagaatacaactcacacttcaagatcagcttcagggcaacagaggcaagggaagtttgatattctccctaccacagattttcgtcggtttgtttgtttacgcgttctcagctgctgcatgcgatcgctttggtcgccactctgtgtgtgccttcacaatgtcagccttcacaagatggtcgcactggatggcagaagcctgcttgtcggcgccaatgctggtgcattcccctgacacggtggtaagtgattgcagcacgctgtctcggccacactccttcctgtaatccagggtcatgc

SEQ ID NO: 18321 - DNA, 349 bp, Oryza sativa
  Clone ID: uC-osflcyp029a04a1
ctaaacctcacatattttggttttgtaccacacaccggggtcttaatgaagtccacacatccactatggtgatacaaacacacgcattttaacataacagtttttacgaatctaacaaatttgacgtagcctttgccccgacaatggctcttatcactttgaaaatcatttttgagataaaatccctcacccgggggccttaagctcaaccaggcggctgaagatgtccatttcatcaacagccttatccttatccttggcagctggtatggcgtgagcgggggcctgcggaaacccaacgggtacctaaaggccgtagtcggaaggaacttgctgcatgaggctttta

SEQ ID NO: 18322 - DNA, 490 bp, Oryza sativa
  Clone ID: uC-osflcyp029a05a1
tttttggggaacaaaattaatacgctctttaaaaaatatccaacattttcataaaacactcaaccaaataacaacacaacaccaaaaaaggaacaagaaaaagggcaaaaacacgggcaaccggggccccaaaaaaaaacgcccccccaaaaaaaaaaaccacaaacagaaaaaaaaaaaagcgggggggggccacaaaaaaccccaaaacccaaacccgaaaaaaaaaaacctaaaaaaaaaaccaaagccccccaccccaggtaaaaaaaggaaaaaaaaaaattcaaaaaaaacccaaattttgaaaaaaaaccccccccacaaacattaaaaaaaaaaaaacccacaccccgaaaaaaaaattcccaaaaagggggggggcaaaacccccccggagatttttccccacaacggggggggaggggaaaagaacaaaaccggggggccccccccccaaaaaaccccaaaaaaaaaaaccccccccccc

SEQ ID NO: 18323 - DNA, 307 bp, Oryza sativa
  Clone ID: uC-osflcyp029a06a1
ggccgcaaacattgatcctcatggtctcggataaaactgaaattcacagcagagttggaagcagagttacggtcacaaatacacaaaacggtgtagacacagtgaaaactggacaataattgttgtaaatcggcaaattaggtttttgtagcgatgattggggagtgtatccgaggctctgagcagggtggacgtttaacttaggttccagcctttcgacgaccaacttgggcaacgaatccagccttgataggagcaacagatcttgaagaaccacactgttcgcaacgaaggaagaacaacctat

SEQ ID NO: 18324 - DNA, 392 bp, Oryza sativa
  Clone ID: uC-osflcyp029a07a1
cattccgatagatagcaacaagcagttcaaacaccataaccaaagcgaactcaattcatggtaacatcacggacgaagaacacctaacactggatggatggatagagggcttctcgactcgagagagccactggacacgataacgactcgactcgatgataagatgattctgacacggatagctaaggataactggccacgatgggccccaccaatcagttcctccagttcccgccggagtcgccgccgtagccgccgccacggctgccaccgtagccgccgccgccgtcgccacggccgtcggcgtagccgccgccgccaccgtagccgccctcacggcgcccgtagccgccgccgccaccttctccgtagccgccgtctccacgaccgcc

SEQ ID NO: 18325 - DNA, 478 bp, Oryza sativa
  Clone ID: uC-osflcyp029a08a1
ggtgtcacaggctgacacagttataataacctgattggtctttaaacattaaaggaggagaaaacgatctcagtagaagtagagtgctacaatctcaacacaaaacgggctcaagtactagttgacaccacgaacgacacatcaatggtaattcaaacttctagattgaagtatcaacggtaattcaaacttccggatttttctttatatctttgtgcaccgatcgccatcacctgactcaaggaagatctagatcttgttgaacgcaacaatgtcgcagctctggatgtactcattcgctggttcggtgtagaagtagtcctcaatcagactatcaaccgacacaagatcatatacaatggtcatcatgatttgcaatttcttgataccgtaaccaacctggacaagcttggatgcgccccaaaggaggccttccatcttaacattcctcacaggttgtttcaatttggccatgtca

SEQ ID NO: 18326 - DNA, 310 bp, Oryza sativa
  Clone ID: uC-osflcyp029a09a1
gtgcttattctcttgatccttgtgtttcttctcctccactgctggcacaggagcagcagcagcagtctcctgcttcctctccccttgagaaaccacaggcgaggacacctcctcctcctcgcctggtcggccttccaactccgactcccccacagccactgctggctcaggtgacacctccattgcatccccctccaccacctacatctctgccggtgcagacgacacctctacatcaccaccctcctcctgtggtggttccctctccaccggcgccgcctcctgctccacctcgctggcctcctcatcc

SEQ ID NO: 18327 - DNA, 350 bp, Oryza sativa
  Clone ID: uC-osflcyp029a10a1
tttttggggttttttattttttggggtttttttttttttttttttttttctcaagctcacattttttggattggcaccacacagcagggttttaatgaaggccacagcccccatatgggatatcaacacacgcattttagcctacccgcctttacgaatctaacaaattggagtagcccattgacgtgacaatggctcaaagcaagcttgagaatcatatcctgaagggaaatccctcagccgggggccttaagctcaacccggcggcgggagaggtcattttaataaacagccttctccttctcctttggcagctggtatggcgtgagccgcggcctgcggcaacccaa

SEQ ID NO: 18328 - DNA, 300 bp, Oryza sativa
  Clone ID: uC-osflcyp029b01a1
tttgttggttatatgaacacttgcacgcaacacgaaagctaataagttgttttgactttcgctggaacaactgatagtaggtttgatacagtttttgcactacgctgttactgcacatgggagcagcacatattctggtggagatctacaatcatcagacagaggatgacattgccaagcactctagagagtcagcccctaaaactttcccagggcaaatgcagctgcttaattactccgttccagcgatcttcttcttaaaggtctcgatgtcggtcgccatctctttcctggtctcct

SEQ ID NO: 18329 - DNA, 487 bp, Oryza sativa
  Clone ID: uC-osflcyp029b02a1
aaaacataactatcgagttcaaaattcataaatctcaacagtttgatcatccgcagcaccagcagctcagagtagcaaagcatttaaactgggtactcaaaatatctgccacaaaactcaggacaagtacagaaactgggaaagctatcaggtgaggttcgattgaattctgatggcctaggccttgagcttgccgaagaacctctgcttctcgtcggtggtctggaagcgaccgtgcccgaacttggacgaggtgtcgatgaacttgagcttgatctcctccagggcgagccgcgaggtctgcttcagcagcgactggcggagggtgacgactctcttcttcggaccgacgcagcaacccttgatcatgaggtagtcgcccttcaccacaccgtagtgcgggaagccgcccatcggggtgatgtccttctcagtcctgtcgaaactcgtgcaggccgcatgagactcctgaccagacttgccaatc

SEQ ID NO: 18330 - DNA, 257 bp, Oryza sativa
  Clone ID: uC-osflcyp029b03a1
ggggaaaaaaaaatgtttaaaaagatggggaaaacgggggacaagggggggacctttatgctggagcccaggaataccttcacggccaagggggggggaccggaagggaaccaaccaaccaaagaattaacttggaggaaaagcgggttcaggccgggaacccgtttccaaccaactaaaagactcgaaaacaaagagaaggccccaacgaaatttttggacaccgacaatttgaggcctaaaaaaccaccccaaac

SEQ ID NO: 18331 - DNA, 181 bp, Oryza sativa
  Clone ID: uC-osflcyp029b04a1
ttttgggggattaaaaagacaacggctgcattgggccgatagcatgtgatgataaaaatcatttgttctacggacaagaactagcgaatgaccaacagagagtttagcagttcaactcaccaagtgctcagcatatcatgtaccgtacaagtccactcaatccacgtgctgagtctaccga

SEQ ID NO: 18332 - DNA, 395 bp, Oryza sativa
  Clone ID: uC-osflcyp029b05a1
ggcacaaagtcagaaatctatctcaagttcacaaacagcacctcttaacaaagtttcagttcaccaagaagagcaaacaagatgaaaaagatcaagctacaataataattcacatcaatgctacaacaaaaaaaaaagaaaaaaaaagaagaggacaggatcggtgtaaccaacgaacaatcagaaggcacggtgatctacatgatgatgacaggcacgaagagtatggacatggagattcttctgcagcacagcatcggccatatgcatcaagcgtccgggccagtcggatgcggcttgtcagcgtagttgtgctgtttgctgtacgcacggtggcgccgctccctggcgtagatcacccagaagacgagggagagcataacggccgacgaaac

SEQ ID NO: 18333 - DNA, 487 bp, Oryza sativa
  Clone ID: uC-osflcyp029b06a1
aaagcgctaaaccaagccattgcgttatggacaatgcaatgtgatgaaccattttacgcatatacaaggctcttacttgatccattgaaaaatccacaagacagaacgtgtcattcggggttcgtgccacaggggttctgacgaggtttcagccccagcaaggattcccacaatagtcagctacatttgctcctgaacaatgttgtaaacagatatcaggatctccacactaatcaaaattatgataagccattccagaaaatcagacttcctgttctgaaggatctcttgaagaaaacgaatgttgtgctcaacaaatttcaacttaaaatcaaggttcccaaatctttgggttaactcatattcatctcgaaggtattcccaaatctgagcatagtttgcgttcttccaagcaatgtttgacctttcaaaaagcccaagcttgagaataacatttgccaggatagagttagcctttcctaccaac

SEQ ID NO: 18334 - DNA, 435 bp, Oryza sativa
  Clone ID: uC-osflcyp029b08a1
tttttgtttttttttttttttttttttttttttttttttttttttttttttttttttttttttttttttttttttttttaaaaaaacaaaacttttgggtactgacttggttagcaaaaaaagggttccaaggggagaaactggccaagctatgaggtgaggcacaacagaggcttttataacagggtcaggggtgcacaaaaaatcttgggagtttacaaggttgattaaatttgcccgaaaagggtctcacccactgggtacttacttagggaaacaggtcactttcacgggtagccgggaggtaaacctttgtggggggtggcccctccagatggggcaattttaagaaccgaaacaaaacccccagtttttcccgagggtaagggccaacccatcttattgggggaagaaaacaataggggggttgtaagg

SEQ ID NO: 18335 - DNA, 335 bp, Oryza sativa
  Clone ID: uC-osflcyp029b09a1
gtaaaataaaactgtgttgcatatggtctcttgttatggctgcaaactgactcaacacccagctgaaaactgtcattattggctaaacccccacagggaaatgccgggtgctagcttaatcaggaactgactcatatacagcttggctctactgcaccttgacacgcattgcctgcatcggaacaccgatgtatatactcacacaactgccaactttcaatggcacaagccttgtacaccctcgacttaaaatcttgcagcgactcctttgagcattttacgataccaacatgttattgctaccacaaacatcaacacctgccaatgtgcaatgc

SEQ ID NO: 18336 - DNA, 320 bp, Oryza sativa
  Clone ID: uC-osflcyp029b10a1
gtagctggctacattgggccaattggttggtatgataaaaatcactcttccgacggacaagaactagcaactaccagacaagaattagcagcaaactaccagtgcgcaacaatcatgtccgtcaagtcaacaatccactctgagttccgatggtcaagtcaacaatccactctgagtttcaatgagggccaagctctgagggcccaaaatcaggagacgttggctcaaccggaagaaaggcttgctacattccaaaaaggaaaaaggcttgcttccccccaaaaggtaaattaagaagggaagggattcccccacttttt

SEQ ID NO: 18337 - DNA, 410 bp, Oryza sativa
  Clone ID: uC-osflcyp029b11a1
tttttgggtttttttttttttttgggaaagtgtttttccaagtctctttgtgttttggacaatgcattgtgttgaacctttttaactgtatgcaagggatttagcttgaccatgggggaaaaaaaaggggggaaggggaaaagggggaaaaaaagcggaggggaaagggcgaagaaaaaccccaaaaatggaaggcccggggaaacaccaaggggggaccgggaaaaaggggggcaacttgaaaaaggatcaaaaccggagcccccgttggttaaaacaaacgtggggaacagtcttgggcgggggggggcccccgggaaaaaaacgacggttccgctgagcaaaccccaatttaaaatagaggggcccaaaaaggggggggaaaacaaaggcataaggaaggtatgggg

SEQ ID NO: 18338 - DNA, 499 bp, Oryza sativa
  Clone ID: uC-osflcyp029b12a1
aatatatatgtgtagtatatatgtattttatttacatctcacacctgcaaaatcttattctactacagtaaactgggtacagagatataataatactcatacaaatatgtacaacaacaagcacaccacacactgatcaacttttccttggattttttgctctgcagcaaaacaccaaggcaaaagcttatcactgctcatatgtatctcatcatactgaattatactaagtagtagtagtaactacatggctgtatagctatatgcagaccaaatctcgtcaaaattaaaatcctaaaatccaagaagaaaacaagaaggagtaacaaatcgaatgaaggtgtgcagtgcaggtaggaggaaggtatcaacggtgacccaaacacaccaagagcaagaaggatgacgacgaagaggagctagctcgagctcgagctctagccatggcgatggcgatggcgagagagagggggagagggaagatcaccacttgcgtcga

SEQ ID NO: 18339 - DNA, 422 bp, Oryza sativa
  Clone ID: uC-osflcyp029c01a1
gggctcatgctggtattggcgttatcacatcaaaggtaattaaacgctgaaagttgggaaacacacggctttttttacacatggaagatgtttacacacaaaaacactaatttgggttgaagctagcccttgataggagccagcaggctagctgacacgtaccggtctgtggtagtcctaacagagacagcaagctactaggaacagagtaacaagataagatagcaacatactagatgattaattacgtattataaaaccacaaggaccagcaaacatggcgtgacagagagatccgccagtcttcgaatcaatgggatttattaagttcagcgatggctgctcctggacttgtcgctgttcagccagactttgacggggggggagctggcctgggggcgggcgaagaggttggccccaag

SEQ ID NO: 18340 - DNA, 378 bp, Oryza sativa
  Clone ID: uC-osflcyp029c02a1
ccaaaaaaaccaagggaaccttgggggaaaaagggggcaaggggtcagggaaaggtaacataagtttttatggggacacaaatttttactccaaaaaaacccccaaggggaccttttatggggccccccaaaaaaagggggcctggagggaactttgggggggtccatctaaacttttaaaaacggggggaacaaaaaatttaaaggggccccggggggattgggggggttttttatgcctgggggccgagttccaaaaaaagggggggggtcggattgttggttccaggggcactgaacgggaggggaccaggggtgaagaaaggggtttggggggaccactcatttgggaagggagcaaaatttttaaaggggggc

SEQ ID NO: 18341 - DNA, 334 bp, Oryza sativa
  Clone ID: uC-osflcyp029c04a1
tgttttgtggttttttttttttttttgtcgtcgtttttgttttttttttggtcgagtttttttttttttttatgttttttttttttttttttttcccccaaggggggggaaccttttccccaaaaaaagggaaaaaaaccgggcccttctgggggaaaaaaaacaaaaaaaaggacgcccctttggggggggaaagaaaaagttaggggggaaaaaaaaatttttcccccccaaaaaaaggctgggtaaaaaacacccccccttgggggaaccaacacctaaaaacaaatccgtcccaaccctgggagggaagcttccccaaattcccacgggg

SEQ ID NO: 18342 - DNA, 336 bp, Oryza sativa
  Clone ID: uC-osflcyp029c05a1
gcacgaatagaattataacactatattttggagggaataaatggcacaaaagggtctcgtaacatggatgagactctaactgatggatgaaatcaaatgggatactatgtactgcaacagttagtgaaactagagacttaaaagctttctgtgaaaaccaaatgattactgacatacattgggaagggtaatccattgccatgcactgaacatgcactgggctggaccctcgaatgtaaggcactgtaagaatatacagttaatgatgatgaaatgatccatagccactcatcccaagcaagaatgcacctaagttagccaatcatatgacataca

SEQ ID NO: 18343 - DNA, 236 bp, Oryza sativa
  Clone ID: uC-osflcyp029c06a1
tttagcgcgccctctttttttttttttttggatcataaatgcacaagttgttattggcatatattatgtgaccccgaaccgatgttgctctttacatacagcatggaaatacaagctgacagcagaaactcaagttgaatgcaagaagatcgggcttcttgcatgcaataagggtgtggaactgagaacaagaaattcatatatgctaggccccgctacaaccagaaaaagtgaaa

SEQ ID NO: 18344 - DNA, 373 bp, Oryza sativa
  Clone ID: uC-osflcyp029c07a1
gacaaagaacatcaggatttttttaccccctttctgcaatattcttttggagaccagggctcacgaacaagccaactcaaaaggagcattgcagcacattgatccacaaagccttttttgatttcaggtatttttgcgcacacacaaggggcaacacaccagctgatactgcatggggtaaaaagaaataaagaaccaagaggactgataatggtagcagcgagaatcaattaaaacttacaattccagcgattctcgacatttccagaactaagattggtcccatctcgacatttccagaactaagattggtcccatcctaggtagtaatatagggcgatcggaactactgaagcatcagggagcacacata

SEQ ID NO: 18345 - DNA, 126 bp, Oryza sativa
  Clone ID: uC-osflcyp029c08a1
tttttggggttttttttttttttggttttttattttttttttttttttttttttttttttttttttttttttttttttttccaaaaaaaccaaataaacctcttgggtaaaaagcggcggcaagag

SEQ ID NO: 18346 - DNA, 499 bp, Oryza sativa
  Clone ID: uC-osflcyp029c09a1
gccagaagatcaacagttaaattaaccggctataataggctagtaaaacaatagctagttaatctagtagtaactaatcatctaattaacaatgctatcaataatcatcatcataataacaattaattagtagttgaaccaccatcgccagcgtccgatgatcttgccgacgtagttgtgttcatggggcttgtacctgcacacggtggggaacacgccgagcacgtgggcgcactccctgagcaccacgtcgccgacgagcctcttctccctccgccgcgccggcgccgccctggtggcgcgccgcccggtgacgaggaacatcttcccgtcctcgaacaggtagtggcacccgccttcctcgacgcggcaccgcggcgcgtaggcggcgctgctgttgaagacgacgacgtcctggaggaagttgcccatgtacccccacttgcagaggatggcgtacggcacggcggcggcggagttcggccgcggcggcggtggc

SEQ ID NO: 18347 - DNA, 514 bp, Oryza sativa
  Clone ID: uC-osflcyp029c10a1
gccttctccgccgcgaggcatggccggcgccgccgccgccgtggaggacgccgggatggacgaggtccagaagcggctcatgttcgacgacgaatgcattttggtggatgaacaagacaatgttgttggccatgaatcaaaatataactgccatctgatggaaaaaatcgaatctgaaaatctacttcatagggctttcagtgtattcctgttcaactcaaaatatgaactcctactccagcaacgatctgcaacaaaggttacatttcctctagtttggaccaacacttgctgcagccatcctctgtaccgtgagtctgagcttatacaggaaaactaccttggtgttagaaatgctgctcagaggaagctcttggatgagctgggcatcccagctgaagatgtgccagttgaccaattcacccctcttggtcggatgctttacaaggccccatctgatggaaaatggggtgaacacgagcttgactacctgctgttcatcgtccgcgacgtg

SEQ ID NO: 18348 - DNA, 469 bp, Oryza sativa
  Clone ID: uC-osflcyp029c12a1
ggaacaaaaatacaacagttgctattcctagatagcatatcatcagacatcggttttgttctacaaattcccaaggtggaaagaaaaaaagaggtatagatttcagtcacaagtacttgtatcggttcacttagcagtcctaattcaaggtagtacaggactacagggcacgacaaacaacacagctactgtccactacggactatgctaaactgttacagtcaactgaacccattcctgtaactggagtgctgcaggatgtgcttccaagtgtcatcttatcagaaattctggatggacagccaaagggaacaaacatagcagctacaacaatcaggcttttttgcgaccacaaacaagaaggaaaaaaaatctttgcttctctgcacatctgattaaaagcaatctaggcagcatacaaaaacttgcttctctgcacatctggtcaaataactcgaacactagggag

SEQ ID NO: 18349 - DNA, 424 bp, Oryza sativa
  Clone ID: uC-osflcyp029d01a1
ttttgggttcttctataggcatggtgtttcctcagattcattagaaaaaaccttacacctaccacagtaatcagctacacgtaggaaaaattcacaacacccccaagacgaaggtcaggaaacccccccccccccccccctcttgataacacagattacagaaagctgcagtaagccagtcacttctactaataaccagcgctgatctttctttccatccgtctatatacattattctatcaccgatatttagggatggcgctaacaaacacctacccatgtagaaaaggggtgtttaaacaaaaacacaaacccatatgtaaactttgacagcgatagttttctggtggtcaggtgtgagggtcatctggtcttggcttggcggaaaacgatcatcacaatcccggacgagtttccttaattt

SEQ ID NO: 18350 - DNA, 323 bp, Oryza sativa
  Clone ID: uC-osflcyp029d02a1
gaacattaccttttgcatattttattattggatcacacaaaacaacgtctatgtacacatttcaggcgtttaacaaatcaaactacataacaagctcaacaagtcttgaagcaatcaactgagatcttggtcccttgctggaactcactagtgttacaacaacagcagcagcagcaagcataatagcacacagagcttacaggatatctagcaccaaaaaaaaaggaagaactgcctaagctttggcatctcctttaggttgaccaagaagagatggccggtaaagtgaatggccctgcgccatctcaattctttcacgtgga

SEQ ID NO: 18351 - DNA, 506 bp, Oryza sativa
  Clone ID: uC-osflcyp029d03a1
acgacaaaccacgaacttggatattaaagatgccacaaagaaggttcacataaacaacacaggtcacagcagcgaaagctacaagcaaaccctgcataatcgaaaagcaaatgtttttcaaaaccagacacacaaactgatagatagaagcccacacggacagatcataggatagcagcagtaatcaagcattgccaaggcaccaggcaagaaccctgaacctctctagtactcgtcaccctcatcaccctcgtcaccatcgtcgaactcggagccgacctcctcgtagtccttctccagcgcggcgaggtcctcgcgggcctcggagaactccccctcctccatgccctcgccgacgtaccagtggacgaaggcgcgcttggagtacatgaggtcgaacttgatgtcgatgcgggagaacacctcgacgacgctggtggagttggagatcatgcacacggccctctgcaccttggccaggtctccccccgggacgacgctgggcg

SEQ ID NO: 18352 - DNA, 347 bp, Oryza sativa
  Clone ID: uC-osflcyp029d04a1
ctctataagagatatgacagcggcatgcgcgcgcgcgcaagctcgggtcctctatttagcgcgcgctcttttttttttttttttttttttgatttcattttataattttttttttcgcgccacataatgttttatgagtcgttcaaacgctttcaattgatatagggaggaccccattttgttgctcaagcacgtgagttgagcaaaaccaggaactttggggcctttgcagggaacaataacgccttccttctggtgtccccccttacagtataccatgacactccacatctttgattgcggaatattagtataaggtgacggtgggattggaagccgtgacaccg

SEQ ID NO: 18353 - DNA, 124 bp, Oryza sativa
  Clone ID: uC-osflcyp029d05a1
ttttgtggtttgtatgatttcttttcataatatattatttcgtttttcttttttttatggtcttgtttgcatccatgaattttttacttttttgaagatgcacccttcagtgagttgtttaccc

SEQ ID NO: 18354 - DNA, 478 bp, Oryza sativa
  Clone ID: uC-osflcyp029d06a1
aaaagacaaaagtttgcgaagacaattaaatttgtcatggtaacttggtaccataaatcccaccattcagcgtgagagtcaaatccaccattctgcatacctagcaaagtctaattaagccaaagatccttcaaaattaccacactacatcattacatcaaaggagtttttatgcacacatgagaagctcaaaatgagctgcatttcaactttccaacaagaagcttccaaacagtgcagctagggtttcctgcagttgtcttgcattaagccctcaaccatacattgatccatgtacttcacaagccacccgctttaatagttgcgtcctgcatttgcacctttctttgcttttcctcctccttttgaccaagatgaaatctagcttaaataatccgaggtgtttgataattgatatgatggttggagatgcactgttaaatttgcaggttgatttcatccttcttggggggaattt

SEQ ID NO: 18355 - DNA, 323 bp, Oryza sativa
  Clone ID: uC-osflcyp029d08a1
gaacattaccttttgcatattttattattggatcacacaaaacaacgtctatgtacacatttcaggcgtttaacaaatcaaactacataacaagctcaacaagtcttgaagcaatcaactgagatcttggtcccttgctggaactcactagtgttacaacaacagcagcagcagcaagcataatagcacacagagcttacaggatatctagcaccaaaaaaaaaggaagaactgcctaagctttggcatcttctttaggttgaccaagaagagatggccggtaaagtgaatgggcctgcgccatctcaattctttcacgtgga

SEQ ID NO: 18356 - DNA, 494 bp, Oryza sativa
  Clone ID: uC-osflcyp029d10a1
ggatgaatacaattcataatagaagattccgttctacatatggatatggtctgttgcatccatgaatttctaagtatttgaagatgcaccctcagtgagttgataaccaccattcacatggttcaaaaacacgagtgcatttgaagggagccacaaagatgatactacagttacacaacataaaagaaaatcccgaaaaagtgtccatttattgcagaagaggagtctatgtttatgatttgctagcagcttctgcctgttgaactgtggcaccaggttgagcagaaactgctgctgcagcagctgatggagaatacaccttagctctacgaagaatctcggcaacaacccagtgcttccttttgctcaagggcctagaaggatcaagcttaacccggtcgccgatgttgcagtcctcggtctcatcgtgcgccatgaacttgcaggtgcgcttgacgtagcggttgtacatcttgtggtggaagaggcggtcc

SEQ ID NO: 18357 - DNA, 471 bp, Oryza sativa
  Clone ID: uC-osflcyp029d11a1
ttttttgttttttttttttttttttttttttttttttttttttttttttttttttttttttttttttttttttttttttttttttttttttttttattttttttttttttttttttaaaaaaaaaaaaaaaagggggtaaaaaaaaaccacaagggaaaaaaaaaaaaaaaggggaaaaaaaaaaaaaaaaaaaaaaaaggggggaaaaaaaaaaccgccccaatatttggcccaaaaaaaaaaaaacttttttaacaaaaaattttttcccaaaaaaaaaaaaatttttttttaaaaaaaagacagaaggggacaaaagatctcatttggcaaaaaaaaagggggaaaaaaaaattaaggggccccgggggggggggaaaaaaaaaaaaaggtaaaaaaaacagggggggggaaaaacaaataggacggggggaaattcactaaaaaatcaaaaacccccccacattttt

SEQ ID NO: 18358 - DNA, 83 bp, Oryza sativa
  Clone ID: uC-osflcyp029d12a1
gtggcgattacatttttttttttcatggtaattttgtttctattatttccaccattcagtgtgtgatttatacccccaaaggg

SEQ ID NO: 18359 - DNA, 445 bp, Oryza sativa
  Clone ID: uC-osflcyp029e01a1
cgcgcgagcgcggggcctctatatcgggcgcgctctttttttttttggtttttttttttctttttcctttttattttattttgtttttttttttttgtggcaaaaacattacgtttttcaaaatcttcttaggggacacaacaccaacccgaacataaggtcggggcactaaacccaagttccccaacccaaagtcaacgaactctggggccagaaaatcagccaaccacaaataaccaatggtaaggtacggacccccactttaattgccggggacaaaattgggggcctacccccaggccttattgttgccggggtccgcgaggggggccgctaggttctcgagggggcccttgccggggacaacggcctggacaaaaaaaccggacatggaaaacatggccagggggcccgtctcaaaccgctttaccttgagctccgagaa

SEQ ID NO: 18360 - DNA, 472 bp, Oryza sativa
  Clone ID: uC-osflcyp029e02a1
aggagcagcataacacacatagaatttccacattagaagcttacgtagaataagttactcccaaataaacacgctacaaaaataaggtccagatatttctttgatatattctcttgcactgacagacaaaagccggtcccagagcgacaggtctattttaagaggaaaagcttggtttcaactgatccttttcacttctagggggaacacaccaacttagaacaccctgattggtttccccatggtgctcttgatgtaaaggcacctcacattctgccagttctttttcaaaagggacacgaggaagttgacgctcatttggatgttttgctggatctgcttctcctccattgacaagttacccacagcaacacccatgcacagaaccttcttcagctggaacttgactgtagctttcgtctcgttgaccttggattcaagagactcctggtgagtaaccaatgtagggaac

SEQ ID NO: 18361 - DNA, 460 bp, Oryza sativa
  Clone ID: uC-osflcyp029e04a1
agaatcggtgggagcatttatgtaactaacgtacagagagagaggatagggagctaaaaatacatatgatcaaattttaccatttcaaatcgttccgagtataggatttgtcatgcaaaattcaggacttgtcccaaattcagggagtgagagatagagaggggagagctagctcacattcttcttcctccggttccagactccctctggcagttgaagtagacggcggcgacagggaggccgaggttgtagagctcggcgaagtcgcgggtgctgaagttctggcgccaccccggtgcgtacaccgtctgccgccccagctgctcgaacagcaggaacaccagcctgtggatccccagcaccggccgcgggctctcgtagcacaccacctctgtcccaaaagagactcctgtggtagccgggatgtcggtgaccagcctcttgcagggtacctcatgtg

SEQ ID NO: 18362 - DNA, 478 bp, Oryza sativa
  Clone ID: uC-osflcyp029e05a1
tttttgtttttttatgatcaaatcaagatgctttcaaattccaattcagaaaatagagatgtgtacaggggaagggggaatggagcatactgcatacacaccatcaagctagacaaactgacagaacctaacagacacgcatgaaacttataggaagctagctaaactctaccggtagctgcacatcgatccaacattttcgtcatcatcattggcaaacacgcatagacccacttctttattgtaaccaactgactagcttcatcgcgttctttatctgcatattttttattcttcagtaactcaaaagtttggtccagcagcgaggatcttgtctgtcaggctgctgtctcccccgatcttgtagttggcgaacacctcgaagttcttcttgaacaggccagccagcttcaggagcgtctccttgtacgcgcccttgtccgtccaggtgttgatcgggtcgagggatttcagacgg

SEQ ID NO: 18363 - DNA, 385 bp, Oryza sativa
  Clone ID: uC-osflcyp029e06a1
aagccaacaatccgaatgggtgcatttttatgatccaggtctgaatgcaattttgtgtctattttcccgagcgagaatagcctcagcttatttaccggtaaccaacaggcaaaccggcgatctacccaatcacatacggactacaggttgccaagaattaaaacacctggttccacacacaaagctatcataacgatgctaacaacctaccccataacaagcttgaaaaggttccacaataccctgacattaacagacattctcagggtgtactgatttgtatgaacagaagcgacgcatgaagaggtgtgctactggagatcaccggaaactttccatcatgatgaatcgctccacttgttccctctcaaccacatgttcactc

SEQ ID NO: 18364 - DNA, 382 bp, Oryza sativa
  Clone ID: uC-osflcyp029e07a1
ggggggaaaatttggtttccatgggacagaaatgggggggcaactgtttcaaggtacataaaagaggaaggcaggcaggtcacttgttgaaaaaaaaaagagcattttaggaggagggggggggggtaaccggatggggctgaccgcttttgaaaacacaccaagtgaaaaaaacccccccggtaaaacaatggggccggggacaaccagatcctgggaaagttgggcctgcccatgaaggcaaaggggccccaatcgtggaagtcaaccccgggggggcatttgccggggtccctggcgaaaaggggttcctcgtggccccagaattggacggagcctgaagccctggggttcaagccgttccttccgaaggaaaggtttt

SEQ ID NO: 18365 - DNA, 418 bp, Oryza sativa
  Clone ID: uC-osflcyp029e08a1
aggggcgggaaagcacacatagacttatcagattggaagctgacgttgaatagatggcttccacataggcacgctacagaaaataagtgccggagatcaacatgatatacttactattgcactgacagacaaaaggccggacccagagcgacaggtctattttaagaggaaaggcttggtttcaactgaaacttcaaacttatagggggaacacagctaatgagaccaccctgactggtgcccatccgattcactcgaaagaaagggagagaggattctggcagtcattaattttgggggacacgatgaagtacgtcgctcattgggatgatatggaggatctgggtttcctccatagaccagttacccactggaacgcccatgcacagaaccttgtttagttggaacttgactgagc

SEQ ID NO: 18366 - DNA, 458 bp, Oryza sativa
  Clone ID: uC-osflcyp029e09a1
cttctataggcatatgtttcctcagattcattagaaaaaaccttacacctaccacagtaatcagctacacgtaggaaaaattcacaacacccccaagacgaaggtcaggaaaccccccccccatccctccccttgataacacagattacagaaagctgtggttagtcagtcacttctactaataaccagcgctgatcttcctttccatccgactctatacatcatcgatcaccgatattagggaggcgctaacaaacaccaccaaaagagcaaagggggtttaaacaaaaacacaaacccatatgtaactttgtaagtgatagttttttggtggtaaggagggaggatcatgtggccttggcttgccggaaaacgagcagaccaatcccggaggagttactgcattttcagggccttcttcttggaagtgggaacccggtgaggatcgagccggaact

SEQ ID NO: 18367 - DNA, 136 bp, Oryza sativa
  Clone ID: uC-osflcyp029e10a1
ttttgggttttttttttttttggtgggtgcttttttgtttcttacgttctttgtgagtgtgtttgggtgtttttttttcatatgatcaaattttaccatttcaaattcgggccgagtataggattgaggcatgcaa

SEQ ID NO: 18368 - DNA, 380 bp, Oryza sativa
  Clone ID: uC-osflcyp029e12a1
aaaacaggccaccggcctgcttataaagccccaagggcccaaaaaccccaaacgcaggggggccctggaaccggcaaatttggggcaaggtcccgccccccgcggggtttattggggggtaaaagggggccccaagaagggcaagggcccggcccccaaaccgggggaaaggacccccccccagaagagcccctggggggggccaaaacccccccccccggggggggggatctgaagaatctccccgggtttacccataaccggggtcccccccccaggggaacccctcccaccctttttcctccccaggaagctggccccaggggccccatttctcccccccttaaagccccggggagccggcccccttttttccgaag

SEQ ID NO: 18369 - DNA, 447 bp, Oryza sativa
  Clone ID: uC-osflcyp029f01a1
ttttgttttttttttttttttttttgttttttttttaaaatttttaaaattttaaggcatgcaaaaatttcacggttgttccccacgcacaaggaaatcaggacttgctacaatggtacacatgcctgcaaacaccaatgaaaagaaaaacgaggtacacacgcactcagatttgtccttacatacgaaaattgaaaagccaaatccattccccaaagggggaacatgaagagttccctcaaactgaatgctttaaaagcgtaagtgccataattgagggctctgcttcggcaccaagtttctcaccattacgcacttttatagatcaagggggcaacaatgacttgaggtttaaaatctggcttcaagtactctgaaagcaaggaagcatacgtgtcataacgggcagtaatgcggaagccccacttgggtttgatctggcgacat

SEQ ID NO: 18370 - DNA, 463 bp, Oryza sativa
  Clone ID: uC-osflcyp029f02a1
gttagcaaatactacaatgaaatttttcattgcactgtctggggatgatgaacagccttatgtcaaaatttaaagcctatgtctgtcgaccacacaatggccttggttaaaagaagaacattaagaacagcttaacgttaagggagtccttgggtcatcaaagatgaaaacaaaaggaattcaattctataaatattccagacacaaaatgttgcatggctgggcatgaatgtttgccaaaccaaaaaatgaaccgaagcctaatagttcaaaaggctttgactccaacagggcttcagatcacatcccagtattatctcgcggatagatggagatcaagtcttgttatatggtgaatccagggcactggggagaaccaaagagtagataatcctatcccaatacgccttagagttagcagctgttagaaagcatactcggaaatagcctgtgcgactccatc

SEQ ID NO: 18371 - DNA, 301 bp, Oryza sativa
  Clone ID: uC-osflcyp029f03a1
caaaaacaaagggaaaaattatacaatccaaaaataaaaaaaaaatttgtgaccaaaaaccccccagaaatttttttaaacaaaccccaaaaaaagaaaaaaaaaaaaaaaaaaccaaaaaaaacaaaccaatcaaaaattcaaccctcaccaaacacactttaaaaccgagggaaaaagggggaaccaaaaccaaaaaaaccaaaagggggggaaaataggggagggaccttggccccccaggaaaagggggtttttacaacccccccgggaaaaaaagggggcacgaagtttttaatcc

SEQ ID NO: 18372 - DNA, 485 bp, Oryza sativa
  Clone ID: uC-osflcyp029f04a1
tctataaaagacataacacggcatgcgcgcgcgcgcaagcgcgggtactctatatcgcgcgcgctctttttttttttttttttttttttttttttttttttttttttttttttttttttaaagcaaaattgggggaaaaaaaaaacgggcgcaagatgacattgcattgggatgatgcacaacatcctgaacctgatgcgggagcaaaggatgttgaaagccttcaaccacacagtacttcccttcaaaaattatccattaaagggcatggaggtctttgttgaccatcatggctgaacaatgagctctctgttaaagctctccgggcttttaatctaacagggggggcctggaaaggccttccatcatttaaccagatatgggagctttacgagctaacattggagaatataggcacaatacgtaagtccgttctggaacaatggtgttgtaagctaaaaaggctaacactgatcgacttaaag

SEQ ID NO: 18373 - DNA, 69 bp, Oryza sativa
  Clone ID: uC-osflcyp029f05a1
gttatacaaggttttttatgatttttacatgattttgtacaaaatatatttagccaaatgtttttttcc

SEQ ID NO: 18374 - DNA, 329 bp, Oryza sativa
  Clone ID: uC-osflcyp029f06a1
cccctcccaaaccgagttctgcaaatttatcttgttaagctgccagatgcgggcacaatcccccatggagaaagtactttatttgaggctaaaacatctttcaaaataggaacagtttggatccaccacagccatgtccgatctcctaaaattaccccgttcccaacccccatgtttacatgtatagcggctttctagagcgagaggcccccggactccttggcctccttgggggcggaggagaacatggggtccagcgaccagatgaggcctacccccccgagcaggatccaccccaggaggctgttgctcaacccggggttgaaccc

SEQ ID NO: 18375 - DNA, 478 bp, Oryza sativa
  Clone ID: uC-osflcyp029f08a1
atcagcaatgacagattgttctatatatcctttatttgggaggtcccgtctacgtgatatcagcatctatggactgcttggatcgacaacaatttgtaccgatgctgtaaatgttcattcagtccagaatgagaactcgaatggtaatggtgatacagccaaaatgactttaaaagaagggaaatgaagcactgaagttggcaagagtatcttgtaaaaagctcagttggctgccagtcttgaccggagctccgcagcaaccgcatcaatgaactctccagtgttcaggtaatggcttcttgtgacgtttgaagacccgtgaataagaagagcaaggtctttggtcatcttcccagattccacggttccaacgcaagcagcttcaagttttagtgcaaagtcaagaagtctagcattgtcgtcaagctttgccctgtgtgcaagtccttctgtccaagcaaagaattgaagcaatgct

SEQ ID NO: 18376 - DNA, 422 bp, Oryza sativa
  Clone ID: uC-osflcyp029f09a1
aacaaaaaccaggtcaatttataatgcaataatattattgtctcaacatttatacatatatcaaataacgttttccagtacctttcaaattacaaaaaaaaagggcaaaattatacaatttagttataatttataaatttataaatgactagttcttgggcatcggccggagtcgcactcgcgacggcggtgggctcacttgacgcggcggcagagggtgatgccgtcgccgacggggagctggcagatctcgacgcggtggtcggcggcgagggccttgttgagctcgagcacgaagtcgcggtagtaacggatgtacttgcgcatgggggcgtcggcggggagcacgacggagccgttccagagcgtgttgtcgtagccgacgaggccgccgaccttgaccagcttcatcagccgctcgt

SEQ ID NO: 18377 - DNA, 339 bp, Oryza sativa
  Clone ID: uC-osflcyp029f10a1
ggggaaaattaggacaggctttattatattcagggcacgaatttatttttcatacccctcctccgttcgcacaaaaaaaaaggggctaattagctaagctccgggtacccacgtacacacgcacgcatgatatacacgtagagctaagccatcacatgaccaccacgactacgtacgggcacacatatacgtacgtacgtacacgggtacacacagcaggttcgatcagtcggacttgagcaggaagctctgcttgcgctcgcggaactccccggtgcaggtgttgaagtcctcctccaccttggtctcgcccaccgtcaggtaatccttgccgcggtt

SEQ ID NO: 18378 - DNA, 486 bp, Oryza sativa
  Clone ID: uC-osflcyp029f11a1
atacaaggcacgatatcattatgacatgattttgtacaaaatatatctaaccaaatgtttcttccgtcatcgcctggccaaaatatgtggcttaattcctatacaaacacgccaaagttctcgaattcgtgagaacatcaactgatgacgactcagcaccgcggcaaactgctcaatgcctcacacgggcaacacaagtaacaaacggagcgaaggagcttcctcagtcgatcaaaattgcgtacaatcaggcgcctctcaaaaactcacgagatggcagctgctcgtatcaccttagttttttctgcagccttctctctgccaaaaggcctgctttgttctgtggctccaaagctaaagcatgcctgatatcttgaagagcttcttggtgattcagaacagcttctcttgcgatccctcgtcgtagatatgctttaacattctttttatccaagagtaaggcctgctcacaatctgcttcagctt

SEQ ID NO: 18379 - DNA, 445 bp, Oryza sativa
  Clone ID: uC-osflcyp029f12a1
aaaagaaaaaaaaacatggaagttggcaaagaacttaagtgtctcaacgtacagtacatgacttctaaagcttaaactaaagaactttctctctttgccttccttgatgtctgtctctctattctattttacaaatatgtcctttgtaaatgtaaaatttattgcatcttccatatgttcctctagactccatagagttttcggacaaaccctcataaaaaccttgcacccaaccgttgagctggtggtcctgaaactgttcattattaggctgaatctgtgtggaccaaaactcatggtccacctgctgcatccaggcttgagagctcatcttctcatcatcaccatgcacatgtaagttaatcttcttcaaatcttgtgacttcgacgtgaacgaatcggaagatgagctagtcaccatgctcggagagccattaaaacaatt

SEQ ID NO: 18380 - DNA, 431 bp, Oryza sativa
  Clone ID: uC-osflcyp029g01a1
tttttggtttttattacatgttttttttttattcttttgtttatttttaccttttttaaagcacggacgggggtagacatgcaaaaaactaaagggggcaaaacaaaaagtcaccgagctaaaaggccagcccaccaatccggtgcaacaagcaaagcggatagaacaggcgggcctcaaaaaaagagaagaaagggcccaataaaagtggccaaggggggggcgaaaaataggaacggccgtggagcccaaaggaaacctccatgcggcggagaccaagagccggactcaccgccccaccgctgcactcaggtacatggccccgggcccacggacggaagaccttggcgtggacggcggaccctaaagagcggtgggtgccaggccggaaggaactacgaggcgccagcggtgcagtagaattacttgct

SEQ ID NO: 18381 - DNA, 440 bp, Oryza sativa
  Clone ID: uC-osflcyp029g02a1
aacctgaaagaccttaacagccattgcaatgttgcacgaacaagatccctcccggccaaacggaccaaaaatttcagttcacatcaaacgagcaagcacgacatgtttccctattcaaaaatttaacactactaggtgcttcaatacagttccactagaaaacaagccttaagtctcaacagtggagcctatactatggctaacaggcatggaacaaacccggaatgtgccattttacagaacagcgagttttcaaccgaatgctacctactattgcctttctccagcgaatacctaattcatgaccatgcttatggattcctttcttattgtgtatcttaccatacacttcggtttccatggcaacatccttagcctctagagaatcagatttctcattgtgcttcttctccatgatctgaacttcaacactagctaca

SEQ ID NO: 18382 - DNA, 371 bp, Oryza sativa
  Clone ID: uC-osflcyp029g04a1
acaaaagacattaattgataatactagtatttagcacaaatcttccagcattgggaaaaacataatggtacaaaacttagtcttacgggctacatggggcctaaaagtcatacagtcgaccaaaacgctaggctcctgcttcaacaattgcatcgagcgcggcggagtttttcccgaagggtacacaaatgcttgcgaagaacatactcaatccctatagctttccaagacttcataacacaagcgcttacaaaaacacaccgagcccccctaacatttcctgcacattggaactaggcgggctacgcgttatttgcgtagggggactactggcggacggctggctgggctggtcatctgcagtggcttca

SEQ ID NO: 18383 - DNA, 70 bp, Oryza sativa
  Clone ID: uC-osflcyp029g05a1
ctaagagcaaagcagacaatttgacagggcacacgagcagataaagctgtgtgaaaatacaaacatacac

SEQ ID NO: 18384 - DNA, 403 bp, Oryza sativa
  Clone ID: uC-osflcyp029g06a1
gatcatgcaatcccaggcaactttattgcgatgaatacgtgcaatcaaatcatacatatatagaattatgtccaaggaggagaatgggagactagaacagcatttgtgcttggaacatttttttttgaaaaaaatatgtatgaactccgtactacaccgaaactttatctgcatgctgaacacggaacctggatgctaaaaactaaagacaccctcaacatgacatggcacgcggacaggaacaagacaacctttacaagactaatttacgacgtgtgatctcggtttttaccgacgatcacaggggttgtggattcggagggactcttggactgggaaggttgctcatgctcgctgtccgcaggagcttgcggaactccgacaagcttattttcccgtcttt

SEQ ID NO: 18385 - DNA, 328 bp, Oryza sativa
  Clone ID: uC-osflcyp029g07a1
aatcacgggggggggcatgcatgcagtaaactaaattgggcacaaaaaaaaggcaccgggtttaaacacgatcacaccgacaaactgtaccatggaatggggctacaaaagggctcctcgatcaaaaaggaaggaaggcgagcagaggagctgccacggggggggcgacgactagcacggccgtcaaacccatgggagacctccctgggggggccccattcggcggtgcccctgccgaacccccattgacgaacaaagtccccggggccacggacggggacgggcccggcgcaaggtacttgttgaagggggagggccttggccccca

SEQ ID NO: 18386 - DNA, 424 bp, Oryza sativa
  Clone ID: uC-osflcyp029g08a1
aacagaagtagaatgataatatcatcgattggtaccgatgcacagtgaagcaaattgtactagtatggataatagtatcaacacaacttagggactctaaaccagaacacaacacaaccatgacacgatgatatgacagacgagcggcataggtataatgaagtccaatgctgcaccacagcacacgctcagagaccaccacggaggcgcaggacaaggtgcagggtggactccttctggatgttatagtcggcaagggtgcggccatcctagagctgcttgccggcgaagatgaggcgctgctggtctggagggatgccctccttatcctggatcttggccttcacgttgtcgatggtgtcagaggactcaacctccagagtgatggtcttgccagtgagggtcttcacgaagatctgcatac

SEQ ID NO: 18387 - DNA, 442 bp, Oryza sativa
  Clone ID: uC-osflcyp029g09a1
gtgatataaatttttgggctaaatcattaatatggcatattgtttggtgtgcattatctttacagatcatacataccttgcaaatttacagcagaaagcaaaatgagtatcaatgtttccaactccaagtaaaaggcaatttgaggtaaacatgtatacaaatttttctttacatacgaaaattgaaaaaagaaatcgattccccaatggcagattttgaagagttccctcaaactgaatgctctaaatgtgtaagttccagaattgagtgctctcctttggcaccaagtttctcaccattacgcactcttattgatcaaggggtcaacaatgacttgaggtttaaaatctggcttcaagtactctgaaagcaaggaagcatacgtgtcataacgggcagtcatgcggaagccccacttgtctttgatctggcgacataagt

SEQ ID NO: 18388 - DNA, 470 bp, Oryza sativa
  unsure (1)..(470): unsure at all n locations
  Clone ID: uC-osflcyp029g10a1
ggtcttaattttatatggacattaacttggaagatcaaaatcaaggaacacacgcggatacatccatatgctctccaaacctcgatctgtctcttaaacacgatgaacacacacaaagagatcgatgatgatcgaattaataatccattagaggcaagcgagctccttgaggcacccggtggacttccccagagcgtggtcgcagacggccgtggtcttcttgtcgctgccgccgtacagcaccctgacgtcctgcatcgcgacgccgctgcacggcagcttgccggagcagagcagctggacgactgccggcgtgttggacgacccggngatgttcctgaaggtgacgtccctgacggacaccttggagtcgcccttgctggtgcagatgctgntggngcagtacttctggtcgatgatgatgggttgtcgacgtggccatgacgacgccgcgtaggacaccttgacac

SEQ ID NO: 18389 - DNA, 374 bp, Oryza sativa
  Clone ID: uC-osflcyp029g12a1
gagcaaaaagcatttaacattgaaccgtaactgcatgcattcctggtagccatacattgttcagggggttctttagtttgacattgctgaataagaagggtgtaagcaaacattctccgaacattgaaccaaacaccagctttaccagttttttattacacttaaccgtgtcctggaggtaattctggtgctgatgaggggtggatttctaacatataaagcccttccggtacaccttccttttttttgaacatgaccttctttttggccttcttgaaatcggcatgtgtcaccttcattctgggctcccttaaagcgagcaatccggccttcgaacatattgctttgatgtcagcaccagaaaactcatcctt

SEQ ID NO: 18390 - DNA, 260 bp, Oryza sativa
  Clone ID: uC-osflcyp029h01a1
catgcgcgcgcgcgcaagcgcgggtcctctatagttgcgcgcgcccttttttttttttgtttttttttttttttggtggtttttttttgcacagggaaaaatcatgttttgtttcccgaaagagctaatattctgacaaaaggttaggcatgctattggacaaccgccaacaacaaacgaatagatttgtacaacactgaagaacaaaggaatttgcccaacagcacattacaattttgacagaaattaaggggtgaaac

SEQ ID NO: 18391 - DNA, 491 bp, Oryza sativa
  Clone ID: uC-osflcyp029h02a1
gacactatataagagctgtcacgtcatgcgcacgcgcgcgtgcgcgggtactctatattgcgcgcgctctttttttttttttagcacatcatttttatgatgatctttctccagccatcacaaagcaaattaatatcgttccaaacatttaaggagctcatgaatccaataatccggaggtttttttaaaaggactcatctcaacatccataacaagcaaacgatagttgtttccgacaccaacattagaccataacgagtcaactggcaaccatagactagaccaaaaataccgcggactgcatagataaaacatcagtgtcgagcagaaggaaccgctcagcactggaccttcttcagcccatgagagaagtaaaggaaggttgggtcggaggctccgtccttgtagtaggcaaacaccaagccgccatcatcatgcatgctctcaccaacaaagaactgaaggtccttgagctttccaagcaagtact

SEQ ID NO: 18392 - DNA, 520 bp, Oryza sativa
  unsure (1)..(520): unsure at all n locations
  Clone ID: uC-osflcyp029h03a1
aagagatatcacggcatgtgcacgcgcgcatgcgcgggtactctatatagcgcgcgctctttttttttttttagcatattgatccatgcgagcatgcgtgcatattagtttggagcacaaatttacatgttacacccacaccctacacccatgcataataatacatagaatatacgtacgtacatacatacccctctcgatcacacgcaccatcgatcgtacaaagtttgngtacatacatacgtacacacatatacggcatactcacgtacatacatacataattaaaaactcgtaattaattaaatacgtagttgatggcatctataatggaacttgaggctgttgaggatgttgttgcggacgggatcagcgaggtgatcaagcaggttctgcacggggccaaccccggtgaagagcgcctggaccgagaagccattgaaggcgagcatggctagcctgccattcttgacctccttgagcttgagctacatcatgtccgcctcgctcttggtcccga

SEQ ID NO: 18393 - DNA, 495 bp, Oryza sativa
  Clone ID: uC-osflcyp029h05a1
gtcaaactaaaagtcaatttactcgcaggacatacatggcttcctccaaacatgaaactaaaatgaccagtaaaagcattttgcatgtacaacagcaccatttcagcagcatggggtttatgatttactatcttctaagcattagatacacatgaatggatgttttactgcagaatcactttgcaggaatcagtccatttgaagagccatcagaaggtccttttccatgaaaagcagattgcctgtctggtctaccaattggtcttggaggcaacagagaattaggagtgccgtttttcacaccagcctcgcccttcaggctgagttcggacatgctgtagagttcatcgatgtgcactggaggttttgagtgcacggccacaggcttgacaacctcatgttgtgcttgcactgctcctggtggtgcatagaaaacaggcacataaccatagtagggcattggaacaaatgccggtgggtagtatggaggaagca

SEQ ID NO: 18394 - DNA, 312 bp, Oryza sativa
  Clone ID: uC-osflcyp029h08a1
aagaccaaaaatttatggcccattatttttggatattcaagcaacctagcccaaaacaaagctgcatactgttattataggcaggaaaccaccagcgcgaggctggagcttaggtcacttgccaccaaccttctcgaaacctgggggcttgttggccatgaacctaaacaccgggacctgcctgaagttgacaaaaccgatgatccggacaaacgcatcggggcaggcccttttggactccttgagcgacttgaacaccgggggggactaggggcacccgcacatgggcagctaccacctggcccacaacct

SEQ ID NO: 18395 - DNA, 451 bp, Oryza sativa
  Clone ID: uC-osflcyp029h09a1
gtacagagcacaagtcttcttcaaaaacttctgtaaaaattcaccattttgaaggtgcgtacactgatagaagaccaaaaatgaattgggaaaaaaatacaaatgttacacatctatgtggccggccgaccaatccggcccaattaacacaacacaaagaacaaacgggcctccaaaacagaattgattgggcccaattaaattggtaatagttactccgaaatatttgaatcactttggtggcgggaggatccttcaatcgccgtagatgaagttgtgactcaccgagccgacgatgcacttatctactcgcctttgccggtgtgcttgaagcacttggcgtcggcgggggacccgagtaactcttcgtggcaggtgggtttgaactactcgccgtcgccggtgcagttgaattacttgctgtcaccggtgcagttgagttgctgggtgt

SEQ ID NO: 18396 - DNA, 99 bp, Oryza sativa
  Clone ID: uC-osflcyp029h10a1
cgcgcgctctttttttttttttgggcaaactaaaaggcggggtactcacatgacatacatggtttcctccaaacatgaaactaaaatgaccagtcaaag

SEQ ID NO: 18397 - DNA, 360 bp, Oryza sativa
  Clone ID: uC-osflcyp029h11a1
ggggcaacaatttctggcctacatccttttcaaggcaattggcatgagcccaattcccctacttttaattgggaattccccatgaaaagatttgggaaatggccaaaatctatacccccatcaggggcagaaaccggcaaactaattacgtattgccatttccaacataatgaatgaatgatcttacctacaaaaaagccctggaaatggccaaaaaaacatccatcagctgggcgttatgctttcttcagttaaaaattaagaggggccccttttggtaatgaaggatttactggaggtcttcactaaaagccctgtaaaggaaaaccctgaaccttttgcagaattgctttggatcaa

SEQ ID NO: 18398 - DNA, 410 bp, Oryza sativa
  Clone ID: uC-osflcyp029h12a1
agcactgtaagtactcgcattccacaacaaccgaagggcaacaataggactcagaacatccaagtttttaaccgaatagaaataaacgagttttaaacgactaacatagtgcacattgcgagcagatattaacggtccatgcaacgagtaccatggccgtgggcaaaacttaacgaacgctaagatatctcaaatgcagccagcataaccaccacttcaacgatgctcatttcttcttggcggcagccttggtcaccttggcaccggttgggtacttcttctccacgttcttgatgacgccaacagccaccgtttgcctcatgtcacgcacggcaaaacgaccaagaggagggtactcagagaaggtctccacaaccatgggcttggtgggaaatattttaccataccag

SEQ ID NO: 18399 - DNA, 465 bp, Oryza sativa
  Clone ID: uC-osflcyp030a01a1
aagcaatgctctttttaagatcaagaatgtgctatacattgatcgtatgaacccaacaacagttccaccaccgccagcgcctaggatgttgtctgctgatgcaaacagcaattaccaatccaattcaaagccatcaacaaacatgctaatcttccaaccatggaatcccagattacccctgtcgtcgaaaaaataaaaaagaatatccaggggataaaaggaagaagagaaagctattcttcagcgctcggtgacacgcggatcagcttggtgatggtgaaggcgatgctgcagagctggtcgacctcgcggttgcgcaaggtgaggatgttccggtgctgcggcacggccttgaaccccctctggcacatcttcacctccgcctgccccgccgtcaccagcgccatcgcctcctcgtacccccccgtgtccagcgccaccgtcgcgtccgtcagctgctccacc

SEQ ID NO: 18400 - DNA, 438 bp, Oryza sativa
  Clone ID: uC-osflcyp030a02a1
ggaccagctgtacgatttccatttttgatgatgcactgagagaagtgcaaaggaagattttgggtgaccgatgcaaaaaattttatgtgtattaacaatagccataagagaatacaatgggaaggggtacatcatcattttttgccacagatggtaataaagagattgatacttcatacacgatacccatcttgtgcaggaaagaacaggatacaagtgtttgttgaatcagcatatcacacgttccatcctttttgctaggcacctaattcgaactggaattgttgggaatccagaaagttagggcagttgacgcagttgcaaacattgctcgacggggagcccacttcaaagcagtgataggaccgatgtgactgttccaacaagcaatctcttgtattggattgatgttccaagcatgcaaggtaccatcaccag

SEQ ID NO: 18401 - DNA, 486 bp, Oryza sativa
  Clone ID: uC-osflcyp030a04a1
gttctaagattctaataagatatagttgtagaatctagaaaatgaactaaaagacaaaagttgggaaacctgtctactaacaagctacttctcagaaccaaaagctcccctaaacagacccttcaaacattttgactttgaaacatatcgtagcctaaaacggagggagtagtaactattgactagttaactgtgatcgattgtgcagagttgtcaaagttactggcgctagcagtctagcttagcttgctccccgttggaggcggtgtcgacgaacctcctccagaaccagtgctgcgcccacagcctccggacctgctcgatgggtaggcccttggtctccggcagcaggaggtagacgaaggcggtcatggccaccagccacgccgcgaagaagaagaagatgccggccctcatgcggcacagcgtggccaggaacaactgcgccaccgccgtcgtcatcaggaagttcaccgccaccgtgat

SEQ ID NO: 18402 - DNA, 418 bp, Oryza sativa
  Clone ID: uC-osflcyp030a05a1
ccaaaaagaatggcttgaattgatctgaatttatatgccaacaggctaattgcacaacaattcatcgtacaggctaaaaccgaaaatacatttcctcaaggatccactgactaaactgattacaccgagggatcagacaactccacaatctgcagcctctcagtcagtagtagtcagtactagtcctgaattacacacacagggcaaacattgctcgaatcagcccctaaaaacctccgtggcagttaaactataccgattgaatggatccatccatctaattccaaagaatcaagacatgggatccttttatttgcacaaaatttacagaacctgcactcgttgaatcattgaatcttgatgcaattgcgcgaatctgtaccatttttctcatagctgtaggttttggctagcttac

SEQ ID NO: 18403 - DNA, 467 bp, Oryza sativa
  Clone ID: uC-osflcyp030a06a1
aaatccacatgaaataaacataaatgatgatttggcctcaggccggtaaatgttacatcggtgctgcacgatacagatatatatgttggtgtctttctttgtagactcgctgtctctgtatatatatcatcactggctctagattaagacttgagcatcttcttgtagtccttgaacgtgcctgcgaaaggcgacaccctgccttccgacaccacccaaagctcatccacgctccccgttatcaggtgctcgtcgtgactcaccattagcactcctccctggaaaacgagtaaaccctggatcagcgcctccacagcatccagatcaagatggttagaaggctcatcgagaagaataatgtgtggcttcttgaaggtgatctttgcaaaagcaaccctacttttctgaccacctgataagtgtacattggttggagggcaagatttcctgtaacaccgaaagaaccc

SEQ ID NO: 18404 - DNA, 332 bp, Oryza sativa
  Clone ID: uC-osflcyp030a07a1
ttttgtggttttttttttttttggggtttttatttttttttttattgttttttttttccctttaacattttcaacaacaacatctactaaaatgaagcctgcagatgcaaacagcaataaccaaaccaaaacaaaaccaaaaaaaaaaaggaaaaatgacaaccatggaaacccagagtaccccagacgccgaaaaaaaaaaaaagaaccgcaggggggcaaaggaggaagagaaagccgtgtttgaggaatcggcaactcgcaggtcacattgtttatggtaaacaccaaactccaaaggggaacgaccggaacgcagcaagaggggggga

SEQ ID NO: 18405 - DNA, 336 bp, Oryza sativa
  Clone ID: uC-osflcyp030a08a1
acacagaaagtagcttccgagctcattatctttaatagtatgtttttattcccacgcaaaaccaacaggtagatgctagatagatccataccatagccggggttgacagcatcatgtcaaacaaaaccattctccgacagaaaccaaaccacacaccaagcttttcgctgttaacttctccctaactggttggaagcagttttatttggatcatacacactcgcaaagatcaaattttatcaaacatttttggggggcataggcatgatgaccatttatttgtaagcgtccggtttggcaatgcgataccacccttacgtgcttgaacatcccggg

SEQ ID NO: 18406 - DNA, 353 bp, Oryza sativa
  Clone ID: uC-osflcyp030a09a1
ggtagaaactttattccagatttatcatttattacccatccctaggacggtaacattcttgtgatgaaaatacatatgcccatgcttaaggtaactggatacaaggaacttcacatcacgtcgaaaaggaaatattacaatacaggcatgaacgacacggggaaaaaaaggcttgaagtaactccggtagactgatcagaattacagtgtgcagcactgaacaagctgtatgagaaagccggatacatatcatagatatacatgactggaatagatccggataccggatgaccagattcaccggtagttgcggtaaagtgggctgtacatgcagatctctgcatacttaacca

SEQ ID NO: 18407 - DNA, 365 bp, Oryza sativa
  Clone ID: uC-osflcyp030a10a1
atattcataatatatccattcacctcacaggggggcacaagacctgcacatgttatacataacatatgcgggacaatacttcatatatagtactgcacattttattcagagggcacaacaatgtataaaagttgcgcgattattcacccaaagcaacaagctaagcatatgctacatgctcttaggacaggttgatcaagtagatcatggcagcttaactagcaaattaaaggctcttaattaggccagcacaatttcagcgggcatcacaatgctggcagccaaagtggggttcagcatccaggtgtggaacggatggaagagcacctcggcagggcatctgaagttgggcaggacagggcaat

SEQ ID NO: 18408 - DNA, 413 bp, Oryza sativa
  Clone ID: uC-osflcyp030a12a1
tttggtgtttttttttttttttgggttttttttttttttttttttttttttataaaagccacaatgacttccaacgatccaaacgtatttcacaaacagaggcaacggaggcagcccggggaaaagcaggaaacgccccgtgcacagatggggtccatgcaaggtccttaaggcccctccaagccccccgtgaaaggccccaaaattactgcaggaatcacccaaagccccccgatacccccgctataccgagggccccctgtggacccaaggggaacaagccctccagaaaaagaggcccacctggaacccgcccggcctagcaggccgtacaaaacctaccctggctcaccggaaacaaagcaaagggggcaacgaatgtttgccccgtctgaccagagcgactaccccaa

SEQ ID NO: 18409 - DNA, 261 bp, Oryza sativa
  Clone ID: uC-osflcyp030b01a1
aaagcaccttccccgaactgtttttatcccaatggtagtcccatgaccagggaaagggcattctcaggcccgccgggcttttgaccgggggcaaaccagacttcgggtggcccccaaaccccaccaggggccgcccccagggggtccctggcccttttagcatggccagaataagtgaaccgttacaatttgaactgaaaactgaaagtttacgggaaccttgataactagggaaacgccccttaggaccccccgcggctt

SEQ ID NO: 18410 - DNA, 423 bp, Oryza sativa
  Clone ID: uC-osflcyp030b02a1
agtaaaaaggtaaactcttcataataatattattaagacattatagctgatgtcttttgatcacactgcgatcaaattatgcatcataggcagtacaactccgcgtcaggaaaaagtagaggagatatatttcttgttattacttaatacagcattcacatatatcgaaccatccggtacgtacgtagtagtactccacgcgttcacatcgatgatcggggacgatatcctcaggtagtacttatgcaaaagcgttggcgtaaactgacgaactgaacggacggacggtcggatttagggctcccataagtccaagttgccggagacgaagtcgtagtggccgccgacgagcttgagggtgccgttggcgatcccctccttgacgaacgggtaggtcttgaggttctccaggattggttcacg

SEQ ID NO: 18411 - DNA, 186 bp, Oryza sativa
  Clone ID: uC-osflcyp030b03a1
ggccaacccatcttgcattgctcttcttccaagcccccttcctgcagggggaatcgaggttgcaaagggactggaccgatgaatgctaaagtgcttcttatcatgccacggggggcatgtccttgagccaggcgtcaagcgggctgccgagggggtacacgaagaaaccaaagcgagcctgcacgt

SEQ ID NO: 18412 - DNA, 509 bp, Oryza sativa
  Clone ID: uC-osflcyp030b04a1
gcggcaataaaacattgcattgaattctgaacgataaacaccaggaaccggcgtttatttgaggcaagcactgcccaaaatctcgcaaaagtactgaaaccttagacatagtacacatccatggcaaacatggatgccaaatgacaactacagaaaattatcaaattcgaatgcagctgacggcttctcctgctgaagatgcatattttcccctccattacttggatgtgctctctccatcgacagccaatgggacggcgctggccaggctgcggtatttcagagcatagaacatctcaatgtaacggcgagtctcgcgcctctcaaggttgcttacgtacttccagaatccatatacaccagtcaaggtcatcagcctctcagagtacagcttccaggtgtacttctcgtaaatcctctgcagacctccctgtgaaatattgtcccagtaggttgaatcctgcttgcacttctcaaagaagtgaccagatatcagcagccttgtcact

SEQ ID NO: 18413 - DNA, 360 bp, Oryza sativa
  Clone ID: uC-osflcyp030b05a1
aatccaacaggagtatgttcaccggtcgaagcagataacgttggttacattgaggacagcatgaattgatgcagaaacagagttcaaaactggtttaaataatccaccgaatgaaaagcacagaaacaaaatagtccaatgcagacggtaacatctaggagagcagagtgttgtcggtttgaggccgcatgaagattacagcctcctaccccttctaccaccctttctgcgtgtgctatcagtcggcactggagtaacatcctcaatacgaccaatcttcatgccagatcgagcaagtgctctaagtgcggactgagcaccatgaccaggggtttttgtcttgttaccaccagtagcacg

SEQ ID NO: 18414 - DNA, 389 bp, Oryza sativa
  Clone ID: uC-osflcyp030b06a1
aggaaagaaagcgataccccggggaccttcacctccttttccgattgatcaacaagggaaccaaccaaatcgattggtgccagtaaccaagctgaaagaaatcaaaaggggtttggggattaacttctcattatcctaaacgacgaggggatcgatcgccaccgcaagggcatggtcgcgccgccccaccgccgtcgttgggggggtactggtcgatctccgacgtcatgtgccgttcgctgcccgttgacccggggtcccctgtcgcacgcgtcaccggggggggcggccaaaagggctatgaaaacatggccttgactggatctccagggcggccacatagttggcccaagcagcatcggcgcggggagcttccggcatccgggaac

SEQ ID NO: 18415 - DNA, 470 bp, Oryza sativa
  Clone ID: uC-osflcyp030b08a1
acgtaacaatacgctatgcccaagacaagtcaatactacaacatctgaggcgagcacagaggtccaaaagtcaggggccgtaagcctttcgattaaaaaccaaactgaaacacgcacgattttttaacaccccacgaaaaacaatactgatacctagctcctttggtggtggaacctaaagagctttatcttcccaaaacatccacatcattatctggcatgactatatagcttcgatccctaaaaaggcaacgttcactcagggatatccgccatgtcttactttcatttaagcccggccaagatgcttcaagccttgttggccatgctgttggaaagccagtcaagcccctcatacaacccctaaccagatgtagcacatgtgctctggatgtaccattgccgttggctcaaggagtgcacaccaagcttgacggcgatcttagcaagatgatggcattaggaaaatc

SEQ ID NO: 18416 - DNA, 434 bp, Oryza sativa
  Clone ID: uC-osflcyp030b09a1
agttcacccttaagaagagggatatatatatagcattggttctgcacttctgcatgctaaagtactccacatgatacagcaggttggctttccatccataaggttacaaatgggcaggattgccgtttctgttataaaccaaaggagttgcaagttagagtaaagcatttataggcgcatcatgcatacagtttcagtccaagatacaacacagggaaccggcaatagattgcttttttggaaaacttagcactccaatgcatcttgagcctgattagttccaagggttgacaaacggccctgtgactggttgctcatctagggcacggggcaactcctcacataagtttatctgatgaggaacattgatgtgaccatgaccccatgatgatccactagatccagagtacattaccggtttatcaggggaatca

SEQ ID NO: 18417 - DNA, 382 bp, Oryza sativa
  Clone ID: uC-osflcyp030b10a1
ttttggttggaagaccataacatgaagaactctccttgaaaattttgtaatttgatgcgcaacgattcagatgcagatgaaacactgctgattcccactcagattacacacaatacaaatacaccgacaaactgcctcaaaaaccaccaaattgattcaaaagtaaaacgggtatgagggatcttcccaccgagactgactaaacctaaccacagacaattggatccactggacccagattattcaaaaacagatggctatgacggcatcgtcctcgcaaccgaagggaacttgcagctatggatatcctcacttcgcgctgacgagctgggtgcggatgagcttggcggccgaaaccatgttggtaagggcgggcttgacc

SEQ ID NO: 18418 - DNA, 191 bp, Oryza sativa
  Clone ID: uC-osflcyp030b11a1
ttttgggttttttatttttctacgggttattttttttttattttctttttttttcacggagggggaggaaacccgggcaataccggaccgagacccgaaggcggaccagcttaccctatagggaggccaattagaggttggcggaaccaaagcaaaagcagatgccgagaggaaatagttatccgcctaca

SEQ ID NO: 18419 - DNA, 71 bp, Oryza sativa
  Clone ID: uC-osflcyp030b12a1
tttttgtttttttttttttttttttttttttttttttttttattttttttttttttcggacgcggggggga

SEQ ID NO: 18420 - DNA, 435 bp, Oryza sativa
  Clone ID: uC-osflcyp030c01a1
tttttttttttttttttttttttttttttttttttttttttttttttttttttttttttttttttttttttttttttttttttttttttttttttttgaaacccaaaaccccaagggatttaaaaacccaaaaaggaaaaatacaagggccccaaggggaaaaaccccgggggacccaaaaaaaaacctgggggctccccaaaaaaagaaaccacccactgagccccccccttttttaaaagggaagggaaacaaccaaaacaaaaccccaaatgggggaaattataagggttttagtaaaaaacccggggggattttcccaaaaaaaaccccccaggttccccctggggggtaaacccaaacccaaaagtttttgttttttattaaaccttttcccctaaaaatttggtgggaaaaacccccggtttttttggg

SEQ ID NO: 18421 - DNA, 507 bp, Oryza sativa
  Clone ID: uC-osflcyp030c02a1
aaagtgaaacacacctgctagcttttatttaaggaatcggacgatcgatttgtggttttctcttgaacataatgtgcagtatatgcacatcgatcagccgtatacatgcaaatatttgcattagccataagccattacattaattagtagcagtacaaaactcggttcgtatgaaacaaccgatcgatcgaactcgacccaatttcacgtacttgatcgaatacaaattaaactgaaaattagcagtacaggtcaaaggtgatggtatactagactggtaatgcgccgtacgtgtcgtcacacattacgcctagccgtgcgtggttattgcgctatccaattccaaacttgtacgtggacggacgagcgcgtcgatcggcgtctaccttgccaccggcttacttagggacatcggttgcctttggctccgtggcgggcttgccgcgggttcgtggcgtcgctggacttggcttgacctttccctgccgccctggcgcgccgccgggc

SEQ ID NO: 18422 - DNA, 495 bp, Oryza sativa
  Clone ID: uC-osflcyp030c04a1
ttttttttttttttttttttttttttttttttttttttttttttttttttttttttttttttttttttttttttttttttttttttttattttttttttttttttttttttgttgggtaaaaaaaaaaaaaaaaaaaaaaaaaaaaaaaaggaaaaaaaaaaaaaaaaaaaaaaaaaaaaaacaatcctaaaaaaaaaaaaaacaaaaaagaaaaacaaaggggaaacaaataaaaaaaaaaacaaaaaaaggacccgaaacagaaaaaaaattatttaccccaccaaaaaaaaaaataagggaaaaaaaaaatgttgcccaaaaaaaccagaaaaaggaaggggggaggaacttggataaaaaaaaccacccaaaaaaaaaagaccggagggaagggaaaaacctcccaaaaaaaataggggggcaaaaaaaaaaaagtgggggggcccaaaaaaaaaaaaaatcaaccctttcttgaagaaagtttggagagg

SEQ ID NO: 18423 - DNA, 403 bp, Oryza sativa
  unsure (1)..(403): unsure at all n locations
  Clone ID: uC-osflcyp030c05a1
agaggagaacaaactgtgtttatagactgaactgaaacttgattatacagtttgccacgactcctaactcaagcccctatgacgtggatacatatgtacaaaagttttgacacctgaaaaaatgatctagtttccctacatggatagctagctagtagctatctcatgtcatggagtgttgccaaaaaggcgtccaacttgacattgtcacctcgagacaagaacttgatgcaaatgggcgccctggcacccatgagtgtcagcatggacagcaagatcgagccgacgccgtcgccgaaaatgagccccgacgccagcgccggtgagagcatccgcccgcggccggngtccattttctcccacaggtacgccaccaggctgtcgatgcacatgccgacgggca

SEQ ID NO: 18424 - DNA, 493 bp, Oryza sativa
  Clone ID: uC-osflcyp030c06a1
agcactccgaattgaaatactcgccattgcttgcagtacgtacagagccgaaattgctacactacccttaagtttgcatgccgtcgctagctgcttatcgatcaatctcacatggccacgcatgagctgatacatagcatcggtgtagtttctcaaccgtgatttgatcagtgagacagtgacatatatatagaacagttcagcgactaaattaaacggtggcgccgttgctcttcccgccattggggacgacgtggtgtttgtcggcgtcgtccatgaagcgcttccagaaccagtgctgcttccacaccctctcggtcatctcctcgatggggatgttcttggtctcgggcaggaagaagagcacgaagagcgacatgacgacgacccacgcggagaagaaggcgaagatggcgtacttgaggtggcagagcatggagaggaacgcctgcgcgatgacgaaggtgaagagcggttgacgcacaggtgacgc

SEQ ID NO: 18425 - DNA, 345 bp, Oryza sativa
  Clone ID: uC-osflcyp030c07a1
ccatcaaaaaaggatttttttagcaaagaacgggggataaattattccacatgccgccttgacaaaggatcctaattatttccagggttaaagggaattaagtgggggtaaaaaaaaattctagctgaaacaaccccagtggaactggcatgccaattgggggcacgctgccttattatattaactttagcccggaatacccttgggctgttcttgggaaaattttctatggtttaccattcaactggactttagctagcttttttccgttttcttgggggccatccaccttaccaggaaatgacctcccactatttgggacaagtcccttgatggttgcttgaa

SEQ ID NO: 18426 - DNA, 528 bp, Oryza sativa
  Clone ID: uC-osflcyp030c08a1
gacgattaaaaagaggagaggttagaattattgtagtgactgcagtatgcaggctactctacaataaagttctcacactcgcaggcaattagaattgaaaagatatactactaatgaatagaaaacgcccaaatgtaatgtaagtacaaaggatgtttaactttgatttgtcgaaagttagacgcactaacaataaaagtgaacaaaacctccttccaccttccttgtaagttctactctgcctttccgttttcactttgctgtctccttttagacagggtcttcaacattcccttgaatatcttccagaaccaaaataggttcatcactgccagcgccggtggcaccgtcagtatactgtagaagcccagggggaagatggacttcacctgatcaaaatggaagtacatgtgagtgaagaaatatatgaacaagattacccgagcaaccagccatccgacaaacagagccaatccattgtataagtaaaggttatgcgtcttcttaccagcaacctccaaataccat

SEQ ID NO: 18427 - DNA, 501 bp, Oryza sativa
  Clone ID: uC-osflcyp030c09a1
agaacaagaagacgacttaagtaaagtttcgacctttttatgctagttcactccaaatcgcccacaactaagaggcgatataagcacgctgttatagtctaacagaaatttactccaaccagattcggggtagaagcatagcaaaacagagcagctaataacagttctacaacgagaagcagtagcagtagcttcagtgaaacatcatttcagctcattacatcggcagttcgccgctgtccgcgatgacaactttgctcttcggtgacccactctgctggccctcagcttcaatcttgtaaaccacatccattccagacagcaccttaccgaacacgacgtgcttcccgtccaaccagctggtggttacagtggtgatgaaaaactgggacccgtttgtgtctctcccagcattggccatggacaggaggcctggtccggtgtgcttgatcttaagttttcatcggcgaacttcgtcccatagatagattcaccacccct

SEQ ID NO: 18428 - DNA, 379 bp, Oryza sativa
  Clone ID: uC-osflcyp030c10a1
ttttgggttttttttttttttttgtttttctttttttttttttagagtttttatttttttttttttttttttttttttttttttttttttttttgttttttttttttttttttttttggggggaaaaggggggaaaaaaaaccccccaaccttttttaaaaaaaaaaaaacccccctgggggccagggatattttaaaaacccccttgggggggaaaacctttgggggaaaaatttttaaaacacaacccttttggggggggcaagttctaaaaacacatgggccccccggtggcaaggaaaaaaagctagggcccctggggggaaccaccccccaggggcaaaaaaaggtccaaaaaaaacatggtttcctggggcgg

SEQ ID NO: 18429 - DNA, 419 bp, Oryza sativa
  Clone ID: uC-osflcyp030c12a1
agcaaatcgatccatgcgaccatgcgtgcaaatcagttggagcacaaatttacatgttacacccacaccctacacccatgcataataatacatcgtatatacgtacgtacatacataccccttttgatcacacgcaccatcgatcgtacaaagttgggtacatacatacgtacacacatatacgcatacgcacgtacatacatacataattaaaaactcgtaattaattaaatacgtagttgatggcatctctaatggaacttgaggctggtgaggatgttgttgtggacgggatcagcgaggtgatcaagcaggttctgcacggggccaaccccggtgaaaagcgcctggacggagaagccgaggaaggcgagcatggcgagcctgccattcttgatctccttgagcttgagctcctt

SEQ ID NO: 18430 - DNA, 467 bp, Oryza sativa
  Clone ID: uC-osflcyp030d02a1
ccctcctttttttttttgttgttggtttttttttttttttttttttttttttttttttttttttgtttatttttttttttttttttttttgcttatggtgttttgaattttttatctttgagaagtttaacagcttttttttagggcagattgtaaaaaaaaggggaaggggggaagattctacccccagggagaaaaaaattggggaaaaaggaaaggggcccccaaaggttttggggggggcacaaaaaaaaaaggggaaaaaaaacccggaacccccaaaaatggttttaaaaaaaagggggggatgtttttaaaaaaaaccgggccgagaaaaaaagggcccccgagggaaaaaacaatccttgaaaaaagggcgcaaattaaaaaaaaaacaaggccccccctggggaaaaccaccccttttaaaaacggatatgccgaggaaaaaaaaataaaagattttt

SEQ ID NO: 18431 - DNA, 350 bp, Oryza sativa
  Clone ID: uC-osflcyp030d03a1
agcccatatctttatattatattattattaacaaaaacttgtcatgcccagctttggcttgggcgcgatctgatccccagaacaaagagaaaacataaaaaggggaaataattaatagcaagcgtcaagccggcctgcttaaaaggggtaaaggcagctgccgtcgtcgctcctcgccgttgggtcgaagttcttggcaacagggtcggtgcaaccttccggcacaggcaggttacctgcttgctgggctccttgcccgtagaaggaaccagtcttcatggcgtcggagttagcgtcaccaaaagcagcctcgctcaagtactggtcagccagctgcacacgcttgacgt

SEQ ID NO: 18432 - DNA, 455 bp, Oryza sativa
  Clone ID: uC-osflcyp030d04a1
aacaaaaacagttctattcattaattcgtttattttgcataatccagcatgcatgcacacttacataatactccagattcaagtccagtgcatgtgcatgcagttaattaaacaactccttggttcggatacaaattaaaacactagaacacagtacgtacgtacgtagtagaactcatcacgcacatttttttttgttgtctacgtacatagcacagcacgtacgtataatagtacgtataatacgagactaattaatcaagatacgtaggtaattaattaacacggatcgatagcataacacagtaggtcgtacgtaattaattaactgattaattaattacgcggcgaagagagaggggcacacgcgataataatatatcgtcgtcgtccctcctgcgcgcgcattctcgaccggtcgtcgtcgcgcgccggcgtgcacgccggcgatcggt

SEQ ID NO: 18433 - DNA, 368 bp, Oryza sativa
  Clone ID: uC-osflcyp030d05a1
ggggccccaggggggaaaggaaaaaaaacccggggaaaaaataaaaaggggccgggaaaaaaggttccacaaaaaaaaattgccccccccaaaaaaaaaaaaggcccggcctatataaaacccccgaaaaagggcccaaaggaaaaacatttaaatttattaaaggggccccggaaaaaaaaactttgttttttttaaaaaaaaaaaagggggggccacccctggggagggacagacccaaggggttccgggggctcccagggaaaaccccccgggggaaattggaaaaaaattcccatcctaggcaaagggacaaaaaaaagtttcttggaaacagcccccttgggaaaaaaaatccccccaaaatt

SEQ ID NO: 18434 - DNA, 455 bp, Oryza sativa
  Clone ID: uC-osflcyp030d06a1
atggggggcattaaaggctggaacaaccgattgttcccattcatcaaaaacatgttaaggcacgagaatgacagaagggctgccacataacatgaaaaggacctacgaacaggataagaagccaaaatgctcgagcaatcccaacaacggggacaaaagaaccccaaatgaacaactacaaaccttttcagaggccagcctagggccgaaactgtagaggacagtaaccgggacccagggtgtcaacacccaagtatgacaaaaagaccttgatgaattcaagatggagcgtgtcgcggacaataagaaacatgccaaccatgagtaccacaagagttgcttacgaggtgggcctttgtacgacaagacggtgtatgttctgtccaccacgggccgcctcgagaaggatcaacgccatcgttccaccgtttaatgctggcaatggttcaaggttc

SEQ ID NO: 18435 - DNA, 463 bp, Oryza sativa
  Clone ID: uC-osflcyp030d08a1
cttccctaaattaatttgccattgttatttttacttgaccatccgtcaaaatttacatgaatacacaacgcacggacgaacgatttattcatgtgaaggcatgatttacatccttaaaattctctcgcatctagatatagctagagagtggccagctgctgactatgcatggagctggcacggcagtagtgtacaatgctactgtaattttgtattgctacaagtactagacaggtacagggctgaggccagtggatggctgtaggctggcagcatactccctcgcccacagatcataatgtatgatctcctccagtgatggccttgttactagctcattccgatgagcgtcgcatgtcagctccaccaccttgaagatgtccaggtacccgatcttttcatcgatgaacaactccacagccttctcattagcagcactcagaactcctgtcatggtgccccc

SEQ ID NO: 18436 - DNA, 487 bp, Oryza sativa
  unsure (1)..(487): unsure at all n locations
  Clone ID: uC-osflcyp030d09a1
accatgaaacgaatccataaaacagcattgaccacaatgccgaatgcaaaaacatataaaaacaccaaaattaaacatctccagacatatctttaattcgagctacctaacatggtgccaaaaagtgctaacataaaccaacatctgaaggccaacctgcttgaattctgaaatccagataggcaagctacagaatttgggcccagttactcagcacagaaagttttatgatcattaaggaaacaactagttgcaaacttcttttctcattcctcatcttcctcctcaccgtcaccgccaccgccgcttgccttcttctggttcttcctcttcaccctaccaggggggcctccaccgaatgggcttgtcagtgagaagtcaatgtgcttttcagactcaaccctcaccatgaacgacgggatgttgacaatttgcctgccgaccctgatgtggngttgnctgatcaggacacgagcatggggatgga

SEQ ID NO: 18437 - DNA, 340 bp, Oryza sativa
  Clone ID: uC-osflcyp030d10a1
agaaaaagcccacctaaatgagcttatcaaattataataagccacttcaataagggggctgtttttttcagcttactcccaaaaatcgggattataataatcccaagctaaaaaaaagagggcccaaatcctttaattagtattattacggcccaaagggcaataattttgagaacccccccaaaccattaagttataaaaaaaaaaggggataaggatccaattttaaaacaacaagggctggccccagggaaaagtagagctagtttaccagcttcaacattgggatttgggcatatcaaaaagatttcgcttcaacaaatttttgctcaacaagctt

SEQ ID NO: 18438 - DNA, 478 bp, Oryza sativa
  Clone ID: uC-osflcyp030d11a1
cggtggcttttttttttgaactgtgctcccgacgaaccacggttgcagcagtgacgcgcccttgatcctcgacccgtcgttggaggccgtcctcaggagcatgtcgtgcacgatgttgccgccggcgctgtcacctgcgatgaacaggacgtacacgtcgccttgctacgcgagccagccatcttgcgctgacaccggccacagttgaccggcccaggaatagctgcaagccgtcggaaggggcagctcctgggcgaggcggtagtctacagtcactacgaccacacctgccgtggcggaagaaggggcatgacgtaccttgtggaacgtggaggagtaggccgactcgatgaggaagccgactccgtggatgaagaccaggacggtgagcttctaggatggctcttggatcttggggaggtagaggctcacggagaggccggtgccctcgtgaatgacgacctccttggaggcaacg

SEQ ID NO: 18439 - DNA, 522 bp, Oryza sativa
  Clone ID: uC-osflcyp030d12a1
aaagcaactatttttttgcttcacaaggggggcaatttacatatcaacaattcagtgttcccattcatctagaaatgcgactaaatgcaacattagagcttcattcagataacaatacaaggacctatgatcagtataagaagctagaatgctagagcaatcccaacaaatggggcaaatgaatcccaattgcacaactactaaccttttcagaggccaaccaatgtctgaaacttttgacttcactaactgtgatccaagttttcatcacccaagtatcacaaaatgtccttgatgaagtcaagattgagcgtgtcgcggacaatcagaaacatgccaaccatgagtaccaccagtatacctgacgacatgatcctctgttcgatttcacgggggatcttctgcccaccacgggccgcctcgagaaggatcaacgccaacgtcccaccgtctaatgctggcaatggcaacaagtttattgcagcaaggttgaggtttatcacagccgcaaactgaaacaag

SEQ ID NO: 18440 - DNA, 395 bp, Oryza sativa
  Clone ID: uC-osflcyp030e01a1
atatggacattaacttggaagatcaaaatcaaggaacacacgcggatacatccatatgctctccaaacctcgatctgtctcttaaacacgatgaacacacacaaagagatcgatgatgatcgaattaataatccattagaggcaagcgagctccttgaggcacccgggggacttccccagagcgtggtcgcagacggccggggccttcttgacgactgccgccgtacagcaccctgacgtcctgcattgcgacgaccgctgcacgggaacttgccggagcagagcagctgaacgactgccggcgtgttggacgacccggtgatgttcccgaaggtgacgtccctgacggacaccttggagtcgccctcgctggtgcagaagctggtggggcagta

SEQ ID NO: 18441 - DNA, 361 bp, Oryza sativa
  Clone ID: uC-osflcyp030e02a1
ccgaaacaaaatgagtacatcatcctcctttatcatctccctccttaattaaatcatcacagaataatcatttatttactccgtgatgcagcagtatagtgtgtgacgaaaagtcggagcagtaaataaataaatccaaaaggcaaatttaccaaacaagcaagcattagtggttattaacctccttcaattaaggcctcctcctccttaatcaacggcaagggtggtagtgctgcggcttggcggcggcgccatcgccgggagccttggcgtccatgacggtctcgaaagccccgacaagcgccttcaccctggtggactgccgcttctccaggagcttgctccgggcctccttaatcac

SEQ ID NO: 18442 - DNA, 482 bp, Oryza sativa
  Clone ID: uC-osflcyp030e04a1
gatgcgaccgaggcagctttattcaacttgtccagaaccacttttctaccgactaccacttttgcatgggtaaaattaaccaggtaccacgggttgattgtacagtatttctcaatgggacacagacatgccgaaacatcaactatttccccctcactctcactactctccatctcaccgtctttcagaaccttggcaaaatctggcgttggagctgtcaaacatgttagccgtcaggtcccgtctcctccatgtctacagccacaagcatccatgccctctcctactcacttgtttagagctcatccttgagaggctcggctggcgccgactctgccttctccttcgcctgaccggcggtttccttgttcttcttaatgaagtcgacgatctcgtcggctgtcctgccgctttcgtagggaaccatctttccactgggggtgacgaagtacagggtggggtaaccttgcacatcgaactcg

SEQ ID NO: 18443 - DNA, 434 bp, Oryza sativa
  Clone ID: uC-osflcyp030e05a1
aggaaatggggcctctcatttaagctattcaactaaagggggaatccctctttttaatggttggccaaaaaatggggaaatttcttggcttttgcttataaagatggccaatcgcgcggcaacatgctagagctcccaaaataatactgtactgttaatgtttacaaaaagaattccatcctttcggcctttttcatggcattataccctgtttggacccgctcgcttgaaaccccaggaatgggcccaatttttacaaaaacatattttccctcttacgacactttttgggaaatctgagcctttggaatttggtcttccaggcctgattcaactgccaccaccatggcctggacaaaatcatttgctccagtaccaattgcaggaaaccctctacctgtgggatatgtatttacctgcttatccagaacaag

SEQ ID NO: 18444 - DNA, 500 bp, Oryza sativa
  Clone ID: uC-osflcyp030e06a1
agctcacgaccataacctccagtttattcgattcacatgacaacataggcttattgcttctctcaactcactgatgatacctttcctgctaaacatgcagcgagaagaaccatgaacaagaactaacaaaatcaactctcttgagagagactctattccttgtctacgaaagctgattcagcaagatcgatggctcgagccagagcggctgccttgttctcgcattcacgttgctcgtcgtctgggctgctatcagcgacaatgccagcaccagcctgaaggtgagcgacccactcccggcgcctctcggtgtctttgtatgagtacatcgtgttgtggcttggcgctgttgagaacacaatggtgcggagtgcaagagcgataagcatgtctccgtcaaatgatatccctccaaggccgccactgtatggtcctcgtcttgtgacctctagctcgtctatcagctccatggcttttacctggttatgtcagacggaatt

SEQ ID NO: 18445 - DNA, 416 bp, Oryza sativa
  Clone ID: uC-osflcyp030e07a1
gaaagtcaatttttctttcatttgcctctttatactcttagagtatacagaaaatatgaaaaagttatttcattggtttcttcatgcacttcctcacaccagcaaccataccagccactagcttctaaataatagcttttatgctctcatgtgcatccttcaactatctatcacacacaaactactgtacatgtatcacacaccagcactgtacatgtttcaagaaatatacaaatatgtgtaacagcaatggccgctcccccagcctcccagggaacaaaaaaattgatcaaggtgaagagaaataataaaagagaaacaaaacaattgaccaattcattatgtattgagagcatcgcaggtaactccataactttcactctagtatgctttttacttttcacttgggggaaatg

SEQ ID NO: 18446 - DNA, 509 bp, Oryza sativa
  Clone ID: uC-osflcyp030e08a1
aaacgctacagaataaacttaggacaaaagtagaaagcttaacatataccacacattttgccgagctcaccctcacagcattgttgttcgaaatagggacggacaaacaacacaggttcagctagaaattcctaaaaacagttgagttcatggtgtagctatagatgatcacattggattttgggtgttcattcatgcctcgggaaatatttaacttaagctgcggaagacatctcaaagtgattgcctagtctaatcccagccttgagcagctggttgagctgccgggtcccatccagtaggcgcaaccggtggaacgacggcggcttcagtggctacgggtgctcctgcttgatcccatccttcggcagcagcaactggagctggagctgcgccccaatcaccaacagtagcagctgggggagcagccacatcagaggtccactggtcagcagaccattgttcaggtgcggtgtcatcagtgatggcagcaaagtcttgtgctggag

SEQ ID NO: 18447 - DNA, 428 bp, Oryza sativa
  Clone ID: uC-osflcyp030e09a1
gatataacacaacgacagttcaaaccctctatttattcgcacggtaataacctttcacaagaataaaagttggtgagagtaatgacatgtgggcccactaatcctagatgtccttaaaaaaagataagagttggtagtggggtggtagcagaatcatcaccactactcctttttataaggagtatagatactcgtgaaaaaccaatctaccaacatacaacaatgatgcaacaccatgacaaaagttcataccctctatttatttgatgccacacacacggaaataacttttcgttaattatattcaactcgtaaatctttatgcaatattgtaagcggatgggagaagccttggtaccgggtgaaccaccaatggctctgccctttgcagcaagagggtaaacgccttatccatattgagcttgtct

SEQ ID NO: 18448 - DNA, 494 bp, Oryza sativa
  Clone ID: uC-osflcyp030e10a1
ggccatctgaaaaacagtatttatccgtttgcaaatataagcatttctggctatacattgcatagcctgaaatgcttatatttgaaaacagaggtagtagtttttattatattgcattacatttagcagtagcactggtgattcatctattacacttttcagaaaaaaaaaagagaaggtatacttccagtcccatgaatttgccaaagcacctcaatgattaattctgacctttcaattttcagaacaattttgacaatcttagacactactgttctcttagcaaattcacaaacttcagcaagttttcatgggaggaccctccctctgctatgcttgtgcatgccgcatgcttccactttgctgccctcgccttgatctccttgtcgtcaaccagctgctcgaccttgttcttgatctcctccttggtgacaacccctcgctcatccgcctggagcttcactccagtcccccacacattgcatatgtagctc

SEQ ID NO: 18449 - DNA, 315 bp, Oryza sativa
  Clone ID: uC-osflcyp030e12a1
gggacattaaaaaccttattatatatagaaagccaaggcgttgccatgagaagaagaaaaacaagaacacacacgtttcaattccatcggaaagaaagaaaagaaaagaaaaaaaaaacaagaactcgctgacaccataagcatgacgtacgtgaatccgttttatccgtctgggtaccttggtaatgatcgaccaatcgatgaatcagccgggggatttatcttttgctatgcatggcctcttggtaacggcaacccccgggggaggcaaattcaccttgaggttgccgtagtccaggtagccggtgcccaatt

SEQ ID NO: 18450 - DNA, 346 bp, Oryza sativa
  Clone ID: uC-osflcyp030f01a1
ggcactgaatcatttttatttcctcatcctttttattcattcctcccaaagagacggatccatggaagttttcttgccctcatcaggcaagcagagcacacacacacgggggcagaggaattgctatgaacaagacgctaatcaacatccagagctaaaacaaacaaggggatcaaagcaaatcccgaaaaaaaaaacacaggggaaagtccacattttttttttgtacccaacgcctccgtgtcaccaccacgtcttgcggatttttttttaccctgttctattcgctaaggggtccacgatctcgccgtcgtccttcgacgccaggatcagctccgggtgcgcc

SEQ ID NO: 18451 - DNA, 409 bp, Oryza sativa
  Clone ID: uC-osflcyp030f02a1
aggttcaaatccaacttattcataaagcatactgctgtgccacaggaaactgtttcataaaactaacatatcatacggactcgatggtccattaaaccagacacaagtagacatcagcaccacaaatacttgacgaacagaggctcgggatgaccaggcacatcggcagctccaccaaactggctgattactgaccaccacggaggcggagcaccaggtggagggtggactccttctggatgtagcagacagcgagggtgcgtccatcctccagctgtttgccagcgaagatcagacgctgctggtctgggggaatcccctccttgtcctggatcttggccttcacattatgaatggtgtgggagctctcaacctccaaagtgatggtctttccagtcaaggtcttcac

SEQ ID NO: 18452 - DNA, 465 bp, Oryza sativa
  Clone ID: uC-osflcyp030f03a1
gagcagaaagtttattggacagttttatttatagaacatagctcgactcgttgacttcttttcagtcagattattaagcaaactattcctatgaatatccttgccgtttaaccaattcagggaattttcacctgaggtttcaataaacattaaggaacattatcctttctagaaagagaaaaaaatgccaagagcctgaaaatgtgggggaagaatgaactaaacaatatccccggttggcccaagcaaacatagttgaatttgcctaaatctgaagagcagaagcaataggttcctgccagactgagaatttcaaacggctgcctgtccttgaccgcattgacagtgagagggcatgaatcagtaatccagaagtggcttaacccatgacccggaccctctccattatcaggctgaaatttttcccacgacttgttggggaaaagcatgtgtcacgtatgcact

SEQ ID NO: 18453 - DNA, 413 bp, Oryza sativa
  Clone ID: uC-osflcyp030f04a1
gaagtagtataagcagaatagatatagtactattaataagactatgtcttatcacttgcagcgatatttgtcagaacgtgcatatattatagacaccaaacactgctgatactaattcatttatcatttggctagctattaggggtagtgagcccgtaacaggtaaaactaatatcgattggtccaatggcttgcgcaaaagaacatttctcttttctatgttggcactgcaaaatagattgaccatagtattttagctttgcttcaatcagagagagaagtatacgtgttgccatgccaggtgcaaaaggtcacttcgctctagggatattacatgggaggcttaagtcattttggcggctccggtggcagcttgtgtacgaacagtgtgcgcacaacagaaggcttgcgac

SEQ ID NO: 18454 - DNA, 466 bp, Oryza sativa
  Clone ID: uC-osflcyp030f05a1
tccgccaccgaagctctgcgccggcattgatcctccctgcccgaacggcggcggctgcatggcggcggcgccatgcattccggcggccccgaacccattgtacagcgcatggtcacctctagcgccattgggggacttgaaggcggcgtcaatgtcgtcctgcgaccggacagcgaacagcgacaggggaaggaacccggcagcgccgccgctgacatcgccggcggcgaggccgtgatgacggtggaggtcgctgagttggagcatgatgggcttgtcgcctccaccgtcgatctggtgctggcggaggcgggaggcgaggagcgcggagtcgtcgaacgccgcggcggagtggtcatcggaggcttcttcttctcctcctacggagccggccgtgaagtcccaagccggcttgccggagccgagctcggaccacaccgccggcagcgtggacagcatctggtcg

SEQ ID NO: 18455 - DNA, 515 bp, Oryza sativa
  Clone ID: uC-osflcyp030f06a1
acttcggctagtagcattgcaacgcaaacagtatgacaaggtaccacgcattgtttaagagctaagacaaagacaaaactgatgcatccaacgtaccaaaaagaaagcgaacagcagcagtcagatagctatgagaagagaactaggagagggataactagaagggacagaatggcatccatgggtccatgacgtttagtcgacctcctccatcttgctctcgccggcgtcgtcctccagcggcggcatgtcggcgtcagcctcggcggactcgtcctcgtcgatgctcaggccgagcttgagcatgcggtggatcctggtgccgaaggtgttggggtcctccaagctgaaaccggaggtcagcagggcagtctcgaagagcagcatcaccaggtccttcacggacttgtcattcttgtccgcatcggcacgcttgcggagctcgtccatgatggcattctccggttgatctccatggtcttcttgctagacatgtagccgccatgctgagtccc

SEQ ID NO: 18456 - DNA, 450 bp, Oryza sativa
  Clone ID: uC-osflcyp030f08a1
ggaggcgcggcggccgttcacggcgctcagccaggtcgacgccgacctcgccctggcccgcgtgctccaggagcaggagcgggcgtacatgatgcttcgcatgggcggaggcgtcggcgagggcagcgattacgggagctcggatgccgggagctacgagtacgacgacgaggccgaggaggactacgaggaggagctggagcaccacctccgcgtccaccaccacgagcacgccgttggggagggtcgtggcgagggagagcgagatggggagggggctgagggaagcgagttcgaggaggaggggttcgacgaggagtatgatgaggaggaagtcgagccaaagctagaccccgcggcgtacgaggacgatgaggcttatgcacgagctctgcaggatgccgaggagcgcgaaataaccccgcgacttatggctcttgcggggatcag

SEQ ID NO: 18457 - DNA, 287 bp, Oryza sativa
  Clone ID: uC-osflcyp030f10a1
ccccaaaaaacttttttttttgaaaccggattttcatttttaaaaggggggagacatttggcctcctcccatttttaacggccggggccctaagtaaaccccaacaattccaatccggaaattcgtcctaaataacccgccttgttaaaacccgttagctggggtcgatgaaacaaatcataaaaaaaatcatttcccaggcgtttttggtgggaatatttggggggtctaaatggggttttggtttcaaaaccaacaaacgaaaaatttttttacgtccaaacaac

SEQ ID NO: 18458 - DNA, 338 bp, Oryza sativa
  Clone ID: uC-osflcyp030f11a1
gagcaaaaataatataatgagggcacataatatacacaagaaaatcaaatgcgatgtggtaagcactggactgtcataaaacgagcaatgtagcaaagctataacagataagcaataaattgggcaagaccattctgagcgtatgataaacaaactaaatctggcataaacctactggaaaaacaccaatgcggttcagtgcgctgacgttttccaatagagaagtagaccgtcttaggcaccacgagccacggtctagaacggcccaagagcatgacatgacacacggcacataacatgtgtacaaaccattctcttctgggagtgagatatgatca

SEQ ID NO: 18459 - DNA, 517 bp, Oryza sativa
  Clone ID: uC-osflcyp030f12a1
atgcagcacgcacgcatgctcggatactcttttatgggcgcgccctttttttttttttttgatctcatgcagctccaattgaatcaaaagcggtgtatcctgggactttgcttggtttaaggcctatgtgttcaccatgcatgggtgcttctacatgatggcatgatagtatgggtttctcaatttaaaggacccaacttgaactgtttacacaggaccaggaactgaggaagtgctttaaaggaaacttgggtccacagtaaagcttagattatgattctaaattggatagaaagccattgcctacattgaagatggatgataaaaggctctaaagtaccgaaactcgctacggaatcctacattgcagcaccaaaggaaacaaactggtgacaggacaacccaccaaactggaatatgtgcagcacagaacacctaaaaacttaccaagacctaaatccatacctagataagtttccgatactgaagcttgcgaactttgcaacaaaaggatgac

SEQ ID NO: 18460 - DNA, 436 bp, Oryza sativa
  Clone ID: uC-osflcyp030g01a1
agctcaaaattttctactgaggtatctgggcatattcttaaagcccatgtaaaacacctaaacatcaaaatggagctgcttatcatgcataagaatacgtaggtgtgcagatcatggcagcaactccacagaagcagcgaccgatgaacaatttgtcaaaacagatacagcatggagcaaatgaagttcgagcctcagcgacctttggccgaagcactggaatcagcattctttttccttttcttcaacaagttcaccttgtcctttttcctttcctggttaatctcaattgcttgaagaaggcctctctgcttgcgagacataagggtcttggaaatgtcagcagcatccttctcggcttgtttatgagagtcctccatatgatcgtcagcttctttagtatcacttttgtccacaacatctggttggttatctg

SEQ ID NO: 18461 - DNA, 407 bp, Oryza sativa
  Clone ID: uC-osflcyp030g02a1
ataagaagatttgatttttcatttagccattagcctccaactcatgtttttcctttcccccttgatatatatcactcagaatttcttgctagataagagagtgcaccagcaatctgctgagcttcttgttacacagtcaaaaacctgtgaagatattggcagcctattgaaggccatatacaagcaaagcccctactccggcaatgccgattatcaaactgacgatcactgtaataggtggtagcgcaccaccaatcgccctcccggtttctgcatcatatttcgcgaaccgcttctttggtgcgttgcattgtgggcagccatattcatcaggctgttcttcgaaaggcttgggaaggaagtatatgtatccacaatcaaggcaaatgtgtgttgctctagccttt

SEQ ID NO: 18462 - DNA, 392 bp, Oryza sativa
  Clone ID: uC-osflcyp030g03a1
ggatgcataaatattcatctttttattatgtaaattatgctgcttttacaaaattttctttcagaaaagaagaaaaataaactacccacaaagtagtaacatttacaactactggagctaacagagaattcatcattgaaaaatagagcccaaattgcagggtttagttcgattgtccactcgtggactacaacatgagtctccgtttgtcgacaaaccccctcaactattggccttcaatttctccccgaggattttgttcaacaaaacaggattagctttaccctttgatgctttcatcacctggccagcaaaaaatccttgcaatttagttttcccggaccgatactgctcaagttgctttggattatcagctaatacttgatctacca

SEQ ID NO: 18463 - DNA, 395 bp, Oryza sativa
  Clone ID: uC-osflcyp030g04a1
aatcacggcaagcatatgttatctcattatcgacgggcaatgatcatatgttgatgttggggctacaaaacacgatgctccatggatctgacccacacgactggcagcaacaaatcggaggaaataatggcccataaacagtttcttgggacaattaccacgactgtttgcatttaaacagcaggtttgaattcagggcttgggggtttcatcatcccatggcatacttctgggcccagctgcgggctggcgtctcatactttggacaatccgtcttgtacatgggggcaatctcagggacaagagggtcccccgggttggggtcagtgagcagcgagccaatcgaaagcaacaccttaaaaattgtcaaagcagggctccattgctccttaaaa

SEQ ID NO: 18464 - DNA, 424 bp, Oryza sativa
  Clone ID: uC-osflcyp030g06a1
ccccccaaaaaaaaaagggaaataaaattttttcccccaaaatttgggggggcccccccgaaaaccaacccccggaaactgaaccgaaccccaaactggggaaggcccccaaaaatggggggaaatcccaacttgaaacccccccccccaattaaaaaaaaaaaaagttcccgaaaattgggcccccaattttagtttaaaaaaaaaattaatttttaaaaaagggggggcccccaaacctttaaaaaaaaaaaagggggggggcccccttttggccccgattaattgttaaccccgtccggatccccccccaaaaaggggggggggaaaataaaaaccccccacccgggcaaatttgggggggaatccgggaaagggggggcccccccgggtctatttatttgggggagggggggcccccccc

SEQ ID NO: 18465 - DNA, 528 bp, Oryza sativa
  Clone ID: uC-osflcyp030g07a1
aattctgaaggactcggttacgttaaaacatccaacattataatgaacatcatacgtgcagtggtttacaaacaccatagactacttctccaccgccatcaatttacaacatatggagaatcttattacaacaacagtagatggatcctaagtcgggtgattcagtggagtacagatactgaaattatacaacttctgatgaacagctctaggcggaatggttgcaccacctagaccgcaatgtcatgctggatgtgtcgaagcaagacagggatgactatgtccggtgagctaagttggggtagatggccctcagacggcattacctcgacgattgagtcgccaccgaggtgcttgtgcaggtactcagacaccacaaccggcacagcaagatctttggtgctctgaacaatgtggcatggtacggtgacagtggtaggaggcttcgcacatcactctggagattgtctgggcgacactcaggcttgtctggactatgttgaaagtgtgcggtaaactcctgaactg

SEQ ID NO: 18466 - DNA, 464 bp, Oryza sativa
  Clone ID: uC-osflcyp030g08a1
tttttgtgtaactatacaattccatgtggcatcaagctcaatagatgaacaattgaacacatgacagtagatggcacagcatagccaaattagttgcaaacagatgtatctttgtcgtgaatatcacaaagtatgcaaattcacttgaagagaaaagtgccatactacaatttcacatgagcaacccctaaaactcaacgcgtaataacaactacagagcatttcgcaaagagtaaacaaggaaaattctcacggtggatatgctccatccagtttacttcaagatcgtattgatgacgccggcaccgacggtctttccaccctcacggatggcaaacctcattccctgctcacaagcgacgggctggatgagctccacaaccatcttgacacggtcaccatgcatgcacattttcgcctcctcgtccttgtcgttcataatctttgtgacattccccgtcaca

SEQ ID NO: 18467 - DNA, 365 bp, Oryza sativa
  Clone ID: uC-osflcyp030g09a1
cccggaacaattttatttctgatttcctatttgcgaggagaagacacaagcttattttggaggctacaaacaaactgaaatgacatggcccgaatcaaatgaaatctcacaatgaaactcaacagaagtgttcgatcttaaacatgcatctcatccaacttgctccacactgatcacattacaaattaatcaagaagaaactaaacatggatcgatcatcacccaagtgtcacatcctcgcaacaaaagccttcttccccatctgaaccaaatcagtccttcacaacacattcttacaagattctgacgatggagtgaccaccatttttatgcgtgttgccgatggcgaaatgggtaattagaac

SEQ ID NO: 18468 - DNA, 261 bp, Oryza sativa
  Clone ID: uC-osflcyp030g10a1
ggacatcttgtttttaaaaaaacgtataggataacacgtagtacacacagatggggaccctactgaagaaaattaagaaaaaacaagcacacggggagcggcccacaaggagcgtacagctgatacaaaaagagaatggcccgctggatgggggccgcagggggtataataactacgttgataaaaaatgctggaaaaaatacgtgcttaaatacaagctgaacaactccggtcgaaccaccgtgaaaagcccaatcgatc

SEQ ID NO: 18469 - DNA, 499 bp, Oryza sativa
  Clone ID: uC-osflcyp030g11a1
aattaaacctcgacattttattatatttgacacactggatatatagtcaataaactttaccgcaaattatgaaatgtacaggcactgcactgtaccatacgtagtttttgtgcagcatataaccataggctgtcacgtacggccttttataccacatactagtccttgaacgcttaataataattaaaagtgcgtgcatcacatcagaaaagtttcaacacgctagcacacaaacacggaattactagtctcactcttgtaggagaagatcaatctaatggtgcgacttgatctgtgtcgtcacatccgtttttattggttgtcgcatcggccttcaggagttcagggtagccatgtcggcatgaaggcagtcacgcatgagttgttcatctgctctggagtaaacccgatctgcaaggtgggctcggcggcagcttccagggaatggaagaatccgtgccaccgtgcggtggcacctgctggacgcatgaggcgactg

SEQ ID NO: 18470 - DNA, 282 bp, Oryza sativa
  Clone ID: uC-osflcyp030g12a1
ccccccccaaaagaaaaactaattcatttattttttccccaaattttagggggagcgagcccgaaacaggtaaaactaatatcgataaggacccaaagcttgggcaaaagaccaattatttgggggaaatttgcactggaaaaccccccgaccatagtattttagctttgcttcaataaaataggggcccctacttggattcaaaaaaaaaaaaaaatgttaataaaggggggggcccccacattgcaaaaccaaaaacgggggggggcccccgtttgcccc

SEQ ID NO: 18471 - DNA, 224 bp, Oryza sativa
  Clone ID: uC-osflcyp030h02a1
aaatgttcgtgttttttttttttttttttttaaatacaagttttttttggtttacgcgtgtttgcgttatagtttcattgtacaggccatttgaatcattactgggcaaattctggtttaaaggcatataaaccttttctattcatgcaaggcagaaatttttgactcattttctacacctttttacacattttattcgccgtaaaaatggttactattggatg

SEQ ID NO: 18472 - DNA, 515 bp, Oryza sativa
  Clone ID: uC-osflcyp030h03a1
gacacagaaaatttactttattatgaaccccaacatagtagctcaaaatcagattagcaagcttatttttgaacatccctagcagcaactactgatgaataacaacattacctaacacagtactaaataaacaagaagtggacatgaataacatgaaaatttcctactttacagctgccctgtgccagtaatgaactcttttcccttgcataaggagcatgaacagcaatcctcttctctcatttacaactcaaaaagctcctccagcctcatggtgtgatcttgcagattccaatttacagtgttatataaagattgaaagcagagttgctgaagaattaggcctttgtagcctgcatttgctttgcaccaacagcgaagaactcggtgatgacttcgagcggcatgcccttcgtctcggggaccttgaggaagacgaacacgaaggcaatcgagcaaacaactgcgtatataccaaagacacctgctaggccgatgcattcagcatcacaggg

SEQ ID NO: 18473 - DNA, 461 bp, Oryza sativa
  Clone ID: uC-osflcyp030h04a1
aaaaggaaaagaatagtcatcctctattcaaaaatcttttcgccagtggagaaaatcaaaaaaatgatggaactgaaaatacagaggtaccctggaacaaagaagactgttttccaggtttctgagtttgtcagatccatgttagaagcctttgccccctccagaatacttcccgttaggccaacaccaactatcccagccaatgtcccagctgtatttgaaacccccatcactataccagcaaattttggagcaacgtccatgtgattcacggcgaagcctgctcttcctagggccagaaaaccgagcgatatcgatgaacaaagcacagtccctgagggagtcctgaataaaggaagagccataagtgcaacagctgaaacaacgaaaccaatggtgttcaggagtttcctcgtctttgtaataaataagatccttcttgtaatcaaatgatcagcaac

SEQ ID NO: 18474 - DNA, 517 bp, Oryza sativa
  Clone ID: uC-osflcyp030h05a1
ggcacgctctaccatcaaaatgggcagagaacagaaccagattgataggttgttctgtcaatttacaagctttcacagaacatgttttggtctctccagatatgcactgaagcaatcaaacagaaaagatatgtgcactgcagcaatcaaacagaagggtagaaagactaaaaaggtatcccaactctagcatctagcagatacaaaggtaggagtaaaaacagttacaaatgaatcttctccaattatgttggagcactaaaaaaacaatatgtagcattggacatagatagaggctttcaaactaaagatatcacacagtggaagaggtgaggatgatgatctacaccgatccggtagaatcaactggcgatatcgctggtgccatatcttctagcattcacagcctgacgagcgctgttgccttccagcacctccaacatcaattgtatcaggaagatatatctgctcttccggttcattcttgatagcattccttgctatacactcaaaagca

SEQ ID NO: 18475 - DNA, 386 bp, Oryza sativa
  Clone ID: uC-osflcyp030h06a1
cccaaaggttctcattgattgatagcgatatcatagaagcagcgacccgaattaagatttaaaaccaaccccaagaaggatcgcagatccaactccaccgaatcgatccaagaactccgcctaatccaaccaaaccatgggcgatctcatttcaccaacacgacacgaactcataaaaagactaacaccaccaccacctcctccttatttagggactcgacgactcaagacgactgatactggcaaaaggcgaaggggaacagcacagatctaggagagctggccgcagtcggcgatgacaaccggcttggcggtgctcccgccgcgggatcccaccttctcgatggccttgacgacgtccatgccctcgacgacgcggccgaaca

SEQ ID NO: 18476 - DNA, 453 bp, Oryza sativa
  Clone ID: uC-osflcyp030h07a1
gtaatataaaacgtacgtatgagatctatttctttttttaaatacaagtgtgtaatggttcacgcgtgtttgcgtcaaagttacattgtacaggcatttgaatcatcactgggcagggctggctcaaagtcatataaaccttttctattcatgcaggcagaaatttctgactcattttctacaccttctacacattttatcgccgtaaaatgtttactattggatggtacaatcaatacacatctcctatcatatacatgaaaaacttcttcagtttttacatgtctatgactcctcgatgggcatcttgatgcccttgatctcgcgtgccaaagaccggaactttttgacctcgtcgccggtgaggcttcagccgagcgcgccggcgaacttctgcgcctggccggcgttcttggctttcgggattggcaccacattgccttggcatgtcag

SEQ ID NO: 18477 - DNA, 286 bp, Oryza sativa
  Clone ID: uC-osflcyp030h08a1
acatacatattaatttttttcgtgaatttttattttatttttttttaaaaaaaaagaattgtgcaatacaaaaataaaagatgagcaacaacaacacccaccgggaaaaaacaactacagagcaaggaggaaagaccccaaagggggcacaaaaactaaaaaaaaaaagagaaaaataaaaaaaaaaacacaggaaaaaaaaagggggggacggcccccccaccctaaaaaaagggaaacaaaaaacccaactgtcaggcgaggggaaacatgaggtacaaaacca

SEQ ID NO: 18478 - DNA, 443 bp, Oryza sativa
  Clone ID: uC-osflcyp030h10a1
tttttggttttttttttcgttgggggtttatatttgtctttttttattttcatgtttgttttgtttgggtcttttttgcaatattgttgcattgtactgtcttttgactcgtttttgggcggggggggcccaacctccttaaaatactcgcggactattaaccgcacctccggggaggcgctgacccggcctaaatatggtcttcccaactctagcatctagcagatacaaaggtaggagtaaaaacagttacaaatgaatcttctccaattatgttggagcactaaaaaaacaatatgtagcattggacatagatagaggctttcaaactaaagatatcacacagtggaagaggtgaggatgatgatctacaccgatccggtagaatcaactggcgatatcgctggtgccatatcttctagcattcacagcctgacgagcgc

SEQ ID NO: 18479 - DNA, 441 bp, Oryza sativa
  Clone ID: uC-osflcyp030h11a1
aaaaaggactggagcagtagacattttttgggcatgtcccaacgcacaactttatcttacaagggtctgggcccactcacattgcaattctaatgaaccgggaccattgtttggcctgcgacaactgggtcgcaaacttgcaatctatgctgatttctatttccctacaaaagctgaccttcctagcacattttaggagaaaactcggtctatgacaaacacggccaagtaagccatgcaatttctgtttcttggcctaaaaacgacgtctatctgacaaaatttcccaatgggttctgcgacaatgctcatgccgaatccaacttgttctgcttgagaaattccaggcccttgagttgccgatgagctgcttccttggacacggtcttgacgccggggcccttcctgtcgccggcagccacctgctttggcatggaggtg

SEQ ID NO: 18480 - DNA, 284 bp, Oryza sativa
  Clone ID: uC-osflcyp030h12a1
cccaaaggtccccatggatggaaagcgatatcataaaagcagcgacacgaattaaaatttaaaaccaaccccaaaaaggaccgcaaatccaactccaccaaatcgacccaaaaaccccgcctaatccaaccaaaccaggggcaatctaatttaaccaacacgacacgaactcataaaaagactaacaccaccaccaccttctccttattaagggactcgacaacccaaaacgaccgataccggcaaaaggcaaaggggaacagcacaaatctaggaaaactggc

SEQ ID NO: 18481 - DNA, 370 bp, Oryza sativa
  Clone ID: uC-osflcyp031a02a1
gagtgagacgcgcggcgttttggtgcgagtaacatcgaacaatcccgcgaggcggcggtgggcggcggaggctcacttcacttcctcctctcgccgccgatcgagaggcgctcgaagcaccggatagcggtgccccccttcgctgccggcggcgacctgtcgtccgcggcggccgagtggtggtggtggtggtggtgcctctgggcggcggcgggggacgggcggttgctgccgctgccgctcgacacccaccggccggcccggttctgctcgccgacgtcgcctttcgaggatgtcccccggctagaccgggtggcggcggcggcggtggtgggcattttcgccgagctcctgttcctggatatgggtc

SEQ ID NO: 18482 - DNA, 292 bp, Oryza sativa
  Clone ID: uC-osflcyp031a03a1
gtgggggggggaaaaataggacaggctttattatattcagggcacgaatttatttttaatacccctcctccgttcgcacaaaaaaaaaggggctaattagctaaactccgggtacccacgtacacacccacccctgatatacccgtagaggtaagcccttacatgacccccccgacttcctacgggcacacatatacgtacgtacgtacacgggtacacacaggaggttcgatcagccggacttgagcaggaagctctgcttgccctcgcggaactccccggggcaggggtt

SEQ ID NO: 18483 - DNA, 488 bp, Oryza sativa
  Clone ID: uC-osflcyp031a04a1
acaaaaaaggaacagctgtgagggtccctttattccttttcctggacaagaaaagaatgatatttccttttcttttacatattgataatattggaggctgatgccaaagttattccattatactactatatatatctattgaattagtgatgtcattcacaggattttctccattacattggggggaaaacaaaatacacatgacagaattttcagtctccttttgtacttggctgagaacttcagagttgagactgtcagagacatagaaagcaggccttacagtagatgagatgatccatacacacatcatttcatctcaaagttctttattttgaagagactcatcttgcagctttgccaccctgcttctctttggagtggttctgattttctgaactgtttctgcagctgcatctaacaaatgtgaccccccatttctgaataccatatctaagacgatttcacaatctcatctcttctgtcga

SEQ ID NO: 18484 - DNA, 412 bp, Oryza sativa
  Clone ID: uC-osflcyp031a06a1
ttatatttatctttttttttttttttttttttggttttttttaaatttatttgggggtttttccacccaaccccaaaaactgcaaaattaaaaataaaatccctccactcaaaacaaaaaaaaacaggaaaaacaaccccccctaaactaaaataaaaccacaacactttctattttatttttggcaaagaaagttaggtttaaaaatggaaccccccccccccaaaaccttaacccaggggggggcccaacttgactagggggggctaaaccaaacccccccccttttgggtaaccaaacaacccgggatcacttccttcacataattcagaaaaggatgggtttaaccctcaacggggagaaaaaagatctgcatcaaaaccgtgatctttttaaaaacaaaactacttt

SEQ ID NO: 18485 - DNA, 461 bp, Oryza sativa
  Clone ID: uC-osflcyp031a07a1
gggggtgggggctttttttttggaaaaaaaaaaatggaaaaagccttaattaaccccatataaaaaagggtttacttctttttttggggaggaacccaagggggttataaaccaaaaaccccccattaaaattttttgaaaaacgggaaaaaaaaaagggggttttggacctcggttcaaaattttccccaaaaatcttcccgaacttttgggagccgggaggttaaaaacctttggccctgtgaaattttaacaagggggaaaaaaaatttggggacccaacgggggcccaaaacccatttggcccctgggcccccaaaaaagaaaaaggggcccaaaactttttccccaaaaaaaaaaggcccgaccccctttaaaaatctcccctgggggaaaaagaaaccccccccccccgaaggaaaaattggggaaaacccctaaaaaaaaagggcccccccccc

SEQ ID NO: 18486 - DNA, 305 bp, Oryza sativa
  Clone ID: uC-osflcyp031a08a1
aagcaacaacaacaactttttgggtaggggggataattttttacaaaagcatcaaaaccctaaaaaatcaacaaaaagggggcccctcccttgggaaaacaaggaggggaagggcggggatcaagcccaggaattcccacccccgaagattttttatgtttttaggaggggaaaccaaccgggaaagccaaaattgcatatttttaggaaaagcttggtgcaaaaactggaacccaaacatgtccctgggttaagcgggcggccaacttttgtccacaatcttggggactttgggggtggacccc

SEQ ID NO: 18487 - DNA, 456 bp, Oryza sativa
  Clone ID: uC-osflcyp031a09a1
tttttttttttttttttttttttttttgttgttttttttaaatttttggggggattctaacattattgcccaaaaataaagctaccccaacaccccccaaaaatccccaacaacaaaggggctccaaacaaccccaaaaaattcccccccatctaaggggaaaaattaaaaacaaaaggtcactcaccttaaacttgacacatttaaaaaccggggaccctttgggtttttcccaaaacggaaaaaaacccgggcttttcttgcaacttggaaaaacggagccaacccgggattataaatacaaaaccgtaaaccccccccccaaagaaatatctttccttaaaggcggaaacctccttggaaaagcccccctgccccaaattgggaaaacccaggcccctaaatcccggtttgggggaaaaaaaaaagtcccaccccataatttttttccttgtg

SEQ ID NO: 18488 - DNA, 388 bp, Oryza sativa
  Clone ID: uC-osflcyp031a10a1
atgggggggatgtaatctggtatatatatggatatggctttgccttatacaaaatggtaagagaaaaacatttttaatttggggggtctcattacaattacatgctctagttaattagaacagtaagagaggaagtgaagaaaaaaaaaggggaaaagaaaaaaaaaaagaaaatgctcggggaaggagagctttgacctttccaatgggggagagggtaaacaaggtactttacctttcctaaactactacttttcccggccggcctggcctgctagccggcggcggcggcggcggcccgtggcgttcacatgacgctgcaagcgttggggttcttgtcgtcgaacatgcggtactcgtcctgcaacggcggcgcgtgcgccctccc

SEQ ID NO: 18489 - DNA, 484 bp, Oryza sativa
  unsure (1)..(484): unsure at all n locations
  Clone ID: uC-osflcyp031b02a1
aaacaagctaattttataattaatggacaacaccatatttcattggtcaggttcagaacctgcacagaaatacacactaccggtacagatctcaccttctctccaatactcgtacatccatccacgcggtccacacgaatacgtacatctatacggtacacgtacgtacatctactgcaccgngtacacacacgcacactctcctgcagagacgcgcatcgtcgtcaacctagctagcttagctgaaggcgatgcgtcgccatggcagcacggcggcggcggcgctcacttgccggggacgaagttggtggcgtaggcccaggcgttgttgttgacggggtcggcgaggtggtcggcgaggttctcgagggggcccttgccggtgacgatggcctggacgaagaagccgaacatggagaacatggcgaggcggcccgtcttgatctccttcaccttgagctccgcgaaggcctccgggtcgtcg

SEQ ID NO: 18490 - DNA, 334 bp, Oryza sativa
  Clone ID: uC-osflcyp031b03a1
acccaaaaagacaatttgttttatttttccggggggaatttacccaaacatggggctggtacattttcataggtatggcgcctgacaaaaaaacaaaatcaagcttttgacagccctattccccctttgtccctgactgcaatgaatggaataaaatgaaaatttccctgtttgccaccttggaaccctttggaagaactactttccctggtccatttcagggcactatcgggaaacccctctacaattacaacggaagaagggactttctcatgaaaattggaagatccgttggtcaccgaaaggaccatatcccccacctctggcaatggga

SEQ ID NO: 18491 - DNA, 651 bp, Oryza sativa
  Clone ID: uC-osflcyp031b04a1
aataatttttttttttttttttttttttttgttttttttaaaaatttttttggttttttaaaaatttttttttttttttttttttatattatttattattttaaaaaaaaaaaaaaaaaaaaaaaaaaaaataaaaaaaaaaaaaaaaaaaaaaaaaaaaaaaaaaaaaaaaaaaccaagaaaaaacacaaaaaaaaaaaaaaaaaaaaaaaaaaaaacaaaaaaaaaaaaaaaaaaaaaaaaacaaaacaagggcaaaccaaaaaaaaagtcaaaataaaaaaaaaaaaaaaaataaaaaaaaaaatccaaaaaaaaaaaaaaaaaaaattaaaaggggggaaaaaaaacaaaaaaaaaaaagaaaaaaacaaggcaaccaaacaacccccgggaaagaaaaaaaaacaaatccataaatcatatgaaaaaaaaaattgaaaaaaaaaaaaaaaaagaaagaaaaaaaaacacttctaaaaaaaaaaacaaaattaaaaaaaataaaaaaaagttcgccccaacaaaaaaaaaaaaggaaaaaccccaaacaaggggttaaaaaaaaaaacttaattttacaaaaaaaaaaaacaaaaaaaaaataaaaaaaaactttaaaaacaaaaaaaaaaaaaaattgcttttctt

SEQ ID NO: 18492 - DNA, 369 bp, Oryza sativa
  Clone ID: uC-osflcyp031b05a1
gggggggggggaaacgtaaacacttaatattcataccaaatgggctaatgtaaaccaaaaatttttggagaaatgccccccattgacacatggagcaacctattctgctgaacatgtgagttcattgggggctccatttttatgcaacaccccagttaagcccaaacagaaggaaattttaacttatttttacaaaccattcactaacaacttactacaccacttttcaagggggagtgagccaccaaaaaaaaaaaacttagccctaccctactacacaatacattcaagcattgccaatccccagaggggaaaacccaaccaaaagaaattttcaagggggggaatttgaatttgagggttgatttg

SEQ ID NO: 18493 - DNA, 516 bp, Oryza sativa
  Clone ID: uC-osflcyp031b08a1
ataattaaataattaatttactggatataaattattgataaaaggtgtgcttacaataatgatgaagtatcaggagaaacgtgtcttcaggttacagattattacatgatggtggtacacgaattgtgcggtgatagaaatcatatatgtcctctttccaaaatagactcgatcgatcggtattgctagagtatgagtagcaattattatccgatagagtgaggctgaggccttccgtgactgaagcagattgcaacgctgatcgatctccttacatgctcggcttcgcgctgagacggctcgccagtttctgacccagagacctgtcagcctgagaccagtaggagagccagatgctcctgatctcgtgggtgaggcgagggtcagagagtgcgtcgatccatctcttgatgaaccggtcttgccttgccggatcccatgaacggtacctctcccctggctgcttgaagttgttctccttggcaatcaccacctttcttccgcggccggtgaggg

SEQ ID NO: 18494 - DNA, 396 bp, Oryza sativa
  Clone ID: uC-osflcyp031b10a1
aaggggggtgaactgcccaacaagatctttttcattggtctaaaaaaatataattatctcctacaattttattcggggggcatccatgggggtacatcactataaacctggaaacaacaaacaaatttggctaaataacaccgggtatggggcagtttatgccctaaaaacaaggtcaaaaacattggtattggtctttttggtggggggttttaacccctaaaaactttttggggttcccaaaaaaaaaatttttttgaagggtacaaaacctttttttggtgattcaaaacttgggtacagggggggaagtccatcacgatggcgggaatccctttgcagggctacatttattttatcggaagacatattttcctgggaaaaattgtaaatggg

SEQ ID NO: 18495 - DNA, 340 bp, Oryza sativa
  Clone ID: uC-osflcyp031b11a1
gggcaaaaaaattttttggtttttttttggggggggaaccttccaaaacgccccctaaatgggggccggggaaaccttaaaccccccccccggttccttttttggaaaaaaccaccccttttttcaattaaaaggggggggggtttcccccaaagggggggggccgggtttttattatggcgggcattattttccttccaagggggccaccctacccttttgaacaaaaaaggaatttttcctttttttccgggaaaggtgttcccaccctgggcccgcccttggaaccttaaccctgaaaaaattcccgttttttgggggttaaaccctcccggggggg

SEQ ID NO: 18496 - DNA, 465 bp, Oryza sativa
  Clone ID: uC-osflcyp031c04a1
tatatttttggacaagcaagaagtatatatatgcatccatttctcaaactactacaagaggtcgagaggaacacataatcaggagggattgcgacaatttacagcaacaggagtctggagatcgaggcaagaacaagacaggcagcagcagagctaccctcttcatttccactgaatttttacacatttggaatccatggaaaccgagccttccctcccgtcgtcgtggtgtcaccggagtccgatgagaaaaatggtcatggcgtgctcataatccggatcgctcgccggcgtcggtgaaggaggcggggcgattgttcgggcggctgttgaggagtgggttcagagccttgacgacgatgctcatgttgggcctgaagtccgccttgtactgcacgcacagcgcagctacggcagccatcttggcaacagccttgggaggataatccccttcaagccttggat

SEQ ID NO: 18497 - DNA, 230 bp, Oryza sativa
  Clone ID: uC-osflcyp031c07a1
ggaggcactataaaaaagaggggggacattaaaccgctcgccatcttaatatatccaacattaacaagggcggtagtccaattattagtacacacgattcttcctcactctatattttagctttttttttctaacccattttaaatgatgcacccccacctgaacagaatttgttttactactacaagggatgtcccaccaaaaaacttcatatctcccccctctttttt

SEQ ID NO: 18498 - DNA, 319 bp, Oryza sativa
  Clone ID: uC-osflcyp031c08a1
aaacccgaaaaaggggggaaaacctttggaaccaacactttacaattccttttaatatggggcgacccaggggacaaatggttgcaaaatccctttgggggggcccgggggggggaaaaaaaagaaagggtgttttattcctggaggggaaaggtaatttgccaaaactttggttaacccccaaagggggggcccttgattattattcaaaggggaataagggtcaaatcccctggacagggggggggcaattttggggggcccaaagggaccccccaaaaatggcccccccctttgggaaaaagtaaaaaaagggggg

SEQ ID NO: 18499 - DNA, 544 bp, Oryza sativa
  Clone ID: uC-osflcyp031c09a1
cacagaaattgaaaatgattatacataacccgtgtgtgcttcctcggacaaaaacatcttcagaggaaaggaagaaacaagctctgtgacactttattacatcgagcaaggaatagctgattatttattatacatcggtttagtaaatgaaataacgacaggatatactggacaagaattttcgaggtctgtctttctcaatcatggttttcaccatttatgacaaatggcctggtgtttctctggctctaaagcataaatacaaaacttcaagagtttcttgtctgggtcttaggtctgcaggaagctcgcgtacttcgcaccaaggaaaagcctctgcacgcagagcagggcattcttcctcacttcggcgttctcgtggttcatgagcttcatcactcggtccttcgccttcagatctgccaccacaatgcgcccagaagggtggtactgaaggaactgtgagaggtcatagcaggcgacagcaagagcagtcgtgtcggccgatgtgtcgatgattgtcataagcacacgtagaatctgg

SEQ ID NO: 18500 - DNA, 369 bp, Oryza sativa
  Clone ID: uC-osflcyp031d03a1
gacaaaggggataaaagagcaccgtttttctatcaagcatactatggcgactgtagaaagaaataacaggctcacagaactagaagatgtacatcatgacacagcctgttgaaatgccgccgtcaattgattctagtagtttttcagttctgttttttctgcatttacaacaagggcttcctcctctttctctgtttcttctaacatatggcaactgaagccatcatgttcataaacctacacagggggtatacctctacaaatcaaactctataagcatatcccccatcaatcttacatttgctacaaaggtcaaagtgtaaccagagaaatcaccgtcggatggcacagaagggctcttctttctta

SEQ ID NO: 18501 - DNA, 55 bp, Oryza sativa
  Clone ID: uC-osflcyp031d04a1
aataatttttttttttttttttttttttttttgttttttaaaatttttttttttt

SEQ ID NO: 18502 - DNA, 474 bp, Oryza sativa
  Clone ID: uC-osflcyp031d05a1
gaaaagcaattcccttgcattttcaacattttagtctcaacaatgtgtcaatgtcggtcgtcgggcatagacgggctgcacaaccttgtacaaacatgtgtagcagtacttacagttacatgagaatagtgcttacaacggcaaaactgggactcatgctctacgcataaagaattcacaataaacctcagatattgaaatctctctcgcccttccctttcatttcatctggtttaagcacgtgcattagaatagtcagaacaaccttcatgatttcttcttcatcatatgagggcgtaaacgtaacccaaggaaggattgggaactcccatctctgcttaggaactgatatggcatatgcagtaacaagagctgaagcagcaagttgacagggagagttaaaaagccatgaactatcttcagtctcataaagaatatccaaaatttccatgcaaacatccatatttaaaagat

SEQ ID NO: 18503 - DNA, 461 bp, Oryza sativa
  Clone ID: uC-osflcyp031d07a1
agtcagagcaaagtaggagcttctttatatttccacgagcaaaggggacactcaattatactacaatttctctgacgcttgaggaagtttctcttcaaacatcggaaacacatgagctttttttgctgaaataaggagcgggctgatctgtctgacgagatcacaaacgcccaaagaaaggaagtgaacgaaataatgctataataatctgcaattatatgctttgaggatgccacattctgtttgatcacataattcggaacgttctgtttgatcacggcttcgtccaggtgaattcgagttagagatggccaggaaaccgagaggagtagtatgtctgatggatccacttgtcacaatttccggcgcctgagatttacgacgacgacgctgacattgtccgaggtttgccgcgccaaagccagcttggtcagcaggacggccgcctcggcgcacgcctt

SEQ ID NO: 18504 - DNA, 426 bp, Oryza sativa
  Clone ID: uC-osflcyp031d08a1
atatttttttttttttttttttttttttggggggttttttttttttttttttgtttttttaaaaaaaaaaaaccaaccaattttttcaaaaacattccctgacccttttaaaaagaccccacatgtatgacgggaggttttgcttttctgaatctggtccttattcctgaaacttattctttgggacaggatcttaaaataccccaaaaccccatggattacattttttttaccaagggataatgaaaaaagttatgccctcttgattctcttctgaaaaacaaaaaaatatccccgcagggcaagccgtgaaacccaaggaaatcttgaaatcttctcctttatcatcagcagcaatgcaaaactcaggacagtcttgagaatttgagcctgaaatcctttgaagaaccctgggaagccttcctt

SEQ ID NO: 18505 - DNA, 278 bp, Oryza sativa
  Clone ID: uC-osflcyp031d11a1
ggcaggggggtttcatagttttatacgggggataaagaagaaaccaccaccattacactaatacacacaaagctcgatcaagcagcttaattaatttcttccacatgtacgacatgcatcctctcctcactccgggatcaatttaagatgattctttgcagctccagctcgacgacgatccatccgaattaaaatcatttgacctcctggatctcgtccagggcgtagttgttggtcgacacgccggcgtagttcaccttcgcgatctagaactagtc

SEQ ID NO: 18506 - DNA, 396 bp, Oryza sativa
  Clone ID: uC-osflcyp031e04a1
gaggtaaaccaactccaatatatgtacaaacacaaacaacgtacccaatttttactgttaaaatacaggcacaatgcctggtatcacacgttattaagtagacagactcgataaccatgacacggacagggacttcttgccactggtttacgcacggttaatattacagaccacacatagagagacggcttagctatttgcaaataagcttgacaagatagatgatgctccaaaaggatgcgatctcagcagttgagtacttacgctggttcatctagaattccctatcggggaagaggagtggggcgacaagggaccaaatgtacagacctgccgttgcccactgggttgcaatcctgacccaaacggatggccacccaacgtcaacaagctttt

SEQ ID NO: 18507 - DNA, 392 bp, Oryza sativa
  Clone ID: uC-osflcyp031e06a1
gacgcgggaagcacgcaaagggactgaaatttctaagcaggcaagcatagtatcattccaattctgccattgtatgcacattattcaagcagagagagctgacgcacatctcaaacacccatgacaaacgctacaccaagtgcatcggttcactcgtggtgcatatgtgatcgaacagtttggaggtgtgagttcaagaactacttaagcctggggcgccttatcggcggccggctccggctggggctgcgcctgagcaggggtgagcgccttcttgatggagacggcgtggatctccgccatgtgcggcgccagcgcggtgttcaccatccggtgccgctccagcagccgcttcccctcgaacttctccgacaccacctcaatctcgtagc

SEQ ID NO: 18508 - DNA, 357 bp, Oryza sativa
  Clone ID: uC-osflcyp031e07a1
atatttcttttttttttttttttttttttgttttttttttttttttttttggtttttggcccttccaattcggaataaattcaaaattatgatggttttcatatctccagctaaaggggaaaaatgttctcaaaacaaagctgggggggggtcccgttttcacacagaccacaaacaggttatttcaacttggattgaaattggtgggtatcaaaggcatgctacccacaccattttttgtttttacaagcagcaaaattttggggtagaaagaattcgagatctttacatacaaggggcgcattcttcctgtactcaaaccgactagctggtaacttcacaaaccaggccgatttt

SEQ ID NO: 18509 - DNA, 331 bp, Oryza sativa
  Clone ID: uC-osflcyp031e08a1
atatttttttttttttttttttttttttttggtttttttttttttttttttgggtttttctttttttttttttttttttttttttttttttttttttaaacaaaaaaataaaacctgctttttaacttttagggaaaaaaaggaaaggggggaaaactttgcctattttccttttttacagcagaggccctcactccccccccgggaaacccatttggaccccaagggccaaaacaaaacattgggggaaaccttttcttttgcccaccaaaggtattgggagactttaagccccccctgaccccgcataacccttgtttaaaccaggggg

SEQ ID NO: 18510 - DNA, 319 bp, Oryza sativa
  Clone ID: uC-osflcyp031e09a1
gggaaaaaagccaacacccccaattcaaaatgccccccaagggaaaaatccaaaaaagggaccaaaaactgaccccaaaaaacggtttcaaatccctaaaaaaatggaaggggggaaaaaaactaaccctttcccaaaaatttttgggctttgcaaacaccccctttttcaaaaacaaaaaaagggactaaaaaagggaaaaaaaaatggaccccaaaaaaaaatttcaaacccaatcaacctttgggggcccctgaaaaccccccaccaattaaaggagggggactaccccacccaaatccggccggggggggggccc

SEQ ID NO: 18511 - DNA, 460 bp, Oryza sativa
  Clone ID: uC-osflcyp031f02a1
aaaacaaatgagcagtggtgtctctgaactttcgcttacacatagatagcaagcagtctagtagtggaccaatccggccttctgcacgcatacagtcactcacacgctactacgctatctttacatggagaacatatacatatattgcgacatagaagtgcatatgacatataattagggtgcacatgtgtgcatgctgctgctgcatgcagcgctagattattcgttcgcagcaggtagcgaagttgtgtgatcagttttgtcaggcgtggtcccgctcaccaggaagagcagcgagaacatcaggaggagcagcgaatacatggcggtctatgtcgtcaggtggactagcgaacacttggtccggatcatggtctacgtcatcatgggggctagagaacacgtagcggggggccggatcatggtctacggcatcagggggactagagagcacctaatg

SEQ ID NO: 18512 - DNA, 317 bp, Oryza sativa
  Clone ID: uC-osflcyp031f04a1
gggggaaaccatatcaatttactaaaccacctcaaaacaaacgggtacatttggacagcccagtaaatgttggaaaaccaaacaaaatataagcccttatagggcccacgaaaaggaacaatctggtcctaccctccacaaaggggttttttccttaacaggcccccacactatgtgggggagggggtatatgttatataaaatggaaaccggccctagggaattgttcaaaaatccagttgccaaaacgctcaagccttgttggcaatgttgttggaaagcccaataaaacccttatacaacccttaaccaaatgt

SEQ ID NO: 18513 - DNA, 466 bp, Oryza sativa
  Clone ID: uC-osflcyp031f05a1
attattttttttgataaaacggctgttggggggagctgtatatatcctgggggtacatttggattgtgggatgcttctttcctacgggaaacccagatttggcttttctacaaaacaagtgatctggaaatacatttggaggagataattacaggatggcgcgcactccttgcaaatgttctcttcaaagatcaattgatcacgatggcacgactaaccggcaaggaagctattcactttggcattggctgccctcgacaaaaatttcatgcaaatggggggcttcaccttgtcaagggcacgaatggactggggaagagaccagatcccatcaccggagatcaaccctgacgccaccgcaggtgcaaacgcatccgtcttgggcttgtttagcttctcccacacaaagaggatcacgctggccaggaacatatcgatcgcgaagtacgatccaatgtaaaaaggg

SEQ ID NO: 18514 - DNA, 482 bp, Oryza sativa
  Clone ID: uC-osflcyp031f06a1
acctgagagagagtgccttgaacaatattgatctattcgaacaagggaatgttcatatttccctggttgcaaaagaaatacaagctgcaacttcagataatgatcacgtgtaccatattgttttcgccccaaaaaacaactatcgagtctatgactactgacccctgtattacccttctataaagaaatacatcaattctgatgaaaactcatcgagattgtcagcctatgcatccaaaagaccaaaactacgaggctagttcatcagaatcttttccccatgatgaaaactcactgggacaacgaaagctttagcttccatcagtacactccaatctttccccccaaaaagagtacatctgaatctcagcactggaaatcacctcggatacttctgtaagtaaagatcatgtggagcatatcctgcagagacaatcctgctgccaaaacgccgccatgtagtgaatgagctgcaatgcatg

SEQ ID NO: 18515 - DNA, 291 bp, Oryza sativa
  Clone ID: uC-osflcyp031f07a1
ctaaaaactcttgggggtttttatttttttttttttttttttttttttttggggccccaaaacaaacaggccaaaaaccaaaagctttggtggggaaacccccaacccgtttataaccaaaactaggcccctcaataaaaaccccctgatcccccaaaaaaaaaaaaacccccccccccccaaaaaagggccctcccctggaaaaaaaccttgaaaattagggggggttagggttacccctaaaaacctcacccccttttcctaaaaggggccttcccccctgggaaaacc

SEQ ID NO: 18516 - DNA, 468 bp, Oryza sativa
  Clone ID: uC-osflcyp031f08a1
gaacaaacgcgcgtattataagtgacgaagcgggctgacataaaacagggcacacaggttacaacaacgagggttgtaagcccattaagccccaaacatcagatcaccacaagcaaatgtctcgaagacacacgcacacggcaacaggataactccacactggcagatcatgggatagcagcagttatcaatcaggccttgacacacagaacatcaagcccccagacgacgacgactcctctagtactcgtcaccatcatcgccatcctcattctcgtcggactcagcgccaacctcctcgtagtccttctccaacgcggcgagatccttacgggcctcagagaactcaccctccttcatgccctcacccacgtaccagtggacgaaggcgcgcttggagtacatgaggtcgaacttgtggtcgatgcgggagaacacctcccgacccttgtggggttggagatcatg

SEQ ID NO: 18517 - DNA, 335 bp, Oryza sativa
  Clone ID: uC-osflcyp031f10a1
aaaagggttacgttttaaaaaggggggccaaaaaacccaaataaaaaaaattaaaggggggggggggggggaaaaaaaaaaaaaaacccccctgggaaggggggaaaaggggggggccatccaaaaaaggccggggggccccaaagggggggggaaaaaaaaaaaaaagggggaaaagagcccaaaaaaaaaaaagggccccccctgggggagaacagggggggggcatccccccccggaaaaacctggaaaaaaaaccccccaaggatctaaaaaggggggggggccaacacggggggaaaaaaaaaaatgccccggggtggggcccccaaaaa

SEQ ID NO: 18518 - DNA, 387 bp, Oryza sativa
  Clone ID: uC-osflcyp031g02a1
gggggggaattatggggcccggatcacatatgggtccttcatattgaaagagacagttttacagatgcgggtacccaacaacctggaaaaaaaaaaagaaccagacaaactggttgagcaaactgcagagctcttttgcagtttcagctgactcaaaaaaatgaaaaaagggtaaaacgcccaaaatatttgaacactaaaactttggctggtacaccgatatcactagcaacttcgcaaggggatttcaaccctttcatcatcttcccaactttttttttttccatggggcaacccgtcactactgatcaaagacccattaggtaggcggggggggggcccacaaccgcccgcaatggaggtagatagcgagagagagacccccct

SEQ ID NO: 18519 - DNA, 461 bp, Oryza sativa
  Clone ID: uC-osflcyp031g09a1
gatcacaagaggaattggtgtaatgacatagtttataacattacataacacaaacaacataattaacccttacaaaacaccacatggacacagacaaaagaccatcacttattcagacacaaaatcatcatcagaagagtagtagaagaagaccatagagcagcagcagattaaagccttgaaattctcaaagcagccaagagaagaaaaaagatgaagacttcttgatgccaaccacagcttagctcagagctcactctcccatggcgcggcgttcgttcagtactggagcatgtgcgcggcggcggggcaggggatctgccatggccggagcagcgggtcgtcgggggggcactcctcctggatgtccatggcgacgccgctgaactcctcgacgacgcggagcacctcgttgacgctgcgcagcctgtcgccgagctcggcggcgcgcgcccggagca

SEQ ID NO: 18520 - DNA, 707 bp, Oryza sativa
  Clone ID: uC-osflcyp031h02a1
aaccccctgtcccccaacccctacccctttccccaccttaacaacccccccccccccataaaacccccccccccaaccccccacccccacccacctcccccccccccccccccccccaccacaacccccacccccacccccccacccccccccatccccaccccccctgccccacccccccccccccaccaccccccccccctcccccccccccccccaccccccccccccccaaccaccccccccaccccccccaaacccccccccaccccccccccaaaccccctatcctaccccccacccaccccccccccccccccctccctcccccccccccccccccccccccccccctcccccccaacccccccccccaccccccacccaccccatcctaaccccccccccaaccccctcacccaaccacgcggaccccacacccccccacccccccccccctccccccccaccatcaccccccctcaccccaccccaaccccaccccctccccccccccccccaacacccccccccaaaccccccccccacccaatcactccctcccttacccccccccaccaccccccactatcccccccactcccacccccccccccccaccccccaacccccctaccaccccccacccccaaccctcccaaaccactcccccccaccccaaccccccccccctccccactcccccc

SEQ ID NO: 18521 - DNA, 602 bp, Oryza sativa
  Clone ID: uC-osflcyp031h04a1
aaccccccgtgtgtttttttttttattatttccttctcttttctttcaccttcttttctttttcctttctttttttttcttctttcttttctctcttctttttttctttttcttcttttttcttcctttttttcctttctcttttttcttatttttttcttcttctttctttctatcttttttctcctctttcctcttccttttctttttttttttttcttctccttccttctcttttcctttttttccattcttcttttttccctttcttcttttctccatcttttttcttccctcttttcacttttttcctattcttttcttatttttcttttcttctttttcttttctactttcttttttctccctttttttcttcttattctctattcttctttctcttcactcttctttttcttctcttttcttctcacttcctttctattctttaccttcttctttttttctttcttttcacttccttcctttctattcttttcctcctcctctttcttttcttttcttctctctctcacttctcttctattcctctttcttttcttctcttttttctcttcttttctttcttctcttttcttctc

SEQ ID NO: 18522 - DNA, 467 bp, Oryza sativa
  Clone ID: uC-osflcyp031h06a1
acatatcaaataggggatcatatccaagggaactgacacagtcacaaacaacaggtacacagacaattacagcacaagcgcaggagggaaataattttaactgaactaggaagaaaggaaacacaactcattttttattgatatatgttggatgaatccaataaaaccgatacaagtcacgaaaaatcagactagatgaatccttcgagatcacatgagcaaaagctttcgacgaaagctgtcctatagtcgtggaagcaataacacttgataaagataggaattcagacacgagaggttgcagactataagatgtcatcaaatctccttgaacgccgcgaagagatcaccgttgatgtagtcgctgtccacaagactaaccaagaagtagctcttctggaccttgtctagtatctccctagatgagtcgccctcagggaacaggcaagcccaaccctttgaccaaa

SEQ ID NO: 18523 - DNA, 373 bp, Oryza sativa
  Clone ID: uC-osflcyp031h07a1
catcccggggcgggagtagggtattactgggtttataaaaaggcctgaacctgtataaatcctttgtctccaaacccatacacttttccagcttgatagccacccccttttattattgccgaaatctagtttcgacaaatggcgacttgaccacggatctcgccagacgagctcaactacgcgttgctccggaaggagccgtagcccctggcactggcacggaggatgatctggtggtacagcgccgcgatcgccgcgccgatgaacggcccgacccagaagatccactgatcactccaggccttgttgttgttgtagatcacggcggcgcccaggctcctggcccggttgatgcccgtgcccgtgatccgga

SEQ ID NO: 18524 - DNA, 398 bp, Oryza sativa
  Clone ID: uC-osflcyp031h08a1
gtgtgcccccaaaaaacctgggggggttcacaaaaaccctcctaaaaaaaaggcccttaccaacaccccccttaacaccaaaaattctacctttcgacccccccaaaaaaaccccaacctctttacacaaaccccccctttttccaacacctcctccacccaaaacctgcacctaaaccccaaatccccaaacatagaaaaatccctttttccccctacaaacttcccaaccacccctttaaagtacatccggaacttccgcccccccccccccaaaccgaccaaaaaatcccccatgttgggcccccccaagggcccacaaaaaaccccccaccaaagactgccccccccccccctatgacccccccaaaaatccccacccccaccctgaaacccac

SEQ ID NO: 18525 - DNA, 380 bp, Oryza sativa
  Clone ID: uC-osflcyp031h12a1
cacaaaagttaccttgtcctgcgtgtctaattaaattttgcttgagttaagagaacaacaaaaagaacaaagctaaagcagttgggagagggagaaagagaccagcttttgacatccatgcataaaactgctaaaaagagattctatgcacctccagctttccatcatgagaggataacctactacacaaaagtatcactcccatcaaccattccaaatacttcagttagcaaatgatccagcaaaggaatgggcgcgccgtcctcttcgattaacagccagcaaacaggctcttgcgcctgtggctgttgctgcgatctgcttcttctggggtccaagaggcgtagctccgttcgcgcatattcagattagcagttagc

SEQ ID NO: 18526 - DNA, 505 bp, Oryza sativa
  Clone ID: uC-osflcyp032a01a1
atcacaatgcaattttcattgagattcaaaatctttaacacggagtcacgaacacagttggatataaagtattcctgatggaacccacgaacaacttgatttctctccaatcaggcttcaacaaaaatagaaaatacaaaagcttaaaagccttaaagagaaccatttcatctgtgactacaaggccgcacagatgataaggttttaggaaaatacataacatacagcaacaggagacaacactggtattgtgttgctgcctggttttgcatgcagcatctcaccacaatccagttcagtagtattcatctcaccacaatccacttcagtagtattccttctcaccacaatccacttcagtagtattcgttaccagcgctgtccgaaaccatgtccttgaggtgtcattggagccttcgagttggtctcctattctgtcctgcaagtttgtttctgcattccggcctccataccagatcttgggttaaatgatagctctgaggct

SEQ ID NO: 18527 - DNA, 493 bp, Oryza sativa
  Clone ID: uC-osflcyp032a02a1
gccgcccttgatctggccgcggccgacgctgcagaactgggggaggagctcctgcgccgggcgggtgtacttggagttgcggaggacgccggcgacgcccgccgggccgccgtacccgccgccgtgcagctgctgccccagcacgccgacctgcccgtgcaatgccatcgggagctgctgctgcaccgacgccgccgccgccgccgcctgctgctgctgctgttgccggttgaagtagagcacgccgtcgcggacgcgcagctcctccgcctgcttcgccatctccagctgctgcagcgacggcgacagcgagagggagagcccctggccttccaccacgccggccgccgcgccgccgccgaacgctgctgcaccggcgccgccgaacgcctggaacgcttcgtggggctggtggattgccgacggcgcgccgaacggcggcggcgacgtcgacgactgtgactgctgctgctgctgctgctgcgggttcatc

SEQ ID NO: 18528 - DNA, 352 bp, Oryza sativa
  Clone ID: uC-osflcyp032a03a1
gggcaaacaaacatactgaaaaggttttggcaaacaggggtaatttaacagctttttaacagggcaaaattggggggtttttcctgggggtgggattggggaacaagaaaacccggttccccccattattttttaacgggacaaaaggggggcccaaaacttcttagggaatttaagaacattattgtttccttcgggagggggccaccacagttcgggtcctaaaagattgtttctgaaagccgaaaacaaaaaaggccatggccccaaaaacaacagagggggcatcaaacgggcccccgaattcattttaatgaaccccaggtttttttggggctgggggttccttggt

SEQ ID NO: 18529 - DNA, 372 bp, Oryza sativa
  Clone ID: uC-osflcyp032a04a1
aatgggggggaatcatttttatttcctcatcctttttattcattcctcccagagagacggatccatggaagttttcttgccctcatcaggcaagcagagcacacacacacgggggcaggggaattgctatgaacaagacgctaatcaacatccagagctaaaacaaacaaggggatcaaagcaaatcccgaaaaaaaaaacacaggggaaaggccacattttttttttgtccccaacgcctccgtgtcaccaccacgttttgcggatttttttttaccctgttctattcgctcaggcgtccacgatctcgccgtcgtcctttgacgccaggatcagcttcgggtgcgccgccgccgccgccgcctttttgat

SEQ ID NO: 18530 - DNA, 481 bp, Oryza sativa
  Clone ID: uC-osflcyp032a06a1
attgaactaagcttagatggcctgggttagacaggaaagccggggttttagatacatatgctttgttttgagcactaaaatactaactcaattacaatggggatgaacccaataacatggctctgctaaaagatatgatccggcctcttggagctgacatctgtcatggaccatttttattgaatggttagatatccgccagaacaaaatggttcacgcctctagactggagtgcacacattctcagaaaggggccctgttatttttgttctgcgcaccgccttgcttttcctttcttccatacagataatccctcagaagaacccgagtgcgcttatcggagaccttgagcctgctgtactcatgctcctcttcaagctttagcaggacatactgtatcttctgaagttccagttccaatcttcccacgttatgcgatcctttctggacctgagcggatattttcctcctactggggtac

SEQ ID NO: 18531 - DNA, 309 bp, Oryza sativa
  Clone ID: uC-osflcyp032a07a1
ataacaaagcaatttacaaggggttcaaaaactttaaggggggtaacaaacataattcggtataccaacatagctaatcaaacccactaacttaaacaaacggctgctagctgctactcccaacacatccgaccatacaaagggcttaaaatcctcaaatacaactaattcaactgcgactacaaactctcatacttcatgtggtaatatcccatgaaataaaataccccatcaggcaaccacaaatgcttcggcttgttggatattttcaaatgctcgatcaaacgggaacgcaaaaaggaaaacccc

SEQ ID NO: 18532 - DNA, 436 bp, Oryza sativa
  Clone ID: uC-osflcyp032a09a1
gggggcatcaaaaatgcaaaagcagcatcaacaaccgtactggatgcaatgcatccatttcgacgatctgtcgatttttattgaaaaccaagtttgttttcaggcatgtttaaaacatgtgatgtaggggaatacaaggggcatttgaccaaaaacacactttaagcagccaatttcctcataaatacaccctttggagcaagaccaatatcatcgatgacaatacagttttattcagcctgcttccaatcttgaattggtatttctttttccctagttcaagacagcaagagcttcaagaagggaagcaacaaaatgcatctggacctcctcatcgatcgtcaagaacaggggcacatgtacaaacagagatttgatgcccgtgttgctctgcgaaccgaagagaatgataatacacatagttgcatacaaaccg

SEQ ID NO: 18533 - DNA, 398 bp, Oryza sativa
  Clone ID: uC-osflcyp032a10a1
aaggggggccccccaaaagggctttttttaaaatttaaaaaaccccaaattttgggccaaaaacaacaggggaaaaccccgggggaaaaagggtttaaacctttttaaaaaaaaaaaaaatacacccgggggggggggaaaaaattttcccccccttttaaaaaaacccccccaaaaaaaaaaaaacccggggggggggggggaaaaaaaccccctttgggaaaaaaaattgggggccaaaaaaaaaaaaaaaattttctcgccaaaaggggggggccaaacaaaaacacactagctggggaaaaaaaaattgggggaagaggggcaaaaaaacccaaaagaggccccccaaataaaaaatgggttttttttagggggggggaccccccctttttttt

SEQ ID NO: 18534 - DNA, 530 bp, Oryza sativa
  Clone ID: uC-osflcyp032a11a1
tttttttttttttttttttttttttttggggtttttttatttttttttgggggttttttttttttttttttttttttttttttttttttttttttttttttttttttaaaaaaaaaaaaaaaccggcctaaaaaagtaaaaaaatttttttttgaaaaaaaaagggggaaaaaaaaaaccccccataaaaaaaaaaaataaaaaaaaggggccaaaattttccacttcggaaccccaaaaaaaaaccccccgggggggggcccaatcaacccgttaaaaaaaaaaaaaggcccttggatggaaattccctttcaaccccaaaaaaaaaattaaagggtttcaacccccaaaaaccggggggggggataataaaaaaaccaaccctttttattggtctcccaaaaaaaggtgggggggccccccaaaaaaaaaaaccaaaggggggggtttgaatttccaaaaaccttttttgccttggggggggggggaaaacttttattttaaccccccccaacagggggggtggttat

SEQ ID NO: 18535 - DNA, 485 bp, Oryza sativa
  Clone ID: uC-osflcyp032a12a1
agcactgtaagtactcgcggtccacaacaaccgaagggcaacaataggactcagaacatccaagtttttaaccgaatagaaataaacgagttttaaacgactaacatagtgcacattgcgagcagatattaacggtccatgcaacgagtaccatggccgtggacaaaacttaacgaacgctaagatatctcaaatgcagccagcataaccaccacttcaacgatgctcatttcttcttggcggcagccttggtcaccttggcaccggttgggtccttcttctccacgttcttgatgacgccaacagccaccgtttgcctcatgtcacgcacggcaaaacgaccaagaggagggtacttagagaaggtctccacaaccatgggcttggtgggaatcatcttaaccataccagcatcaccgttcttgaggaacttgggctccttctccagctccttgccggatcgtctgtcgatcttggtcaccagc

SEQ ID NO: 18536 - DNA, 523 bp, Oryza sativa
  unsure (1)..(523): unsure at all n locations
  Clone ID: uC-osflcyp032b02a1
cagtgatgaagagaacttcacttggaaaagagtatcaacttggtggttacatcggttacatcatagtacaagtacacaatcaacaaggcatgcagtgctccatccacaattacatcccaatacaccaccaccattcacagcctactccgatcccaaaaaagagaggtaagtcgcgtcgacgaacagtcttttcatcttcctccattggcagccattgctaacactccaacacctgaagaactcctcatttgggggtgaaggcctggaagatggtggcgtggccggggtcggcgagatgggcgaagaggttgtcgatggggccggtgccggtgtactctgcctggaaccaagctcccatgacggcgagcatggcgagccgcccgttcttgatctccttggtgcgcagctccttgatcttctccggcgagccggtgccccagccgagcgggtcaaaccacagaccaccagggtactcgacgtcggtgccggtgagcttgttgttgnggaagatggggtcggtgtt

SEQ ID NO: 18537 - DNA, 404 bp, Oryza sativa
  Clone ID: uC-osflcyp032b03a1
cccacgggggatccaagagcttcttattaataataatagcaaaaataaacgccaaaggttctcacacggaagcaactaacttagcccacaaaagacagacttgaacacacccaagcccttccttttccttgtctaaaacgaagcagcaactaaattaaatcgacctaaaattccgaggcccccaatggcggtgatcgacgacaaaaccgaggagctctagttggctgccttgctgatgagctcctgcccaacggctacggggggcaacgccgggatggcacccttcttggtggtgcagatggctccgcacgccttcaaaaacttgagcgcctccctcagtttctcctcgttggggaagatggaatcgtccttggcgacgttgacgaggagggagcctacaaggc

SEQ ID NO: 18538 - DNA, 459 bp, Oryza sativa
  Clone ID: uC-osflcyp032b04a1
attgggatcgatgatcacgataaagcaagcaaaaatatttatttccgagactggtgtataggtctctcttgagcacaacaatgccaagggtttgcaaaggggctagtccatcaacaaaacaaacatgaaagtaagcatcagcttaaaaattcaccgagctgacggttttgcaggacttgggctacacgtacagaacttcagacaatgagcgggcttattctcgactgggtagggatagtactctttgccattggccactctgggaggggtgcccccaacgtccagcgcaacaaatggaaaagccaggcaagaaccaggtatgagcccaaaagggatgctccctcctttggagcccaatatgggggcgcccgcgacaaaggcgcccacggcccccttgacctaatcgttcttcttgcgctgggtcaacaccagctgttcgaccctatggagaggcccccc

SEQ ID NO: 18539 - DNA, 400 bp, Oryza sativa
  Clone ID: uC-osflcyp032b05a1
caagagttaaatagaactaagtggaatacttgtatttagagaacatatttgttaggaagaaaatacttcatggctcatgatagagccgacaagaaagttggagtgacaatctcagaactacacatgatagtgatctgatctatgcctattgttgctgcttctcaaaaataccgatgctcaagtaaaccaccaaaaaagaacttacttgagtctatgaatggtgctaatcagcagtaaaggtcaccaaaaatcttacttgagcctatgattgctactaatctgcggtgaaaatcaccaaaatgttgctgctggcctgctgtttctcaagccacaaaaaagggaacttgtaacatttgctttgctccttcttaggatgggcgttgctgcctatgggaacttc

SEQ ID NO: 18540 - DNA, 456 bp, Oryza sativa
  Clone ID: uC-osflcyp032b06a1
gggaaattaaaacctataatatgggacgtataattaattcgtgcattaagcacattaaattttgcgagcactcagagattgggtgacgcgacccacacgtacgtacctggtctgcactgcacagtgcacatcatacacacacgattcatcagtacacaaattaccaacttaacgtaacaacacacgggaacacatgtactcttaccatccaagaaaaaatcaacttctaactacgtctataaattcatagagaagttaattttttttagacaggaggagtacttaattaacacacagtaaggaggcacgttatattaagccgccggagtacacacatcgcggcggcgtgagcaacggtataacttaacgacggcatggtggctcgccggagttgattaacacctatggcacgggtggaacgacggacggcatcggcggctgtgggtcttcctgcac

SEQ ID NO: 18541 - DNA, 364 bp, Oryza sativa
  Clone ID: uC-osflcyp032b07a1
ttttgttttttctaattattcattaattgggggttaacagtatcattggggagttccatgcacaccaccctgtttacaaaacccagcacaaaacctgcacagagggatacactaccacttccaatgtcaccttcaacataaacagactacttccatccccacgaagaaaggcgaagtcggacctacaaacaggccacggacctacctccattgccaggcatagataacactacaactattgtaaaacaccccattcgggggtgaccgacctgaataagttgggggggccgggatctcatagacacccaaaggggcaccgcctgaccggcggggtatgaaactaccacctgcaaaccaagaacgg

SEQ ID NO: 18542 - DNA, 190 bp, Oryza sativa
  Clone ID: uC-osflcyp032b08a1
attatcaacttgtttggggcatttttttctttatttttcaagtacacaatcaacaaggcatgcagtgctccatccacaattacattccatttcaccaccaccatttacaggcaaccccgaaccccaataatagaggtaggtcaaaccgacgaacagcctaaaaataatcccccaaaaacacccaggcccc

SEQ ID NO: 18543 - DNA, 344 bp, Oryza sativa
  Clone ID: uC-osflcyp032b10a1
attattttttccaacgacaatatctatggggctcatcaaaacacaggggggattacatagaatattgaaatgaaatacacccaaaaccacccacatagcggaaaacaaaataagacaactaagaggaacacgagctctggcaacaacaaaggtcgggcaccacaccagggaggggaacaccacacctaccataccaaaaaaaacctgatcccgcacaaaaaaaggccagaaaaccaggacaaaaaaccaagcaaatcaaccccaagccctaagtaataaacccccaaaaaaaccctaacgattactcaccaaacaaaaccatgtgaatgtgacaaaagcgcaaa

SEQ ID NO: 18544 - DNA, 403 bp, Oryza sativa
  Clone ID: uC-osflcyp032b12a1
cttggggcccaaaacccccttgggggtttctatttttttttttttttttttttttttttttttttttcctttctttttttcccccatctctctccccccccatctaagcaaaccacaactcaccacccaacaatcacccatcccccacccccccccacacccacccaaaccaacccctaacccacccccccaaccaacacacacccccaactaacccacccctggacccaacccacaccaccccccccccaaaaggaacccccccccccacaccgggccgacccccccaaaaacaaaaaaccgttgcccccctctaacaaaccccccccctttaattacccacaaaacccgcccccaccctcccccctccccccccaccttttaacccccccccccaaaattt

SEQ ID NO: 18545 - DNA, 398 bp, Oryza sativa
  Clone ID: uC-osflcyp032c01a1
agcgcccgcccttcctttttttttttttttttaatcaacattcacgggggcacaacaaaactatgggggggttctcaaataaaaacaggggttatgtgatactacatccaaacccgtacactgaatgactacccatgccgacaggacacaatatggttggaaaaaacacatccgaacacacaaaaatacgtaacaccaaccccatggacctacaccgaaccccttttctggatgcaaccatggagaaggaaacaacaacaaaccgctttaaacctagaagggaggaccccagaacctttactgatggtcgacaacaaaaccgacccaggcgacaggctgtttatggaactgcaatgctccatgagaattgaaagaaaaccccccctacgccaaaggcg

SEQ ID NO: 18546 - DNA, 423 bp, Oryza sativa
  unsure (1)..(423): unsure at all n locations
  Clone ID: uC-osflcyp032c02a1
gggggttctttaaaaccttttggggttttttaatttttttttttttttttttttatatttttccatttctgcccctgccccttggaaaaaaaaaaattccctgaccgatttttttgtcccccaacccccccctttcccccttttctaaataacccggggggaaaaaaaaaaaaagggcccaaatttaaccccttttcaaaaaattttccccaaaaatttaaagggaaaaaaattgggggggggggaaaaaatcccaaaaaaaaaaaaaataaacccccacccgggttgcccccccggaaaaaattgcaccacccccaaaaaccggttggcttccaaaaaggcttccaaccccgggggggacccccccccctgagggtgtgtnnaaaccccccccccaccaaacatttttggcccccccaaaaa

SEQ ID NO: 18547 - DNA, 531 bp, Oryza sativa
  Clone ID: uC-osflcyp032c03a1
ggaagcgcggcaataggacattgcattgaattctgggcgataaacaccaggaaccggcgtttatttgaggcaagcactgcccaaaatctcgcaaaagtactgaaaccttagacatagtacacatccatggcaaacatggatgccaaatgacaactacagaaaattatcaaattcgaatgcagctgacggcttctcctgctgaagatgcatattttcccctccattacttggatgtgctctctccatcgacagccaatgggacggcgctggccaggctgcggtatttcagagcatagaacatctcaatgtaacggcgagtctcgcgcctctcaaggttgcttacgtacttccagaatccatatacaccagtcaaggtcatcagcctctcagagtacagcttccaggtgtacttctcgtaaatcctctgcagacctccctgtgaaatattgtcccagtaggttgaatcctgcttgcacttctcaagaagttgaccaagatatcagcagccttgtcactgtggtaaggatcaat

SEQ ID NO: 18548 - DNA, 497 bp, Oryza sativa
  unsure (1)..(497): unsure at all n locations
  Clone ID: uC-osflcyp032c04a1
aaaatgaaatacaaatatgcattagcatatatttgcacaattacataggaaattcggctaattacatataaaattggagcatcatcccaattcaaaatccaataagacacatctaattggcgcgaatcttcccaacgtacgcctgcaggttcttctccgacgagccgccgtcggccaccgccgcccgcgccttctctctccacgccgccgcgctggcgcgcaccgcctccgacgtggcggcgtcgatgcaccgcctcagctcgccggcctccagcacgccgtcgacctcgctcacgggggccctgacgccggcgccgagccgctcggcgacgagccacgcgttggtgccctggtccgtccactgcggcacgcacaccgccggcacgccgttcgccaccgccttcagcgttgagttccacccgcagtgcgtcacgaagcaccccaccgccgggtgcccgagcaccctcacctggtngnaccactccaccaccacgccg

SEQ ID NO: 18549 - DNA, 526 bp, Oryza sativa
  Clone ID: uC-osflcyp032c06a1
agcaataccaacttggaaaccaccagaggcaccaaaattagggatatatagacaggcgaacatgaagcgagtctttagtaccagctacgccattgtagggaccatatgaagccgggaaaatccagctgaagttaaacgaccgacaacatgtataacaaacaacaaatggaatcagcttttatcgcttgttggtgaggaatcaccgtccatcttgtcatgttgaaatttcacgacaatgcatgtgatattgtcaccactccctcgggaaaatgcagtctctgtcagcttccgagctgctgcctcaggttcctcctcaatcttcacgagtgaaacagcatcctcattcggaaccacatcccacagcccatcactagctaaaatcagaaactccaattcatcatctatttcttgttcctgaatctcaggatctgcaacaacaaattgcttcaacaagcggttgccaaatgcccgagacattgcaagtacaccacctaccctccaagttccagcccacataacaacccca

SEQ ID NO: 18550 - DNA, 364 bp, Oryza sativa
  unsure (1)..(364): unsure at all n locations
  Clone ID: uC-osflcyp032c07a1
canggggggacattataatctattggggggtttttaaaaaaaaaagggaaatatgtattgatattcccatacccgcacatggaactcccagccaagcgactaccctgagagttttttggaccacccatacctatcaattcatattagccagggtttgccctactgaccgccaatcaaatttttttttgggtgaaaccatggagatggagacaacaacaaaccccgctaaggctaaagggggggagaccaccacattcacggggggcgaccacaaaaaccggtccacgcgacaccccctgtttgcatgggcaatggccgggtaaagcgagaggtataaatccatcctgctcaggacgctggggag

SEQ ID NO: 18551 - DNA, 404 bp, Oryza sativa
  Clone ID: uC-osflcyp032c08a1
tataattttttttttaatcgcccaacgggggttttataaaaattcgggggggtaacaacattaaccggtttttattttaggcaagcactgtcctaaattttttttaagaactgaaaccttaaacttaatccacatcacatggtatacatgcatccctaatgacccctttttttttttatttgcggaggaaaacaaagaggcgggcacgagtaaacctctttcaaaaaatttttctctaaaaatttaaaggggagaaactttcgggggggggaaaaatttttaaaaaaaaaaaaaattgctcctacctgggttggctccccgaacaaatattcttcaacctctcaaggctgtttccttccaaacagaatccatacaccccaagggcggccccccccccgggattg

SEQ ID NO: 18552 - DNA, 350 bp, Oryza sativa
  Clone ID: uC-osflcyp032c09a1
attattgggggtttactggctctttgggcggtaccatgccaacccggctgattacaaatgccaacacatcacatgttttcagggaaatcaatggaacatgatcgacgctcgcgacagccgggaaacaggatcactaccagaaactaggagagccttgaccaccaccaaagccaccggcatattaaacggctgtacataaccatcgcctccatagcccccaccggaaccaccataatcgacggccactggacaccgactagccaggctgaaggtattggacaccaaaacaccaactagatgaacggcgaatcctcgcgccaccacctgcgaacgaagaacgggccgagtat

SEQ ID NO: 18553 - DNA, 297 bp, Oryza sativa
  Clone ID: uC-osflcyp032c10a1
tatttccaacgcaactagacatctcacgggggtatataaaaaacatatggggattcaacaccatactcatacacccttaactgacataagatggcataaaaatcttcccaatcaaagtaatagcacaccaaataagctgtgccactaattgattacacaagacccttaaagatattaaggagttccaaaatcaaccaccaacaccagaatactaaaattaaagctactccaggaagctattaggccttcaatattagctttgctcctcggccccagcctccgctgccgtggcctccc

SEQ ID NO: 18554 - DNA, 493 bp, Oryza sativa
  Clone ID: uC-osflcyp032c12a1
gggaattatttaaatttttaaatttaaatataaaaataaaaattgtaaaaaaaaaaaaaaaagtgttaaaaaaaaaaaaataaaaaaaaatttttttttgcccggcccttaaaaaaaaaaaaaaaaaaagaggggaaaaaaaaaaaaaaaaaaaaaaaaaaaaaaaaaaaaagggggggggaaaaaaaaaaaaaaaggggggggagtgtaaaaaaaaaaaaaaaaaaatttttttttttggaaggaaaaaaaaaaaaaaaaaaaaaaaaggaaaaaaacccctcgggggaaagaaaaataaaaaaaacataatccaaaaaaatattgggggggggggaaaagatatcccacttgtttacagtccccaagggaaaaaaggagatgaaaaaaaaaaagggtgcaaaaccgtttgttcttctcgccctccccaggaaaaaaaaaaaaaaaagccccaagaatttttgggggggggaaaaaaaacaacccccacaaa

SEQ ID NO: 18555 - DNA, 404 bp, Oryza sativa
  Clone ID: uC-osflcyp032d02a1
gaaaaaaattttttttttgctggggaattttgatttctggcgctggatcacaagtttgattacaagacaggcaaaaatacaaataataatattattattattaactaattaattgatagtgccaaatggcaaatgttactcctatggcactgagtagcatcagctagccaaggacctgcgccttgaaggcgtacacgtgcgccgggtcgatggacaccgagagctgcacctcgccgtcgcgccggccgccgacgagcaccatctcgccgtcgtggttcatcgacacgagctcgacgcgcgccggcctcccaacccgaagtcggcggtgccgtacgccccaaaccgcgggctcgccgccacgttcgccatgcgggagagggggatctgcatcacccgcgcgatcg

SEQ ID NO: 18556 - DNA, 425 bp, Oryza sativa
  Clone ID: uC-osflcyp032d03a1
gggggttagccggcaacaacagcggaagattgaatcatacgtaagtgcttgctgatacaatatcaacatggagggtacattgccggttccatttgaacaaacataaaaacaccgaaaccccatatggccattatgccgatcctagcctagcttggcgaggacatcgccaagagcagatttggtcaacgtgtagtacttctccgcctcttcggggctcttgatcttggctgcatggtcaagcccgtcaatggtggcgaaaagcttgccggtgaggtccttgaggcccttcttctcggccttgggcttggagttgatgacggttttgaggtcctaccgcaagtaggaggccctgaggcggaggtcgtccctgacgaacggccactggttcttctcgatgagcggcttgaggttgatgatgtcctggg

SEQ ID NO: 18557 - DNA, 460 bp, Oryza sativa
  Clone ID: uC-osflcyp032d04a1
caacaaccatggaatgaattgaaacagacagggcacacgcttagtccatgaggacagaacgttgccgccttttattcatgtagagacagacagacacggcaaccagcaaagcaagcacacatttttttgtccgatcgacatacgttccaaacccgtcacatattttgctgtcgatcgatcgatggatggatcgatctagaggttgaacatgaccttgatggcgtcgcggccacgggcgctgacctcgaacgcctcctccacgtcctcctgcgagaacccgaatcggtgggtgatgagcggcttcacgtcgatcttgccgctgcggaggaactcgatgcagagcggccacgtgtccttgtaccggaatatccccaccacgtccacctacctgatcgccgccgacgtcagcggcaccgtcatctcgttgtgccccatcccgacgaggcacaccttcccgccg

SEQ ID NO: 18558 - DNA, 386 bp, Oryza sativa
  Clone ID: uC-osflcyp032d05a1
gggtgttagcacccactggatcaggctttattatctttttcccaagacacaggaggggatattttcaggattccagatacagtttcacaacttgggtcaccagtatacatatcaccgtatcacattttattcacgactacgggtgggcgacacattacaggtcatgtttgactggccaacatagcaccaccactggattcctcctggccgatctacatgtttggtttcaggttgagacgtgaagccagcttttgcccaagggacgcattacactgggaccagtaggagatccagatgccacggagttcatgtgtaatacgaggatctgggagagcatcaacccaccggtggagaaaacgatcttgcctggcagggtcaaatgaccg

SEQ ID NO: 18559 - DNA, 381 bp, Oryza sativa
  Clone ID: uC-osflcyp032d06a1
aaaaaaaaaaaggcctttttaggttaaccccaggtggggccatggttttatttaaacatacctatttggggtttttttacaaacccccttttaagggggtttttatttggggggggcacacaaaattcatttgttcggtcaagcttaattatgcatggtgggccttttgccatttgggggtagctgtttaaaagggggggttcccttctatgccaggaatagaaaaacttggaacctgcccagccggggcaggggcattagcatagttgccactggggaagggagggccattgaaggtggggccagacacagggacacttgggctggggcccatgttagagttttgcatgccgttaatgaccccctggtggatttttcctt

SEQ ID NO: 18560 - DNA, 529 bp, Oryza sativa
  Clone ID: uC-osflcyp032d07a1
cacattaatccttgctagatggggtttttccttaatgaaacggggaagactgtacaaataaacaaggaacattaacaggccttggcaggaagcagtcaacaaatatggctgccaaggacgttggaccgtccaatgttccagagatgtatttaacaaaacaaatggtcttttacagtatgtacaaagcaacggaaaaggggcagtgttgcggcaggcagcagcaacttctcgacaacaccaagctccccttaacgtggatccgtggattagttaatggcccggaaggatcttgatctcaattcctgagtaaaacttctcacaaatggatatcgagcacaagcttcacctttctaatatgtaccaaatagtagattatcatctcagcaccaatttattccacgaaagcctaatggaaatccaccattttctaggtaatatcacgggcactgttttccattctctatgtaaaagcagagtatattattaggttcaacctttttcgctgaggcaaaaacagccccaagcatgt

SEQ ID NO: 18561 - DNA, 377 bp, Oryza sativa
  Clone ID: uC-osflcyp032d08a1
agaaaaaaatattactttgctggtgaactttgatttctggcactggatcacaagtttgattacaagacaggcaaaaatacaaataataatggtgggatcattgactgattcattgatagtgccaaatggcaaatgttactcctatgggactgagtagcatcagctagccaaggacctgcgccttgaaggcgtacacgtgcgccggaacgatggacacttagagctgtatctcggcgtcttgacggtcgccgacgagcaccatctcgccgtggtggttaatagacacgagctcgacgcgcgccggcctttctactccgaattgggctgggccgtacgccccaaaccgagggctcgacggcaagttcgacatgctgaag

SEQ ID NO: 18562 - DNA, 462 bp, Oryza sativa
  Clone ID: uC-osflcyp032d10a1
atcagaagtattcatattaggttgcattgcaaataaactgcaaagagatgaacatttagacgcagcttttgttaaaatataagagctagaggggaaggaagcagagaatcgagagtatacagcagaaaggaacacatgtatatccgcacgaatcttgatgcaatccgcaccgccacgtgggccacgcggattggaccgagaccctactactgtcataggcacggccgcataggcgccacccagtgattgggacgaattctagtaggtgtagcccttgacgtacaagctctcggacggtccgggcgtcgccggcggcgccgccgtacttgccgagcgtggcctcggagttggccttgcaccgggcgaggaaggcagcctgagcggcggcgacgttctccttcttgccgccccacttcttgatggtgctctgctgcagggcacggccgaaggagaaggtgagcg

SEQ ID NO: 18563 - DNA, 474 bp, Oryza sativa
  unsure (1)..(474): unsure at all n locations
  Clone ID: uC-osflcyp032d11a1
caacaagcatggatcttactgaaaggttaattacatagtagagcaccacacatactcttaacaatatgactaaaatgcttccaatttccaatagtcgagaggacagaggaaaagcagacaactttttcaatggagatcccaaacaaaaagatgggaaaaagaacgggaaaaaagggactttttttttccaaatggcaccacatcaagggaggaaccaaataatatcccttttcttatgaatgacacaaatattctttggttaagattatgttctttccttcttttttccttctcctctcttcttgttgggcgtttcttggtccgagagaccgttcttgcgtcactgcgccgcgacggtgcgggaggacgaggactgacgngccgccgccggcgcggcggcggcggtgggagaggacaacgggtggccgtgcgagctgctgcggtggagccggcacttgaaggagccggcgtgcg

SEQ ID NO: 18564 - DNA, 536 bp, Oryza sativa
  Clone ID: uC-osflcyp032d12a1
agcaaacaagcacgactaactcattacatttatataataccatgatgatacacgaaggatgcatagaaccggacggaatttctcctgtcctcaaagagatgaataaggcggtaggtgccccttctcccgtaggcatatcagtgtgttgtacaaactttcttttatgggggtgaatgtgaggcccaagtctctcagcctttgattagagaacttgaaaggttggaccatctgcttgctgtcttcacacttgttacaggtgattggatactgtggaaagagttctctgatcatctgaataagctcggaccggtgaagcacactagcaatgcagagataacgcccatgcgccttggggtcttcatacaccagtgcatgtgcacgggccacatcgcgcgcatcaacatacccagcgacagcattccggtgggttttcctgcttccgttcaagaaatcggcgatatgtctgatgctagggtttatggttgattgcaacatctggcctagtgtcatggcaggaagcaccaccactagctgaa

SEQ ID NO: 18565 - DNA, 425 bp, Oryza sativa
  Clone ID: uC-osflcyp032e01a1
gcattagaaaaagaggatgatgggggtagtagtatttcttgagggagagtcgagcagcatggtacagttacagaacgtcgaaaaccaaaccaaaccaaacacgacaaccttgcttacagactcgatatatacagatagataatccaagccacgcattgagttaaagatcttctgttatttttgcttaaagacactagaacaggatgtgcatcaatagatgcccattccaggatggaacaacaacagaagaccggaggaagaaagcactgtgtatatatcctaaggtgaaaagcagcacaggagaacagagtacacacatggctcttcattcatgagatggatccaatagatgcagatgcagcgtcagaaatgcagtgatgtgtgctagtgagttgaactggtggtaccatggccgctgctgattg

SEQ ID NO: 18566 - DNA, 262 bp, Oryza sativa
  Clone ID: uC-osflcyp032e02a1
ttatttttggagcgggatcacatcctcgggggccaatacattatcattgggggtaagtacttatgagaccatcgaagtgcgagatatatcgtgtggcaatatggtggtattcctcacgcatatggatcatcacatgtgaatctcgatatggtccgcgggcctgggcacgacccaggattcgccatcgacaaaagcgtaatagctataaccgacggaccagtggtatcagctatcactatggcccatcccaactagaactagt

SEQ ID NO: 18567 - DNA, 390 bp, Oryza sativa
  Clone ID: uC-osflcyp032e03a1
gatcagaattttcaaggggcaggaagaggcacgccaggccttgcaaaaggattagggatccatccccatcctcaaccacattccagttcacaaatgcatacccttctctttatgtacatcaccacacaaaggagagaggagagctactagtacaatactgggagtttaccaggtaaccaacacgaaggaaaaaaaaaataatagccaccctatcttaccccatttccccaactcttataccatccttctaccaaatacagattgtttttcccttttacccccaccacacccaaagtaatttacaccgataaaatcccccttataccacacaaactatacccccgtgccgtccttccgccacaaaaccaagaattcaactgacactactac

SEQ ID NO: 18568 - DNA, 549 bp, Oryza sativa
  Clone ID: uC-osflcyp032e04a1
agactggtcaccggggggcgaaaggcccacctgaatatattactgggaacgatcttacacaggacaggcttcacctgcgtaaatgcaggagccctggaggataataagaaagaatacacggggatatatagagaagagaatacagacgcatcacaacctccccaccacgcacacagaggcacagagataaactgagaagctttgacgtttgccacctgcaaaaacgcccgatcaaattccaaatcaaactaatgctagaaccctaattgaacatcatccacatcgcatgcagacttgaaacaccaagaatcgaaggtgccggagggcctcattgccacgcgcaggccggctcagttctctggcagtcgaaagactgtggatatcgaagaccacccgtatcaagccgtcagaaatacgacttagtcatgttgctgcttgaatcaatgtcccccaacgtctattgggggaaggaagccccaaagagggagggccactaaaggttgaggccataggccacccgcatcaagccgtcttcaatcgggctttaac

SEQ ID NO: 18569 - DNA, 587 bp, Oryza sativa
  unsure (1)..(587): unsure at all n locations
  Clone ID: uC-osflcyp032e06a1
gttaaagatttatgaactttagcaggtctgttagaagcttgctggtaccattcaggtaacattgacaaaaattgcaagtgctcccatgaagaaaatgcttttgcagcagaggaagaaaacagaaaattctaggcatgggaaaccccagtggcagaatgtacatcatactcattatttgaaatgcttccgcttaaatgctcaaaacattttaatgaaagtaagaaacagtggtccctcagttgacaacatcaaggaccagcttgcgtgacttcaggacggaccacctcatgcgacggtagtatgcggcttggagaagtgcaagtgacagtaggaagatccatttcactcccatcagtttcctctcttccatctcaggttcagctgcccatgacaagaacgaaacgacatccttgcccatctgggcttcagtggcaggagtaccatcttcatattcaacagctccatctataagcatcttgggcatagctatggcaccaccagngaagtagggattgtaatgcaaaccctcacggatctgaacactcgcaggtggatcacggtaaccaagtagaagagcaaacacatag

SEQ ID NO: 18570 - DNA, 482 bp, Oryza sativa
  Clone ID: uC-osflcyp032e08a1
gtgaaagaattgaattgggatggccgtttctggataaaagggggtaggtgcagctatctaatcataaacccacgtaaaaacatcggcttaaaaacaaaccttttgctcaggccgggtgattcaagctcaaaaacacaagctgtttgttacaagaaggcgcaacgagcaaccgagttgcaaacctgaccctaccccacgaccggcgccaccaggtgcacgggctaacactaaactgcctccctgcacgagtgacggctccatggtgactgatgagcagtatcatgaacaatgtcgcctccagcaaggggggacgtactaccaaccgtctgcgagtcttcggccatcttatcatcttgtcagaagctcgatgtcggctccaacttcagcgatcttcgagtcctttgaagctcttgcggtgttcgcaacactcttaacatcaagatcaagagcaatggacttcacaggccattcacatgagagag

SEQ ID NO: 18571 - DNA, 332 bp, Oryza sativa
  Clone ID: uC-osflcyp032e09a1
atggggggatattgaaaaaacatgggggggtttattaatcttaggagggaacacaattatcttagccgggatctacttaatacactatcccaagttaccaaaacctaaaacggtataatggggggcccttggtcaaactaaaaacaccttggtttttcaagggcaccctccatcagggtattcaacggtgtcaaaacaggagttatacgcccatacccagttgttaaccgatcctgttaccaaatccggatggaaatagcgggggcccttgaccaaaacaattgtctggacaaagaagacaaaggtggctgactacgcgaaggggaccttct

SEQ ID NO: 18572 - DNA, 405 bp, Oryza sativa
  Clone ID: uC-osflcyp032e10a1
aaattataaaaaaaaaagggacctgaaattccctccaaaacagaggccctttcataaaaaaaaaaactataacagccctaagggggaaaagccttctctagcgtaacccggaaggatagcccgacaaaaataaagaaaaaacgtgggatcttgccaaaatgggatcaaatggagttacaattatgctattaaaggaatttacccacccatatttgatgaaggaaaataaagttagttgctgtaaaaccccttggtggaaggggccctgcaaaacttattagaaaggctattccctttctccagcttggaagtttaaggattttggtcaccaaaaagctggccacaaaaaaactcacccagagcctgatctatattttctggggagatcctgaactacctatttgg

SEQ ID NO: 18573 - DNA, 432 bp, Oryza sativa
  Clone ID: uC-osflcyp032e11a1
ggggggcccacatatatgaaagttgaaacagattccgtaaaagataattcagatgacaagatgagtgtatgcaaaactgaagctttgatatcactaagtaggaattattgcattttcatgtccagatcaataaccaacaaataaattgataatgagttgccattgtcagaagtgcatatcataaatgatatgcggcacaggaagccagaatgcatagacttgaacatcagatggaaagtaattcaaggtagatgtaaccaaatcagcagttgagataagcatgtcagttccatgtttttggaagattacaaaaattgttatctcggtgttatgacatcgacatctttcctgttcaaaagcacatataatttgacctcttaaagcatatgttacttcagaataggctgtttgagctgatcctttcagtcatgc

SEQ ID NO: 18574 - DNA, 344 bp, Oryza sativa
  Clone ID: uC-osflcyp032e12a1
gggcccggaaaaaaccctgggaccccccttgggggacccccctaaaccctgggaaacacattggggtttaattttgggaaaaaaaaaaaagggtaaaccccttttaacaaattgggcctaaacaaaggggaaaagggcccaagggggcggcaaagcccccaaaaagggaaacaagttgggttttcggggcttggcgaaggaaccaaaaccgggggggccaccccccccgggaaaaaaccatggatttgggattggcaaaagttcacccctccccggggggttttttcctttggagaaaaaaaaaaaaggggggcccccttttttggagaaaccaacccggggcc

SEQ ID NO: 18575 - DNA, 492 bp, Oryza sativa
  Clone ID: uC-osflcyp032f02a1
aaatctcgtcaagggggtcaatatattcagcacaggggtgcaaagtgatacatcgatccaaaatataggtaaacaagtagtagatctgtagctacggattgcagaatgatgaattagagaacaaatgtgatatagatccaacgagatcagatccagatcaattacagagtaacgcgaaacactcgagccaaagaagcctaccagatctcgtcgcccgccgccgcctcaaaccctagatccgggcgccccgaggaaggacaggagaccctgggccgcgctgttgccgctggcggcgtcagcgtcgtcgaggaagaggtcctcgggcatgcggcacgcgccgtggacggcgacgatggccccgccgacgagcagcccggagatgatgagcgacgcgacggaggtgaagaagaaggccacgaacgacgcgacgacgaggccgagcagcgtctcgcggtcggagaaggtgcgaccgaagaggactacgggctggtc

SEQ ID NO: 18576 - DNA, 465 bp, Oryza sativa
  Clone ID: uC-osflcyp032f03a1
acaccgcatgcagcacgcgcgcaagcgcggagtcccctagagcgcgcgcccccttttttttttttttttttttttttttttttttttttgggggttttataactttttttgggggtttttttttttttaagaaaactttccaaccggaaatgaaactttcggccaaaaatgaaggaagtcaccaccctgaaaagaagggcccaccctcacacaggggggggcccaatcgcgaacaggaaaaaaaccaacgcccggtttttaaaccccaccaaaaaaaattgggagtgatatggggacccggaaacttggtcccgccccccaaattcaagggccctcccgggaggccttcccaataagaaaatgggggccaaaacaaaaacttggggaaaccgtgggaaaaaccgttttctttgtgaaaagggaacccccccccaaagcggaacaacatacgaggcctccccaaaa

SEQ ID NO: 18577 - DNA, 563 bp, Oryza sativa
  Clone ID: uC-osflcyp032f04a1
ggcagccactgtttttgccactgcgactagcgttggtggtgcggaaggtggtttggatgaggaagatgatgggttcggatgcgatattgggactattggtaacttcaagaaggctaagggaaccataaatatctcagcaacatacgagaccaggcaccatgactttgagacttcagttgttgcacgtggggacctttggaggttggagtcgtcgcgtggtggttcaaattctggcgatgaaaatgctccgcttttccttgttcagctgggacctttattatttgttcgtgactctacacttcttttgcctattcatctgtcaaagcagcaccttctttggtatggctatgatcgcaagaacaaaatgcactccttatgtccagctatctggtcaaaacatagaagatggatggtgatgtcaatgatgtgcctcaatcctgtaacctgttctttcatggatgtgcagttcccaaatggacagctaacatacgttgctggagaagggataacagcaagtggatttttcccattctttggcggtttgcttcaagctcatggaaaat

SEQ ID NO: 18578 - DNA, 507 bp, Oryza sativa
  Clone ID: uC-osflcyp032f05a1
aattaactgttctttcaaagacatggagtacgtatttgacagtagtatatatgacacagtaatgcatgcatatatgacaccaaaatgtgatatggatatgattaagcaggtgcagcaaaacgtacattaattaaacaacaacaattaaccctcgggcacgcctgtgttttgttatctcgctcaacatatacgtacgtaatactttgcttgcatagcatagggacgacgacattatattcttaattgataaactcaagaacgcatggagatggatcgagagatttataaatatggagcttgcttgattgattagatgaggtcgtcctccttgtgggtctcgatgacgacgtcggacttggggtaggcgtggcaggtgaggacccagccggcggcaacctggtcgtcgtcgaggaagctctggtcggactggtcgatctcgccggagaccaccttgccggcgcaggaggagcaggagcccgcgcggcaggagtaaggcaggtcgatccc

SEQ ID NO: 18579 - DNA, 592 bp, Oryza sativa
  Clone ID: uC-osflcyp032f06a1
acgtaataccatccattttttttgttgtcgacgaatttatcaggtatgctctagatacatatcttgtgtgtatatagccggagctttgttttcacatatcctcacccaacgataattgtagtactcttacaataaaaccggtcggagagggagggaagagattattacatatgtgttaagagcagaggccattgagatggtacataaccaaattgtaaaataaaaatatatagcatattatatattgatatatcatcaacatagcccaaaacaaagctgcatactattattataggcagcaatccaccagcgcgatgcttgatcttagcttagttgccaccagactcctcgcaacctgggggcttgtaggcgatgaagctaatcaactgcacctgcctgacgttgtcgaagccgatgatacggacaaaggcatcggggtaggccttcttggcctcctcgagctccttgagcacctgggtggcatcggtgcagccgaacatgggcagcttccacatggtccaatacctgccatcgtagtatccgggagacctgtggttctcacggtagacgaacccaaccttgctgaactcga

SEQ ID NO: 18580 - DNA, 454 bp, Oryza sativa
  Clone ID: uC-osflcyp032f07a1
gacctaaatattcaaaggggtatattatttatctacgggttataaggggaacttgctctccctatctttctcaaacccacatagctatgtacaagttatctaatacagctactgggcttgcttgcagctatgttaagttatacaccctgacactccatgtcccatacctactttacaatcctctaatgtacaaaatatgacctgcatcacgctatgtctttatagcagcagaaggcatcataaaaatttccaaggcgttgttcaagtcaagatccctcttggaaggtcacctaccgtgttagggcagccgggttcccctgcatgaatggcaagctgctgatcgctgtgtgagttgatgcctttgcctcatcctttgactcaaaaacctttgccagcttgcatcctctgccatgatctgctcccaccttgccactcttgatcccaataagcgacc

SEQ ID NO: 18581 - DNA, 372 bp, Oryza sativa
  unsure (1)..(372): unsure at all n locations
  Clone ID: uC-osflcyp032f08a1
gcgcggcgccctttntttttttttttttttttttaaatctcgtcaagggggtcaatatattcagcacagcggttcaaagtgatacattgatccaaaatatagggaaacaagtagttgatctgaaactacggggggcagaatgatgaattagagaactaatgtgatataaatccaacgagatcagatccagatcaattaccgagtaacgcgaaacactctagccaaagaagcctaccagatctggtcgcccgtcgacgcctaaaaccctagatccgggcgccccgaggaaggacaggagaccctgggccgcgctgttgccgctggcggcgtcagcgtcgtcgaggaagaggtcctcgggcatgcggcacgcgc

SEQ ID NO: 18582 - DNA, 92 bp, Oryza sativa
  Clone ID: uC-osflcyp032f10a1
gtcagtttatggatgctatcttatgtaaaaaaaaaaggaaaaaaaaaaaaaaaaaaagaaaaaaaaaggggcggccgttcgcgatctaaaac

SEQ ID NO: 18583 - DNA, 599 bp, Oryza sativa
  unsure (1)..(599): unsure at all n locations
  Clone ID: uC-osflcyp032f11a1
gaaggagctaagctaagctaggggtacactactggagtacatgagaaattctcgatcatcatcagtcacagagcctcacaagggctcacatctcacaaaggaaatgttgctgacaggaattaagttaacacacacacacacactgcacgcagagctaaccaagtcatcaatcaccacaggtgttgttggtgttcaactctctccccccacctctaaccaaacgaccggcgcagcaaagccgtggccctagcgacggctgagctgcgccgaaaccgttttccttacagcagcacaacataatgttctttttttttctttttttggacaggctaagaggcggcgaaggccgagttctgcagacgccttggttctcttgcactgtacacctcgaccttcgccacggaaaagcacaaggtatcctcagcagcagatgttacccagtcaagagttttcacctcctctgcctttttgactcagccttaggctcatacntttgtgaacctgcatatgcatgtgaaggtctctttgcaccgttttccttgacacaatctgagcacacaaagtgatctagttttttggcctgctcaatagtcatgctc

SEQ ID NO: 18584 - DNA, 473 bp, Oryza sativa
  Clone ID: uC-osflcyp032f12a1
ggttagtcaacagatgcaaacttcattagatttttaggaacctactgttgatttcggaaggagatcccacccacaagttaaaattccacatttctcacatagttccctaacagtttcatgttacacattctgcaaaacaaaattacccatccttctgggtttggcagatctggatggtgcaagtcactactttgtcttggtgaaatggggagcaagcagcttcgaaacagtaaagccattgaatgattcaacttgcaatagatccttcagcttctcgtcacatattattttcctccggtcagaaggatcctgtaatttattctcttttatatagtcccacattcttttcacaacatcagatcgcgaaagcatactctcaccagtgccaatgaatttcactaaatcatccgaaagttgaaggggcacaagaaaaccagatccagacccagaagaaccacctttttgcttcttcc

SEQ ID NO: 18585 - DNA, 427 bp, Oryza sativa
  Clone ID: uC-osflcyp032g01a1
aaaacaagggggagacaacatgtagtgcggttatataacaataacaaaacaaggggcatcaccatccgttcgaccatttgagtgaaggtgatggtctgattactgagtgcacgctctacaattgaaggtagacaattcttcttgaggcctcttatttgccagatcacatgggcataaccccaaatggcacgaacgcaactttattacactcttccatggcgaagtaattaggtaaagtgggagaaaatgaaaaaaaaacaaaccaaactggggagatgattcgccggttagttgaccccacagatgcacttgtattcactgctggcgtaagagaccagttcactgggctgaaaccagagaccaatctcagcctttgcagtgtatgggccatcaccttcatggatgatgttcctgccaaaacaacagc

SEQ ID NO: 18586 - DNA, 410 bp, Oryza sativa
  Clone ID: uC-osflcyp032g02a1
gttcagacttattgccatgtggggtgctatcattgaacatgggaacagttgaactggatgtattcacaagatcaccgaagccccggagttcagatggtagcagctaaagctagttctgccagcatctttacatcacatggtaactcggcaactacattacatgtataaaagagcaaacaaaatgacgtacacagttgaggatgaccaacagaagattcagctcaaaacaaagctagtattactgggtagtacggcaagcatgatcagaaaaatcgatttagacatagtagatcatgccgacttcgacgaggctaatgtggggtatgtgcagcgccaccgcgggacccctgcagttcttgcggaggaacgagtaaccgtagtccatggctaacgtgttggggaagttggag

SEQ ID NO: 18587 - DNA, 386 bp, Oryza sativa
  Clone ID: uC-osflcyp032g03a1
cccccggggctcctaaaaaaacctgggggggtcccattttttcctttttttatcactatttttgccccgccggggaacacacattcagtgatcactacgacccaactattcggaccgagattcatccaacacgccataatgttacaggaaacgaactaatgtagctgctccactattacgaatttgatcgaacggctgaacggctcctgatacacctcacacacttgtatgccaactcgatctttgccacccatcactagcctgctaacatgggaactccagttcgcactgctgagcacccataaaggtcgctgcaatcatctttcctgcgaaccatctaccatgcagggcgaccttgagcagctgtcgcagctgctacactgtca

SEQ ID NO: 18588 - DNA, 498 bp, Oryza sativa
  Clone ID: uC-osflcyp032g04a1
gccttggatggtttctgcgtgaccggcgagtggtggtgcgcgcggtgcatcggcgacgacgacgcgtggtacgacgcgttgccgtgccggcgtggcgtggagtaggagaagggccgcgcggtgtcgatctccagcgtcttgacctggtcgcggtggtcggtggacgcgcgcccaggcgccgccgctgcggaggcgcggacggtgctcctgctggtgtcgaacgacgcgcgcgacgccatccacctctccgcccacctcggctgcccatcgacgtccatctcctccaccgacggcgccgggttcctccaaatttgatgggagaaggcgtaggagagcgccctctcacgcttgagcgcggcgtccttcctcgtctgcagcatcgcctggatctcctctatcgtccgcggtcggtcgtcccagtcgtcgccggcggcgaagctgctgccgtctcgcgaccgctcgatggagcggcggtcggcagcggcgaagtcgtgggtg

SEQ ID NO: 18589 - DNA, 335 bp, Oryza sativa
  Clone ID: uC-osflcyp032g06a1
aaaacattagggggggttttatattttttttttttttttttctctcctcgaacaaaaatgacgaaaacaaaaaccatcggaaaaaaacaaaaaacaacaaacacgctggccacaaaaccatccaacacaaaaaaacccctgcaaaacaaagggcccaaaaaaaaaagcccgaaaccaaaaaaaaaaaaaacacaaaaacggggaaaaacacaaaaccccccacgagtcccaaaaggcccccgagggggcccaaaccggagacaaaggcccgaacgaagaaccccaacatggagaacatggccaggcggcccttcctgatctcccaaacaccaaac

SEQ ID NO: 18590 - DNA, 357 bp, Oryza sativa
  Clone ID: uC-osflcyp032g07a1
tgacgtatgctgccggcggtcggctggtagcctcctgtgcggccgccctcctttttttttttttttgttcagacttattgccactggggggggctcaaaatgaacccgggggcttgatactgggagatatagcctgattatctttctcacgactattggagggcatgcgatcattaaaccactggcaggtcttttacggctcaaggtaccaccaaaacttctgggcctgcctaacagcgcaagcactttggcacactcacatggggacacccctcaacggatggacttgaaaacacagttagtcttactggtgttgtcgaggggcatgatcagggaagatcccttggagcatattaa

SEQ ID NO: 18591 - DNA, 381 bp, Oryza sativa
  Clone ID: uC-osflcyp032g08a1
agctggtagcctcctgtgcagccgccctcctttttttttttttttgttcagactcacatgcacaagttgggtgccattattgtacaaggggcctgtcacacctgactagtttctacacaaaacgggggatccgcggaggaccacaggttgcatcataattacgatgcaactatttggacccagaacaaggcaactcgccatctagataccaggaataaactagcgaacatgatgacctacaccgaagaggatgacccacataagatgcagctgaaaacacagactagcttactgggcagctacggctgcatgaccagaaaaatcgatgttagacataggaacatcaatgccgctctgacgaggctaatgtggggtatgtgc

SEQ ID NO: 18592 - DNA, 349 bp, Oryza sativa
  Clone ID: uC-osflcyp032g09a1
gatctaaatatttcaaggggggatattatatatctacgggggataaggggaacttgcttttcctatcttttttaaacccacatagggaagaacacgttatgtaacacagctactgggcttgcttgcagctataaaaagccatacaccctgacacttcatctgccatacctactttacaatcctttaatgtacaaaatttcagctgtatcacgctatgtctttatagcagcacaaggcagcataaaaattttcaaggcgtttttcaagccaaaaatacttatcccaacggcaccgagcgaaattacggcaccctttttcttaaacatgaatggaaagcagataatcgctg

SEQ ID NO: 18593 - DNA, 390 bp, Oryza sativa
  Clone ID: uC-osflcyp032g10a1
ggggtggctaccaaccatgctagcattattataattatcaaaacaagcaagaagcatgggggaatacaaaaatagaacaaatacaaccaaagaacaaaaaagcaccaactgaaaaaacctaaaaaactagaaaaaaacatcatctggtattctggctatggcaacaccactagctaggtaaaaagctagctagaggaagtcaaaacgcatgaggagcctgacagacttggacccggggccccggaaaacggggaaaggcacagcgcggatgccctggttcagctcccacactggcaggcatgtctgccccccaaaggcatgcttctccgacatggtgaactcaagaacctcgatttttaaaacagccagcttcgggactggcagagggaa

SEQ ID NO: 18594 - DNA, 455 bp, Oryza sativa
  Clone ID: uC-osflcyp032g11a1
gggtaccatataacggacgagggctgattactattactggttgcaatgtaacacttcggatacaatagtacattacagagctagctaaatgcgaagccacaataccgtcagcgcaagacgatcataaataaagcttacacaacatagccaacatgcaaaccattcggactgaccagagatgagggttcttgaagctgccgtggtgtgccatgcatcacaaatgccgaacaactagattgtagcagccaacatgaaaggaaaaggcatggataatgcagcaaagatggatgatgaagaccgcagattgtgacgcttcgttcaccaaccatatgaaacccctaaattttgtcaagtttctccgccttcaccaccggattagccttggcaatagcatccctagcagcggtccgatagtcaaactggcagtcatgcttatcggaatagcggtgcgttgc

SEQ ID NO: 18595 - DNA, 531 bp, Oryza sativa
  Clone ID: uC-osflcyp032g12a1
agttgggaaacgaataaaatcggggttgcaaaaacatcatcgggttcttcatcttcttagtgtacacaacaccaactcgatcatcatctcgtcgcactaaacccatcttccccaacccaaagacaacgaactcgctggccacaaatccatccaaccacaattaaccactgctaagctacggtcccccacttcacttgccggggacgaagttggtggcgtacgcccaggcgttgttgttgacggggtcggcgaggtggtcggcgaggttctcgagggggcccttgccggtgacgatggcctggacgaagaagccgaacatggagaacatggcgaggcggccgatcttgatctccttcaccttgagctccgcgaacgcctcggggtcatcagcgaggccgagcgggtcgaaggcgccgccggggtagagcgggtcgacgacctcgccgagcggtccgccggcgatgcggtacccctcgacggcgcccatgagcaccacctgcaccgcccagatggcgaggatgctctgcgcgt

SEQ ID NO: 18596 - DNA, 539 bp, Oryza sativa
  Clone ID: uC-osflcyp032h02a1
gaagcacggttgtactaatgggggggtatcccaacatgggggggggaacagagaagatatgaaaccaagactcagaaaaccacagcacggttgtacagtgctaattcgagttcctcgtcaaaatctgactgaaaaatgaaactacaggagctataatttaggtcatccgctgggcagcctccttggcgagcagcttttccctggtcttggtcttcgcctgcgacttggatcccatgacgccgcctccccacttattcctaacctcatcgaatttgtcgttgaagttcgccttgatagcctccaggatcttgctgaactcaagcttgtcctcgttcttgacagtggtcaagcagaggacagatgcagttttcttgtgaacaattgatccaagacgggcttttcctttcacaatgcagtaagggacctacatctttctgcacagggctggaagccacacaaccagctcattcggatcgacatcatgagcaatgacgaccagttgggccttgctctgcttcatgaggtatgtgacatgggta

SEQ ID NO: 18597 - DNA, 355 bp, Oryza sativa
  Clone ID: uC-osflcyp032h03a1
aataaaccatcggggcatgcacgaaaaattatgggcagggtttatattgaagttatgttggactatctacatataccatgttccatgtacatgccatctttcaaatctggagcagctgcctgcactttgaggtgttctaagggatcatgctttaaactttcagtacagagcttggtaaatacctcagcttcggctggagcttgggttacttatatacacctggcatgccaactatgtaagattgacagaacattgtctgatatccgcgcgggtagctgagtctccgtggaaggccattgatttacggtcatgaatggatacatctctagatgggactctgcaaaactcatcaggt

SEQ ID NO: 18598 - DNA, 383 bp, Oryza sativa
  Clone ID: uC-osflcyp032h04a1
ttttttttttttttttttttttttttttttggggatttttaaaattttttggggggtttttaattttttttttttttttttttttttttttttttttttgccccaaaacaagagggccccctcccctttggttgggggtttaaaaatttccttacccaaaaaggttaaaaaaaaataaacccggggaaaggtgaaaaccccccctttttccgggaaaaaccttataaaggggggaaaaaaaaaaagggcccccctgtttttttgttaaacccttaaaaaaaatttttttaaggggggggcatggtcaatcccccgggaaaaaactcccttaaaaaaaaaattttcttttttggggggattaacccggcccccatttttttttt

SEQ ID NO: 18599 - DNA, 606 bp, Oryza sativa
  Clone ID: uC-osflcyp032h05a1
gatatataattattctgtttttatgggaatacacataaacgatcgaagtgtgaaacggtacaggatctgagataattaggaaactacagagcagcagctacaatattaaccatagcagctgcaggataaacacggtgctaaataggcaggctttgttcttctttcacagcctggatatctggaaggggaccatgacttcagtcatctcctccctcatgataatcttcccaacctggaaaaggtcggagatgcctagctgcgtcgacagatgccttcggcaatcctctgcagcaacaatgcctgaagaataagctccatgcacggacccagagtgatcgatgcaggcggcctccccagcgaaaaacaggttgcccaccggagcacagaatctttcatacaagtcagctggcttcccaacaaggtcgcaggaataagaaccaagcgaattcgggtcggttccccaccttgaaaccaaatactggaccggttcagtagctcctggtagcattttcttgagctgagacatgacaaagtttacggattcttcatcggatagcttctcgattcatatgcgaattttctgctccatgcatacaagaaccgatg

SEQ ID NO: 18600 - DNA, 334 bp, Oryza sativa
  Clone ID: uC-osflcyp032h07a1
caccattggggggggaacaaaggatttctttaaccttaactccgaaccccacatcacggctgttcagagctctaccaaattcctcatcaacaccagacttgagtttaaaactccccgagctacaatgtaggtaacacactttctcgaaagcttttctaacctccatgcccagagttaaacactccacctaacactagatgcccaagaccccccccccccaaaaattgcccaactcttaaacattgacgatgaccccccccttgaccccctgcaaacaaaaacctcttcgctggttgcacccgctctaccctgaccaaaaggagggttcttaaaa

SEQ ID NO: 18601 - DNA, 440 bp, Oryza sativa
  Clone ID: uC-osflcyp032h08a1
attgggggcttttccaacacgggggggggtacatatattatttgtttccaagaaaaaacaaaagacaaaacggccccacagtgttgaataaagatccttgacaaaatccgactgaaaaaagaaactacaggcccccccctaaatgtcattcggtgggcagaaaacttgaaaagcccaatgtccctggccttgaaatatggggggggcttgaatcctttgaagccaactaaacaacttcctctaacctcattgaatttgcccctgaaatttcaccatgaaagccttcggcatcttgctgaactcaggcttgtgctcacccttgacagtgaccaagcagaccacccatgcgggttaaaagcgaacaattggtccaaacaggcttaaccttttaaaatgcattatgggacctccatcttcctgcacagggctggaagccacac

SEQ ID NO: 18602 - DNA, 474 bp, Oryza sativa
  Clone ID: uC-osflcyp032h10a1
gggacccaattgcaatatacgggatatactaaagtctctcacattgagacctgaatatgatgtaactggactgatccgcgaagccacttatagttatagaccaaataagtaggccttggattacccactaattttacatataaatagattcacgggtcggtcaaattttattacctataaatcggtttacgggttggcccatagcccacttgtatttttagacctgaagctgcattggccagatgagaaatgattcatcagagcagggacctgatcctgtcaccctaggtcatgacatggctgcgggatgatctcgccgacgctccggtagccgcagagagccatggccacctccagctcgccgttgagcatctcgatcacgtgccttgcgcctgacttccccctggacgacagcccgaagaacaccggtcttccaaccatgaccgaccgtgcgccgagcgccagggccttgaa

SEQ ID NO: 18603 - DNA, 292 bp, Oryza sativa
  Clone ID: uC-osflcyp032h11a1
gccaggcgaatctcgggacaaagcctacgaaaacattcctggtactttttccactactaaattatgggagcttatacaaaggcaagtaagggtacaaagagggggaatccttaggcaaagaaagatatcagcacatttgcttgctaaggggggaaggcggaggggatgataaattacatatgggatggcatctgacatggaaaaaaagggggggaaaacttcttttccgggtagggggtaacaccgtaccatcaaggatgggggcagatgcaagggaagggtttaatccttt

SEQ ID NO: 18604 - DNA, 213 bp, Oryza sativa
  unsure (1)..(213): unsure at all n locations
  Clone ID: uC-osflcyp032h12a1
cgtatattattctttttttctacttctttttttttatttcttttttttctccctttttttttttttttttttntttcttctccttctttttttttcttcttttcttttcttctctctttttttttttccttatttttttttcttttttacttttattttttttctctttttttttcatctttttttttttatattactttctcttcttttttc

SEQ ID NO: 18605 - DNA, 375 bp, Oryza sativa
  Clone ID: uC-osflcyp033a01a1
aaaaaaaaacaaaacatgggcccctaaaccaatgctcaacattcaagacaggtgggatttttttcaatatgggggcttgatccacaggtacctttcaacccttgaacaaaaaaaaatgggaaaaaaaaggcggcccgattgaaattcccccttggggaatcccggacccttggtttgaaaaacaataaaaccggtttttcaagaagcccccttccccggcagagatagatcccccgccggtttaaagagcaacaaaactcgggaagaaactccccaggaacaaaaacccatccctttggataagggatgcaaaacaaactggatccctcccggacataaaaaacccaacctgggccgaccataggaaacccgggg

SEQ ID NO: 18606 - DNA, 430 bp, Oryza sativa
  Clone ID: uC-osflcyp033a02a1
gggggcaaagattggcccattaaatccctttggctcaaccaccctggcagctcgcaatcagataatggaacccattgctaaataacaaattccaaaaaaagaatgtgaatggcccaccctcccctgggggaataaaccaacgtggccttaacaacattaaataaaaaccatccgaatttcccaaacaaaaattggtccatcatgggaagggggccagggtggacggctggagccccgcggggaccttgaaggacctgaacccccccccccacccgcgggtgtccttgagcatgtgcaccaggacggtgtcccgcccgaagttgtccatgtcccaagtgggggcgtacatccccggcctgggggtggaccggttcttgccccggggggcgatgttgagccatttcccgacaggagggcctcgggcccgcgt

SEQ ID NO: 18607 - DNA, 486 bp, Oryza sativa
  Clone ID: uC-osflcyp033a03a1
gttgctacttatgaattttttttgggttttttttctttttttttgcgttgacccataaactagcatagttcatggtcccaaaagcacaagagtgctccggtgcttccccacaaactcctgcggcccatgtggcctgattcggggggttacaatgtaacaacaaaagttacaagacaccacctccctgctggtctacaatataaaccttaaattgccttgccaaattttaaaccaaggctacaacaatgcagaaaaaaaaatgcccaactccatgataacttatttatgtctactggacctatgggagaaagcaaaggcctaaggcgggtgctaattaataagcagcctcagaatagccaaagcctcttctcttttactatagcaaagaggcctgcctcctgctgcacctgaatctgaatctcacactgacatttctgcgaaaagtgaactgaaaaacggaattagccgagtactcgatcagaactg

SEQ ID NO: 18608 - DNA, 383 bp, Oryza sativa
  Clone ID: uC-osflcyp033a04a1
gatataaaagacacatctgtgggatatcgataatatttacattattacaaaggcgcttcaggcctgacaatcaaaaataaacagcagcggactagcgggcctacgggtccatcttcacaggcgctcaactggggtataagccaggactccacctaagacatcttctccaaagcttctcttactgaagaggggaaagattgggcaagaatgagtacaaccacagtactcagcaagccacaccggagatgcataattaatgcacgggggtacaaggggataataataaggggttaaaggtttttgcagtaaacagcatttaaaagtcacttagttgcccaaagcccttttataaagaccatcctagagctacccaaaattattaa

SEQ ID NO: 18609 - DNA, 376 bp, Oryza sativa
  Clone ID: uC-osflcyp033a06a1
agacgagcaaccacaggcgatttcccaaactggagcattgagtaccagagcttataccagaggcaataatgaacactacatgaacaaaaaggtaaatccatggaatatataccaagatagacagcttgcgatgtgctatagtccaaaacttctgatttgccaaaataaagtttgatgttgcaattcaaactaaacttattctaaagatgcaaagaaggtaaagcttaatccgtttcgtaaacaaccttggttcccagccccttcaaacccttaggagggacctcggccacagggaccagagaggagagcttttccttggcatcctccttggaattcctcttgcgggcgaacctcacacgaacccttcgggggacac

SEQ ID NO: 18610 - DNA, 355 bp, Oryza sativa
  Clone ID: uC-osflcyp033a07a1
cgcgcccccaaagggaatgggtaaaacgcccaattttaaaactttcccaaacaaaaacaacttattttccccttaaaaaaaccccctgggccccaacaaaaaaaccttttttttttcaaaccaaaaatttttctaaaaaggggggaaaaaaaaaacctttgggcggcgccaaaaaaaacccttaaaattttaaaagccccccaaaaaaaaaaaaaggggaagctttttggggccccccccccgtttaataaaaagctccctttcccatggggggggttattttaaaacttggaaaatgggccccgggggggggaaaggaattttccttggcccaaaaaccggtttttgggggggg

SEQ ID NO: 18611 - DNA, 512 bp, Oryza sativa
  Clone ID: uC-osflcyp033a08a1
cgggcaactctgggctgggaaagtatcgaaacatacggttgaaacatgctacatcgtgtaaggtataacctctgtccgaatcataacaacattccaacaaaagctcaaagcggcacaacaaggagacacgaacctcaaagatcaaacaaccctataccctggcgacggtggcaaaagggagaacttgaagtaagaagaaatgtgcaattaaattcctatggtgtcacctagggttcattccgacgccgtgtagttaatagcggataatatcactcaagatgctaaagaagtggttgatatctatcttttcctctccaccatagactgcttccgcgcttcctcctgatggcccttgtgcagccatctcaacgagtgtgtacagcttcttgattggcatatcgtccagtgcttctgcagccgcatcaatgtccgcttcatcgaacacattgagatgccgcaacacctttgtagcatcctcctttttcaatttggggacatggtatgtcacggag

SEQ ID NO: 18612 - DNA, 486 bp, Oryza sativa
  Clone ID: uC-osflcyp033a09a1
gcgacaaaagaaagtataatcaaatcacaaacatatcatatacatagacccataaactagcatagttcatggtcccaaaagcacaagagtgctccggtgctcccccacaaactcctccggcccatgtggcctgattcggggggttacaatgtaacaacaaaagttacaagacaccacctccctgctgttctacaatataatccttaaattgccttgccaaattttaaaccaaggctacaacaatgcagaaaaaaaaatgcccaactccatgataacttatttatgtctactggacctatgggagaaagcaaaggcctaggcgggtgctaattaataagcagcctcagaatagccaaagcctcttctcttttactatagcaaagaggcctgcctgctgctgcacctgaatctcaatctcacactgacatttctgcaaaaagtgaactgaaaacggaatagccgagactcgatagaactggccgcctc

SEQ ID NO: 18613 - DNA, 521 bp, Oryza sativa
  Clone ID: uC-osflcyp033a10a1
aactcattaactcaatagctatgttatatttacacgatataatatatgtggaaggagattaattattactagatacattgccaattaaaccagttgtacatgatttgaggcaagattgcataggtaataaaacatgtagtgcatgcatctggcagccctgttgtaaaaatattcaaaagtatactacaagtcacgacaagattaaatagaaaagttcgtataatataactttttagtaagacgaatgatcagacataataataataataataataataataataataataataataataataataataataataataataaatcaacggtatgatttattttatttaagaaaacaaaacattcatgaaactttttggctgcgaagaagaatatataaattggcgtttttttccccatcatgtcctagtacgtcagccggtgcagatgggcggtggatgaggcggcggctggttgacgcgaggaagacgacgcagggcagcgcacgcgatgtcgtacaccct

SEQ ID NO: 18614 - DNA, 352 bp, Oryza sativa
  Clone ID: uC-osflcyp033a11a1
gagaggaagcacgggtgtatttacaagtctgcatcttacattgttctaggtttctctctaccaatacaggcaggtggctgaaagaatgatgctagccagagcacaaaacccaaggttattgcaaaaagaaaacctcacaggattgtgcggccgttggtctttctcttggcctcctcccatggcgcctgtgcagaccccatgtccagctctcctccaaccatcaatgccgggaggccaccatttgcagtggagccacccatggtccctccaatgccaagcccaaggaagtccagagtggcaggcttgggaccgtacagtgccgatggtcccatcatcaagtccggcaaccctg

SEQ ID NO: 18615 - DNA, 476 bp, Oryza sativa
  Clone ID: uC-osflcyp033b02a1
gaaacaacattaacatcatctggggctaacatgtgttcattatgggggaacgctgcttataaaaatttacagcgccggttcatcaccacggatgctcacagtagctcagatcaatcaactacatgagaaaacatcaaatttttccacagcatttactgggcgtgtagctactggctaacgactttcactcagctgcacagattgggatcacattggccactgaaacctgaaactctcacgcttcagagaccaaactgtctgcctcggcgtcagacggctgcgactcgtgcttcgcggcggcctggagaacccggtcttggaccgccgtcgtgagggggaaagtccccaagccaatcttgcttggctccagcttcttggccgcccacgagaactccttcgcgcctactcttaacggggaaagcagcagttttagatcttgctccagatcctctgaaccctcgtacgtagagaacccc

SEQ ID NO: 18616 - DNA, 494 bp, Oryza sativa
  unsure (1)..(494): unsure at all n locations
  Clone ID: uC-osflcyp033b03a1
acaatatagagcgtacgccgtcaaccaatcaaattcactgggccaggcaaaatgattctcacttgttacaaaactgcttgatagcctccgtctatgttgaaaacctcagtagcataagaactaatacaacacgagcagcataaatagggagcagaaacaagctgttaggtggacaggtttgttacagcacagcccgttcagtccaagggcagcaaaatgtatcctagccgacggtgcaagagataagaacaatcctaactatcattatccaagatatccgtctccgtttgctggagactcctctcttcctcgaatacgatcatactacatgatgttttaccgcatggaaaatagaaggcttccaatcatcattgcacagttcaaagagatcattgcggcgctgaccccaggcggtggtgcttggngggtggcggcggaaggcccacattgcccatacccggctgatatgagctcagaccaggatggatgtcatc

SEQ ID NO: 18617 - DNA, 515 bp, Oryza sativa
  Clone ID: uC-osflcyp033b04a1
gacgtcgcacgcctgcgtacgctgcatgctccgatgcggccgccctcccttttttttttttttttttttttttttttttttttggtgttttttttttttttttggggggtctttgggggaaaggcaagggtcgataaaaattggttcacttggccaaaggcccgataaaaataccctgctccctgacacggggagggccctgccccccccttatttggaccccccaagggcaagggtgccgaaaaaatcaagcaacccaaggtgaactcacgggcccacctggaagcctttcactgggcggggccggggacttttgggaaaaacaggaaccccccccctgccgaagaagacaaattattcccccccccaatgggcgacccgggggcccggaactaaccgcaagggatctgcccccccccggggacattgtgaagagggctgcccccccaagaagtggggctctctcttgccgggggacccctagggggttttgggggcctcttttttttgggggg

SEQ ID NO: 18618 - DNA, 375 bp, Oryza sativa
  Clone ID: uC-osflcyp033b05a1
atacagggttcaagcaaagcatttactacttgggaattcagataatacatcaagcaaaatcacacaccagccatcagggcttccatctttagcatcacagcctgaaagctcattccaccatcctccacatgcccatccatttgacatagttgcagagggcttaaaaggacccgaaaacaccacgcaacgatgaactgcgggcttggctgcaaactgcaacaagctccatcgcagcccagagcaaacatatgtacatatatgacacaggagacgacaaccttactacacaaaccatacacgacttaacatagtaaaccgcgagcagcagcaggcgtacttaattactagtagcatctacgttatatcacaatagta

SEQ ID NO: 18619 - DNA, 352 bp, Oryza sativa
  Clone ID: uC-osflcyp033b06a1
gtcctccatgatccttgagtcgaagcgcgcgccgcggtcgacgcgcaccacgggcagcggggggtggacggaccgcgcgaggaggcgcaccccccacacgcccttggcggccaggaagaacgcctgcagcagcggctccggccaggcgcgggcgcgcgcccaaccgagggaggaaaccacctcgctcatcttggcgtcgcagaaccggctcaggccctcgctgtagtgcttggtaccgtggaggaggacctcctcccacgtcagcgccgcgatggagtggtacgccgcgaggttggcctcgcagcggcccgccgggtccgccgtgtgcacgtcgcctcggtgtcgactcgaa

SEQ ID NO: 18620 - DNA, 587 bp, Oryza sativa
  Clone ID: uC-osflcyp033b07a1
gcaaagttacaatacacactggcgaatgaactgcaaacttaacttatgtgtcactaacaacttagaaacgagcaaacaaaaaccagtcagttcatcgtcttagactaaaacaggcaccctgcagacaagtgccttgatcaaacggtttttacacggcaaaccaacagacgaaaattcaccagttaaacacatttcagcatctcttcgtacgcataagaactcttcaagcttctgagcttcatcaggtgtttctttgaccgccataatgtttctttcaaactcctcgccttatctctgaaatgtggttctgggagctcattctgagataggcttgcgaaccaaaaagaagtacatcggcgtgaagatttccttcttgccaccttcgacgagaccttcagctgccttctctaaaaagttagataccctttcacttccttgtggggcaagggcgacgtattccaatgccttaccattgggcgagtaattgcacgccccacagtagtcagacggaagctactcaggaaaaccggcttggatccaagggaggtaccaggaaccgggaatctcagcaggtcttatcccaatac

SEQ ID NO: 18621 - DNA, 552 bp, Oryza sativa
  unsure (1)..(552): unsure at all n locations
  Clone ID: uC-osflcyp033b08a1
attataaaatgacttgtattatattcccaacattaaagtttgatattcggatacattttgctcactgtggcagacaaagcagaccacctagagcccttttattcagaatatattcaagataataaagaacattggtcatagcatatactagtactatatgaatagtctggctggctgcttcacaaagtaacagagtgatcgctattggagttttgagtattctttaatcttcagtgcgcttccctcatcagcagctcctcatcttcttaccctctgtgccatctatctcctcgacagcatcgtcttcccagtagagagcctccattttaccagctttctccgtgttttcatcagcaaagcaatgcagaacaggatcgtggcgacccggtggcgatttcagcagtagcagtgaagctctggtaaatgagcaaacccncagaaggcagctcctgctcaaccatgttgctgcaagaataggccccgacatccagccccttggcccaggtccctgcatgattgcggccaccaaagatggtaaccgcaacagagaac

SEQ ID NO: 18622 - DNA, 424 bp, Oryza sativa
  Clone ID: uC-osflcyp033b10a1
gtatgaatctatttgatcttgcatagacaaacaatttcgggagcaaaatggtactttcatgacagaagaaacacaacgggatataccgataacagaactgataaagacatacttaggtatcctacatactaggttctgttaagtccccaattcacaatttctatggagtatcaagaggaaaattgagacatgtactttgtaaagtatgcaaacataaggagcacaaatagcttcccctactacagtggctggtttcagtttgtcttggtcttcccggccctcctcttggaatgtcttctaggaatagagttcttcattcccaagaagaaaagcagggcaccaaaaagtgccaaattctgtgagaacttgacgaaaagctgaacaaattgtgaagactccatttatagttgtagaaagtcgtaca

SEQ ID NO: 18623 - DNA, 420 bp, Oryza sativa
  Clone ID: uC-osflcyp033b11a1
gtatggcctgattaatgcctgccgatatgggacgtttcagcgggtcgggctaacttagaagcatgggatttctctacaccattttgtcggtgagcaccaagaaatgcaatggtatttctacctacgtacaagccattggggtatcgggtaaagatataaaaaactgcctcaatttttgtctaccttgacgatcatgcagcaaaagcataaaacatttcaacagaagacctttgatacagattgaacattagatgtacatttgtagggacatgtggatccataccctagggatgccgaccaggtggatctcctgcttccacattgggggaaaaattgcacattcaacacacgatacctggaatagacgcaaaagtcagtccgacaaaatcatgtgacttgcatatgcaatgccaaaattga

SEQ ID NO: 18624 - DNA, 451 bp, Oryza sativa
  unsure (1)..(451): unsure at all n locations
  Clone ID: uC-osflcyp033b12a1
gcatgctatcgctttcagcgtgttgcttgtttcaaagaacaaggggagtataaattggtcgcctttttcactgtcgtaataatgaaaaaaaaatagagaagaagttacaggttgtcgtgctcgatgacctgcgccgccctccactcctcgccggggttgacgaccaccggcaccagcatggacgccgtcccggtgcacaggaagtagtccttgccgaacttcctgtacatctcccccgggctgcacaggtacatgtgctcgtaccccatgctcaccaccctgaaccccagcccgctattctgatcaatgggtggtgaatttggagggcgccgtgctgtagatgcgcttcttcctctcctccggggggggcgcgtacaccctgctcaccttcttcttgaggatggtnagaagggttgtcctccacggtgcacaccccctgccggggctcctc

SEQ ID NO: 18625 - DNA, 482 bp, Oryza sativa
  Clone ID: uC-osflcyp033c01a1
catgagcacagatgttcactgacaacagaagttgtgcactgcattttagtgaaaacataagcgtccataacattgttttgaaaaaattgacttatggttacacaatattgctgcaatcaacttatttcaagacaagtaatcaagcatataagtccttacatttttgacatttaggatcctgactccttgggagtttttgcaacaattgagatagcatgaagtcctgagttcaactcatcagtcaagaggtcatacaccatcctgtgacgcttcacaaggctctggccctcaaacttaggcgaaattaccctgatgtaaaatgtgtctcatttgcattgtccttgacagctgcatgcccagcatgttggtaagaaacatcttcaatatctagcgcactggcctccaagcagactgtagcttttgcctcatccgagcagctcttgaaagcatagaactaggccctcgtgagctcatcattgata

SEQ ID NO: 18626 - DNA, 517 bp, Oryza sativa
  unsure (1)..(517): unsure at all n locations
  Clone ID: uC-osflcyp033c02a1
gtaatcaacagcatgaacaagagcataagtttttgagtacaagatcgatacagattttcttacctccataataagagccaaaattttacctggtactgtcctaggaccagtactaataattaagcaagagaacagatagtcacatgagctttttaaggtttagtaggatatctgtaaaacattcctgccactgccaatatttaacatgccgaggattcgctgatcatatgcttccgagttgtgcgacggtgccagagtcatcattcatcaccctcttgtgacggcgttcccctccgacgcagttccttcatcttgcggaattcatcatagtgagccttccgttgctcttcgaaatctgtgccttgtttgatggccacttcttcttcttcttcttcttcttcttcttcttcttcattactacaggattcaaaatgttctcttgctgataatnttccacttgaaacagctttcatcaaagcagtcttaatcgcatcagatgagtggacttatccactga

SEQ ID NO: 18627 - DNA, 365 bp, Oryza sativa
  Clone ID: uC-osflcyp033c03a1
aaaaaaaaaaaaacttcccggggaaacaaaggcccaaaaatcaaaggggtcttcagcattttacaacttacaagagggggcaaatataccagcccaacttttttaaagaaagctggggggggaaatggaaccctttttaacaacgggaaaaatattgggtatagaaggaaaccctttgaacaaattaatggggaaataaattgggggggagcgtttcccccccaactcaaaaaaaccggacctttgaaacctaaaaggggggtgggcatccaagtgaccgggaagacccttttggggaagagggtcttgcccgacccgggggggaccccaatggaaaagggggccttgggggggggggggggggg

SEQ ID NO: 18628 - DNA, 584 bp, Oryza sativa
  unsure (1)..(584): unsure at all n locations
  Clone ID: uC-osflcyp033c04a1
aagtctagcttgtttgtttgcttatttatttattcattcattattaatcacatctcggacggcctggtaccgattattacttcaaaaattcaaataataaatacaacaacccacaatagcttgaatacagacaatgagtataaacacagacaagaccaagcagtctataagaagaaattaacacttggaatagaatacaatggtgaaccgtgtcttgttcttccaaaaccctctaatccgctcgagattggcccgcacgagacgagaggatgataccaacaatcaggccatacagagcaagagcttctgcaaagataaggatgnaggatcatgcccacgaacaactttggctgctgcgcattggccctgactccggcgtcgccgacgatgccgatggccatgccggcggcgagaccggcgaggccgcaggcgagaccggagagaagtgggcgtaaccgtcgaaaagaagtagggcttggcctggggttgatgcccgtggagatgatgacngcgatgataggccttagatacctagcactccgccatgacgacnggaccatggacttcacaccagttccggcgca

SEQ ID NO: 18629 - DNA, 568 bp, Oryza sativa
  unsure (1)..(568): unsure at all n locations
  Clone ID: uC-osflcyp033c06a1
ccagcaatgaactcatatttccgtttcatgcctaaagtcacagataatcatatatcttttacttacacagtggcagatacagataattgtatggatattcatacatgggtggaactattcttgtttttattgcatttacaaaatgcataagcatatgcatcagaaaaggaaaaaataaaaaactaacacctatgaaatatgaatctatcatcctatgtacatctctacatattcacaagctatgaaaagaaccctgtatgtacatccaaatctgaatgaatttctaatcaagccttcatcttcgagaaaagaggaaggatccatcctttgctctaaatcggataaaagaaataccgtagactatccataattgctttaatatgtttgtgaactaggttctaaatagtgacatcgacagagtgcttggagacgatgatgttgctggcgagatcctttggagttgcctaacattntagctgtgatgatttacaagtgctccagtcgtcagcttccatatcaactnccagtatgtgaaatggtcttgacgctcaaactcatgggagatgca

SEQ ID NO: 18630 - DNA, 382 bp, Oryza sativa
  Clone ID: uC-osflcyp033c07a1
acggacgggcatacatacccctctggaggacacgcaccatcgatcgtacaaagttgggtacatacatacgtacacacatatacgcatacgcacgtacatacatacataattaaaaactcgtaattaattaaatacgtagttgatggcatctctaatggaacttgaggctggtgaggatgttgttgtggaccggatcagcgaggtgatcaagcaggttctgcacggggccaaccccggggaagagcgcctggacggagaagccgaggaaggcgagcatggcgagcctgccattcttgatctccttgagcttgagctcctttatctccgcctcgctcttggtcccgaagcccagcgggttgaagagcgggccccggggtaggcc

SEQ ID NO: 18631 - DNA, 383 bp, Oryza sativa
  Clone ID: uC-osflcyp033c10a1
ggggaaggggattccaatgggcctttatgtaaaggggaaaagggtattaagaaacccttaaaaaaactgggggattgggcaaaaaaaacctcaaaaaagggggcagggggtggggacccggggatctgacaggggaaacagggaaagaaaaggggctgcttcttgggttaacatgaaaaggaaaaggggtatatccccgaagaactgggtttagaccatggatgttaacccagggccccctattgaagaaaaactggtcaaagaatcccgacccctggggcgaacccggaaatccggacccggacccggggggggacccgggtaccctaaagcgaggcccaatagagccccggggaatcctggggaaagggggttcccggggg

SEQ ID NO: 18632 - DNA, 402 bp, Oryza sativa
  Clone ID: uC-osflcyp033c11a1
tcctatacagccgcccccctttttttatttttttattacaaacggattagaattgagggaaactgcaaattcacggggggaaacacaaattttataaatacacagagtcagcatctactaccatgcacaaaatatatcccgccgcactcacaatttcgcgctatgaacgggttcctacaatggctagaagcatatttaaacggagtgtaaagacttaaacccaagcttaaccttagtggagacccccatccgtcatggcacactttcttacacctaaagttggacaattgaacttccttcgacaacttgcttgccagccactactcttatgaatggccatccaacaaatagcattttctttacagactcaccccgacaacccaaaactctttatgacatatc

SEQ ID NO: 18633 - DNA, 382 bp, Oryza sativa
  Clone ID: uC-osflcyp033c12a1
aggcttaataaccataatgattattatatctgaaactccattaatccgaatatacatacactggttgttgggtatacaacaccctatattacaaaaagggcccaagtatacaacaaacaaccaggatttatactatggactgtagaggagatagggcggcacataacaggatatgctattcgtaagcagctctattgggaggctctatgtatcatttacatatggttattgcacaatacttgttagaggaagaagggaaagcccttttgtgtttgtggcttggtgcagtctgaattagtccatccaatctgcctctggtgattggcatacacaaccaacttgccgcgcagagcattatctccgactattactggtgacccat

SEQ ID NO: 18634 - DNA, 604 bp, Oryza sativa
  Clone ID: uC-osflcyp033d02a1
tttttctgtaatcaacagcatgaacaagagcgtgggtttttgagtacaagatcgatacagattatcttacctccataataagagccaaaattttacctggaactgtcctaggaccagtactaataattaagcaagagaacagatagtcacatgagctttttaaggattagttggatatctgtaaaacattcctgccactgtcaatatttaacatgccgaggattcgctgatcatatgcttccgagttgtgcgacggtgccagagtcatcattcatcacccttttgtgacggcgttcccctccgacgcagttccttcatcttgcggaattcatcatagtgagccttccgttggtttttgaaatctgtgccttgtttgatggccacttcttcttcttcttcttcttctttttcttcttcttcattactacaggattccaaatggtctcttgctgataattttccacttgaaacagctttcatcaaaggagtcttaatcgcatcaggatgagtggacttaaccactgatttttaatagttctttttggaaaaaagtcccatcatcttaataaacattggtgatatgcgtttaagctcgggaattttt

SEQ ID NO: 18635 - DNA, 520 bp, Oryza sativa
  unsure (1)..(520): unsure at all n locations
  Clone ID: uC-osflcyp033d03a1
aggttaaaatgtcttccatggttatacgcagattatgatatagaggtgtctcctttgagtcgaaaatacgacggactccataaggcattaaacagttcctaagggttccagctaagtcatcaaaaagaaaaaagaaagaagcaaccgagggtcacgcaacttcgcccttcagagtgacagcatccacaaaatgcagacgatcggcaccatcgcaatctgacatcctagactcagttctcctcctcctcatcctcttcaccctcatcagcatcagacccctcttcgtcgtcatcctctcctaactcttcagcctcattattgaaatacttcaatggattgggccacaggtcttccttgatgatctcagccacctcatcttgcacaccatcagcaagaatcttgtgctctgtatcagtaaccaggtgaagaaactttcctcaaccaatggtcgcttgctccctttcttcttggcattcccatttgcaatttccattccttgcttncacttaatgctagtagc

SEQ ID NO: 18636 - DNA, 457 bp, Oryza sativa
  Clone ID: uC-osflcyp033d04a1
attaagccaacaattcggaggggtgcatatatatgatccaggtctgaatgcaattttgggtctattttcccgagcgagaatagccttagctcatttaacggtaaccaacaggcaaaccggcgatctacccaatcacatacggactacagtttgccaagaatcaaaacaccttgttccagacacaaagctatgataacgatgctaacaacctaccccataacaagcttgaaaaggtttcacaataaactgacatgaagagacattctcagggtgtactgatttgtatgcacagaagcgatgcatgaagaggggtgctactggtgatcaccggaaactttccatcatgatgaatagcttcacttgttccctctgaagtacatggacactctgtgaagaactccaatgctcagcagtgtgtccaagcaaaacagtgcgaaccccacaaaggtaaagatcc

SEQ ID NO: 18637 - DNA, 480 bp, Oryza sativa
  Clone ID: uC-osflcyp033d05a1
ggaggattacaacatgcagcagtggcattaatacgccagtacattaattaagttacacatatgcaggctccattttggtttcttttaatttatcgtattacagaatttctgtagccttgcagatgatcacttggatatcatgtactagtaattaacaataggatgcatacaaaagatggcccaacgacaacagaagatgcgtgcatctgacattgtctggccttatttgttggtagtactccaattaattaacaagagatgatgcattcttgtgccttagtttcttcacatgcttggcttcacgttgagcctattcgcaatcttcacccccaacgactcatcacactgggaagaggtagttgacccagatggcgcggagctcaggggagaccttggggtgcgcgagctcgccggcgaagcggcggatgaacctctcctgtctatccggcgcccacgacctgtacctctccccgggctgtt

SEQ ID NO: 18638 - DNA, 496 bp, Oryza sativa
  Clone ID: uC-osflcyp033d06a1
aacattagatgaatgaagatgtacatttttcatgtttttggacagatatgcttagattctgccttttacggatacatccatgctattttgcaagccatgtaactgatttataattaatgcagcctctccggtggttccatgacgatcatcgcattactcgttatcatcatcagccaggtcgaactgcttgagcagcgcgccgcagatgggcagtgggatgtccttgaggtagccgagtgggttggctaagcgcaggttgtcacagatgccgacattcctggtgagcaaaacacgggcacgatccctttcggcctcgatttcagagcagtttgcaagggggctgtggacgaggacaacctcgcagatgtcctcctatggctgtccttgagctcaatcttgtatgtcccggtctcatcagtcacaccgtcaatcgcacgctcgaccttgtcggtgccaaagtgcttgcactccagcctgaccttggcacccttgatat

SEQ ID NO: 18639 - DNA, 508 bp, Oryza sativa
  Clone ID: uC-osflcyp033d07a1
aataaaaaaggggggggctctaaacttacattcccaaaagaataagggagcaaggaccaaaacacgcacacaggagagaccccggcgtgggggaaaaaaaaaaccacccccggggggcccacgcgggacaaagggaaggaaaaaaaaagacccaaccccccgccggggaaaaaccccccccaacaaaaaggggccccccccccccacggggggggggggaaaaaaagggaggggcccccaaaaagggggggcaaaccccggcggggccaaaaaaaaaaaaacggggcacaagggggggcaaaaaaaagggggacagaacggggggggggcccgggggaccaacaaaagggggggcccccaggggaaaaaaaaaaccccccaaaaaaacccccccacaaacgccccgggcccggggaggggggcaaaaaccccccggggggggcggggggggcacaaggcccaaaaaacccccttgaaaagaaaacgaggggaaaagggccccggcccc

SEQ ID NO: 18640 - DNA, 393 bp, Oryza sativa
  Clone ID: uC-osflcyp033d08a1
attattatatttttttttaaaaacaaaccggttgggtttaaaaaaaaaaggggggaaacccaaaggggggaaaaacgggaaaaaccaaaaggccccccccccgagggaaaagaaaaaaaaaggcccgggggaaaaaacaaagggggggaaagcaaaaatttggggaaaaaataaaaacccccccccggaaaaaaaaaaccgggggggttttaaaaaaaaaaaaaaatccccccccaagaaatcacccctttaagggccaaaagggggcccaaaaaaaaggggggccaaaccccccccgggggtttgggggaattttccccaaaaaaagttttttggaaaaaaaaggtgggggggggaaaaaaaaaaaaaaaaactccaaaagcgccggggggg

SEQ ID NO: 18641 - DNA, 513 bp, Oryza sativa
  Clone ID: uC-osflcyp033d10a1
ggcaatacatatatgaggcgcccaattcagcacacctggcacgacgacgatacatacatgcatacatacaatcaattcaagcccaaattacccccaaaacgttacccattaattaattaactgcacgcactcaaatcatgattaatcgtagccgtacacgtactcatccccatccatccatccatccatcggacggccagcaagcatcgatcacagatctcgatgagatctcaggcgtcgcggtcgcggtggcactcgggcgacatggcggggtagcgttcgcggtcgtcgcagtagttgcagatggtgtgcgtcttgcggacccaggcgaggcggcggtactggtcggcgtcgaggtcgcggaactccggctggtcccaccacccgggcgccctggggggcgcagtaccgggtcttcgccgacgcttgtaaccattgacctggcaatccctggtcggaggccactaacggagcccgtaccagtcgggcttttccgcccgccctgggtggccc

SEQ ID NO: 18642 - DNA, 542 bp, Oryza sativa
  unsure (1)..(542): unsure at all n locations
  Clone ID: uC-osflcyp033d11a1
aaccttcatagagggcaatcatattgcggtctatgaatttttgtttccatagaccagaatttgattgtgttcagtagatatgctacatagcatgtccagtcggtgttgtctaaacaatgagatatggtcattgtctgcacatatatgttaacatatgtccatatctatcttgtgctttcaattgatcccccaaatgataatgtaccatatatatcctctacaaaaacactgcctagtccattagatcaccaaaagtagacagtcagaagtcaccatcaatctgaagcacatgccttcattaatcttcatacaacacggcgaggttttcagaacaaaggatgaagactagcaacatgatgatcttcacgtcttcagccttgtccttctggtgctatcttcaggtaattaaaccagttagaatacactggngttacgtgcacttgattaagtagagcagttggtatgaccgggaatgaagcttgatgtatcgatcgatccaactcaagctggcatgccacacattgacttcaatattttggata

SEQ ID NO: 18643 - DNA, 474 bp, Oryza sativa
  Clone ID: uC-osflcyp033d12a1
aaggagaagcagtagagattttgtttcatggaccagtaggtccggttgatgtacgtcattaatacgcagtataaaagaccaaaagtagtatcacatcatcatatgcctaacatggaaaacttgatagtattatcgcccctagagcggaaagaaacaatttgtcgccgccgtcaaagccgtgcagatatgtatgcacggcgctgcttgctgcttactgctgcgcgcactgcacgcgctgggcgccgccgccgtgcatgtcctcgtcctcgtcgtatgcctcctgctgctgctgttgctgccgcctcctcatctccttctggatgttcaacgtcgtacggcatggtctcctcgcactcgtcgagctccatgtgcggtgtactgcgacaccggccttggcgggaggacggtctccagggccttgcactggtcagggttcaaagagtcggggaattccacgaagagtggatgtagagc

SEQ ID NO: 18644 - DNA, 395 bp, Oryza sativa
  Clone ID: uC-osflcyp033e01a1
aaaaggtaccaatgatcaatcaagaaattatgaaaccatccaaatgaggaacatacataattttccagtcgggccctaactgatagggataaaacaactatgagcaatgacagactggtctatatatcctttattagggagggcccgtctacgtgatatcagcatctatggactgcttggatcgacaacaatttgtaccgatgctgtaaatgctcattcagtccagaatgagaactcgaatggtgatggtgatacaaccaaaatgactttaaaagaagggaaatgaagcactgaagttggcaatagtatgttgtaacaagctcagctgtgtgcctgtcttgacctgagctctcaagcaacctgatcaatgaactctgcagggttcaggtaatggc

SEQ ID NO: 18645 - DNA, 294 bp, Oryza sativa
  Clone ID: uC-osflcyp033e02a1
aaaacattatctttttattgggggttttaaaaaataaagggggggaaaaataaattttttgtgaaattttctcaataaaaagaggaaagggaaaacgcaccgcccctagaagaactgaaaacaaacaaaccccccactcggctgactagaaaagggggggcaaagcaaaccacacccaaaaggaaaaaaagcagacaggggaaccccccgagagggggagaaaaaacaaagatacaggacgagataccagaaacctacaaaactgtgcgcactaggcagagaacgctggacaaa

SEQ ID NO: 18646 - DNA, 380 bp, Oryza sativa
  Clone ID: uC-osflcyp033e03a1
ggggaaagtcaagggtcgataaatgttgcttcacttggacaaagtacagataaaaatacattgatacatgacacggagagagccatgcacaccacttatttggacacacagagggcaaggctgcagagaaaatcaagcaacacaagctgaactcacgggcccacctggcaggctctcactggtcgaggccggagactcttgggaaaaacagcaacaccacgcatgcagaagaagacaaattattacacacacaaatcgacgacacgggggccggcgacgtacgggaggggtcgtcgcccccgcggcgactttgtgatgaggttcgatcagccaaagagggggtgcttcttctcgccgggggactcctcggcgcttttggg

SEQ ID NO: 18647 - DNA, 395 bp, Oryza sativa
  Clone ID: uC-osflcyp033e04a1
ggggcccaaaaaaggcttttgggggggggaaaaatctttggccctttgggggccccccccccccggaaggggggcaaaagggccgggcccccccccccaaaaaaaaaagggttgttggggggcccgggcccaccacccgggggggcccccccccccctgcggggggggggggccaacccctgggggggccatttttttttccaaaaacccgggggggcccccccgggccggggacccaaatgggggcccccccctggcccccgggggaatttactggggggccccccggcccccggggaaaaaaataaccccctttttgggggggggggtcacccccccccgggacaaacaagggaaccccttgggggggggggcccccgccccccccttggggg

SEQ ID NO: 18648 - DNA, 267 bp, Oryza sativa
  Clone ID: uC-osflcyp033e06a1
atcttttttttttttttttttttttttttttttggtttttcaaaaaaacaccggcggtcaaaaaaaattccctcacaaaaaaaccccctctaacacgtcaacatataccaccattatcccccaaccttataccgacccttaaaaaaaacaccaccaatcccaaaaaacccaaaaccaatctcacaaccccacttcaccaaccaaaaaaaaaaaaaagccctccaacccactccccccacacaaaaatctactcaaacccaaaaatcc

SEQ ID NO: 18649 - DNA, 439 bp, Oryza sativa
  Clone ID: uC-osflcyp033e08a1
gaaaacatcacctttttatgcaattttttatacaacaaaaatcttgaaacatagttttctgctgatattcctcgaataaatagaggaatggcaatatgcacgtcctctagaagaactgaaactaaacaaactctctactcgtctgtctatataatggtgtgcatagcatagcacacgcagcattcagtaaagcttgacattgttatccccctatatctggagatgctacaaagttacaggacgagataccagaaacctacaaaactgtgcgcacttggcagtgaacgcttcacaaaagattagctttccaccttcttcctctttcttctatcctgttctccgtctctttccttcctccctcggctgcgtgatttcccctcagcagagaaagtcttaaggggatcactacttctgccagatcctgccttgaatcccattc

SEQ ID NO: 18650 - DNA, 346 bp, Oryza sativa
  Clone ID: uC-osflcyp033e09a1
gctagttatatcatatatattgggggaagtttagttttccttgggttacattttacagttttcccaatcccaatacattgcagcttacgcctgaacgcgggggtccaactatccatattgtaccaaaccagggttgataacaaaactgaaaccggctccccttgctcctgcccaccggccatggtggaccggccggtcagtcggtcgcgtcgcgcaaaaagcaattctttcgatgacccgaaaggacggcagcgagctcataccctgaccagcttgttgccgaggatcatgtcggcggtggtgaaaatcggacgtctttctgaacctgccgttgccgaagttgagg

SEQ ID NO: 18651 - DNA, 372 bp, Oryza sativa
  Clone ID: uC-osflcyp033e11a1
aagcaaaaaaaacatcgatatatcgcttatataaagtaccctcttcagtttcagaactgacaacattatcgccgcacactttaccggacctgcagcagaaacgcagtattggcaagaaaacgagaacagttgatacatacacgtttattcggggagagatgtaaaaaggctatcaaacaggaggccataaagaaagttcatgggtagcctcaaaagcattctagaatggctcttgaaaagtttatgtgatgacggggggagcagatcggccagggtactcttgcatctttgacagcttcagtgcaacatcaaccagaggagcaagggcatcctgcgaatccctgccggtcttggaagaatccttctcatact

SEQ ID NO: 18652 - DNA, 471 bp, Oryza sativa
  Clone ID: uC-osflcyp033e12a1
gaaaaaattaggggggggtgaaacactataaacaaccaagggtcaacgccaacaagaaacccaaaaacccccaaagggggggggggggaaaaggggaggggggcggacgggccatagggggaacccacggggggaagggggggaagggacggccagggggaggcccgcccggaacaggaaaaggggggccggaaacggaaaaaaggaccaccaagggggggggggggggggggaaaaaaacggagagagagggggggggggggcggggggggggggcgggggggggcgggggcagagggggaggggggggcccacccccggaagccccggggggggggggcggggggaaaaccgacaaacgggggcccccagggaaaccggggaccaccgcaggaggacccagcgaggtcccacatgagggaaaaaagggggaaacccccaaagggaaaaaacccaaccccggggaaaaag

SEQ ID NO: 18653 - DNA, 469 bp, Oryza sativa
  Clone ID: uC-osflcyp033f01a1
gccggcgtggcttttgtcgtgacgtcggaccagttcgagcgcatgctgccccaccgcgacgacgcggcgtgccccgcccgcgggttctacgcctaccgcgccttcgtcgccgcggccggcgcgttcccggccttcgccgccacgggcgacgccgacacccgcaagcgtgaggtcgccgcgttcctggcccagacttgccacgcgacctgtggtgggccctactcgtggggctactgctacaggaggtgaagggcgcgacgtcagacttctgcgtgccgaacgcgcgcttgccgtgcgcgcccggaagagcgtaccacgcccgcggacccatgcaaatcgcatacaactacaactatggggcggccggcgaggcgatcggcgcggacctgctgggcaacccggggctggtggcaacggacctgacggtggggttcaagcggccgctgggctgtggatgccgcgccggtcg

SEQ ID NO: 18654 - DNA, 495 bp, Oryza sativa
  Clone ID: uC-osflcyp033f02a1
cattgaaatcattgcaatttctgcaggccggtggccaaagaatgcgtaatataagctgatcagcacaagttttaccttgttgatgacaacctctgtctgactttccggcaatcagattacaataaggcaatgtcaggacagcacctagatgtatcagacgtaaaatagacacacaatctaatctcacatttgctggaatatggaaaagatccgcggctgatacatcaacaacatgcaggctctcagaattccaggcttccagctttggttgcagacaacgcggaggaaagaggcatacaagacaacaagcgcaggggatattagctacgccaatcacccagatttgaatagcaagacggctttagaatcgatgtaaaaatacacaaagtagttcgtctcgtgtgttacgtaggaccctgagttgctgccgacattgcaatgccaggtagggcccagggtcttgtccaactccttcttgatgtactccgcgatgtc

SEQ ID NO: 18655 - DNA, 448 bp, Oryza sativa
  Clone ID: uC-osflcyp033f04a1
gggggggcaaaacccacctatttaaaaaggaaaccgggggcccccaagaaaacgggtaaaaaaaccaacaaatcatcccggcccggggggcccttaaaccccacccaagggggcattagccccccaaaatcctggcaaaaaaaggggggggaagaccccgcccaagggggggccccccaaacgggggggttaccgccccccccggggggggggcccccgggggggggggggccccccctggaaggggaaaaccgcgagggggccccccccccccaaatggttgccaaaaaaaaacaaacccctgggggccgggggaaacccccccctggcccggaacctggcccccacaaaaaaaaggggggggggcccccaccccccaaaggggggggcttccccgaaagggtttcccaaaaactgtaacccccccggggaaaaagccccggggggg

SEQ ID NO: 18656 - DNA, 548 bp, Oryza sativa
  unsure (1)..(548): unsure at all n locations
  Clone ID: uC-osflcyp033f05a1
gttgggaaagggactgggtctaagaagagtacaaatggatagactgctgtacagtcggagcttacaatgatgaagagcccagactaccgactaaatgccatgtccaaaaactagccctcaaatgctctatttgacaattgatcctcatccatggaagttatttcaaatctcagcaagtcctttcagatgactgaagaaaactgtttgctcaatgtgacgacagttcattgatctccaatacaaccacctccaagtatcagcnatggtggtttatcaaattctggctccaaactccttcctcttttcttattttcttctctttttttgtattttcctgcttttagccttttttacaaagcagcatttttttccataaaccatcttccaagcttattatgctgattctaatatgctgtatgatgggctaggcaccaatttggttctcatcatataaactataattcatctcccctatgtggcaggaggaagcacctgttcagcagaaggcagtgccaccgttgcacctgtatttgaatcagtaactgaag

SEQ ID NO: 18657 - DNA, 632 bp, Oryza sativa
  Clone ID: uC-osflcyp033f06a1
ttttttttttttttttttttttttttttttgtttttttttaaaattaatttttttaataaaaattttaattaaatttttttttatatatttactataatcaccaatataccaccccaacacccaaaaaaccccaccaaaaaccccaacaaaaaaaaaaaaaaaccaacgacaaaaaaaacccaccaaaaaaaaaaaaccccccaaaaaaaaacacccaaaaaacaaaaaaaacacaccaccctaaaaaacctaaacaaaaaaaaaacaccccgccccaaaaccacccccaaaaacatatcaacccccccaaaaacagaccccaaagaaccaaaacccccccacaaccccaaaaaaatcaccccgggaacccccaaacgtccccccacccccccccacacaacacccacaattgaccccccacccaaaaaacacctaaaaaaccccccccccccaaaaccaaaaccccttttaaaaacaaaaaaccccaaaaaaaacccccacccccccaaaaaaaagtcctcatctcacccacacccctctttaccccccccccccccccccaaatcccccccccaaaaaaaaccacccaaaaaaaaaaaacacccccccccccaggccaaacctacacccc

SEQ ID NO: 18658 - DNA, 473 bp, Oryza sativa
  unsure (1)..(473): unsure at all n locations
  Clone ID: uC-osflcyp033f08a1
aatgaccctctacacattgcaatggatatgaagacatgcatggggtctcagttctcactcacaaaaaagcaccattcgcatcctaggccttcacgccaagcatataaagtgcaatatgaagatttaatcttcacctagaatttcaacgacgacggatactaaacggtacaaaagtaaacaataataaggcttcacataagccacatcaggtcctaagctcattatttaagcaagtcagtgcccactttagtactgccctccatagcctgggttgccatcaccatagcctccttggttgccataaccaccgncaccaccaccatacccggcggcacctgggttccctggaggtctctcattcgcgaagttcacgcggatactccgtccctcaagttccttaccgtgcatggcatccatggcactcttggcatcatcgccattggcaaagctaacaaagccaaaccctcttgacc

SEQ ID NO: 18659 - DNA, 446 bp, Oryza sativa
  Clone ID: uC-osflcyp033f09a1
aggcaacaactaaccaaagaggccatagataacagactggagccctccagccgactgccgaggcagtaaggcaaagggtgcccccggcccctggcatggaggtactcaggtacaagtacaattgttatgtgcaactggagtactggaccagaaaattcacatcaaaaacagagagcagaaagcacataaaagatcatacatagacgaactgaactgaactgtttaatccgagggctttttattcttcggagccatggttgccatggcaggcatccattatattccggtgtccaatagtttctcagggaacactcaggcaacaacaacaaccaaggtgtttttggttcctatcccaatctctgtttcccttcactggggaaggtggccacaggatggacacccaacacacaagaaagggtataactggtactgggtcgcgagctgac

SEQ ID NO: 18660 - DNA, 523 bp, Oryza sativa
  Clone ID: uC-osflcyp033f10a1
aagaattaagatctccatcacataaaaacatacagtgactgagtactggattacacgattgagttgttcagggttcagataggaaaaacatcttggggactagagatagagggaatcgacagatgcgcagcagtagcgcgcgggaaacaggacatcacgattgcgttgcatgtcgtcggctgcgcagcggcggcgcggggcttaagacctgctcttgaatgggatcgccctgatgatcacctggtggtagatggcagccagggcagcgccaacgaagggaccaacccagaagatccaatggtcattccaggcatggtccttgttgtagatgatggcagcgccaaggctcctggctgggttgatgccagtaccggtgatggggatggtggccaggtggaccaggaacaccgcaaaaccaattggcagtggggcaaggataggaacatgtgagtccctggcattcctcttggcatcagtggctgagaagacggtgtagaccaagatgaaggtgccaacaatctca

SEQ ID NO: 18661 - DNA, 500 bp, Oryza sativa
  Clone ID: uC-osflcyp033f12a1
gaaagcagaggtagattatattaagaagcctggcacgcatgaggagatggagcaggagtacatgatgagatcaccatgatgatagatgatccatccaagctagctagggatccatccaacattgatcgacacacgcacacactgacaacgacgacgacggttttatttaggcgtcagagcaaaaggcaaggcctgcctacatataagctgggtactaatgcaagcaaattaaggcctcgatcaaagctctgatcgacagtagcagcatccatacgataaatcctcatgcagccgggcgacgacgacgatagattcagttgcaggagcagcaggagcagccgctgcagctggtgccacacttgcaggtgttgcagccgcagccgccgttctcgccgctctccaccgccatctccattcctccagagctcgccttgttggatggagcagcgaggacgaaggtcttggtggtggctgtggcctccacatcagggaacatcttg

SEQ ID NO: 18662 - DNA, 328 bp, Oryza sativa
  Clone ID: uC-osflcyp033g01a1
aaaaaaaaaggtcctgggaatccccaggaaaaaaaaggggggctgggacaaagcctaaatacccactggagaaaaaccaggaacgggatttggcctccacattttgggatgggaacgggtctgaaaaaaacagtttttttgggagggaacttaaaagttttttttattaaaaaacccgggggggggcaaaccctaactatttgcccctttggggtttgcttaattttagggggggcataaataaaggagggttttttcctcccaaagttcctgggcaacggcgcccatttttttccttgaaaacttggggatggggaaaccctgaaaa

SEQ ID NO: 18663 - DNA, 386 bp, Oryza sativa
  unsure (1)..(386): unsure at all n locations
  Clone ID: uC-osflcyp033g02a1
gactagtaacaaattgaagacgatgtatgtaaactgaacgaaagaatgggctgtgacaaaaattaaacacgatatatgaacttggtcgtaatacaaaaagtacagcagcctggtgtctcctagatcctcaagcacaaggaacaaaagcacaaaccaaatgacacctcacagctgcgttgatctatgaatgacctagaacggggtaaaatcagctatatatgccccaagataggggnaggatcaccaactgggagtaaaggagaaatatgagtatgataagtaggatgaatcaggactattttggaccatgcaaccgcatcaatttctgcttgagcactccgatatagctccagcctcttcgcagaattagtcctccgttccatgac

SEQ ID NO: 18664 - DNA, 327 bp, Oryza sativa
  Clone ID: uC-osflcyp033g03a1
cccggggggactgaaaatgcaggaggggtagaccaaaatgcccctacctacactgatctccaaacatgtgggaatcttcaacatgacaacgcacagggggacatttttctgaccatgccaccaggaggggccccaccaatatcgccgagggggcggcggccacggaacgcgggggacacacccatggggagtaagctaggtggggttaggctgaaggcgatgcgtcaccatggcctcacggcggctgaagtacacactggccgggaacccccatgcgggcgtaagcccaagcgtttgttgatgacctttgtcatcaaggcggtcgac

SEQ ID NO: 18665 - DNA, 325 bp, Oryza sativa
  Clone ID: uC-osflcyp033g04a1
ggggaggctttacggcctggaattactgacttggacaaaatggcaaacgcatacaattggacacaaggatacttctctaatatgggctgggatacaccatttacaccgatcgtaagccggggcagcacataaaaaagtccattttttctgacacataaaaaaatcattcatattttttttgatggaataagaatggaatcttgctcataacgaaaatgagactctcggccgagcagaggttcctcgcgcgcgacgagaccacgggggctttagctaaagctagctatcggcgagcgcgatgagctggtccaccacccctggttcg

SEQ ID NO: 18666 - DNA, 655 bp, Oryza sativa
  Clone ID: uC-osflcyp033g05a1
aaacaatctggacgaggaggggggcatatatatatataggggggtatatacatatatatacacacccccgccccgggcgagagcccaaaacaacaccagagtgcgcgggcgcgcgcgggcgcgcgcgcgcgcgcgcgcgcgcgcgcgcgcgcgcgcccccgcgcccgcgcgcccgcccgggcacccccgcccgccccctccccccgcgccggcgccccccccccggggccccccccccaccgcccccccccgcccggggcccccccacccgcggggcccccccccagcccccccgcgccgcccgccccgcccccccccccgccgggccctcgccccagcccgcggcccccccggccccagcgcccccccgcgcccccccgccgccccgccacccccggcccgcgccccccgccccccgccccccccccgccccccgcccccccccgcccccgggccggcgccccccccgcccccgaccccccccgcccgccccccccccaccccggcccccccccggcccccccccccccccgggccgcgcccccccccccgcccggccccccgccaccccgcccgcgcccccccccgcgcccccggggcgcccccccccccccccctcccccccccccaccggccccgcccccccccccccccc

SEQ ID NO: 18667 - DNA, 703 bp, Oryza sativa
  Clone ID: uC-osflcyp033g06a1
tgacctcgcatgcaccccgtacctagaccaggaaccccaaaaacgaccccccctttttttttttttttttttttttttttttttctttttggtttctaaaaaaaaattttggggttttaaaaaaatactataaaaaacacataaaataaaaaaaacaaaacacaccaaccaacaaaaaaaacaaacacaacaaacaaaacccccccccaaaaaaccaaaaaaaaaaccccccccaaaaaaaaaaaaacccaccccaaaaaaaaaaaaaaagggccccaaaaaaaaaaaaaaaacccgggaaaaaaaacccccccaaaaaaaaaaaaagggccaaagttttgggaacaaaaaaaaaaccccccgcatcaccccaccccaaaaccccccccccaaaaaaaaaaaccccaaaaaacaaaaacaaaacaaaaaaaaaaacaaaaaaagcgggggggacccaaaaaaaaacccccgcaaaaaaaaaaaaaaaaaacacccccccccaaaaaaacccccaaaaaaaaaaaccaccccaaacaaagggggccaaaaaaaaaaccccctccacaaaaaacctctctgaaaaacccccaaaatcactcgcaaaacaaccccacccaacccccccccaaaaaaaaactaccaccccccccacgccagaaaaaccccaaaaacaaaaaactcaaacccccccccccccaccccc

SEQ ID NO: 18668 - DNA, 392 bp, Oryza sativa
  Clone ID: uC-osflcyp033g08a1
atcaaaagattccggaatggggatctactttcatcatccatgaacacaaaattcaacgctaaggtccatgagaccatgacaacaaatccgaatttacgagttcgctcatatttactggtagccaagccttctgaatttgattttgcgttccatcgctatattcatgcatacatctaaagttacctcttattttccaaaagagggtcaacaaggttcacctgatgttttgatggattggaatcaccttcagtaggtttcttcaaaattccagttgggctgtccttgcctattctgcgtacctgtgcccttttgacccgttaatctcccaattgatggagccctggcaacccaagatgcagcggcggcggcggccactccgatcctcttatgaa

SEQ ID NO: 18669 - DNA, 359 bp, Oryza sativa
  unsure (1)..(359): unsure at all n locations
  Clone ID: uC-osflcyp033g09a1
ataattaattcacaacaccatatggcattgatcaggttcagaacctgcacagaaatacacactaccggtacagatctcaccttctctccaatactcgtacatccatccacgcggtccacacgaatacgtacatctatacggtacacgtacgtacatctactgcaccgggtacacacacgcacactctcctgcagagacgcgcatcgtcgtcaacctagctagcttagctgaaggcgatgcgtcgccatggcagcacggcggcggcggcgctcacttgccggggaccaaagttggtggcgtagggctaggcgnttgttgttgacccgggtcggcgagagtgggtcggcgagggttctcga

SEQ ID NO: 18670 - DNA, 470 bp, Oryza sativa
  Clone ID: uC-osflcyp033g10a1
ataattagggggggcaatgcaatcaggggtactaccactgaaaatgagatgagacagggcagcagcagctactactactacagcagagtagtactaggggggggagaaattacagatatgacctccattagcttaccacggccccggtgcggggggcaggagggaagggggccattaattaattaacgcggaactgagcgactagcggctaattaatccatgggatattgctaggtgaattagagctaattaaaccctagggattaagggaactcattagctagctaagctaagctaggctaaggctaagctagtgggggccactgacagggggtctggctgtctagctagaccctgatccgtgaaggggagggggaggaccccgcggctccgggcggggagtcccctgtgtattcattctagccctccccccatgcctttgatcccggggcccagcccctgcccaggcc

SEQ ID NO: 18671 - DNA, 321 bp, Oryza sativa
  Clone ID: uC-osflcyp033g11a1
aaaccccaaagaagggaacttatttatttccacaaggggaattaaaaagacacatccctcgggtcacagccatgagtccagaacttttattaacatagccccatgtaaaaagggagttatgctatgccctaaacttatttgcaacttgggcccagccgttcctggccccgttcaaaggaatacccgatcataatatccagaataccctaccagggctaatggggggggcaaaaaaaaatgattgggcatcccctggtaaaacacaacaaactggggttttctgaatcttccccaagggggaaaaacaatgattattcaagg

SEQ ID NO: 18672 - DNA, 367 bp, Oryza sativa
  Clone ID: uC-osflcyp033g12a1
ctccgccaaacaaataaaaaccccccaaaaaccggggccccaaaaaaaaaaaaaaaacccccccggattaaccccccatggcaaggggaaaaaagcccccccaccccccaaaaaaccccaccccccaatcccgcctggaaaaaaaaataaatccccctccccccaaaaaaaattaagccggaaaccccaaccccccctttcctaacccccgggggaaaaaaatccgccaccgcaagggaaaaaaaaacccccccccttaaaaaccccccccccatttaaaaaaaaaacccccccccccccaaaagcccccttaaatccccccaaaaagggcccaaacccaattggggaaaaaagggaaaaccccccc

SEQ ID NO: 18673 - DNA, 333 bp, Oryza sativa
  Clone ID: uC-osflcyp033h02a1
gttggcaaaagctggaagcccatcgccagctaattacaaaaattccactggtcatgaacagctctattgttcattgcatagcatgtcataacctgaaacgatatggttattcataactctcccagggcataaactcccaaaccaaaccaatgatgaacactacctcaacaagtaccaacacgggcaaccaacctatcatcctccggtatacgggaacacaacaagtccactaggaacaggaaaacttttggtatggggctaaagacagcaggggtgggggatgtacattgagaagattcatcaagtttaaccgcctaggcgaagggtggaagc

SEQ ID NO: 18674 - DNA, 370 bp, Oryza sativa
  Clone ID: uC-osflcyp033h04a1
gggaaagggcccccaggggggggaaaagggttttccaaaaatttcttaaactcacaaaccggttaaaaccaacggggagggccgggccccctggaaacaatttgactataaaggacggggataggccccctggtttaaaacaatccaatcagggccttgccggaaaaaaactataagggccccggaaaatagaaattgaaatgaaaaaaaattgggggtgggggcaagaaaaaacggggggttgatccttaaaaaacacaaaagccccttgggggaacccgggggaaggcccttgggatttttgcaaaccgccctgggtcttgggggttttgcccaaaaacccccccctggtgtgattaaaggggaaccc

SEQ ID NO: 18675 - DNA, 498 bp, Oryza sativa
  Clone ID: uC-osflcyp033h05a1
gatgaacatcaaagggggatcaaatgataattttgaggtcaaaatatacactctctacaagtataaaactcatttatcttttctacaaaacaatcaagaatggaaagaaatggctttccaggaccttcaaattcaacgagcaggcatgcagcgtgcatatactagatctacactaagcaagagaagtcttagcagtcctgagatacaccatttgcttttttggtatcactgatggctttggttgccaaaagtggttcagtctccttttctggcatctgtgaaactggcagtggatcatttgctgccttcttcttgccctccttcactgagaagtaggagtacaatcccatcccaaatatggcgatcaaaattcctaatatgttccttgcgttgaaaggatcctgtaacagaatgtatcccaatgagagaactagacatgtcttaaggtggcctagccctggtatgtcactggagatgttgttccaatcacaagaaatg

SEQ ID NO: 18676 - DNA, 336 bp, Oryza sativa
  Clone ID: uC-osflcyp033h06a1
cgggggttattacttacaaaaaaatctccaataaaaaacactttacacctcacccaggacggggggcacttaccccaaacgtttcccaaaaagaagaaaaagaacaccccccccacacaccaaaaccacaacatatttaaaaaaccaccccaaagagagaggcccaaaaaaaaaagaaaacgccccaccagtgattactccctcccaaactaaagaaattgctaaaatcaccaccttaaacccgccataaaacaaccctttaagcaagcccaaaaagacccaaccaccgctccctcggaaccggcagcctaaaaaaccaaaaaactgggccccccc

SEQ ID NO: 18677 - DNA, 350 bp, Oryza sativa
  Clone ID: uC-osflcyp033h07a1
ggggggggggaaagctataaccacagatcctgggatccatccaatagatcatcacagatcattggtgcagatgacccacaggaagcagagcaggagtactattgggggggctaaacaagaagcagaggggtagaggaaaacttgttgttgctacagcctaccggggggggaaaacaagaagcacaggtagaggtgtagctgcggctgatgatctcatttggagcagccctgcccttgatctttttgcttgggcataatgtctccctgaataatttccttaagccagcatgaatgcctgcccatggggcaggaacattttccatcgagctagaaccagctgggtttggctg

SEQ ID NO: 18678 - DNA, 297 bp, Oryza sativa
  Clone ID: uC-osflcyp033h08a1
gattctatcagcggccccttttttttttttctaaacaaagttaccacaggggggaaaaaactagaagcccggcgccaaataattacaaaaattccactggtaataaacagctctattgttcattgcatagcatgtcataacccaaaacgaggtgggtctaaaaaacttttccaggggataaactcccaaaccaaaccaaggatgaacactatcttaacaaggaccaacaggggcaaccaacctatcatccttcggatgaccgggactcaacaagttcccctaggaacaggaaaactt

SEQ ID NO: 18679 - DNA, 366 bp, Oryza sativa
  Clone ID: uC-osflcyp033h09a1
gaggttatgtatttcttcagttcaggtgtttgaacctgaatacttgatcaattccaaatttccaatagcaatgtgatgcctttccaattgctctctctacctttgtagagacagtggcagtggcaccaacaataacaatccacaaatcatcatcaacacccaaaagatacaattccaaatcttggtgaataatcccatgcttttaattgatgagagtggctttctttctatacccctagctgctcgagggcgatggtgaccgtgtgcgtgagctcgcccatgatgaggcggtgctcgccgacggggatccttcggaccccgttccggtcggcgacgctgagcccgtcgcacacgtcgatgcccatt

SEQ ID NO: 18680 - DNA, 534 bp, Oryza sativa
  Clone ID: uC-osflcyp033h10a1
gatccatgcgaccatgcgtgcagagcagttggagcacaaattgacatgttacacccacaccctacacccatgcataataatacatcgtatatacgtacgtacatacatacccctctcgatcacacgcaccatcgatcgtacaaagttgcgtacatacatacgtacacacatatacgcatacgcacgtacatacatacataattaaaaactcgtaattaattaaatacgtagttgatggcatctctaatggaacttgaggctggtgaggatgttgttgtggacgggatcagcgaggtgatcaagcaggttctgcacggggccaaccccggtgaagagcgcctggacggagaagccgaggaaggcgagcatggcgagcctgccattcttgatctccttgagcttgagctccttcatctccgcctcgctcttggtcccgaagccagacgggttgaagagcgggccgcggggtaggccggctcgccggagccgcgaggtacttctcgaggccaggaagtactgctttcccatggagcc

SEQ ID NO: 18681 - DNA, 464 bp, Oryza sativa
  Clone ID: uC-osflcyp033h12a1
gttgggaaagggactggttctaagaagagtacagatagatagactgctgtacagtcggagcttacaatgatgaagagcccagactaccgactaaatgccatgtccaaaaactagccctcaaatgctctatttgacaattgatcctcatccatggaagttatttcaaatctcagcaagtcctttcagatgactgaagaaaactgtttgctcaatgtgacgacagttcattgatctccaatacaaccacctccaagtatcagccatggtggtttatcaaattctggctccaaactccttcctcttttcttattttcttctctttttttgtattttcctgcttttagccttttttacaaagcagcatttttttccataaaccatcttccaagcttattatgctgattctaatatgctgtatgatgggctaggcacccatttggttctcatcatataaactataattc

SEQ ID NO: 18682 - DNA, 436 bp, Oryza sativa
  Clone ID: uC-osflcyp034a03a1
gccccttcttcttggctccggggaaatctcggaagccacatcaggggttttgtcttgttcctcactgacgaattcccacttttcatccctaaggagaagcacctctacatctccatcatcatatgcaatcttgtgcctttttgaagctgtatcaaatgagtcaacaatgcccttgtaaaacttcttgtcgtcaggccaccatacttggatccttgcaccaacaaggctagcatcaaggcctttattcttcctagaacgaggagtctcttgttcatcctcttgtgaccttttcctcttggagccattattgtcctggccttggctgcccttggtcttagctgaccccttggacacggactttggagagaccatttcctttaggctcagaaccttagcagtatcttccttggagtcagtttcatccttctgtttcaaa

SEQ ID NO: 18683 - DNA, 447 bp, Oryza sativa
  unsure (1)..(447): unsure at all n locations
  Clone ID: uC-osflcyp034a04a1
aatacttaatagtaatagactctttgatggagtattacaacatgcagcagtggcattaatacgccagtacattaattaagttacacatatgcaggctccattttggtttcttttaatttatcgnattacagaatttctgtagccttgcagatgatcacttggatatcatgtactagtaattaacaataggatgcatacaaaagatggcccaacgacaacagaagatgcgtgcatctgacattgtctggccttatttgttggtagtactccaattaattaacaagagatgatgcattcttgtgccttagtttcttcacatgcttggcttcacgttgagcctattcgcaatcttcacccccaacgactcatcacactgggagaggtagttgacccagatggcgcggagctcaggggagaccttggggtgcgcgagctcgccggcgaagc

SEQ ID NO: 18684 - DNA, 94 bp, Oryza sativa
  Clone ID: uC-osflcyp034a05a1
ccccccctttgtaatgcatcccagaaaattgccgggtgtcgttcttagaccttttttttacagggaattcaaggttgacccgcgatctatttcg

SEQ ID NO: 18685 - DNA, 338 bp, Oryza sativa
  Clone ID: uC-osflcyp034a08a1
gtattttaacctttttgtattaaacccgattttcatttttttgtttgaggggggttttttgtgttgttaacatgggtgagatccaaaaatacatttttattgaggagaaaaaaaaaaatcccatgggggcaaagaaacaaaatcattcttaaaaagacagtaaaccacccaaggttaccgttgcaaaacatcgggcaaaaaaaaagacttattgattaaataccaccagggggtttatggtaggggcctttattgaaaaaaaagggaataggcgaaacctacagaagaagggagttttttttggggggggaggaataatcaagcccaaaaatgggggg

SEQ ID NO: 18686 - DNA, 403 bp, Oryza sativa
  Clone ID: uC-osflcyp034a09a1
atttcgcccttttttttccacccctgtgaaacatcctaaaccacatggggtttttacaaatgaaattgagagacatatttaattttttcttgcccaaaggactgaagggaaccaaagcaaagctccttcctgatggacgccgaacgaccaattagaagaagggaagagcttttcttagtcactaacgaaagagcatgcacctactgtgctggccaaatggtaagaacctggatgacctccaaaccttgagcctttgttggccggaggggattaaggccctccaagtgtggccttctccatgtgttgtctgctaagggcatagctgaatttcccttgtacgttacttgtcaagattcccagggcccttttaaaagaccctgatgtggaggctaggaaccttaag

SEQ ID NO: 18687 - DNA, 314 bp, Oryza sativa
  Clone ID: uC-osflcyp034a10a1
ttccgctttggtaattaacccccctttaatttatttcttttatgggggggttcttcatgaaaaaatggcagtaatacccccgtacaccaaaaaaataacacaaaagcgggcggaaaaatggatacaaaaaaattaaagaaattcagattaataaagtgccccgcagatgatcacatggaaaacaagaactccgaaaaaaccaaaaaaaagatcccaaaaaatggcccaacaacaacagaaaaggcgtgcatctgacaaggaagggaaaaaaaaagcggagggaccccaaataagaaacactcggggatgccccc

SEQ ID NO: 18688 - DNA, 423 bp, Oryza sativa
  Clone ID: uC-osflcyp034a11a1
aagcattcagaaaattgccgggtgtcgttcttaaccgggaattacagagattcaagttgaccgtgatctattcggtatacaactaattaaattcaagtatcgaaccaagagcagcaattcgatatacaactaattttcattgaccgctaaaatgtatagggaaggaatctacaagaaaaacgaactagagccatgctgttgttggcctctccaaggatcttactacagctacaccacaaaatgggtttagcaaatagtgatttgggtctgagactgaaactacgatttcacctctggcctgctctggttgggtcgtatgcgacaggataagtagctggtgcttgtcctgcattggcagctccactgcttgactgaacaactccagcaggatatccagcactactgatcgcgccatacatgctt

SEQ ID NO: 18689 - DNA, 447 bp, Oryza sativa
  Clone ID: uC-osflcyp034a12a1
gtctcgccgatcaaacagctgggacctccttccaaagcagggagcgaaatccgctcttgattcgtctgataaattacagcggcaacggcaatgcagcacaatggtagacaatggacacatatatactcatacacagtgaagcactccatgtagaatacaatagcgaagactttcaatgatcaggttggccattaggagaagatgtagaccacgtcgaacgatttcgattttttcccaataaacgtagggctgtagttgtaaatcaggttgtccaacaccttgtctgcgggaggtctgttctgggacttgcgggcttggctgataaaatagttggcaaaattttgtgtcacttgtactgcctcctcgctgtgtggaatcatttgtttaccaaactcaaaaatagctttctcaagatgccactgagtgcatgtgataggatatttgttt

SEQ ID NO: 18690 - DNA, 424 bp, Oryza sativa
  Clone ID: uC-osflcyp034b01a1
aggaaaatcatatgagactttaatggaagtatggaacaatatatggaaattcaaacttgcacacacacacacataagaggaccatatgatgaaaatattgaagtacatgtacgaatagctccgtaggatccattgacacttggttttttatagatgaatatcccataggtatgttacgtctgaggaactagttgaatatgatactcttgagcgaccaaaacctcggagatacgctttacattccctccgtcgatatccttccatctatactcggtcaccacgatgtggagaaagagtgtgataaaaagcttgttaaactctgccgcagaacacatcctgattcctcctccaaatggcatgaaattcctttgcatcgagattctcttctcctccgtccatctccatggatcaaatttgagtggat

SEQ ID NO: 18691 - DNA, 166 bp, Oryza sativa
  Clone ID: uC-osflcyp034b02a1
tttttcctttttgtgttttaccctccttttttttttttttttttttggggggatttttcttaaaacaaaaaccatattacaaacacaaacaaaaaccgaaacgaaacccacaaggcaaaacaaccgaaaaaaacgttaaaaattatcccggaaacccaaacaaaaa

SEQ ID NO: 18692 - DNA, 440 bp, Oryza sativa
  unsure (1)..(440): unsure at all n locations
  Clone ID: uC-osflcyp034b04a1
tttttccggaagtttataaaccaanacttaatagtaatagactctttgatggagtattacaacatgcagcagtggcattaatacgccagtacattaattaagttacacatatgcaggctccattttggtttcttttaatttatcgnattacagaatttctgtagccttgcagatgatcacttggatatcatgtactagtaattaacaataggatgcatacaaaagatggcccaacgacaacagaagatgcgtgcatctgacattgtctggccttatttgttggtagtactccaattaattaacaagagatgatgcattcttgtgccttagtttcttcacatgcttggctttacgttgagcctattcgcaatcttcacccccaacgactcatcacactgggagaggtaggctgacccagatggcgcggagctcaagggaga

SEQ ID NO: 18693 - DNA, 178 bp, Oryza sativa
  Clone ID: uC-osflcyp034b05a1
tttttcttccttgggtgattcccccccctttctaataaaccgtttttggggggtatttaatatatgctttttcttgatttttccccataaaaagaaaaaaaacccccccaacaaagaccaccaccattgtatacaaaaaacaggcctacacccatccccaccatccgacagtgaaccc

SEQ ID NO: 18694 - DNA, 449 bp, Oryza sativa
  Clone ID: uC-osflcyp034b06a1
ccagaacttgcacaccaccttttttttctttcaaggttggcaacaatccacggtttcaggacgaacaggtgaaaagacaaaaattaaaccggtatatattccatgcctatttccctttgatttgttcatacaagggaattcctcaacctgaacggtaataatttttccattcctgtatcatcattacactgatattacatgttctacaactgtaccagcaaagaaaagaaaggttatgtgactgcttctggagctgagttgcagtagggagtgtgcaagcaaatgaatctggtcgacatcaggcatacagaggcaaaggcgaaacctatcaaaagcccacagatgctcttccgcatgtccaaccttagcgagcgtttgaagactcggccaaagcttggaatcaaagcaccacaggcaatgaccatccagtagtctagtccactgtagtc

SEQ ID NO: 18695 - DNA, 322 bp, Oryza sativa
  Clone ID: uC-osflcyp034b07a1
tccttcttatatttttcccatcccctttttttttttttttttttttgtttgggttaatataaaaaaaaccacccctacacacacaccctaaaaaaacaaccctactacaaaaaaacccccccaacaacccccaaacaaaaaaaacaccccccaacacaaccacgaccccccaaaacacaaaacccaacccacccccccacacccaaaaactccccctactccaacaaacaaccccccaaaaccccccccaacaaaccaacccctcacccccccccaaaaacacacccaccccaccacaaaaagaaaaacccaaccccaaaaa

SEQ ID NO: 18696 - DNA, 412 bp, Oryza sativa
  Clone ID: uC-osflcyp034b08a1
aagaaagctgatatgcagcctatggttgcacttctcttgttgcgtagttttacaagtgtgtgatccaaaaatatagttctactttgcaataataataaaaaataaaagaaccaatgctacctcatcatacgtatgaagaaaataaatcaagaaaggttaaggttacaaaagaacgccctacttatagaactgtgtacatgaaacacgctcgtgttatacatggaatcaccctcgaatgttcttgcagcccataggtgaaacctacagatgatgggagttatctattcacatcgatgtctaatgaagtgttccataggtgggtgattcctgagtaccttcatccaggaactaccgaagctcatcatgaaacccataatcatcttctgtgaataaagcactgtagaatacatat

SEQ ID NO: 18697 - DNA, 411 bp, Oryza sativa
  Clone ID: uC-osflcyp034b09a1
gagcccagctcactaacacgccagcccctataaattatgatgattaccggtatcggaaatcttagcagcacatgacaaagttcgcccatatacaacaattttcagttccaaatctaagttaagacctttaacaaaagttggtcatgcaggcagctaggcatcagagtttcatatagctctgaggtctatgtctattcataacttacaaatttcatggactcacctatagaagacaaggatattgcgtaaaggcaataaaaatgaatacatataacacaaagcgaaaactagcacctacacaggtccaatctaatctcaagatgttgcttcagagaccagaaacttccgtcgcttgtagtgccgctctgtttttgcttcatcacccccgccatcatctttctgcaagcactt

SEQ ID NO: 18698 - DNA, 418 bp, Oryza sativa
  Clone ID: uC-osflcyp034b12a1
tttcttttttattctttaacccgcacatttttcttttttcaagaactgggaagcattccgcccccaacaaatgggggcgctctattaaacctttttttttgccggggacacattacaaccctatttccccctggtgtgtggatattagcacctccccagccgtgcaaagggatgctaaatcctgacatgtgggatgcttaccgggagggattgggtggttctaaaggggcccaaccaaaaaaagctgaaactgccacgaatgcgacgcttttactcaaaggccgggaatcgctcccaggtagaccttctctgatgaggtaagcccattctttgggccctgctgtgttatgggttgaaccagtgcgtccaatttccaaaggtaggaagaggaggcattgtgatccgggggtggaatcgg

SEQ ID NO: 18699 - DNA, 366 bp, Oryza sativa
  Clone ID: uC-osflcyp034c02a1
acacccttattgcaaaaacattattttgttgcttatttttttagtgtacacaacaccaagctcgaacatcatgtccccacactaaacccattttccccgacccaaagacaacccacctggtggccacaaatggatacaaccacaatccaccactggtaagatacgggcccccagtggacttgcgggggacgaagaaggtggcttacgggcaggcgttgatgctgacggagtcggcgaggagggccgccaggctgtcggggggggccttgccctagacgatggcctggaccaagaagcccaacatggtgaacatggggaggcgggcgatcttgatctccttcaccgtgaggtgcgagaacgccttgg

SEQ ID NO: 18700 - DNA, 428 bp, Oryza sativa
  Clone ID: uC-osflcyp034c03a1
ttcaaccctttgttatcaaaccccccaaagcacgactatcaaaatggggggtaatagcatgattgtctgggattattccaacgatgataacaaatccttttccagctacaaaagaaccagcataacaacaaagaattattaagttgcttaagtaatcctctcccttcatctcaaaaagagctatatctagggggcctaggccacagcaacacttttacttaaagggtactttccatcctgcgacacacaagctcccaggatcaatctacttggccttgccgctctcgacagaagcagttcgaggggttcagcttatcccaggcctcgatccaagtgaccatgggattcggaaagcttgtacgaaatagggttcgaatcttggccgagcttctacctgacctgcctcggcgagggagaggtagcccttt

SEQ ID NO: 18701 - DNA, 183 bp, Oryza sativa
  Clone ID: uC-osflcyp034c04a1
ttcacccttttgtattccctccctttttttcttctttttttttttgggggctttttttttttttttttcttcctttttcccttggggggaaccccggcaaaaaaccattgctttgaatttggaacgataaacccccggaccccgggtttttttttgtggcaagcccctccccaaattcttggc

SEQ ID NO: 18702 - DNA, 319 bp, Oryza sativa
  Clone ID: uC-osflcyp034c05a1
tttttccctttgttatttaccctcttttttttttttttttttttaggggcattttttacttttttttctctttttttttcccggggggaagcccgggaaaaaaacattgcattgaatttggaccaataaacccccggccccgggctctatttggggggaagcccttcccaaaaatttccaaaagatcggaacccttaaaacatgcccccctcccgggcaaacagggcacccaaaggccccctccgcaaaattaccaaatccgaaggcctaaaccccccttccccggtgaaaaagcctatttcccccccccttcctcggg

SEQ ID NO: 18703 - DNA, 421 bp, Oryza sativa
  Clone ID: uC-osflcyp034c06a1
tttttccttttgttattacacccctctttctaaaaaagagagaagcggcatggttcgcatggttcatcagccaatatattgaaaaggaagtcaaaacaaaacatggggcaaaacagatccctattccacagtattccatgagctccagtactggagctactacctagaggggtaaattaagcagaagtactcaggcagattaatgcctttcaaacagccaaaaagaacactagggtgataccacagtcgtttaccagaacgcgataactaaaacaaccctccccatttttagccggcgtagctgaaacctgagatcttgtagatcctgaagggtccatctgtgcaaccagcatagagggtgcttccatttgcgctccagttcaagcttgagcagaaaagcatttggttcttggagacaggg

SEQ ID NO: 18704 - DNA, 427 bp, Oryza sativa
  Clone ID: uC-osflcyp034c08a1
agcaaccaaagcacgactatcaaaattacatgataaaattattattgtcttgaattatgtaaacgatgataacaaatccttttccagctacaaaagaaccagcataacaacaaagaattataaagttgcttaagtaatctctcccttcatctcaaaaagagctatatctagggggcctaggccacagcaacactttcacttaaagggtactttccatcctgcgacacacaagctcccaggatcaatctacttggccttgccgttctcgacagcagcagtcgaggggttcagctcatcccaggcctcgatccaggtgaccatggcatcggcaagcttgacgaagtaggggttcgatcttgccgagcttctccctgacctgctcggcgagggagaggtagcacttctggacggtgtcgcactccttggg

SEQ ID NO: 18705 - DNA, 426 bp, Oryza sativa
  Clone ID: uC-osflcyp034c09a1
agcaaaagtttagattttataatagaaaaactgacaggatacgcaagatattttgccgagacacacaagtacacaactagctaagcttattgaggtttacggacagcactggcaaaagcctattacagcatgacgtcacagttctggacgaatgccttctacttttctttttgaactattatcggtaattagcagagcgtccacattagttaacagtgaattttccagcctcataaaatctacattaactcaaggcaaaattgtacacaaaagctcaaaacagtacaggtaagtaacttaaaacccttcaacctctttggtatgaacagaagctatatccactgaaatgggtaactctgtcggagtaaacacaagcatcagtacccaggttggttttctacccagtgttgagctttggtagaaacc

SEQ ID NO: 18706 - DNA, 371 bp, Oryza sativa
  Clone ID: uC-osflcyp034c10a1
ggggggaagcccggcaaaaaacccttgctttgaattctgacccaaaaccccccggacccggggtttttttgggggaagccccgcccaaaacctcgcaaaagtcccgaacccctaaccctagcccccccccctggcaaccctgggtccccaatgcccccccccgaaaattttcaaattcgaaggcccctgccgggttcccccgctgaaaaaccatatttccccccccattcccgggaggggccccctccattcacagccaatgggcccgccctgccccggctggggtttttcaaagcaaaaaccctcccaatgtacccgggggccccccccccctcaggggtgtttccccccctccagaacccatacccccc

SEQ ID NO: 18707 - DNA, 421 bp, Oryza sativa
  Clone ID: uC-osflcyp034c11a1
aaaaagagagaagcaccatggatcgcatggttcatcagacaatatattgaaaaggaagtcaaaacaaaacatggggcaaaacagatccctattccacagtatccatgagctcagtactggagctactacatagatgggtaaattaagcagaagtactcaggcagattaatgcctttcaaacagccaaaaagaacactagggggataccacagtcgtttaccagaacgcgataactaaaacaacactccccatttttagccggcgtagctgaaacctgagatcttgtagatcctgatggttccatctgtgtaaccagcatagagggggcttccatctgcgctccagtttaagcttgtgcagtagagcatctggttcttggagacagggatctcgggcttaagggcctgcacaatgtgctttg

SEQ ID NO: 18708 - DNA, 441 bp, Oryza sativa
  Clone ID: uC-osflcyp034c12a1
agagcaatacaaagatgtacatatgtgtaactagctgtctgatattatttgaaatagcttcaagttatgatcataagaacagacaactttgtgatctcacaagacagttccactgggaaattgttacatcaacctttacatatcacaggagataaaatgacattttaagatgaagcagcagtagcttcaacaggtgcaggctcagcatcccagaacgaggtcttcttgcccgtctttgaaacggtctgaagaacggcatctggtgtaacatttcccttgacagtgaccttctgctccttgatgtctacgtcaaaggactccactccttgcatctttcccagtacccgcttaacagctccaacacaaccttcacaggacatcccaaccctgagcacaacagtctcagccatggcggtcgacgcggcggcgaggcgaggcgga

SEQ ID NO: 18709 - DNA, 542 bp, Oryza sativa
  unsure (1)..(542): unsure at all n locations
  Clone ID: uC-osflcyp034d01a1
agcaggaaccaagagcggccgcctttataaaccacgggttttaacccaccgagaaaaaaaaaagnaaggggggggattaaaaaaagaacaggcgagaaaaaaccccaaggggcaaaaaaaacaaaaagcaaaaaagccccttaaaggaaaaaaaaaaaaggaggggggcccccaagggagagaaaaaaaaaaacccccaagcccccccgaacagagaaaaacgcaattcccccaaagcaaggaaaaagaaaagggaaccccgggggggggggaaagaaaaaaaaatcaggggaaaaaaccaaaaaaccccaaaaaaaaggaagccggggaccccaaaagaaaaaaaaagggggaaaagggcaaaattgggaaacaaaaaaaaagggggaaaacacaaagggaaaaggggggcccgaagaaaaaaaagagcccccaagagggagcccccaaaagggggaaaggaaaaaaaaagccgggcaagggggcccaaacccggaaaacccaaaaaaggaaaaagatcggaaaaacaaaggggaaggggg

SEQ ID NO: 18710 - DNA, 368 bp, Oryza sativa
  Clone ID: uC-osflcyp034d04a1
catgccttcaattgttgattgtatatccattgtgaaacagaaaggtaccacaccacacactgacggtagaagttcaacggaaagaaaggcagggcacaggtagctacccccccagggcatttggaacagcaacctcaaaagcaaaagtaagaagcggcagggagtggaaccaaagacaggtacaacgagaaccgtagtataaagagtcttctggacaaactttgctataacaaacctggaggggaacaaacaatgctaaataataaactatggaggccggcgaaggcgaaccaccaccaaagaagccgcagcatgcacttccagaagcagctgaattgtaaaaaccctgaatccgcaagatggcaaaa

SEQ ID NO: 18711 - DNA, 361 bp, Oryza sativa
  Clone ID: uC-osflcyp034d05a1
cagcatcactctattccatgcatccattgattgactgaaaacccaatagcaatacagcatggactacgttacacactgtagcttgcagttcaacggattgaaatccagcgtacagtagtagccccccaggcaattgcaacagctacgtcaaaagcatgagtagttgcttcaaagaatggaagcaaagataggtacaaccagatccgtatcatagtgtgtcttcttgacattcttcctataacagcaagacagggaacaaacaatgtcaaataataaacgatggaggccgagaaggcgaacgtttcctcaggagccggagcatgcaaatccagaagctgctggtttgtcggcaccctgatcc

SEQ ID NO: 18712 - DNA, 395 bp, Oryza sativa
  Clone ID: uC-osflcyp034d06a1
aacaaaataaaagatgccccacaatttgtataaataagttggagaaggatcgagcagtgcttacaagccaacaacaaatattggcaggagcactaagtattttaatgatggggggaaaatagaaccagggtatctttcttaaaaatatactatttgtttggggggggaaagaagaagaaaacgtagcgtattaacccatgtcgctagagcatggggtttttcatatcaaaaatttacaggatcagtagagctcctagggatgtacaggtcctatacagtcgcatatccatgggagcgtatcgttggaccggatcggaggcactgttattttgcgttgacggacgacggcatgagattatttgcgcgcgccacaaaaggcgaaaaagggcctggat

SEQ ID NO: 18713 - DNA, 412 bp, Oryza sativa
  Clone ID: uC-osflcyp034d07a1
gttggttcccacaaggcgccttaaataaggtaaacagtcgcattacagctagcaccaaacatgagttggcgaattgatcaacataacatcaggcaaaagagctcaaaaaaggattgtctggggcagagagtgctatatgcttgcaaacaactcgctatagcaaaactccaggcagacgcagcagcagattttaagcgttggcagcagcctgggcggcagcatcccgcttcctttgctcctcgatgatgctgagcttgatgcccttgcccttgggcaggctcacccaaggcttgttgcccttgccaatggcgaacacattgcccagaccggtggcgaattgggggcccagggcatcctcaacgcggatggactcgaagctggctttatgcttctccctgttcttgatcacacc

SEQ ID NO: 18714 - DNA, 351 bp, Oryza sativa
  Clone ID: uC-osflcyp034d08a1
ccccaaacaagagcagttgcaggctgcatccccatttttaataaaacatatgggcctagcaagggtcccattacaggataggcccttttttaggggaacatagggccaacccgccccagggtttcaacttaagcccgggggggattgttcataaaaaaggggcccccttgcaccacccatttgagggcccccacgggggggggctccttttttccaacccaatcatgcccccaagttccacaagagtatttgttgggccccccactgacatggcccgttcaaaaaaacaggtgggggcccaagcagccccagagcataggggcgggcttttacccattcactttgggggcc

SEQ ID NO: 18715 - DNA, 281 bp, Oryza sativa
  Clone ID: uC-osflcyp034d09a1
gtatatcagttcatggctgcatgcagattcatttcaatgcagtacaggcatggcacagagagagccatgagttcttacatttcctcttttcataatccactaatcgcattcgcatggcagtatttaattagtcaagcgagtccacatgtggcatacgtaggtgcgatttattattaattagcgcggttaattacttcattagtacttaatcagagcgaggtggagcagccggtggcgcaggacaagacgtcgctggtgcagccgatgacgcagaacggcat

SEQ ID NO: 18716 - DNA, 425 bp, Oryza sativa
  Clone ID: uC-osflcyp034d10a1
gctggtacagcatcactctattccatgcatccattgattaactgaaaacccaatagcaatacagcatggactacgttacacactgtagcttgcagttcaacggattgaaatccagcgtacagtagtagccccccaggcaattgcaacagctacgtcaaaagcatgagtagttgcttcaaagaatggaagcaaagataggtacaaccagatccgtatcatagtgtgtcttcttgacattcttcctataacagcaagacagggaacaaacaatgtcaaataataaacgatggaggccgagaaggcgaacgtctcctcaggagccgcagcatgcagatccagaagctgctggtttgtcggcaccctgatccgtcttgttgttaatcttgattgtcttgtcctcaggcttggagtcggtctcagcaagc

SEQ ID NO: 18717 - DNA, 364 bp, Oryza sativa
  Clone ID: uC-osflcyp034d12a1
ggggaagggtatgaaaattagccccggccaatttaggaaacccgggggtagaaagaggatgttttgggttggggcccaagggccggcacgggcccccaggggacgggcttcgggcttcgggggggaacttgcactggccagggttttttttcgaactttcagggggggattattcttcacccccccacaattgtttgggcttttttcaacaacccacatttttgggggggcttattggctcaagagaaattgagggggggctcaatttttaccggggcccccctttttggccccccttgttccccggggcgggggagggccctggcctctttgaactggtgcccccggagggggcccttttttc

SEQ ID NO: 18718 - DNA, 345 bp, Oryza sativa
  Clone ID: uC-osflcyp034e01a1
cgggagcacgaattcctcacaagggggcagcgttcaacatttattcagccaaggccacacatttgggacataaacaagtgacgctaaaacgagatcattaggaaaaagaaaaaaaaagatgcaaaacgcttgcagttgacacagagagagagagagagaacgcaccgaatcgataaagtttctcactacagcttggacttgtagcgggcgacctcggagtcgttggggaagaagcccccgaggcggccgttggagttctggtaggcgtacatgaacccttccatgaccccgatgagccctcccgacaccatcgagggcccgggggtcccctgcttgatcccggaa

SEQ ID NO: 18719 - DNA, 449 bp, Oryza sativa
  Clone ID: uC-osflcyp034e02a1
tcgaatgatttggtgatgttgtttttttctgacgctgatcggccggtgtgtcaccgggtcgatgccacggctcagcagcttcctcctgatgtgcgtgttccagtagttcttgatctcgttgtccattcttcctggaacctcccgctatcagagaccatttgttgcctaaaaggctgtgaagcttgatgatcagctcatcctcctcctcggtgaagttgccgcgcttgaggtcaggccggaggtagttgatccaccggaggcggcagctcttgccacagcggaggaggccggcggccttgggcagcgatcgccagcaaccttcgccgtgcgccttgatgtaggcaatgagccggtcatcttcctccttggtccatgctcccttgttggtgtgtgccttctcgcagcacggtgacctccccatgaagacgatgaagctttcttgattcttt

SEQ ID NO: 18720 - DNA, 340 bp, Oryza sativa
  Clone ID: uC-osflcyp034e03a1
ggccaacggaatcaaacttgttgcctgcaattttcagtcatggaaatatgcaatcctgcgctatggaaaatgcacgcacatttaacaccttactgacccttcattgctaccccacctcggatgaccaccacaacattttatataactttgcatgagcaaactgtgcaaaccaacattaggatggcctcaattcattcacaggaacagagtatcgtgccttccatttcatccatgtaaaaaaatcaattgcactcctaggactgctatgggaatacgtgtactacatttttctctataaatggcgcatcttgctctagaaattgttacaccatgtccactt

SEQ ID NO: 18721 - DNA, 323 bp, Oryza sativa
  Clone ID: uC-osflcyp034e04a1
ggggaacctcgaccggggggggaaatgttgtccacatattcaaggttacaacagggcaaaaaagggggggaccgaaacatacccagggaccgaaaccgagacggggacggaaacgggggggagggttgccaacaattggggggggacccaaagaacaggggaaaatgggcgccttggggggggggggggggttcaggttgaaggggccgaatcccttcccgggcaggggggggaaacccttgggggcgcaccccttcttgaaaattcgaacgcacgccgtttccttgaaattggccgagcactgggccttgatgcttgggaac

SEQ ID NO: 18722 - DNA, 429 bp, Oryza sativa
  Clone ID: uC-osflcyp034e06a1
attcccccctattttttttttttttttttggggggtttttttttttttttttaaaagggggcaaaaattttttttcccggactggggtaaagggttttttcgggcccaacaaagcccaggattttcaaaggggtttgtccctcacccaaacccacatgaagggacggctcacctttaaaaatcaccccaggttccggttttgcaggacttgggctccccggacaaaacattcagtgaaagagggggctttttctcccccggggcgggaaaggactttttggcagggcacactctggggggggggcccccaaggccccggggcccggatgtaacagccagggaaaaaccctctttgagcccacaaggggccctccctcctttggagcccaaaatggggggcccggacaaaaaagccccccccccccccgt

SEQ ID NO: 18723 - DNA, 423 bp, Oryza sativa
  Clone ID: uC-osflcyp034e08a1
acaacgccatgcagcaagtctaaggtttcatcacacacgactcaaaatgtctccatccactgagaagcgagcacacacaatggtgacgatccaagtcctccgctaccaaaccacgacagatgctagcattacaagttttacaacaagcccaaaagggtttttacttaaactggtccggtctgaccaacaagaagctagagaggatgtagcacagcgtgcgcagtgttcttctgttagtcactgcgggcaggagacccgtcggcagacctggagcgggatcctggaggcgatcctgaggattgcctgggggacctccggtgcggaggggatccatcgctgtcagctggcggcgacctcttttcataaccattatcagcatcacgccggtccccatctttattggcaggagaataggatctccgc

SEQ ID NO: 18724 - DNA, 245 bp, Oryza sativa
  Clone ID: uC-osflcyp034e09a1
ggtagggccaaaaaaattaaactccttttttttctttttgggaaaagaaaatgggggggcccacctcggcggggaactttaaatccgcaggcccctggtgggaaaaccaattttccgaagggggcaattgaattgcacccccggcgtgggttggaatacattggatggatgccaacccctaatttgggatcctgggcctgctttgggaaggggggaacttcattttgaactataaatggggcacc

SEQ ID NO: 18725 - DNA, 427 bp, Oryza sativa
  Clone ID: uC-osflcyp034e10a1
gtctatcctctttattcattcctcccagagagacggatccatggaagttttcttgccctcatcaggcaagcagagcacacacacacggtggcagtggaattgctatgaacaagacgctaatcaacatccagagctaaaacaaacaaggggatcaaagcaaatcccgaaaaaaaaaacacaggggaaagtccacatcttcttctcgtccccaacgcctccgtgtcaccaccacgtcttgcggatttttttttaccctgttctattcgctcaggcgtccacgatctcgccgtcgtccttcgacgccaggatcagcttcgggtgcgccgccgtcgccgccgcctttttgatcgtgccgtcgatggcgttcggccggccgagcgccttcagcgccaggtgcgccgtcttctggccggagaacatcatggct

SEQ ID NO: 18726 - DNA, 408 bp, Oryza sativa
  Clone ID: uC-osflcyp034e11a1
acggaactcaatgtaatagctgtttaattcagaaacatgttaaggctcaaagtacagtaaaccatttaactgtgaaatcataaccaaagctcaataactattgagctccggaattacaccttacatattgggatagcaaccacagccctaaatacccatcgatccatccaaagctcccctagcttatgcaaatcttgttaaaatttaggccttgctggcaatgttgctggacagccagtccaggccctcgtacaatccctcacctgttgtagcacaagtgctctggatataccagtgtcgctggcgaagggagtgcagtccaagcttatcagtgatctcagcagcattcatagcgtttggcagatcttgcttgttagcaaagacaagcagcacagcatcacgtagctc

SEQ ID NO: 18727 - DNA, 393 bp, Oryza sativa
  Clone ID: uC-osflcyp034e12a1
agagggaaccatattggagaaacttcagtttacactcgacttatttaaccgattggattcacaaagatttgacgctcctgttaaactgcccaacatccacaaatttggcaactcaggccagacgcatcaatcttaactgggtacatgaggggattgaaaaggttacgaatgggtccttgagaggcaccatggaggcacagcaatgtccaaaggtagttttgttaccgcatagccaacaggctcagcccttatgggccatcatgttctagcagcagcctgatgatctttgggcccgggtgccacccaccacatccacggggcccgggacatacagttctttctctgggtcattcttcaaagcattctttacaatggcctggaaagcctcctcca

SEQ ID NO: 18728 - DNA, 431 bp, Oryza sativa
  Clone ID: uC-osflcyp034f01a1
attatcagcgaatttcgagagtaaaatcacggtcatactagtacatataaatgttgatagtactaatttgggcacatgccatacaaagtttaataatattattatgcgtacccatggggcatgatgcatgcatcaagctagctagcttttgggaagtaggtccttgtgtccgataaagacataaagttcagtccccgcccaaagtacacaccttgaaaatacttcagcatgttgtgcgtataatatggtggtgaccaccaaattgttgcttgctccagcatgtgttgcattgtctgcactttattggcactctagagagagccagacagcacgtagtaggatgcaataacacacatgcatgtgttcaagtagtacttgcagttgcatacttgcatgtgttcaagtagtacttccagttgcagttgcatact

SEQ ID NO: 18729 - DNA, 320 bp, Oryza sativa
  Clone ID: uC-osflcyp034f02a1
ggggggccccaaaaaaaaacccatttttaggaaaataaataaccgcccccggttgggaaccccaaagcaaaatttagccccatgcattggaggcttgggaaagggaaaaaaaatcgcaaaaaaaaaaccgaaccgccccaaaaacccgatgttcaaaagggaaaaaaaaaaagccgggcccaaaggcccaagggggcccttccctgcaaagggtttgccggggggaaaaaaaagggaccccccttaagccaccccccccaatttggtttcgccgggggcttccctaagggggggaatgtttgggtcggccccccccggtt

SEQ ID NO: 18730 - DNA, 425 bp, Oryza sativa
  Clone ID: uC-osflcyp034f04a1
gcagcactagcgtgcccatatttatattccaagcctccaaggtatacaatacatatttgatgtaccgaacaactgaaaaaggcgcttggtttggaagcgcactatttttaaatttataggataacttctgacagcctttcttctaaatgaacttttggcaaccgctctgaagccgtgtaacacaatccaacaaagcaatttgcagtcaaaatttcgggcatgtgccgttctagttagaatttaggatgtgactcactaagtaattgcgattgtttctctatgcaaacaccagccaacagtattgatttcatcatgcataatctggcatgaccttcttgaggaatttaattggttgggattcctcaggcgcaacctcatcaaagggaacatagtatctatccttgtcgtaaacatggcatttagtc

SEQ ID NO: 18731 - DNA, 277 bp, Oryza sativa
  Clone ID: uC-osflcyp034f05a1
gggaaaggacctgatccctggcccttgaaaaagtcattaaaactggcaaatttttgggggccaaaaaacacccccaatgggactttgggcccaaaaaaaaaaaacctttttttttttttttttccccccttttatacaaaaaaccggaaaaaccccagaaaaccatcaaaaaaacatggggcccctccaaaaggggaatgaccaaaaaaggttgggggtgtaccccccttttcaggggggggggtttttttaggcgacattttggcccgggggcccc

SEQ ID NO: 18732 - DNA, 486 bp, Oryza sativa
  Clone ID: uC-osflcyp034f06a1
aacacaacaaaaacaaaacaaaaaaaaaaaaaagagaaaacaaaaaaaaaaacaaaaaaaaaaaaaaaacaacaacaaaacaaaaaaaaaacaaaaaaaaaagacaacaaaaaaaaaaaaaaccacaaaacaaaaaaaagaaaaaaaaaaaaaaaaaaaaataaaccaagaaaaaccaccggagaaaaaaagacaaaaaaaacaacgctcaaaacaaccaacaagaaacaaaaaaaacaccacaaacaaacacaacccaaacagaaaaaacacacccaggggcaaaaaaagaagcaacaaaaaacaaaatccaaaagaaacaaaacaaaaagaaaaaataaaacgaaaaaaacaacaaaaaaaaaaaacgaaacaacaaaaacaaaaaaaaaaacaacaaaaaaaacaaaaaacaacaaaacaaaagaagagagacaaacaaacacagaacaaacataaccaacaaaagacaaaaacaccaaacaa

SEQ ID NO: 18733 - DNA, 123 bp, Oryza sativa
  unsure (1)..(123): unsure at all n locations
  Clone ID: uC-osflcyp034f07a1
accccccgtaaatanatacacccatattaaagcataagaacgggggagggttattaaacgagctagcttgcgagtatgggaccaaagaacttatattgtttttatatcatcaacagacagcct

SEQ ID NO: 18734 - DNA, 379 bp, Oryza sativa
  Clone ID: uC-osflcyp034f08a1
ggaccgaaattagacggccattaatttgaactagggtttcacaaacttcgtccattgacaaaatccccggataatggggcctaaccattttcgcagggaaaaagggacccccctcgaaaccatcacatttttaaacaacctaacccaagagctagataaaaaaacaacgggggggggggacacatcactacaggtgggccttataaaacaacgacgggtccgcctcctccttgaggggggaggattcctttttttaaacctggggctcctcgacctcctttttcttttccacgggcgggtcggggctcagggaaaggtttttttgcccccacctgtaaatgctggaggcaaaacccttgggaacaggaaggttgaagcc

SEQ ID NO: 18735 - DNA, 415 bp, Oryza sativa
  unsure (1)..(415): unsure at all n locations
  Clone ID: uC-osflcyp034f09a1
cttctgttggagaacagccacaaacatgactcattttattaacaagaaccaactaataacagcatgcatgatacaccaagcgtatcaaatttcctctaagaggctaacaaacaattcaagaaacaaaataacacaattaaacacaaccaacaaatctcacatctcgatcgacaaaacagtgttttacttaatcgacaactaataataatataaccgaccaaaagatgaaccatctagaccaaattaattattaaccaaaagcagcagatcgacgacgaatgatagacgatgatgggtatcgatcgatctatcagtagttgtggttgaccctcctgcaattggtcctgacctcnccgttgcccccggtgagcggcgagatgttgcccatcttgaccatggaccgcgcgaagtgggc

SEQ ID NO: 18736 - DNA, 404 bp, Oryza sativa
  Clone ID: uC-osflcyp034f10a1
tttttttttttgtattttttcttttttttttttttttttttattttgtgttttttttttttacaattcttttttttttttctttattatttttttatttttcctttttttataaccactatgggagaaaaaacaagggggatttattttaaaaaaaaccctcacccccagagagaaagaaccacggccacccatgaaaacccccccaataaaaaaaggcccccccaaaatggccggggcaccccccaacaattagcaaaaaaaaccccacttaaaaaccgagaaaaactgtttttttatgccaaaaaaaaaaaacgagggggccgccaaaaaaaaaagggggaccaaaacaaaaaaaaaaagggcccccaaaaaaaaaattttaaacacaaggggccccacatc

SEQ ID NO: 18737 - DNA, 430 bp, Oryza sativa
  Clone ID: uC-osflcyp034f12a1
ggcaaatgggttcaatgttttcagcaaatgtcctgcgaatcaccaggcaaaaaaaagggagctagtacaaagcctcaatacacactggagtaaaaccagcaacggcatctgcgctccacatctcgcgatgtgcagcggtctgagataaacagtttctatgtgatggaacttaaaagtctcttttattcaaaaacacgggagcgggcaatcgctcactatctgtccctctgggtattgcttagttttagttgaggcatgagtaagcgagcgtcttctcctccgacagctcctgggcagtcgcgtccatcttcttccttgagaactcgtcgatcgggagaccctgaacaatcgtccattcgccaccactgcatgttactgggaacgagtagatcagaccagcaggcacaccatacgaaccatcagagtacac

SEQ ID NO: 18738 - DNA, 428 bp, Oryza sativa
  Clone ID: uC-osflcyp034g01a1
aagcggccaggacattaataaaattgaaggtacaatcaggacccaaactgctgtcagaaatgcagatcagaactcggaaatcaatctacaatgaatagttggtgacggtaatcctgctaacccatcagttatgtgctttcaaagccaaatattcggaaaacaccttcatcagcctggtacttgttcttgtcgtctcctgcgtaagccaggaggttgtacttggggttccattcaacactattcatagctgccttgcatggaatctgatgaatcgatcgtccagtttgaacattggcaatgtcaatgaagggatcttcgctagcatatgcaagaaactctccagtatgattgaagctaactgttcttacaggccactcgagtttggtaaaggttttaatgcaaaggagctctttgacatcccaaagact

SEQ ID NO: 18739 - DNA, 455 bp, Oryza sativa
  Clone ID: uC-osflcyp034g02a1
gggtgaactattttctaaaaccaatatctcaacacgaattgccaaaatgttgatgatccagaaatctctatttcctacggcggatattcttccacattcagccatggtaaagcgggattacattatgttgcatcccaatgcaacagacatgtcaagaggaacctaaaactagttaacaaaagatacttcaatattggaattccatacgaaataactgtagttcatgtgctcgaattacaaaacctttctgaacagagtactgaagcaaaagatgaatccaaaacaagttctagcgtctcatacaatacaaaagcagggaagtgcaaaaacatcttaactcccaaaccacaaaaggaacaacagacagtaacaccggtattacatatccagccttgcaaagcggcagagctcaagcgccaggcaacaagtaaacatgcttctgcctcttttggcaa

SEQ ID NO: 18740 - DNA, 410 bp, Oryza sativa
  Clone ID: uC-osflcyp034g05a1
agccctccattgggaaacttttattacatccaacaccaggaaagactgaatcatctgcactgtacaaatgttctgaataaaagcgtagcaccaagtgccatacatcattgatggatggatacataatttggcaactcaagcgttcaggatgtcatgaaatgcagatggccgtttccgctttttcagacagagctcctcgattgcagaagccacccttaataagctagcctcgccccatggtcgacctatcagttgcaagcctataggaagcccttgcttatcatgaccaacagggaccgttatcgcgggcaaaccaagaagattgccagctatcacgaatcggatcaggtaagctgacacaccgtaattggactcttctaactttagagaactttgtggtatttctggag

SEQ ID NO: 18741 - DNA, 105 bp, Oryza sativa
  Clone ID: uC-osflcyp034g06a1
ggaaaaaaaccctaaaaccaaccaatcaaaaacatttttctccctaaagaccccacaacaaagtcttgcatcaaaaaaccattccaatggcttgacaaaaacaaa

SEQ ID NO: 18742 - DNA, 131 bp, Oryza sativa
  Clone ID: uC-osflcyp034g08a1
tcccccttgttgtttaccccacctatttcttagtatcactaattggtggggtatttgaaaaaacgaaggggacccaaaaaccaagataaacaaccgcaaaaacgctaccccaggtccacaaaacaaaccca

SEQ ID NO: 18743 - DNA, 448 bp, Oryza sativa
  Clone ID: uC-osflcyp034g09a1
gttaattcaaatacttaatagtaatagactctttgatggagtattacaacatgcagcagtggcattaatacgccagtacattaattaagttacacatatgcaggctccattttggtttcttttaatttatcgaattacagaatttctgtagccttgcagatgatcacttggatatcatgtactagtaattaacaataggatgcatacaaaagatggcccaacgacaacagaagatgcgtgcatctgacattgtctggccttatttgttggtagtactccaattaattaacaagagatgatgcattcttgtgccttagtttcttcacatgcttggcttcacgttgagcctattcgcaatcttcacccccaacgactcatcacactgggagaggtagttgacccagatggcgcggagctcaggggagaccttggggtgcgcgagctcgcc

SEQ ID NO: 18744 - DNA, 395 bp, Oryza sativa
  unsure (1)..(395): unsure at all n locations
  Clone ID: uC-osflcyp034g10a1
ataaaacnggaaatctcctttatattanagcgacaggtcacacatgggacacaaanagtgatncgagtcatataccanttaaaaagctatatacacttanntagactcgtatacacattacccactgccacggtatattatctgaaccaagaataacattagccagggtagcaccctggcctcnncctggatctcacatgcctgctcgtcgacaggacttgggccggcttgaatctgtctgtaccacgggtggnaaaaagaaacccacagtnatccgttngccaagctttgtcgtacaccgcaacgggtgaactgggcgacctcttttanncgtggancctcgtccctttgcagtgggtggaaatcatcacacgntactctttnntcccccgtaa

SEQ ID NO: 18745 - DNA, 56 bp, Oryza sativa
  Clone ID: uC-osflcyp034g12a1
acaattacctttttttatttaccttaacaattttaaataatgtgttctttgttttt

SEQ ID NO: 18746 - DNA, 463 bp, Oryza sativa
  Clone ID: uC-osflcyp034h01a1
tttttttttttttttttttttcgacgcataccattccattgtcgtatgggttcatgtatgtatactccgcacaagacaaaatttacacaaattaacaggcctactacttctactgaatcaccataaacaagaccgaaaataatggtggggagcaagatacagacttcagcagtttacagcctccaatagagcaacaatttgacaaaataatgcctatctgatggagaactagaggagtaaactgcgtctttcaatcataacagacgggccagaatagcacacgaaaggtaaaaccccgaagcacgtgtacatttctacacataaacaatgaattgaatggactcggggtgtgtataaagcaaagaaacacaaccagcaagaaaattgctgggttttacagacatcacgatgattgaatttggcctccaacaaggacatgtgcctgtcaaatgctagggagctc

SEQ ID NO: 18747 - DNA, 428 bp, Oryza sativa
  Clone ID: uC-osflcyp034h02a1
tttttttttttggtgatttttccctttttttttttttttttttttggggggtttttttttttttttttttgttttttttttttttttttttctttttttttcccccaaaaccccaaacttgggtttaaaaaggcccccaaagggggggtaaaaaaaaaacccaagggccaagggggggagggcccaacaaaccccttttaaaaaaaaaaggaaatgtttttaaaaaccccccccccaattgggggggaggaaccccccccggcccgatattagggagggggggaaaaaaaagctttgccaggggccccgggaaaacccccgaccccttttgggggggggccccctaaaaacccctgaaaacaatggaaaacccggggccccccccctcggaaaccctccccgggggggggggggccccgggggccccg

SEQ ID NO: 18748 - DNA, 435 bp, Oryza sativa
  Clone ID: uC-osflcyp034h04a1
atgtgtctggcgatggactttactctattatacagtacatatggaacaagaatgtgcatggtaggcgcacaggcgacgagagaacacttttgattctacgatggaccactgttagttaaattccaaggatttctgtacatcagttccctactgtaatccttccctcatttcctccaacctgctcagctcagacttggggatttgccagccaggtttcaaatcctgaaacctgaacttctgttcacaagatgggaccagtgaattgtgtatctgggttaccggtgatgctcctctgagttccgggctcccggctaaacatgaaccgactggtatgcacttgttcatcgcaataattcaggatgtgaatgagcaatagagcaagtgagacctcagttagtagtgatgctgtcaaaacattatccacagaccataatt

SEQ ID NO: 18749 - DNA, 402 bp, Oryza sativa
  Clone ID: uC-osflcyp034h06a1
ggggggaaagtcaagggtcgataaatattgcttcacttggccaaaggccagataaaaatcccttggtccctgacacggggagggccctgcacaccacttttttggacccacagagggcaagggtgcagaaaaaatcaagccccccagggtgaactcacggccccacctgtcagcctttcactgggcggggccggagacttttgggaaaaacaggaaccccccccatgcagaagaagacaaattttttcccacacaaattgaccacccgggggccggggacgtacggggaggtcgtcgccgccgccggggaccttgggatgagggcccccagcccaagagggggggcttcttctcgccggggggctcctcggcgcttttggggcccttctttttctcgggggg

SEQ ID NO: 18750 - DNA, 373 bp, Oryza sativa
  Clone ID: uC-osflcyp034h10a1
cataaatcgtctaacccactggattacaagaaaaatctgggggtgaacagaaatacgtccgcagtacaatccatccccagattctgggtgaaggtatttacaggaggaaaatgtaaggcacaagaatatgaaaacgctaaaaacatggacagtttgtaatttttcaatccgccggattgactcacatcttgtacaataatacaaggtataaagaatgtttataattaccatcccaccaacacatatgcgggggagaacattagatcctaggtacaaaaataagaaacacaaagcaaacacacaagcaagccccattgcaagctgaggcccaagcaaaaactgtcttgcccttgtacggtgatatatatttatc

SEQ ID NO: 18751 - DNA, 405 bp, Oryza sativa
  Clone ID: uC-osflcyp034h12a1
tccccagttcttaccctcaccttttttatttccaggctcaggggatggcaaatcaaacatcgatatgcacaaagtccatcccgacatactatggcctcttattccaaacgatcagaacagatgggcgtgtcatgcgtttgcgcatattacattacagcttggaaggggatttgtaccatccccacggctcatcggaggcgtcctccgtcacttgcttgacgcttaggtagttgtcaatgcccccttctccgagctcgcgtccaaagccgctgcgcttgttcccgccccatggagcttggcagaagcagggttgcgagcagttcacccagataattccggcatcgatctcctcagttaaatcttggcatcgctcgcggacaccggaaagctcagcaccaggcagac

SEQ ID NO: 18752 - DNA, 316 bp, Oryza sativa
  Clone ID: uC-osflcyp035a02a1
aaaggccaaaggtttaacttaaatggacgggccaaaaaacaaggggcctttacaaatggggggctaaatcccgcgtggggaaaaaatcagccaaaggaaaaaattatccccgaatggaaatcccaacccacacatggttggggctggccgtttcggcctaaaaaaaaggcgtccgttgggcgccgccatggaccagttttggacccggagcgtaaggggcatgccgtcctgcaggggaacggccggaaacaccttgggtttgcatccgggggggggggggttccttttctgggggggcaccttgccgcccagccga

SEQ ID NO: 18753 - DNA, 137 bp, Oryza sativa
  Clone ID: uC-osflcyp035a03a1
ttttttggtttttttttttttttttttgtttttttttttttttttttttttttttttttttttttttctttaaaaaaaaagcttactgacaaacccaaactcaataaatttaaaaaacaaggtaaaattttagttat

SEQ ID NO: 18754 - DNA, 396 bp, Oryza sativa
  Clone ID: uC-osflcyp035a04a1
gacatactaagcgctcgaagagggtgtgcacactattcagtaacagcgaagttctagtagacattacaacatgtgcatactggcacgtcatagctcattaattttcagcgtcaagacaaaagtttatcatcacattacaacaatttcaaattataaaagaacatcacatatagatttgcatttcgtcattttagatgttatatgcactagttctcactttcccccaccactgggctttgcgaacagcttctttggtagcttctccagaggtgttgttttcagaaggaaaagcctggcagcacgctcttgtaaggtgccaccacattttagttcaagaatttggaactctagcttgagtcttttcatgccaaggaccttcaaatctgcagctgaact

SEQ ID NO: 18755 - DNA, 366 bp, Oryza sativa
  Clone ID: uC-osflcyp035a05a1
ggaacgggtggaccgctgtgaaaaaatttccttgccttctttcacgaaccaaacatatggatacaaacaatacaccatccaacacgtcacatgaacacacaaatggcaaatttttgcttgtattttctaagttggttcactttcggatctagacaaatttggataaataaacctacactaacaaaaccacacaccaccaactcctgccttcgaggactggcctcacattgtacacagaactcttaatcgataaacctacacttaagcatcaaagctcacccaatggctaatgtggaataggacccaatgtagatatcttaatcatgtatgcgctttatttcctcaaaactttgtccacagcagtcc

SEQ ID NO: 18756 - DNA, 322 bp, Oryza sativa
  Clone ID: uC-osflcyp035b01a1
aagggaactatttaaatcaattaaagaaaacaaatgcttttagtaacaatattgggtagaacaacagaccagatcgatcacatagaagttatgaacaccaaataatgaaacaattgaagaggcaaaaggaacaacaggacaatgtaatacaaggccgaccgttgggtgggaaccattaaggggtatcgaccctcgaacatggatgaaggaacagatgtgcagccttgacacaatcatgcacgtgcgggaacacttgaagcgccacctttcgttaagtgtccattgagttccttagcatcgacgatgcaactgtctacgcact

SEQ ID NO: 18757 - DNA, 99 bp, Oryza sativa
  Clone ID: uC-osflcyp035b02a1
aaaaaagattccgccctacataaaaaatagggggggcaaaaacaaggtttcaggcaaaaacaccaacgaacacgtacagaaacaaagggaacacaaaac

SEQ ID NO: 18758 - DNA, 369 bp, Oryza sativa
  Clone ID: uC-osflcyp035b04a1
gcaaaaacatcatcttcttcttcatcttcttagggtacacaacaccaactcgatcatcatctcgtcgcactaaacccatcttccccaacccaaagacaacgaactcgctggccacaaatccatccaaccacaattaaccactgctaagctacggtcccccacttcacttgccggggacgaagttggtggcgtacgcccaggcgttgttgttgacggggtcggcgaggtggtcggcgaggttctcgagggggcccttgccggtgacgatggcctggacgaagaagccgaacatggagaacatggcgaggcggccgttcttgatctccttcaccttgagctccgcgaacgcctcggggtcatcggcaaggc

SEQ ID NO: 18759 - DNA, 388 bp, Oryza sativa
  Clone ID: uC-osflcyp035b05a1
gatcaccgaagcaattcatcacttgcatcattcgataacattgcacaggcagtgttagcaataggcgtcaaacttcttgcatatacacaacaatcgtgtgcctgtgaaaggaatttagatacctgatctcacaagttaacgatacaatgagaaaacgcaatccgaggctagtcgaattgctcccagtcggtgtttatttgtgtggaagaaacccgtggtgggggtgcattcaagctgcccatgccattgtcgaacgtctcccactgcgttgtcactgaaacagatttgttttgatcgctgaagggattggcattttttgccttcaggttatccaacgtcttcacaagaccttggacacggcgtacctcagccttcctttgtgcccttg

SEQ ID NO: 18760 - DNA, 350 bp, Oryza sativa
  Clone ID: uC-osflcyp035b06a1
ggttaaagggcaactcctcaatatccgataaaatcgtgtaagttgagcattaacttacagagacgcggtatatcatcagatatgaagatgcaatcattaaccaataaccggtcaatgattgcatgtgatgatttgtgaaaacgttaactacaattttgttctatcagtacagccatggtgtcaaacaggagcaacaacgcagcatttgatgaacagtagccaacaagcaatcttgcagatgatgatttgttgcggattatttctaggttacagtagtcagaagcaaatactagtcatctattttccctttccttttcccttccccttcttcgcgtaaaggttggcttgga

SEQ ID NO: 18761 - DNA, 266 bp, Oryza sativa
  Clone ID: uC-osflcyp035b08a1
gcaaaatctgctctcattcatgatatcttagcacaggtacagactccaggattgcaggaatccagacgagaagatgagaagaaccagcgacaagtttctcaacgacaccaaaaaaaattagcagtaatatgggaacatgtatatatattcctgtgtgcgcgtgcaagtggcactgtggcaggttcttctcatgagtgctcctgggtcctctacaacagcttccgcggacctgcttccggtgacgcttctttcttcttcccttggct

SEQ ID NO: 18762 - DNA, 159 bp, Oryza sativa
  Clone ID: uC-osflcyp035b09a1
aaacatcaccatatatccattcctataaaaggccttgctttaccttacaacagggtacaaagtaccccgactaattccaaggtccattgactggggcattaattattcatcatttacaaacaataattctgcccccccttatttttttggttttcagca

SEQ ID NO: 18763 - DNA, 86 bp, Oryza sativa
  Clone ID: uC-osflcyp035b12a1
aatttcatactaaacgcttcgaagagggttctttttattaggacctgacaaacaaaggtcataccccaataaagaaaaactagaac

SEQ ID NO: 18764 - DNA, 308 bp, Oryza sativa
  Clone ID: uC-osflcyp035c02a1
gatgccgaaccaaacgtttctggagctggtgtattccataatccggaggtttttataatgggtttaataactaccttcttaacatgcaaaccgtagctgtttgcgccaccaccattaaaccataacgcgctaacttacagccataccctaacccacagaatccgagaactggctaaaagcaccatcactgataaacctaaagaacccttgagctcttggcctccttgaccccatgacagccatggcggctaggttggcctgctggatctggctttggccggcgcaaacatcaagccgcggtaagtatg

SEQ ID NO: 18765 - DNA, 250 bp, Oryza sativa
  Clone ID: uC-osflcyp035c03a1
aatggaggccgatgatcaaacaatgaccatgcggaaaataaatgcaaaccgaaaccacaatctgaggtacttaaataaacgtatacccggaaggcgggtttacaaaacgttttcgaaaacgtttttagccgaaaattcgtttaagaaacattgggatctgcttagttggacagattcaaacaagataatgacgatatttgaataaccgttggcacagccttttgcaatccaacagtgaacacattctata

SEQ ID NO: 18766 - DNA, 381 bp, Oryza sativa
  Clone ID: uC-osflcyp035c04a1
cacttaacgtttcacgtcagtcaaataatgggattggatcacaggtaaaataattccacatcgcaaacacaaaatggagtgcggagtaatagtttgctgagaaaaacatgattataacatcagaagataatgcccaaattatgttctacaggcagatgattcctatcctacaacataatcggtcaacagaacctagctaaagttctttttcacatgctattgtgcatgtatgggtgctttcaaattatctaggggatacaaaaagacttgttttcttggataatgctacgcaaagatctgagcggctgagcatcattgcattaatgaatgcttcaaaacagactaaataattctattatacgtcaaacacaaggtgcaagt

SEQ ID NO: 18767 - DNA, 404 bp, Oryza sativa
  Clone ID: uC-osflcyp035c05a1
gggcggttggtttgtgtgggctgctcccctccctgtttctttatcttcaggtctttgtgtcttgaatttattctcgggcgccggtcacgcagaggagcccgagggcgggccccaccatacggagaggggcaaaccagggccccccgggcccgctggggggaaaaaaaaacccgggggtccccgcgcaccgggcggccattcccccagcaaaggaaatggggggaaggggggccacacaccggggggcgggcacggggccggggaaaagaccctggaaaaagggccccccccaccacgggggctgcccgccaagaggggcgggccccgccgggacccccccggggggcgccgggcccccccccgggcccgggcccgggcacctcccctccccccccccggggggg

SEQ ID NO: 18768 - DNA, 311 bp, Oryza sativa
  Clone ID: uC-osflcyp035c06a1
gggcggaatgttaacgctaagatgatagatcgccaaaaaagaattgaatgggccaatgcataaagccctggaaccaaagggttttccaagtgggtcgatcagtctaaagtcagcccgacgggatgggaccaacactcgttttaagtccatttgcatgcaagttcaccgactatccgccgggctttggatcataggggcccataactaagacttcaagtctgcgagcgaatgtttttcttgcctgggaagcctttaagctgctaaggctttatatcctttgaaagaaatacaggtatcccatatccttgggc

SEQ ID NO: 18769 - DNA, 318 bp, Oryza sativa
  Clone ID: uC-osflcyp035c08a1
aaagccacaaggttgtaagtaacattagatgaatgaagatgtacatttttcatgtttttggacagatatgcttaaattctgccttttacggatacatccatgcttttttgcaagccatgtaactgatttataattaatgcagcctttccgggggttccatgacgaccattgcattactcggtatcatcatcagccaggtcaaactgtttgagcagcgccccccaaatgggcagggggatgtccttgagggagccgagggggttggctaaacccaggttgtcaaaaatgccgacattcctggggagcaaaacacgggcc

SEQ ID NO: 18770 - DNA, 420 bp, Oryza sativa
  Clone ID: uC-osflcyp035c09a1
agtcaaaatggcaatagtttcctttacttccctacagaagatacaagtctttttgtagtagcatgcaccggcaccgcagctcaaaaataaaaacgaaagagacattgatacgacgacgatactcatcatccatcatgttaacacaagatatatagagagagatgccatgccatgccttcattcattcattcccgcgatgtccatcgcccaatggcttctcctaccctgatcctatcgccagccttgatacagaaatcgaaatctgacgttaccgtgccactgccatcctctctccatcttgccttggacactacaggtgccttaaataccatcaccaccgtcgatcccatcttaaaccctgctatctcttccccctttttaaccatcacaccggtgcctacaggttcaaaaactcgatca

SEQ ID NO: 18771 - DNA, 355 bp, Oryza sativa
  Clone ID: uC-osflcyp035c11a1
aggaacgtgcaggttacattatgtagtgaacggatggccagcttaatatgtacttacatctagcccaagtatacagtatcagtgccattaatcccgcgaaactgatgatcaaaacattcttgtgctgcgccgccggaaatcagaacaagaaaaacggtcgcagcgtcgcgagcggtcatgacaatttacgcagctcgatcagttgatgttctttttgccgccttttttattcttgatcagcttcaggaggttgggcatcaccttccttttccttttgatggagaacgacggtgagcgcgggttccatgcgcccgtggacaccgaacaccgtcggggtttggaccttcttgacgtt

SEQ ID NO: 18772 - DNA, 433 bp, Oryza sativa
  Clone ID: uC-osflcyp035c12a1
atcgaagccgtttcgtttgcttttattccattcgattcgattcaattcgttcatctcaacatgcacatcgtccaagctaactccttaccggaatactctctatagaaagtagaaaccaacttggaattctttttggtggcccttaggccctcgcatacctaaaaagaaacagccttttctagagagcgtcgttgccttgttcaaaggttgcaccaatgcccgtttacaagactacaactcatccttgaaatttggaccggaccttcttttcccccttaaaaaaagtgaagggggcgctcggacccttctttgttttcggtgttgacgaacccggccgctttagtttgaaagggatgctagcgtgctttttgattaacttgtacatctccaccaccgtcgggcccccttaaaagtaatagggttaaaacttttt

SEQ ID NO: 18773 - DNA, 452 bp, Oryza sativa
  Clone ID: uC-osflcyp035d04a1
agagaatgtttggttattgcataaatgaataacctggttccaagcaactggtgttgataaacccagaacaagttgccatattcttgaacaaagcaagcaggctgcagagttagttcacagagaaattttgaagcagccaagcaactcaccattctacccaactatcttaagatgctcgaggaagcatagctaataggtagtgtaaacataaatgcctactgtgaatttggtaggtaacttaacacactactatctcctctttcaaatgcttgtcatttcaaggaacaagaaagaaagtcacttaagaacttgagtcagtaggaatcaaaagacttattgcaagcactgaattttatcttccctccgacataatagtcatagatgatgcaccagacacggtgccaatgcttgtcgccgaccgggggcccgccgacatgatgaaagaattgaac

SEQ ID NO: 18774 - DNA, 369 bp, Oryza sativa
  Clone ID: uC-osflcyp035d07a1
ggccgcccactaactagggtatttttaataagcagcaatacatcatgatgcggactttgaattttgataattcgctacaaaatcccaggagcttcctttgctttgatgggctcccactacatgcctaggttggatgagccacaattccaggtccattcacatatattgggtcctagaattttgaactaaaaattttggatgagatctcggtgagattaggcaaatatcctcatcaaaggctacctagacctcaatctaacttataatgtaccatggcataacatgttcacttgcctaagccctaatattattcttattcaatctaatttccccttaaaagtgcctagattttacataacaaatctgtta

SEQ ID NO: 18775 - DNA, 110 bp, Oryza sativa
  Clone ID: uC-osflcyp035d08a1
gcaccgacgaagcaggactaaaagcggccgccaaaaaaggggacaaaggaacaacagaaaaaggaaacacggaccggaacaaaaggaaagacttaacgaacaaaaaacaa

SEQ ID NO: 18776 - DNA, 148 bp, Oryza sativa
  Clone ID: uC-osflcyp035d09a1
ttttgggggctggaaaaggatatattccccaagcgtgacaacaacttttgagagccagcgagagtgagagaacccctccccaccctgctaaaatacatcatcttcaaacgaaaatgaattcgtgaacttcaacggggagggaaaaaga

SEQ ID NO: 18777 - DNA, 471 bp, Oryza sativa
  Clone ID: uC-osflcyp035d10a1
gcaagtcaaatacactcttttctctccatagtagagtttgagcagcgagcgggcaaacataaattattcaattattaaatgatatgatcactcttgatcatctcaacactataggaacaaaacttcgctaccgcgattttactattttagttgtccacaacttcaatgagggttggttcgtagtcagcaggagcctcgaaaccatggaagttcattacggttgcagcaacattggcgagcccaggggtctgaatgtcagaccggaatttcacaccagggtgaagaccgggaccttcaatagcaaccgggaccggctgaagagtatgtgaggtaagaatctggataccaccgttcttgtcgagaagtggctggccagatttggttcttttcaccatatccttagcattttcatgatcagcggtgacaagaaaaaaaccaccgacttgttcaatcgcgttcaaaaaattttaa

SEQ ID NO: 18778 - DNA, 333 bp, Oryza sativa
  Clone ID: uC-osflcyp035d12a1
gagcaaattgagcacatatttaggttcaaatccaacttattcataaagcatactgctgtcccacaggaaactgtttcataaaactaacatatcatacggactcgatggtccattaaaccagacacaagtagacatcagcaccacaaatacttgacgaacagaggctcgggatgaccaggcacatcggcagctccaccaaactggctgattactgaccaccacggaggcggagcaccaggtggagggtggactccttctggatgttgaagtcggcgagggtgcgtccatcctccagctgcttggcagcgaagatcagaccctgctggtctgggg

SEQ ID NO: 18779 - DNA, 104 bp, Oryza sativa
  Clone ID: uC-osflcyp035e01a1
aaaaaaaaaaaaagggagggaaaaaaaaaaaaagggggccacaacaaaaaaccaaaagaacggggaccaaaacaacgggacacagacaccaaaaggcaaagcaa

SEQ ID NO: 18780 - DNA, 370 bp, Oryza sativa
  Clone ID: uC-osflcyp035e02a1
acttaaagataaaaaaaattaaaacaacataattattacggtgcgggagtacattttattaacgcgcgcacggccgtaacgaaacatacaaaggccatactggcgagaccgaccgaccgggcccaaaaggggcggacgtactaggtcacacatacaacggcataatgatgtcgaccctagatattcatctcgattatgatcgatgagcgacatgacatgaattaagcagaggcagcgaagccctccacgacgtccacgaggcgtgctccgctgttggtcttgaagcagttgcggcggatctcgcctttgttcccgccgggccttggcaccttgcttagcttgacgatggacgtaacgaactgggtgaaga

SEQ ID NO: 18781 - DNA, 181 bp, Oryza sativa
  Clone ID: uC-osflcyp035e03a1
ataaaaagttgaggttgggtcatacagcccagaatgaagtccaagcatggatagaaaatgtaaatactggggctgtatatagaactgtataacaaaagctccacaattaaacacacatagcgaagccagggacgccaagacggaaggggtgggccaccaaaactctcgctccaaagaccac

SEQ ID NO: 18782 - DNA, 91 bp, Oryza sativa
  Clone ID: uC-osflcyp035e04a1
cattcttcccaaaatgaagttcaattatggatagaaaatgtaaatactggggctgcatatatagcagaataacaaatgctccaaattcaat

SEQ ID NO: 18783 - DNA, 324 bp, Oryza sativa
  Clone ID: uC-osflcyp035e05a1
tttttgtttgtttttttttttttttttttttcttttttattctggtttattacaatgttattgtttttttttttttacattgtctaaaaggcagtaccgttagaataagacgcaaacgaattcgactaacaaaatacgagtcaccaaacacactgacaaaattctgagtatttttgacagatccaccaataagacgaataccgcaccatcatgtcacagagagaaacaaattggtccacaaaatacactctactcaaaatggtcttataagcaaaagaataaaccccactactaaaactacgacggaagctaaaaatgtcaaag

SEQ ID NO: 18784 - DNA, 434 bp, Oryza sativa
  Clone ID: uC-osflcyp035e06a1
gatagaggagatcaaactgtgtttatagactgaactgaaacttgattatacagtttgccacgactcctaactcaagcccctatgacgtggatacatatgtacaaaagttttgacacctgagaaaatgatctagtttccctacatggatagctagctagtagctatctcatgtcatggagtgttgccaagaaggcgtccaacttgacattgtcacctcgagacaagaacttgatgcagatgggcgccctggcacccatgagtgtcagcatggacagcaagatcgagccgacgccgtcgccgcagatgagccccgacgccagcgccggcgagagcatccgcccgcggccggcgtccatcttctcccacaggtacgccaccaggctgccgatgcacatgccgacgggcacgcgcggcggcatgaagaaggtgatggc

SEQ ID NO: 18785 - DNA, 364 bp, Oryza sativa
  Clone ID: uC-osflcyp035e08a1
ggaggaaatactaatttaaattattaaatgttattaacaaattaagttaattattatacatatttacagagagggaggttatagtcgcacaaacacacgacacaatacactagttacatatatgaacgaacatgcaaacctcaaggcccaattcacaggctttctttgcgactaggccagcaccaattataacgctgggatttgatgtgtttgtgtaactgcatattgctgcaagaacaacacttgaaattgctgtccaggcaagcatgccaatctgatttcatttccttcaaagggacacggtcatgaggactctttgggcctgaaatgcaaggcttcacatctgtaaagttgagcttaagtt

SEQ ID NO: 18786 - DNA, 302 bp, Oryza sativa
  Clone ID: uC-osflcyp035e09a1
caaccgatcccgttttaaagattacatcagaaatgttggtccatataaaccgatcagggaatacgcaatttttccctgtttatgggactcgaactccgacggttaatcatagcaggagcagtccatgcattaatatgggactcatcttttattatatgcccacatagcaatgctgctgcgttgaagtttcggttttcagttgaccccagaaaaaattcctgaagtttgtcgatgaagcttaacatgttcataagccgatcttgcccaccgaactagccaaaatttattccttgggctaaagg

SEQ ID NO: 18787 - DNA, 331 bp, Oryza sativa
  Clone ID: uC-osflcyp035e10a1
tttttggttttttttttttttttttttcttccgacgagggcggagcacactaagattcattcattcattcatttgatcaaagcaaacgagacgagctttttttttgcgatcaaaaacacagatgggcaaccacacagttaacacaaactagatagttccacacaaaactaacgatgataacgatcggatgatgatgatggtagctcgattagatagatagataacttggccatgagggccccaccgctcagttcctccagttcccgtcggagttgccgccgccgcggctgccgtagccgccgccgtagccgccgccaccacggccgccacc

SEQ ID NO: 18788 - DNA, 374 bp, Oryza sativa
  Clone ID: uC-osflcyp035e11a1
acattaacacggattagagacaggtgaattacaatgtaattgtatctagccatgcacagtgccaaagaggcagcaccgttagaataagacgcaaacgaatccgactaacaaaatacgagtcaccaaacacactgacaatattctgagtatttttgacagatccaccaataagacgaatacagcaccatcatgtcacagagagaaacatattgttccacaaaatacaccctactcagattgttcttataagcaaaagattaaacccactactaacactacgacgcatgcttcattttgtcaaaggagtcgccgaggggaatttaagcccttttaccacgaattcttctagccagctgaatgtccttaggcatgat

SEQ ID NO: 18789 - DNA, 359 bp, Oryza sativa
  Clone ID: uC-osflcyp035e12a1
ttgtttttttttttttttttttttttttttttttttttttttggggaaaacaatgatctttattgtataggcagtacaatacagacaacagtcaccgataaacgaatgtatgacatacaacgggcaattcatccaaacaggtaaatatatgctggtcaaaactatcaaccaagcaagggtgcccattatttcctaccaactggaccagattattttttgaagggggggagatccatcttgaggggcttttttcccttggggactcgagcaattgcaatcagcttctttaaaagctcctccaaattgcgcagaggccattgagttgggccataacaaggggcgttcaagggaacattatg

SEQ ID NO: 18790 - DNA, 295 bp, Oryza sativa
  Clone ID: uC-osflcyp035f01a1
cacaaaacacagcgcaccaaaaaaaccaaaacagcaaaagcaaaagcaacacgaaccggcggaagaaacaaccaagccccaaacaaagaagaacccgggaaaagaaagccgagcatatgggaacaaacaatacagacctagacaaaatctggttgagctaatttcctgcctttctggttatatacatgagtaaaactgtgaaccttttggtttagaaaaaactggagctttgaggtgacaatagaaacgtctttggttcagacgaccattttggcctttttttaaaattgttgga

SEQ ID NO: 18791 - DNA, 323 bp, Oryza sativa
  Clone ID: uC-osflcyp035f02a1
gtacgatcagaacgggggccacatattataccagaaaattatctcagggcaagtcaatacaggggaaatattcacagaagaggtactaaagaatgcgaccaacaacttcgacagcggacaaaagcttggcgccggtggtcatggcattgtctacaagggcattctcagggacaacaatgtcgtcgccgtgaagcgctccaacttcctccacgtgacagacgccgaggaaatcgtgcaggagatcatcatgctttcgcagaacaaccaccggaacggggtcaggcctcatcggctgctgcctggaagttgaagagcccaaactg

SEQ ID NO: 18792 - DNA, 354 bp, Oryza sativa
  Clone ID: uC-osflcyp035f04a1
ataaaacacaatcttaacaacaatttaagtactcaatccgtttaaaaacaaaggacaaacagatccattttgtcaatggactattaccgatgaaatgacaacagaaaaatattttttggctcgctcgcaggcggcccaatctgtcttaaaatagaattatttagaggctaaaaattctcatgcgactcaaccaaaaaaaaaagcatacgtgtatgttacttagagctggataccactcttatagacagagccggccgtaaagctttcggggatgacatcgtcgacgacgcggtacccgccattcttgacgaggaagcggacggagaaggggcccttgagtggcgagccgctttt

SEQ ID NO: 18793 - DNA, 306 bp, Oryza sativa
  Clone ID: uC-osflcyp035f05a1
gtctgccattgttaacaacccttttcctccaaactaattgttctcaagaacaatagaattcaatacaaactcagagaatagaagagaaattgagtgagaagaagtagaggaagcttctagaaatggcagtgaagaggaacacgagagaagtaagaaagagattagagatcgacgaggtttcaaccgaaccaagcccgccgccgtggccgaagccgctgatgcctgaatctggttcgttgcttgaagtttctcctgctgcttgccttttgtattccctctcctttgtttgcttgggcccttggcatg

SEQ ID NO: 18794 - DNA, 183 bp, Oryza sativa
  Clone ID: uC-osflcyp035f06a1
ggcgtaaaatacttcttgaagctacattgcagaaacatatataacatctgcatctgaagcatatggattggtccttcatttataccatattagtcgacatcgatcaactagcattattatattagctactagcatatctcgatcacattaattaggagatctttgagtagatctcttcaatca

SEQ ID NO: 18795 - DNA, 650 bp, Oryza sativa
  unsure (1)..(650): unsure at all n locations
  Clone ID: uC-osflcyp035f07a1
aagcacgcgaacgaaagcaaggaacaataaaagcaaccgccctnanntnnggggtggtnaaaaagggtggttgttttaaactaaaaaaaaaaataaataaaaaaaaaattataaaaaaaaaggaaaaaaaagggaaaacttttaaaaaaaaaaaaaaaaaaaaaaaaaagggggagggatatgggaaaaaaacgggaaaaaaaaaaggaaaaaaaggagaaaaaaaaatccgggaagaaaaaaaaaaaagagaaaaaaaaaacgtggggaaaaaaacaaaaaaaaaaagaaaaaaaaaaaaaatgaaaaaaaacagggaaagaaaaaaaaaaaaaaaaaccaaaagggaaaaaaaaaaaaaaaaaggggaaaaaaaaaaacacaaaaaggggaaaccaaaaggaaaaaaagcggaggagtaaaaaaaaggaaaaaaaaagaaaaagaaaggaaaaggaaaaaaaaaaaaagggcccaaaaaaaaacaaaaaaagggacaaaaaaaaaaaaaacaaaaaggaggccccaaaaaaaaaaaaaaggggacaacaaagaaaaaaaaccaataataaaaaaaaggaaaaggcaagaaggaacaaaaaaaagaagggaaaaaaaacaaaataaaaaaaaaaaaggaaaaggaaaaa

SEQ ID NO: 18796 - DNA, 199 bp, Oryza sativa
  Clone ID: uC-osflcyp035f08a1
acaaaaagtctgatctgatagttgatcagctggtcgtttggcttttctgaagaatacaagaaggcacgacatgcaatcagctcggtcaccggtggggttcggagttttattctccgacccccggtagccacgaacattttaaactttttctttacaaaccagggaaagctaaactatagcttacagctcttccaatggt

SEQ ID NO: 18797 - DNA, 248 bp, Oryza sativa
  Clone ID: uC-osflcyp035f09a1
accaatcaccacaacatttttgttcctttcacatggttacaattctgacactaatccaaccagacattttacactttctaataataatttccattttatcaactttgcatatagacatttagtctcatgcagatttacataacacaagaaagcaggattagctaagcttgacagccatggttattcaaggctgcattcccttttttttgagcctgacccattattgccgtttctgcgttgtgaaggtt

SEQ ID NO: 18798 - DNA, 107 bp, Oryza sativa
  Clone ID: uC-osflcyp035g01a1
tttgtgtttcgccctttttttttttttggttttttttttttatttttttttttttttgtttttatgtttttttttttttttttttttttttttattttttttttttt

SEQ ID NO: 18799 - DNA, 100 bp, Oryza sativa
  Clone ID: uC-osflcyp035g02a1
ccccccatatttggtttaactaaatcccaataaaatttgttatctattgaacctcaaatttttttaataattttttttttttttttacggtatttttttt

SEQ ID NO: 18800 - DNA, 373 bp, Oryza sativa
  Clone ID: uC-osflcyp035g03a1
ttagcttttccgccctttttttttttttttttttttttttatcaagtttggtctgagtatagtattacatataagtatcgtttttgacgatttggacaatatatttattacgatgtgtatgtgcatatgattagcctggtgctagcattcacatatgcatgctctttaacctatgttgatacatacatatgtacatacatacacagctgatgttgacacaaacaagatgaaaaaaaaaactgaagcaacaaactgggaaaggggaaaccaatgcaaggtggcccgattcgaacgttcaaagctgccaaaaccgaatagatcaatcgagtctcctctgtatagagctcacgagtgagcttgctggcttgccaac

SEQ ID NO: 18801 - DNA, 236 bp, Oryza sativa
  unsure (1)..(236): unsure at all n locations
  Clone ID: uC-osflcyp035g04a1
gggctgagtatagtattacatataagtatcgtttttgacgatttgtacaaaaaatttattacgatgggaatgcgcataagaatagcctggtgctagcattcacatatgcatgctattaaacctatgttgatacattacatattgtacattacataacacagcttgatggttgacacaaaacaangatgaagaaaaaaaatctgaaagcaaacaaaattgggaaaaaggggaaaacc

SEQ ID NO: 18802 - DNA, 328 bp, Oryza sativa
  Clone ID: uC-osflcyp035g05a1
ctgccaacgaaaatgtaattcgtgcttttaaaaactcacagatcagctggacgggggttcacccatcacccttcacaaacacgtacgagagatcaataagcagagagcgtatcaattacaacgggataattcgatatcgagtcggcatatcaagagcgctttgggatcggcctcctccccgccgccggaacgagcggcgggggcaaataacctccctgccacgcccacaccatgtcgccaagcgacggtttaagctcctgcttgaagaagacccggaaatccggggagtcgccgccggtttttcttaccttcaccacgggcaccttcg

SEQ ID NO: 18803 - DNA, 262 bp, Oryza sativa
  Clone ID: uC-osflcyp035g06a1
gggggaaaaaacccccaaaacctgtttttatatgcgcctgggtaaaaaaggcaaaaatttgctcccttggggaaaaaaaaagggggggcaaaaaaaggggttttgttcccctaaaaaaaaaaactatttattaaaaaaaaggggggcataaaaaaaggggggaaaaaaaaaactgggggggatttatttaattctcccggggggtttaaattttcgggaaaaaaaaaaaccccaccctcggggggggggggggggaattaaa

SEQ ID NO: 18804 - DNA, 406 bp, Oryza sativa
  Clone ID: uC-osflcyp035g08a1
cggcccatcaaaaggcaacctccaattctggatgtgagatccaaaaacatctgtgcaactccaggttcttgctcaacagagtgatcctgaattggtgatcacattagttaatcttgatgcaagatcgtggattttgtacacatgcaagcaaataatgctagcttctgtattttcacttcgttcaaaaagagaagaggagagaagaggagcaagtatagagagatttgattacatcgatcgccaagaaaagaaatggcgggaacggagcagattacaccgattagtgacgacgacgacgactactatggcggcggcgtgacgtcatgaggtcagatcgcctcgtcgcgcgcggggaagaagagctttcagtagagcagctcgttccacgcgttggggacccccggga

SEQ ID NO: 18805 - DNA, 313 bp, Oryza sativa
  Clone ID: uC-osflcyp035g09a1
ttgtttttttttttttttttttttttttaaaaaagcagggccgtatagccttctttaaaaaaatgaactactaacaccgaatattaagtattgtcatatcagtatattacaatgccatcgagcaaacagcttgtgtcacagcaggcaaaattatcagggcctagacttggcaaaatataatattatcgggcctatgttttttcaatatgaaagcatgagcgaccaagcaacttcaacactcatttggcaaaatccaacatcaagggtgtcatgactccgtccacattttaccgggataaaattcttggaatca

SEQ ID NO: 18806 - DNA, 414 bp, Oryza sativa
  Clone ID: uC-osflcyp035g10a1
gacttcgcaaattacaatgcatttacccttcttgagaagtaccgtgcaaacaatcttgtcttcaatgatgatattcaggtagtaggttcagatctcacttttttactcttcgtattggtctcgttacagttcctaaatgaaagcgaactagtgaatgtgcatttatactgggtttcacaacaataggagtaaaccatgaaactgtggtgtaaacagggaacggctgctgtagtgcttgcaggcctcattgctgctcaaaaattttgtcagtgggactttagctgatcacacattcttattttttggcgcaggagaggtaagctgaccttccctttcagtgatatggagggtgcattctgcattggtcacatttactttagactggtgcaacatgtctgaactctgaacattcat

SEQ ID NO: 18807 - DNA, 379 bp, Oryza sativa
  Clone ID: uC-osflcyp035g11a1
cataggaccaggaaattttgatgcgcagtcacaattcacaattgtataccgtcaggacacagttttgagctcccagtttttcccagggttactccagagagcgataatttatgaaactactagtgagcaacaagtcgataaacatcaaatgttcttcctactttaggttcagcaatatataggatatataaaaggataggtttcggcttagccatgcttcgagaggatgctctttgcgacgctacgagcgatgggaagatagaattcatgcgcctctgagaagatcctatgggcaagcattttttttcttcccggagcctcgagccagcgagctgtaaagcgggcgaaggtactttatcctccccattggttaagcatt

SEQ ID NO: 18808 - DNA, 105 bp, Oryza sativa
  Clone ID: uC-osflcyp035g12a1
aatttttggtttgtttatttaattatgattgatcctttttttttaattatattttaatgttgttttttttttttttatttttttaaacaacaggatttcgggttt

SEQ ID NO: 18809 - DNA, 217 bp, Oryza sativa
  Clone ID: uC-osflcyp035h01a1
ggagaggcaaaaagtgtgcaaactttggatatctatccaccaccacaaagattacattagcaccttttgacagaggtaatccttttataaagtccatagaaacattttgccaagctgcagagggaaatcaccaagggtttgtaagagaacccaggataagaggcaaagcctcatgcttttgcttgggtgacagaatcaaacatttgttgggacaaaa

SEQ ID NO: 18810 - DNA, 128 bp, Oryza sativa
  unsure (1)..(128): unsure at all n locations
  Clone ID: uC-osflcyp035h02a1
tctatattgcgttgcggcctgnctttttttttttttttttttttgagtaaagagaggtaaaaagtgggcaaaatttggatatgtacaaaaaagcacaaagattacattaatatctttagaactaaagt

SEQ ID NO: 18811 - DNA, 520 bp, Oryza sativa
  Clone ID: uC-osflcyp035h04a1
atattttttttggttttttttttttcggcctcaaattatatcaaaatttgaagtaaatagtaaaaacagcccgcgtaccagttacatggtaaatttttgaggccatcaaaatataaaattttgcgctttcacagaccacattgagcaaggcagcactacgcttctagcctaattttatgacctgagagcgatgaaaataagcattaggctttagatgtgaatggatatatctcatgctttccttataggccaatcattttacaactcgaacattgggcttttgtactgttggtgcaacagagctcgaaccgtttttgtaaactaattggccccaattaaatttccctttatgaattccaggttcaacaaaagccttctttgaacccgatgaaaccctaaggattataattcttttaattaccccctcggtcgaaaatttcttggttcaaaatttttgggtgccattttatggaagttgcttattgtttgaaaatacaaaacgcctaatggttaaagccct

SEQ ID NO: 18812 - DNA, 353 bp, Oryza sativa
  Clone ID: uC-osflcyp035h05a1
tttttgggtggttttttttttttctttttttctttttttttttttttttttttttttttttttttttttttttccctccccaggcaaaaagggaccctcgggcccaaattaacggcttgggaccccctcccaaggggggggatgggaaaacaaaaggcaccctattaccccaccttgaataaacggggggggggggccctgagaaaccccgcccacgttttttttctagcatagacaaagcatcccggatttcccggctggggggccagggaacccccgggcaggcaaagggtttttccggggcccgggccatgggggggaccaggggaaaaccccgggtggtgaaacccccc

SEQ ID NO: 18813 - DNA, 203 bp, Oryza sativa
  Clone ID: uC-osflcyp035h06a1
aaatcaatctacaggtacctacataaaaaaccatggacgaaggggcatacaaggagctgagcatgaattgattggttgccaaaataatcccccagtgaagtgagtgagatcgatgatggatggaaccaatcaaaggacaaaaagcagcggcggcagcagcagcagggtcaaagctttaactaatctgagaaatctgatgagag

SEQ ID NO: 18814 - DNA, 61 bp, Oryza sativa
  unsure (1)..(61): unsure at all n locations
  Clone ID: uC-osflcyp035h07a1
anattnagggttggtaaagagaaaaagagaaaaccagaaagaaaaatccagaaaagccaca

SEQ ID NO: 18815 - DNA, 243 bp, Oryza sativa
  Clone ID: uC-osflcyp035h08a1
ccactctcaataactttatattgtaaactttacagaagcaataatcttggctacaccaccaggcattgtgaaaaatgtatcactcctcagcaaccaataccaaccccaaacaacacataattctgatcaacacaagggcagaaacattttacagctaggcagcctatggcggcggccatgtactgatgggaactgaggcacccggatgcctgggggagctttcagtgggaacttcatgaaggg

SEQ ID NO: 18816 - DNA, 330 bp, Oryza sativa
  Clone ID: uC-osflcyp035h09a1
aaggcaataaagcaagcacaactagcgaacatatcaagaaacaaaagcatccagacgggaacaaaccccagggccaacgggtacagatttcccaccggaagtcttactgtaaacacaggccaagtctacctcctgttggaacgccaaaattgcatatccagtatccagcctaaagataaaaataaccatgttgcatacatagataaggagacattctccccagtaacagaagaaaagcctagttcatcctccggatgagctcgttgaagtagtccctacggtagccggcatcaccacccttgacaaaaaggttccttttttttttgaggc

SEQ ID NO: 18817 - DNA, 321 bp, Oryza sativa
  Clone ID: uC-osflcyp035h10a1
gaacatgaacatgctaaccatcgtttgaactttccacccatccaacttgatagtacaacagagtcaacaaacaagaggggatgtactagactactagtaccataaattcgagcaggcatattgtcgttgaacaattctggaaggggaagatcgaccagggatgctcatttgcggattacaatctttaaatttgacaagcagatgctttaaatttgaaccggttagatatagcgtttcaggtactcatccatgcgggggtactgaacctctgggtagagcctgagttggcttggcaccattgtcaccaattttgaagtttgc

SEQ ID NO: 18818 - DNA, 609 bp, Oryza sativa
  Clone ID: uC-osflcyp035h12a1
acaaagaacaaaaccggagaaaacaaaagaagaacagaaaacgaacacaagagccagggcagcaacaaccaaaaaaagggacaaaaaaaagacaaagggaaacaaaagacccaaaaaacaaaggaaggaaaccccccaaggcaacccaaaaaaaagaaaggggcaaaagagcaaaaacgaaactaaaaaaaccggggaacaagcaaaaaggaagaggaagggaaaggaaaaaaagggcaaaaaaacaaaaaagagaaggaaaaaaccacaaaaagaaaacccgaccaaaaagggggccccaaaaaaaaaggacaaaaacggggggaaggccccggaaagaagggccaaaaaacaaggaaaaaccccgggaaccccaggaagggaagaggcccaaaggacacaaaccaagggaaggaacaaaggacacccgtcggggaaaaaaaccgggcaacccggagcaaaaaaacaaaaaaaaacggcgcacagaagggaaaaccaaaaaaaaaaaagggacccaaaaaaaaccaccccggaaaagggacccagggaaaagcgaaaaaaaaagggggaaaccaaaaagaaggcaaaaaaccaaaacaagagggacac

SEQ ID NO: 18819 - DNA, 61 bp, Oryza sativa
  Clone ID: uC-osflcyp036b05b1
tatattttttaaaaaaaaaaaaaaaaaaaaaaaaggaaaatttgaaataaaaaggggggtc

SEQ ID NO: 18820 - DNA, 483 bp, Oryza sativa
  unsure (1)..(483): unsure at all n locations
  Clone ID: uC-osflcyp036b07b1
tcgctttctagcagaagccgagcgaccgcctggtcgagccatatcttccggtcgagttcttggtcgatctcttccctcctccacctcctcctcacaggttcttggtgtagcttgccactttcaccagcaaagtttcatgtctgatctcgacattcagatcccaactgccttcgatccctttgctgaggccaatgctggagactctggtgcggctgcaggatcaaaggactacgttcatgtacgcatccagcagcgtaatggccgtaagagcctgaccactgtccagggattgaagaaggaattcagctacaacaagatcctcaaagatctcaagaaagagttttgctgcaatggtacctgttgtccaggacccagagcttggccaggtcattcaacttcaggtgatcagaggatgaacgtatcanattttcttgttcaggcccgcattgggaaagagggacacatncagattcatggtttctg

SEQ ID NO: 18821 - DNA, 284 bp, Oryza sativa
  Clone ID: uC-osflcyp036b08b1
ttcgtttttgtccctgacttacccacatatggggtggtgtttatatctaactggggggagacaacgactgtaggataaataacgctacagcgagctcgatgaacgacgtaatcactagagggtgcgcacagaaatacttcacccacctgaagcgctactgaaacatggacatacctgtatacgtcaacatatgcacctctgcctggatcatcgagctcactacttataagccatcctgacactacggaacagctctcacgccatgattgaaaacatacctgttg

SEQ ID NO: 18822 - DNA, 353 bp, Oryza sativa
  Clone ID: uC-osflcyp036b09b1
tcgagtatgtccttgatatacccacaaaaggggggggtgtttatatctaactgcggtgagacaaagaatgctccacaaatatgggttgaacgtgcttgatcatcctctcaagcacatgatggtgctgccagaaatacctcacacactagaagtgaaactgaaacatggccatactcgtatatgtcagcagatgcacctatgactgaagcacccgacccagtaaatataagcaatcctaacactaaggagcaacactcacgccatgatagggaacatacctcgtgccactttagggaataaaggatgtcagcatgcattgagactgccaaacaaagggacaaacatcgagtatc

SEQ ID NO: 18823 - DNA, 461 bp, Oryza sativa
  Clone ID: uC-osflcyp036c01b1
cttccttttcacattcaccgcgccggcgccccgggcggggtttacttgaaccaagggcgggggactccacccagcgccgagcgccggcgccacctgctgcctccaccgcgcagcgccccatccggctcctccctccaccgagctcgccacctccgcccggggccgagctcgcctcctccctccaccgagcgccggcgccgcctgctgcctccaccgtgccggcgccccctccgcctcctcccttcaccgagctcgccgcctccaccctccgcctcggggcctccagcctccaccgcgccagcgccggttcctgccctcacgggtccaccgcgccggcgccgactcctgcaccgcgccgggcgccgactactcccttcacatctagccggtcggctacatcccggaggctgaagttgaagtggctgtgtgcgccagttgggttcgatttgccgatttccttt

SEQ ID NO: 18824 - DNA, 350 bp, Oryza sativa
  Clone ID: uC-osflcyp036c03b1
cttccttttcacccacccccaaatccacctcggggtcggcgtcgataaaccctagggagcgatagccatggctgcggccatcctcctccgccgggtgccccccgcgcgggcccaggccacggcgctcatcgcggcgcgctcgatctcggactccacggcgccgctcaccatcgagacctcggtccccttcacctcccacatcgtcgacccgccctcgcgcgacgtcaccaccaccccgggcgagctcctcaccttcttccgcgacatgtccgtgatgcgccggatggagatcgccgcggattccctctataaggccaagctcatccgcggggttctgccacctctacgac

SEQ ID NO: 18825 - DNA, 436 bp, Oryza sativa
  Clone ID: uC-osflcyp036c04b1
cggctttccctggtcgtttcacgcgtccgattcttatcgactcctactgaggaacattgctggttttattgcaattgtggcttgaaacaaccccgcgtctctactcgctccgccgcgccgtcgtctctcccgacttcggcgacaagcgagcgacgcaggccaccgcgcgcggttcgttttcgcgagggaggccgccgccgaccagccgccatggtctcgccggacaccatccgcacgggcatcggcgtcgtaggcaatggaaccgccctcgtgctcttcctctccccagtgccgacgttcatacggatctggaagaaggggtcggtggagcagtactcgtcggtgccgtacgtggcgacgctgctcaactgcatgatgtgggtgctgaacggcctccccgggggtgcacccggacagcatgctggtcatcaccatc

SEQ ID NO: 18826 - DNA, 471 bp, Oryza sativa
  unsure (1)..(471): unsure at all n locations
  Clone ID: uC-osflcyp036c05b1
gcttggtttgtctgatgccttcatagccctaccgggggggttcgggactctggaggggctgctcaaggtgattacatgggcacagcttggcatccatcataagccggttgggctgctcaacgtcgacgggtactacaactcgctgctgacgttcatcgacaaggcggtggaggaagggttcatcaacaccagcgcgcgggggatcatcgtcatggcgccgacggcggaggagctgatggacaagctagaggagtacgtgccttaccacgacagggtggcatcgaagctgaactgggagatgggccacctaggttactgacgtactcacttacagctgcagcaaattgccagacagcaatggcgatcgatcgatcagaaaacgtangaggaggaggaagaagaagaagaagattcaagtcgatcgactcatcatcaaaagctgggaaagatttggttgatgcagctagaaag

SEQ ID NO: 18827 - DNA, 103 bp, Oryza sativa
  Clone ID: uC-osflcyp036c09b1
ccccagaaatacctcccacaccacaaacgcaactgcaacatggacctacccctctacgtcaacacaagcaccactccctgacccacccaaccccctacacata

SEQ ID NO: 18828 - DNA, 369 bp, Oryza sativa
  Clone ID: uC-osflcyp036c10b1
atctaggcctcgcaatagcggcccaagaggggacgattaaaagtagctggggcgttccaaataatctccagcacatatcgtatgagggtcctagacaacactatgacggacaagatggagcgccaggaagacctaccatactagagagcaaacatgagcctggcctcattagtatagcgtcagaacaggcactagtcatgctaacatccggccaaatacttacacacactcgcctcaacaggatagcagacctcaaggcataatctgaaacatcactcgtactcattgggggaaaaaacggtggctgcatcatcggcagctgctagaaaaaacgagcaaacacgacgtttaccagatgcagacaactcc

SEQ ID NO: 18829 - DNA, 447 bp, Oryza sativa
  unsure (1)..(447): unsure at all n locations
  Clone ID: uC-osflcyp036c11b1
tcgttaaagccacgaagctccgggcgaagcggggacgagccgaagcagcaggacgccgcccgtcgcgcgcaatggcgatccccaaggtggacctgcgagggctcgagccggggacgccggggtgggaggcggcccgggccgcggtgaccgcgtccatggtgtcgcacggctgcgtcgtggtcgcgcacggcgcgctcgggccggagctccgggaggcgctcttctcccgcgccgcgcgcgagctgttcgcgctcccggctgaggccaagcggcggaacgtctccacggtggggccttacaggggctacatcaccaacacccccgggatgaactgtgagagcctncacgttggcgccgtcgacgactccggtcgagtcacggagttcgccggcctcctctggcctgatggcatacccgagttctggtgttcgtacagtgacacgatcg

SEQ ID NO: 18830 - DNA, 473 bp, Oryza sativa
  Clone ID: uC-osflcyp036d04b1
attaatgaaaaaaagagagtcgtagttcgcctggtctgcctcctctcgttctcggggggggggcggaaatggcgtcgttctcggaggctcccccgggcaaccccaaggccggcgagaagatcttcaagaccaagtgcgcccagtgccacaccgtcgacaagggcgccggccacaagcaagggccaaacttgaatggtctgtttggaaggcagtcaggtaccacccctggttattcctactctacgggcaacaagaacatgggtgtgatctgggaggagaacacactttatgactacctgcttaatcctaagaagtacatccctggaaccaagatggtcttccctgggttgaagaagccacaggagcgtgctgatcttatttcctacctgaaggaagcaacctcttaacaggaggggagctgtcgtaacatgagacaatcggacaattcattctacaggtaaataaaaatattt

SEQ ID NO: 18831 - DNA, 467 bp, Oryza sativa
  unsure (1)..(467): unsure at all n locations
  Clone ID: uC-osflcyp036d08b1
tctgttttatggttgtgactgtgttttccatacggctgttttcttttaccacagcgtgggggatcctaangctgagttacttgaccctgcagtcaaaggaacccttaatgttctaggctcctgcaagaaagcttccatcagaagagttatcgggacatcatgcatgggtgctgttgtctacaatgggaaaccaagaactcctgatgtagttgttgatgagacatggttttcagttccagagatttgtgaaaagcatcaccaatggtatgttctgtccaagaccctagcataggaggctgcttggaagttttcaaaagataatggatttgaaatagttactgtgaacccagcaatggtcattggtcccctgctgcagccttcactgaatactagtgctgaagcaattctgaagctaatcaatggatcattctcgacatattcctaatttagctttggctggataaacg

SEQ ID NO: 18832 - DNA, 498 bp, Oryza sativa
  Clone ID: uC-osflcyp036d11b1
ttggttgagatcagcaaggtccttggattcaagctggtgactgactgccttgagctccgggcatggttctaccttgcacttgaggagtatgaggctgcagtgcgggatatcagggcgatattgacgttggatcctagttacatgatgtttcatggaaaagtgcatggagaacagctgatcgagatcctccgagggtatgtgcagcaatgggatatggcggattgctggatgcagctctatgaccggtggtcagaggtggatgacatcggctctctggctgtcgttcagcagatgctcaccagggaacctgggaacagtagcttgcggttccgacaatcactgctcctattaagactaaattgtcaaaaggctgcgatgcgtagtttgagatttgcacgaaattgttcggctcatgagcatgagagacttgtatacgaaggatggattttgtacgatactggacaccgtgatgaagcacttgccaaggctgaacattcg

SEQ ID NO: 18833 - DNA, 200 bp, Oryza sativa
  Clone ID: uC-osflcyp036e04b1
ctcgcctccatccccatcgtccgatccgatcccgcgggatgagcgggcaccacggggctaagccctaccagccccgccgcgggccgggtcccgccgacgaggagggcgcccccgccgctgcggcggactaggcggaggcggaggcggaggtggaggctatggaacggcactagcaggagcaggagtactaggagggggag

SEQ ID NO: 18834 - DNA, 478 bp, Oryza sativa
  Clone ID: uC-osflcyp036e10b1
ttgttttcggcaaaatcaactgtgactgttctgacatccggcaatttgctggatgaaaattcatttgctgaaccaaacaaagtcgtaccggttaaaagcgagctgccagatgcttcagaagagatggaagcagcgctctctccttattcattcacttcatttgacctcgctctagatcagtacagcaagctcgtggcagagatgtgaagcaatgatgcacacttataccagagaatagaacacaggatgattacgtgaggtgtggtacctgaatttcagaaagctaacagagtgtatatactgcattctggcatttgctaatcacactttcgtgtgacccttgttgtttatgacgctgtaagaagtagtttaagggttgtcacattatcgaacctaagcggtaacgctaattaatatcattgtcaataagctatccctttgatcacactaagctccggctactcagcttgaatggatt

SEQ ID NO: 18835 - DNA, 345 bp, Oryza sativa
  Clone ID: uC-osflcyp036f04b1
ggtgtttccggcaatgtcatcgctctcttcctggtcctttcgacagtggtcacgcggtggaggatcatcaagaagagatcaacggaggacttctccggcgtgccttacaacatgacacttctcaactggctgctatctgcttggtacgggctgccattcgtgtcaccatacaacatgctggtgacgaccatcaacgggacagggtcggtgatcgaggccatctacgtggtgatcttcctgatcttcgcggagaggaaagccaggctgaagatgatgggtctcctgggcctcgtcacctccatcttcaccatgggtggtgctcgtctccctcctggccctgcacgg

SEQ ID NO: 18836 - DNA, 495 bp, Oryza sativa
  Clone ID: uC-osflcyp036f06b1
atctgtatccgccgcagccgcactcctctcccgggctcgtccgttcgtatgtcgtctgtgccggttgctttggcgggcagctagggtttaggcgcggggccctcccgaatccccgatgtacggcgtcggcgtcggcggcggcggcggcgggaactacgatggcgggggagggaacgccagctccctcttcggcggcggcggattcatgccctcgcaggcgaccaacgccgcggaggggaccagcggcggcggcggcggcttccccaagagtcggaacgcccaggcgctgctcccgctcaccgtgaagcagatcatggacgcgtcccagaccaacgacgacaagtcgaattttgctgtcaatggcatggaggtgtccacggttaggcttgtaggacgcatgttaaataagcttgatcgggttacggatgtatcattcactcttgatgatggtaccagcagggtacctgtgaatcgctgggaaaacgatagcactga

SEQ ID NO: 18837 - DNA, 296 bp, Oryza sativa
  Clone ID: uC-osflcyp036f07b1
tcggtctcacccagatggagagtatccaactggccgggctgcatcaacacggggcactataattacattgccatcatggcctacttcaagcgttgaggaggttgcctcaactggaccagggattcgtttcttccagctttatgtttacaaagaccagagggtggtggaacaaccttgttaggaagagctgaaagggctggattcaaggcgattgcgcttacggtggatactccccgacttggccgtagggaggctgacatcaagaacaggttttgttcttccaccatttttgacac

SEQ ID NO: 18838 - DNA, 370 bp, Oryza sativa
  Clone ID: uC-osflcyp036f09b1
atcccgtcctaattcccggttcacccagcgttttaatcgtgggcctgatgcgatggcagctctgtccccttcgatgatgctcggggcccggctaaacttcgccggctcctcccgctacgcctccgcggcaccgaccaccggagcgcagaagatcgtctccctcttcagcaagaatgcccgccccgaagcccaagcccgccgccgtcacctcctcgagccccgacatcggcgatgagctcgccatgtggtacggccctgacaggaggatctccttgccggagggtctcctggaccgctcagaggtgcctgactacctcatcggagaggtccccggagactactgctactacccttttggcctcagtatgaa

SEQ ID NO: 18839 - DNA, 448 bp, Oryza sativa
  Clone ID: uC-osflcyp036f12b1
tttcttcaccttcctcgcgaacactcacgaagggtggcctctatataatcccggggggggttcacccaccgcccgcgccggataaatgggggatccgctcgtcttcctcctcatacagaagaagaagcaacgcgctcgccaacgacgacgacgacgacgaactagggaaaagcggaccgcatcgcgcgccggtagctgacctcactcggccccgtggagatccaaaagggtttttgggggggggtgttcgtctcggattatcttctggccgcaccgcacatcgggggcagctctgctctgtatcagccctagaacctgttcggcaggtctagggatttatcaaactagtatatactaaattagttagtgatgtatcctgcaaaccagtacatggatccatactattcacattacagaaatcacgctccttacgcacattatcctcctc

SEQ ID NO: 18840 - DNA, 282 bp, Oryza sativa
  unsure (1)..(282): unsure at all n locations
  Clone ID: uC-osflcyp036g02b1
tccaaaattcccttntcttcccactcctccacttttccctctancttctcaacctttaccctcttgggtggtttatttcaaaaccgggtttggtatatccctcaatttaaccatcgagggccgccaacacacatagaccaatgaagagccaactaacacattacaccaaagcgcgattcgtcatcatctccgtcctcgtcttctcctccttncccactgccactgtcgttaaagcccgggttggacctatcgacatcgctcccaccaaccttatcaccaacc

SEQ ID NO: 18841 - DNA, 367 bp, Oryza sativa
  Clone ID: uC-osflcyp036g08b1
tctttcgggtttcctcatgatgaccctccagggcgggcaaaatcccattgtctgctggggtacaggaaaaaccactgagccttacatagactcatctccaagccttaatttgggcgtacctccagggctttctcttgatatccctcctggctttatgaaagctcattatctccctcatacaggagaaactactgagtctcacataaacccttctcacagtcacagcctttcttgggacacccctctaggagtttctcttgatgttcctccgggatttactaaagcccatcggctacccatagtatctactgctggatctgaaactgctggttctgaaaagaaacccctcattaagttcactctgaat

SEQ ID NO: 18842 - DNA, 364 bp, Oryza sativa
  Clone ID: uC-osflcyp036h11b1
tctcttttatccatcttcttcttctttctttgggttgggtcctgttctttggggggggagggaactaaacgcgttgctgctttgtttaattttgtgtgttgctgggggtgcgttaatggcggttgacccaatgactacgacgacccccgcctctccgcccctttaaataaatcgcgcgggaaggagagttcgccgaggacacccatcccgtcccttgctcgtcgcatggatctacggctccgatcgatcgatcgatcgatccagcaatggcggcgtcgtcgtcgaagaacaaagaggaggaggaggtctcggtcgtggcggcgaggaaggggaggctgatgcagcgctacgacgtcgagtaccg

SEQ ID NO: 18843 - DNA, 284 bp, Oryza sativa
  Clone ID: uC-osflcyp037a02a1
caccactcatttcgatgatgcatacgggcgagtccataacgaacattcacaatacgagcacgttgcataacaatcataacgctcgaactccatacacgggacacggactcacagctacccgacggatctatcgtttagaacaatttgaaggagagctgaccacacacgcgtgcaggacttttgacctggggtacagttagtactaccgtaaacccgcccagtaccctgcacggttgcaccgcgcgtaccgtgtactagacggccacccaacgtgtacgcgaaaa

SEQ ID NO: 18844 - DNA, 304 bp, Oryza sativa
  Clone ID: uC-osflcyp037a03a1
aagggtcctggagcaaaatttgccaaaaatttttggataaaatagggttccgtcatcacaggacaagaaaaaaaaataccgattctacaggaaaactgtactgcgctatcaatccgaatcctgatacaggcacacatagcaggggaaaaatcttattacaattgcaggaaaacgagtttggcagagggattatcaaagaacttcatgtagtcataaaatgactttccacgccgaattttagcagtggacccaacatcttctacccaatattcagggggtcgcaacttcaagttgtaggttgaag

SEQ ID NO: 18845 - DNA, 496 bp, Oryza sativa
  Clone ID: uC-osflcyp037a04a1
gtaagaaccaatcataaattcaggatttcaggtcacatcacacaactcgaaagtttggatatacatgcagattctattagagagatctcaaaatgagcagaggaggacatgaacgctaattagtgattgctgcgaccaaggaatgaccacaaccagtcatctggacaagatttgcggcaaaatcatgcacaattggataatgatatattaatatgtaaaacccaggaacaccgagctaaatgtctcttaggatgggccatcctttcttagcaatctcatcaatcttggagtttattctgttctgggtatttggggagcagagctcagcagcgtatgcattcaactttgcagctagtgttgaggtcaggagctcctcctcgggcaggttcccaatcagttgcaggagaaacggcttgcgcttcagctcaaatttctgatgttccggttcagccggataaaatgcacctattggttggatctgtgtggtaatgacact

SEQ ID NO: 18846 - DNA, 350 bp, Oryza sativa
  unsure (1)..(350): unsure at all n locations
  Clone ID: uC-osflcyp037a05a1
ttttattttttttttttcttttttttttttttttgttttttggagggatctctgattaagatttataaacaaaatcactctttctttcaaaatcgtgtaaaataaacttaatgctctaacaggatactgaattctgaatgaacagtattagggctttttttcccgatcaaaacccggagatcaagaacgaaacataacaataaagcggggggtggcctaatgcggaccatggattaatttgtttagggagatcatggatgtggctcataaaaaagtgntccgaatctttggatctccagatattgtttctccagactggccccaaaggcccaaaggcatggatgaccggg

SEQ ID NO: 18847 - DNA, 403 bp, Oryza sativa
  Clone ID: uC-osflcyp037a06a1
attgcaaaaacatcatcttcttcttcatcttcttagtgtacacaacaccaactcgatcatcatctcgtcgcactaaacccatcttccccaacccaaagacaacgaactcgctggccacaaatccatccaaccacaattaaccactgctaagctacggtcccccacttcacttgccggggacgaagttggtggcgtacgcccaggcgttgttgttgacggggtcggcgaggtggtcggcgaggttctcgagggggcccttgccggtgacgatggcctggacgaagaagccgaacatggagaacatggcgaggcggccgttcttgatctccttcaccttgagctccgcgaacgcctcggggtcatcggcgaggccgagcgggtcgaaagccgcccccgggtagag

SEQ ID NO: 18848 - DNA, 525 bp, Oryza sativa
  Clone ID: uC-osflcyp037a07a1
aagcacaacataatttattgttcacacacctataaatttaattaatcacaacacggttcgcttacaaacattcatcacgctctacaacgagcgacgggataaagcctcaaagcttccccgtccaatctaacttcgacaaccttgtatagctgcgctgtgcaaagcagcgtcccacactggggacatggtgtacagtcattacaaccttcttactcctgagtaaacaatgaactaatcatgtacactaaagttacaggtaaaccacccaaagtacatacaactcgattatttgctcatcattccattctgtcctttaaaattggtgtagatgagagggaccgggaagcacatagcttcgcttacgatttgaagctctgaacggttgtgtagcttccaaccgaggagatgaagtcatatcaactacactgaacactgaagcgtcacaatgaactaatcaccagatgaacaccttcgacaaaagggggcctgtgatgtgatgctcggctgcaggttggttggatgtat

SEQ ID NO: 18849 - DNA, 426 bp, Oryza sativa
  Clone ID: uC-osflcyp037a08a1
aatgtaaaatggattgattaagaacaatagttctgacccggaaaacaaaatttgtacatatgatttgacttcgctaacaaaatggattgcgcatctacatcgcttggaatggtggaaatctaatgctctattaaactaccaactgtggaatggtagatttgcatggcctatctacaaacctcagttcgaggtggtgtggcttttacaagatttcaagggcgcaagatgtcaaatcaaggggaaaaacctctgaatcctgtaccaagatgagatcattggcaaaaactcattcttccaactccttgagaaaatctacattatcaacaaatactgttttccagccatctggatctgtgcaagcagttatcttcgtattaattccaggtaatgggccaggttcacgagttattttgccaccattttggt

SEQ ID NO: 18850 - DNA, 321 bp, Oryza sativa
  Clone ID: uC-osflcyp037a10a1
atccacccctttttttaggtggtcatttgtggggtttaattacaagccacttactccatatggaagcaagataagagagtcaatttacagaccggtctcctttatttaagaaaaatggagggcacttggaatacgttcctaaaactttctctcattctctctttctctgatgaagcttagtccttctattttagatgaaactgcgatgatctggggaggtaagggctataacgatttgcttatgcaagccggaccacttggaaatgcacaggcagaactctttctgcgtaaggattcccggggctttaccttggacaaggg

SEQ ID NO: 18851 - DNA, 412 bp, Oryza sativa
  Clone ID: uC-osflcyp037a11a1
tttttatatttttcctttttttttttttttttttttttgggtgttttttttttttttgggtttcaaaacccctgactcaataacggaaccccggaatggcagaacccggtggtcctaattaaaatacagtaaaaccattaaacccttaaacccaatgtggggttttggaacccccttttcttattgggaatagcaaaaacatagcaaaagctgtaacttgaaaaggggggggggccttacagcccaaagaccccaacgaccaaacggggcacactggtgcgggggctgggggtgtgcaactaggtgcctgggggaaaggggaaaaccggcaaaggctccaaagccctacaagttaagatcctgggggtggggaaaccccccaaaagccttaaaacccttgaccacggccctt

SEQ ID NO: 18852 - DNA, 57 bp, Oryza sativa
  Clone ID: uC-osflcyp037a12a1
tttattttcagttttatattatcgcaaccttacttcctttttttttaggggggtagt

SEQ ID NO: 18853 - DNA, 423 bp, Oryza sativa
  Clone ID: uC-osflcyp037b01a1
ccgaccaaagattcctgttttatgggggggctccaagaaggggggctcccccccaaagctaaaggggaacaaaaaataaccccggaaaaaagccccaaaaaaaaattccccggtcttcccccttgggggaccgacccaagtttctgggggcaaacagagatgaaatccgccccccgattcccccgcccaaaaccccaaaggaaatccatcccaaacaaaccgggggtccgggggcccaaccaaagggaacccaaaaacctccctaacctaggtaattaaccccccccccccccctgaaaaaaaaaaaaaaggccactcgggggcccccgctccccccccggggcaagcctcccagggaaaagccggagggaccaggccgggaaccaaccggcaaagggggggggggggggggggctccggggg

SEQ ID NO: 18854 - DNA, 510 bp, Oryza sativa
  Clone ID: uC-osflcyp037b02a1
tttttttttttttttttttttttttttttctttttttgttttttggtctttttgatctggtttgattgttttttttttccccaaccaaagagcccgggattatgggggggctcaaagaggggggggccccccccagggaaagggggaaaaaaaaattaaatctggaaaaagcccccaaaaaaaaatcccccggttttcaccctggggggaccagacccaatttttgggagcaaacagagtggaaccccgccagcgatttccccgccccaaaccccaatggaagtccctcccaaacaaactgagagagcgggggcccacctaaagggaacccaaaaacctggctaacctaagaagtaaaccccccccccaccccggaagaaaaaaaaaagagccatccggggactccctccccccccccggggggggccacccagggagataccggagggaccaggcccgaaaacccccggtaaacggggggggggggggggggccccggctttgggggcc

SEQ ID NO: 18855 - DNA, 247 bp, Oryza sativa
  Clone ID: uC-osflcyp037b03a1
ggggggccatagcaaaggaaattaagttttaccccaaaccgggtttgaattccaaaacaccgtcggggggtgatttaacagggtggggcctgggaatccacccaaccttcagggggtggtttaaactagttggggtttggacacatgggcccactgtccgggtctgttttagttggggaggggtacaaaccccccaaaataacggggggggggtaaaaggcccaccaggattgttaatcccggccct

SEQ ID NO: 18856 - DNA, 166 bp, Oryza sativa
  Clone ID: uC-osflcyp037b04a1
taagcaattcccaaaatagcaaaagaaacaatgaaacaaaacagcgtggttcttatgctaagatgtacatgacggtctagggcaaacccaagaccagaatacactccctgacaattttcagtgtatcatcattaagtacatgatacatgtcaccggatgagccatt

SEQ ID NO: 18857 - DNA, 363 bp, Oryza sativa
  Clone ID: uC-osflcyp037b06a1
aaaaaacaaacataattacgtaataccatccattttttttattggcgacgaatttatcagatatgctctagatacatatcttgggtgtatatagccgggagctttgttttcacatatcctcacccaacgataattggagtactcttacaataaaaccggtcggagagggagggaagagattattacatatgtgttaagagcagaggccattgagatggtacataaccaaattgtaaaataaaaatatatagcatattatatattgatatatcatcaacatagcccaaaacaaagctgcatactattattataggcagcaatccaccagcgcgatgcttgatcttagcttagttgccaccagac

SEQ ID NO: 18858 - DNA, 532 bp, Oryza sativa
  Clone ID: uC-osflcyp037b07a1
gaacaaaaaaaaatctgccttactttgtttcttgtacagcttgatctggtttgatagaagaaaaatacaaaatgtaaaaagcaatggattttgtgagaaactgaacatcatttgatttccatccgaatatttgaccatcaccaatattcaggattcataatcctgcggatccatccttccacagctcgcaccctgcagctcacagcaccagcccactcgagcaaactgtgtggctcgccgtgcagctcgcaccacgcatagaccttgccgcctgttccttgtgagcttgttgcacctagcagtggaccgcctcatgcgccgctggccctcccttagccagttgttgataacttaagccacagtccgcttggctgctccttgatcaatactgtgactatggcttaagaagtgccaaaggcatgtagtgccctaaatccatctaacgctcagctgctcggtctctcaactgatttgcctagctttccctgcacttttacaactccaaaatgtggacacaatcagaaaaatcatg

SEQ ID NO: 18859 - DNA, 448 bp, Oryza sativa
  Clone ID: uC-osflcyp037b08a1
ataattaattcacaacaccatatttcattgatcaggttcagaacctgcacagaaatacacactaccggtacagatctcaccttctctccaatactcgtacattccatccacgcgggtccacacgaatacgtacatctatacggtacacgtacgtacatctactgcaccgggtacacacacgcacactctcctgcagagacgcgcatcgtcgtcaacctagctagcttagctgaaggcgatgcgtcgccatggcagcacggcggcggcggcgctcacttgccggggacgaagttggtggcgtaggcccaggcgttgttgttgacggggtcggcgaggtggtcggcgaggttctcgagggggcccttgccggtgacgatggcctggacgaagaagccgaacatggagaacatggcgaggcggcccgtcttgatctccttcaccttgagct

SEQ ID NO: 18860 - DNA, 407 bp, Oryza sativa
  Clone ID: uC-osflcyp037b09a1
aaaggaaaaatatcaaatattcgattatatataaaaataaaaaagcggacgggttccctcccttagaacctcaaaaccccccggattgaacatcaaaggtcccacccaggcggcagcagcatcagccagcagcaaacgacatgattccccacgctttgggatgaaaaacaagaagtcccagaagaaaaagacgatggccaaaccccttgatcgagctcaacaagggggatcgatcaccaatcacctacttggggaacccgagggcccaggcgttggccaaaatgtagggggccttgaaacccgggaatccgggggggcgggcgagctccctgaactccctctgggacctttccttgcccccggggttgggggccagcattaaacatgtttaacggggaacaccccct

SEQ ID NO: 18861 - DNA, 448 bp, Oryza sativa
  Clone ID: uC-osflcyp037b10a1
attactgaagcatgcatatcagcatgatgaatgaaccacttaagccaataacagaacggtttaggcattcagaatgataggattctattcatcacaaaacaatcagtacccgattctattcatcactgctatatgcagttccgaaataacaaaagaaacaatgaaacaaaacagcgtggttcttatgctaagatgtacatgaaggtctaggtcaaaccaaagacctgattacactccctgacaattttcagtatatcatcattaagtacatgatacatgtcaccggatgagccatttttatgcgacaagtgtttttggacgtcttaacggctctcaggaatgtctgttccaggacaagtagttggtgatcacccaatttccttggttttatgaggtatagcaaggtgaaagccaatgccagaaaaagccgaccccttcgactataaca

SEQ ID NO: 18862 - DNA, 262 bp, Oryza sativa
  Clone ID: uC-osflcyp037b11a1
gggacccgaaactttgggggcccttggaccctttaagcagtttgattgatttgggaggaataacatggaccaaaccccagctgttaaacagggttaagcatccaaaaaaaacagagcccataagggggttgggaggctaagttggtttgatgcaggggctggggtaagaaagcatgggctgaaagggccctcctgctccggttggtttgctaaaaaggggctgaaaccccttcaccacgagggtcatgttcggccggaaatt

SEQ ID NO: 18863 - DNA, 144 bp, Oryza sativa
  Clone ID: uC-osflcyp037b12a1
atttcctatttatttttcccaattaactcctccaaaaacaagcgtgattacgtaataccattcattttttttattgtcaacgaatttataagatttgctcctagatacaaatctttgtgggaatattaggccgggagcttttgt

SEQ ID NO: 18864 - DNA, 407 bp, Oryza sativa
  Clone ID: uC-osflcyp037c02a1
gagcaaaaaagacaggatcaccatattaatactaaacgagacggacccggcggtggctacacatagaaacacacaaatgccattcacagctgaatctcaaccctgcaaaaattgatgcttgaggagatgagacatgacaagacttacccaaggggctcaggtgggttatgcatacaacaacatgaaaaggaaaacacatttcacggagaataacatgaccacagactaaacaatgtatgacaactgtcgtacaaaccgagagcaaatttataggatgacaacctgttccaacgaataatggcctaacttgaaacaaggaaaattgtacctgctaccgttgtgccagagcacaccttctttatactgaccctaaacaggggcacgaaaaaggagtacacaactgctgt

SEQ ID NO: 18865 - DNA, 515 bp, Oryza sativa
  Clone ID: uC-osflcyp037c03a1
aaaataagggcacaactgaatactcgaactgaagcattataaaaggcgagcagctgcggcttgttatcagcaagcaaacatctgtggcattctgctaaaatcaaaatttgcatacaagccaaacacatcgccttagcagcagcagcagcagatactctagaggagaacgctcatagcataaaatcactctcgagtcattcaacagcaatggtccaagaaaactaatatcggatacacataaaacgctgaaaaatccatcaccgatgccaaatcgttacgggccaatctctggtctgcggccaagttatgtggagtcggcaggcttcgcctcgtcggccttcttggtaggcacatcagtacccatctcagctttcagggtcgttgacgctctgctccagctcatcgatcttggttcccatttcatcatctgggttaggaggttttgtacaaatgctgtcatatctgccgggttctgcgatgagggctctgagtccatattggccgaggtggggatc

SEQ ID NO: 18866 - DNA, 485 bp, Oryza sativa
  Clone ID: uC-osflcyp037c04a1
attaaaacaaatcacatagtactttcattatttgaaacgaacataatgatacataaacacatgaaagaaattaagggagatgttgcaaacatatccgcaagaaacacgacacaaaggtgcgtttgcactactggacatgaacacagcttgcctcttaatcacttcttaattaatccttctgcagttcttcctgatctccccgtttgatcccgtcaacggtgtgatgtcccccatcttgatcatgcccgtcacaaaatccgcaaagaatgtgctctggctacttatgtaagactgaacaagagcatcagtggctccgccattgaagagctcctgatcagaatgcaggagccccttcttgacgacgaggttcttgtagtagttgttctcgaacacggttggcgtctgaagatccaaaggtgccaggttattgtcacctgatcctgagttacgagggcaacctgaatgccttctcatcgcaagccact

SEQ ID NO: 18867 - DNA, 386 bp, Oryza sativa
  unsure (1)..(386): unsure at all n locations
  Clone ID: uC-osflcyp037c05a1
taatnactttttgggggttttttttttttttttttttttttttttttttttttttttttttttaaaggggaaacacaacaaaaagggggaattttcaaaaaaaatacaaaccccttctcatggggaaagggaaaaggcaacccgaaaaaaaaaaatccccaccccccttttaaaaaagaaaagaagcccccaatccttttggggcccgggggccaagggcccctttatcaaccccgggaaggagggacccaggccccccccagttttgggcgggtactaaaaaaccccaccctttgccagggttttggaaagggaaaaggggacccccccctaaattttcctggggggctccttaattgacccggtttttttgggggggggccccc

SEQ ID NO: 18868 - DNA, 335 bp, Oryza sativa
  Clone ID: uC-osflcyp037c06a1
cctcctgaagagccgccccctttttttttttttttttttttgccaacatttcacttgtttctttttgttgtttttttttttgatttggctttgtctttttttcttgggaggggacacaaccattaaatcaggagcggtgccagcccagcccccggtttccggcccgccccgggttccggacccccaaacggttacccccgagtaaagggctccgcgacccaaaaaaagggattccccccaagggctgatgccactaccacccccggacaaaaaacaagctggttcccgaccccaaaaactgagccatcaaacctgccaagtgggcggccaagccg

SEQ ID NO: 18869 - DNA, 512 bp, Oryza sativa
  Clone ID: uC-osflcyp037c07a1
acaaatatgacacgctcctttattcattcatcattacgtgatggagtacaagtttataggtacggttacacacacaagtagtagtctctgcagtagaggtaatgaaaaccacgtacatgcagcattcgaacaagtaaaaaaaacagatgtgcatgtccgttttccagaatatatatgcaggattagttaagaacatatataggtagaaatatattttgcaccaattaattaagcagattaagatgggtacgtagtagacattagcaagcaagcaccaaacctgtagattagatagatagatagatagatatctggagcggtatcatcagctgatgatgatgtgtatagatgaagtattgagctgatgcaagaggaggccttggattcgatgggtgaggaaatgaagtagtaaaatgatcagcaggtagcttcgcacttggtcgagcagtcgaaggagcagccgccgtcgccaccgacggcggcgtaaccattgccggagcggctgaaggaga

SEQ ID NO: 18870 - DNA, 420 bp, Oryza sativa
  Clone ID: uC-osflcyp037c08a1
ctcggaaaaactgatggggccaaaacttagtcttccgggcctcctgggggtataaaggctcataggcctcccaaaaccttgggctcttgttaaaacatttgtttcccccgggggggggtttttcccgaggggcccccagatgcttcaaaaaaaccaccccaaccccattaggttttaaaggctccataagccaagggcttacaaaacccccccggccccccctaatttttccaggaaatgggacctgggggggttccccttatttggccgggggggcccccccgcgggggccgggcttggctggaaaccctaggtgccctccttcacaggggggggggggggaccggttttacctttacccccggacgggtggggccaccccttggactccgcccttttaggggaacgagccccggggcc

SEQ ID NO: 18871 - DNA, 408 bp, Oryza sativa
  Clone ID: uC-osflcyp037c10a1
ccacaagaacatatatttatttcagcatcatccatggacagacacactggaaactggagagagatgggagatcaaatcgagctcgtaggctcacgaatttccaggcatataacaacaactacaatctttttcaccacgacggcccggatctcactacttacttaccgctgttaaaacgcaacgcccatgttttcttggatcagttgggggcggcggcgtcggcctcgtcggcggcggcggcgtcctttttctccggctccgggggcgccgggttgagctggaaggcggtgacggggagggtcgcggccgaggccggccggggtgcggaagacaagcttggtgccggaggggctgaggacgatctcggagatggagacccagatgaggagcttcttgcttcttaccccg

SEQ ID NO: 18872 - DNA, 472 bp, Oryza sativa
  Clone ID: uC-osflcyp037c11a1
gggcggccctcctttttttttttttttttagtgccaacatttcactagtcacaaattgcagattataattatgatatggcagtgacaatatgacattgtatttgacaaaaccatgaagtcagtagcggtactagatcaaccaccgggataaaacaagtctaggctctagaatcctataaatgtaacggaagattaccggcctctgccatgttccttcaggcattcttgaaaaatattcaggcgactgaaaccatagtacaaacaacaagcagcagagggacgtcaaaatctcaggtaacaatggagcaaagtttccagcaatttcaatcctcaatctttcgagttttcatgaagcaaaacatactcccggctactattgccaaacttaatggtatccttttcaaagagttcataataacggctgggctcaatacgattctcaatatgaaagttccattggtactaccaagat

SEQ ID NO: 18873 - DNA, 525 bp, Oryza sativa
  Clone ID: uC-osflcyp037c12a1
aagctaagagaacaaatgcataagtatttgtatttcaaccttatttttgatttatttatactttggcaagcgcatatgttgggcagctgcaagcccaatcaagaagcattacatataatcactaaaacaagcttgtgtatataccaatgttacacaatcatcatatattgagtgcacaagtcccacagtagaattgctccattgccgagtataggactagtagtgcccaccacctccaccggatccatatccgtagccagagccagaaccatagccagatcctccgccttggctgccgtcgtcttcaccaccaccaccgcttccatatcctccaccataagcaccgccgccttgaccatatccactgccagatccatagcctgagccgctaccatacccaccaccttgaccgccgccgccaccaccaccatgttcaccttcaccaccgctagcaccacctgcacctgatccatatccagagccataacccttaactgagccatacccagatctcggaccaccacc

SEQ ID NO: 18874 - DNA, 71 bp, Oryza sativa
  Clone ID: uC-osflcyp037d01a1
aacccctattttataacccgcgaccaaataacccctctaaggggaactatttcatatacacataaacaaaa

SEQ ID NO: 18875 - DNA, 468 bp, Oryza sativa
  Clone ID: uC-osflcyp037d02a1
aatagcggagactatttatggcccttagggggagctatttactggacacataaacgaggctacaacatatacagtatgttacctataataaacaaacccctaaatagggctaacatagttggccagagcgtgcatatagaggctacactttgcacgagagaggcctcagattctcccttgatgatcacttggcttctgaaactgatcacataatgctatttaattaacaatcttagaggcagcacatcgaagttcattacgcttgctctgaggctattacatgagcatggactgtaaatggatcctttgcctcaaaacatatatttaggggctgcagacaagcatgcttgcctgaagctgcctatccatgttgaagcttgcaatgaagccctccactctacgagtcagcttataaggtggcaacccaccatgttcctcctcaatgatagactcctagataaccttgcc

SEQ ID NO: 18876 - DNA, 506 bp, Oryza sativa
  Clone ID: uC-osflcyp037d03a1
atattacgcacctaaggtcacaaattgtttatgcgctattacgaaattattacctgcctgggctggattccataatttcataatcaaagacacaatttgatcgaagcagtgctaaagtttggcagcccactagcactgaaccccccacaggggttactgacattattcatctacagtctgtctacacaccctacaacattggcggcaaagtagcaaaacgaccccctgtaccatctcccgtctgcagctagcattgcatcgcagaacctttagaagatgtttgatctggatcagttcagggaatcagcaagaaacgattctacattctactacccagcaccgccaaaagagcgctaatacactcgcgaacattagctgctgaacctagctccaccaacagttgcagagaaccatcaaattgtatctttcacccaaaacttcgttgtcacagaatcacagtccagggcgattgctgcttcataagtggctggttgcaagggcggtca

SEQ ID NO: 18877 - DNA, 365 bp, Oryza sativa
  Clone ID: uC-osflcyp037d04a1
atatataccccgagtcaatctgtatatttattgggggtgttttggggtatttgcagatatcatttttcacttattgacaaataataacaagatgcatactggttactggtcaacaatacataacacttcacattttatccgaaaaatctttcatattaggaaacgtggataaacaaaggcgcttcaaagcatttagggcagggggggcagaagcagcaacataccttcagtacgcatcaaaagcaaagaacggccaaccctcctaggaggaagccaaggcacaaaacaacgacgaggtggccaacatgttggaggccacagaggggaaagccaccgggggaccggaggcacccatggcggaggtg

SEQ ID NO: 18878 - DNA, 312 bp, Oryza sativa
  unsure (1)..(312): unsure at all n locations
  Clone ID: uC-osflcyp037d06a1
ntcttcttatttaaacccccccaccacatttccttcttaaaaggtgtaattaatattaatcacacctacaataacaatttattttatttacattcctccccaataacaactctccacaaccagggggggggcccaccacacccccaccgaccctaaaataagcccacaaaccccaaaacaagatctccacccaacaagggcaccaaccccccaaaaaacggcccatattcacccgggtaggggcccccccccccccaaaaaaaaacgggccccataaccccccccccggccttaaaaaaaaaccccccccgg

SEQ ID NO: 18879 - DNA, 534 bp, Oryza sativa
  Clone ID: uC-osflcyp037d07a1
gttaatagaggtgactatatattccctctaattttatctatttcatatacacataaactaatagacaacatatacagcatgttacctctaataaacaaacccctaattagtgctatcaatatttgttatagtgtacatatagaggctacctcttgcacgagagatgcctcatcttctccctttttcatcacttctcttctcaaactcatcacataatcctatttaattaacaatcttagaggcagcacatcaaatttcattacgcttgctctaattctatttcatgagcatggtctgtaaatggatcctttgcctcaaaacatatatttagtagctgcagacaagcatccttgcctcaagctgcctctccatgttgaaccttgcaatgaagtcctccactctacgattcagctcatcagttggcaacccaacatcttcctcctcaatcatttcctcctcgaataccttgccttgagaaattgctccttcctgttcttccacttccttaatttttccatccccaacattagcatc

SEQ ID NO: 18880 - DNA, 407 bp, Oryza sativa
  Clone ID: uC-osflcyp037d08a1
aaaacttattttattgtttttttcttgcgggggtttacaccagtaaccttaccagccgctatctgctaaataatagcttgtatgctctcatgagcatccttcaacgggctaaaacattcaaactactgtacatgtgtcacacacccggtctgtacatgtttcaagaaataaacaaaggtggggaacagcaatggccgctcccccagcctcccagggaacaaaaaaattgatcaggtgaagagaaataataaaagagaaacaaaacatttgaccaagacataatgaattgagagcatcgcaaggtacttcataactaccactctagtatgctgttaacttatcacttggggggaaatgatcgaatcctataccgaggtggcctcagctcattcacaggggccggactc

SEQ ID NO: 18881 - DNA, 265 bp, Oryza sativa
  Clone ID: uC-osflcyp037d09a1
ggggtattacgaaattattacctgtgtgtgctggattccataatcccatattcaaagacacatactcggtcgaagcagtgcccaagtttttgcggactcacaagccctgaacccccgcccgggggtcctgacattactccattacagccagtcaacaccccctacaacatcggcggctaagttacaaaacggcccccagaacgatctcccgccggcagctagcaatgcatggcagaacctctcgaggatgaaagggggggagagg

SEQ ID NO: 18882 - DNA, 465 bp, Oryza sativa
  unsure (1)..(465): unsure at all n locations
  Clone ID: uC-osflcyp037d10a1
gaggcatgaagcagccaaacttggaatttcattatacgagacaaaacctgggaatatgtactgatgagttgaaaggtcagnatttcccccctcaattttcccctttccccatttgcatcagggtctaggaaccaaacatattacagtcaccagagagataggatgcaggttcaacacaagatctgtctcaacatgttacacgaactcctgggcctgggcatctggtcttcgagaaccctttttgccggcgatcattctcctaggcatgttggccctctgaacaagggggaccagcgcttgcaccaccttagacattggcggtctgaactccggctcaggctggacacacagcgcaatgacctttgcgaaacgggacagggatttggcagggtacaggcccttgagcgctgggtcgaccatatcgtccaacgcattgatgtcatgcagctggggccgttgcccacc

SEQ ID NO: 18883 - DNA, 534 bp, Oryza sativa
  Clone ID: uC-osflcyp037d11a1
tccgtcggcatggtagcactccagagcggccgccccccttttttttttttttttttatgatcaggtaattcagtacattataaaaaggatagtgagttcagcacaatctacaataacaagtgaattcagcacattctacactgatgagcgaattacagatcatacacgcgggccccacggcattagatttttgttttagtgatgtgtcacacttattccagagcaagatctgaagcttacaagttcaccaatggaatataaatcggcagatatgtatattaggatcagagtgaagcttagctgcggtggccgtgggcgacgatcacgcacggcgctgcagggcttcgtagagattcttgagcgccttgtcgtaggagacgaaccccatgaaccagaactcgtggttgtccgtcgtcatgatctggatgtacctttcgcccctgttcgtcatgctggcggatgggttcaccgatttcactttggttcaggggaagcactaccttgtagatggcctcaggagggtgagctggggcg

SEQ ID NO: 18884 - DNA, 523 bp, Oryza sativa
  Clone ID: uC-osflcyp037d12a1
atggaaactggaagcacgatgaactgacgaagtgatccattctgaatcatcttcagaaacaatcaaatacaagctgtagctattgccaattttgccatctctctgatatagacgaagttttgccggtgaatcgcaagaacaaacgaatctaacgccttgctcgcgcgcaatcgcggcaggcagcagcagcattttgattttttgttcttcagctgctgttctggtcgacgagcacgtgcacggtggcggacacggcggcgtcggtggcgatgacgacgcggttgccggagacgttccggagagcgtggcccgggaacgcgtcgccggcggcgagcgagtactgcacgtgcccgatccggtccgggaacagcagcaccggcgagaagtccaccgtccacgagcttccgttcccctccgccgcggcgcgcgtccgtcgtcgacctcaccgtcatccccgtcgccgcgttctgcgccacgtacacctgctccaccgtcgcgaactcgccgtcgagctccacgatgt

SEQ ID NO: 18885 - DNA, 450 bp, Oryza sativa
  Clone ID: uC-osflcyp037e02a1
aattattagcagcttgtatgcaatgtacgtagatgcatcacaagtaacagtatcacacacacacagacgtgacatgttcatattcgtaccgggaccaaattttatggatcaacaacaaaacatttcaaacaatgagatggctggattattacagagctggaccaaacaaaacaaaacacttagctagggccagtcgagcgaccacacctgccggcccctccatcgatcagaggcgcctcttattattccataaacctccctcactcatatgtagagatagacagatagatttgatttgatcaccagggaacaatcttccagcgctggttgtcaccctcgcaccactcccagagcaccagggttggttccgtcgcgcacgccgccgtggtccttgtctccatggagcgcgtcgaaattgaggtagatgttgtttaccatcctgatgcaccg

SEQ ID NO: 18886 - DNA, 497 bp, Oryza sativa
  Clone ID: uC-osflcyp037e03a1
cttctgcgaaaaatgaggagatatattaattacggggtatcgtttcaaggatgagttcggatgagtgatcgatcactctccacatacttggatcggtctctctcgcacacgtacaacgacaaggggagacggtacaacagcagcggcaacaaacacgcacgtacacgggtagtactacagaacgcgccaacgtcatgggcgattggtgagaaaacacgcacacctactagtactagctttatccttttttagtgtacaccacacggccgtcgacgatctcatcggctagcgcgatcaatggccgaccggccggccagcttcgagcgttatgcttccatcttcccgttggctgtcccgttggccacaaccaggccgacgccgttcgtcccgttggccgccatcgcgcagttgccgttggccttgccgttgctggtgccgttggcgttggcgtttgcctggttggtgtggttggcggaagccgaggctgaattgtggga

SEQ ID NO: 18887 - DNA, 308 bp, Oryza sativa
  Clone ID: uC-osflcyp037e04a1
gtggcgtacaataaccaatatatatcaggggggacccaataatccaataacagaacttactccaaataacaaccagcttacccaaggctttaaactattttttattttcttgctgtacggaaatgaaaagtttcagggagaagccacatatcatctagaaacaccacaaaagaagagaccaagctattgactgtatgttggtatggtttggagctttatgaaatgccttacaatgttgtgcgtaaggccccccccccccccaaaatgaatttgcccaaaggagaatttaattgtacctcttgagtttt

SEQ ID NO: 18888 - DNA, 525 bp, Oryza sativa
  unsure (1)..(525): unsure at all n locations
  Clone ID: uC-osflcyp037e05a1
aaatcacatcattatttttcatttggggaaaaatcaacactgtaccattgcaggatatctccaaacataaatgatactagtagatagttgagacgtgaaggacatctgcaaaccctgatgctagtatattctgaaccaaccagaaatgtgaacatcaaaaccaggtaaaaaggactccatggcatctcagcattcataacttaggtaaaaactcggagaaactaaaagtttccaattgcaaatacaaagattggcctacgaggagaagcaaaacagggccgtcatagaaaaccatgacctcagaacagcggtcaagtaacatttcactacttgtggtatctatgatcaggcttttgtctcctgagctacctcttcgaaattctctcccggaacaagctctggaacatcatcatcgttctcttcctttgcctgngcagtggcacctgcagcagctacctgcttctgcatctcttcagcaatcctctttaggtgctccatgttgtcaggacccaattgggtaatgat

SEQ ID NO: 18889 - DNA, 413 bp, Oryza sativa
  Clone ID: uC-osflcyp037e06a1
aaaaacccttgaagattcatttgattcgggaagagaaacaattttcaaattcccaccggaacccaactttttttttccagaggccctcgctttttttggtttttgggcaacccagggaaaccattttaccggcacaccccccaccatatatgccccccaaaaaaaaatcaagaacccaaacaattcccctttaaataattcccggttaattaaaaaacccccgccttaataataaaggaataaattaactaagggctggttctttccagacattttgccttacctggggaggatggccgggctacaatacgggccgttgagccagcccgaagagatctgcttggaagctgcctcggggggggggatgcccccccaactaaaaagccaccccgggttggagcccccttatgccc

SEQ ID NO: 18890 - DNA, 489 bp, Oryza sativa
  unsure (1)..(489): unsure at all n locations
  Clone ID: uC-osflcyp037e07a1
attataagctccaagcaagagcagctgcaggctgcatctccattattcatataacatattgtactagcaaaggttccattacagtatatgcactctcttagttgaacataaggcccaaaccgacccaacggtttcgacttaagccagcaggagatagttcatagaaaaagtgcacacttgcaacaaccatatcaaggtactcaacggatgaggctacattattccaacccaatcatgcacccaagctacacaagagtagtagtagtgcccaccactgacatggaccgatcagataaacagcatggtgtccaagcagcaccagagcataagggcaggctcttacgcattcacttttggtgcccatccagcaatcaggtgctccttagctgccttcgtcttgatgaaagattcgcggctaaacagagcctttgngtaagcatgaacattggttaggtcttccgggaactttcagcctttgaaatgctccag

SEQ ID NO: 18891 - DNA, 402 bp, Oryza sativa
  Clone ID: uC-osflcyp037e08a1
gtaaaggaaaaaaaatactttttgggacaacttggataattaacaagggaacaattggggccttcccacctacaaatgcccgatgggtacacccttaaaaaccggattaagcccctaaaagggggaaaaaaaaacaaaaccaaaaaaaaaccgggggggaaaaaaaaaaaatcactgaaacgggcccctgggtaaaccctaaaaagtgggcaccgcaccggcgggggccccctcattggctaaagggaggcaaggccgaactgggggaacaaaaggacaaaagtggttcccgggaaaaaatggattaccctccaaagtccacacaaaataccaaccggaagcataaaagggaaaacccggggggcccaaaggggggggccactcaacataaagggggagcgc

SEQ ID NO: 18892 - DNA, 133 bp, Oryza sativa
  Clone ID: uC-osflcyp037e10a1
gggggccaattgggagtttacttttactttttaaaaaataacggccccacaaaaacccccttggagcttggggtttcattccaaggaagacctcttggggggggggggggggggggtttttaaaattcttctt

SEQ ID NO: 18893 - DNA, 527 bp, Oryza sativa
  Clone ID: uC-osflcyp037e11a1
gtagctgagtacacatggaacctaaataccacgagaatacaaccatagcatgtgaaaattctcacaatcagttcttccaagctaagagttgattcatcattctttcagaaaattgggggttcaggaggggctgtaggcacgacatagacgcaaacatgactaacaaaatccactgaataaaataggcgggccttccagcgtaaaacacactcgagagaacgctctaagctgcagcacccttgcccttcttcctctggagcttcttcatgtagaactcaagctctttgccctccaggatgtacccatcagctctgccacattgcccaggccgggaggagatgcaggccaagagccttccgctgccaaattgctcttcaatgtgcgagtccagagtgcgagtttgctgacgcttttcaagcttcctcacaacatggttgctcttttttgcttcctccgaggcagcctcaccctcttgtccctcagcagcattcttcttagcagcaggagctttcttcttctaccgatat

SEQ ID NO: 18894 - DNA, 497 bp, Oryza sativa
  Clone ID: uC-osflcyp037e12a1
gtcaaaatggtttcttgactatctctggcaatgattttgcaaaaacgggttttattattgttacacagagcagaccctggctgtttcgcgacaaagggaaagcacaagacaaaaataaatctgacaatccaatgaggaatactcttattcagctataatgacgttctaacactataattttttttcgttgttgttttgtacacacctgtggcttctacaatctgaattttctaactgtaaattcacaaagtgcagcgagcaatgtattcttctacagagtgtcgctcatcttttgtacaccttggttagaagagatgggagaatgattggtggaccttctgtactcagtacaaagcttcaattctggaattcttctccaccggttttgtttgatcttgttgtggtttaatcgtgatactttgagaaaaagctcatcagctcagaaagacacttcagctcatctgtcctactttatcagattgatgtcaggtcctgca

SEQ ID NO: 18895 - DNA, 409 bp, Oryza sativa
  Clone ID: uC-osflcyp037f01a1
aaattacttaagttcagtgagttgtccacctttatcttcatatgttttagttagctaagctacattgtcagataagattacttgagcatcacgtacggttgtgacatgaaccttatggttcaaggacaaaaaaaactgtctcaacgatgcatcaaagtatcaaacatgtaaaagaccgaaggaatctgccgtcgcaaggaatcatgcaaaagactgaagttcagtgagttgtccaccttatcttcacacctgccctctcctcatcctattcaccacctgccctcccccccccttctctagatcctcatcctcccgaggtttctttggcacaactggttttgctttgatgttgcgaaaactcaaaagtgtcttagcacttatttcttcgatttcagcatcttttagcagc

SEQ ID NO: 18896 - DNA, 412 bp, Oryza sativa
  Clone ID: uC-osflcyp037f02a1
cgaaaaccaagcaaaatctcaagggggccttggctccagttgaacaactgcaaaacattcctggtgaacacattgtggagggaaaatacaagatgcccttggcggcttttgctgccaaatgtttctgttctggcggccggaagagacattggctgggctggaagaggagttttgcattgttcaaaaagaaaaaaaaagcatcaattgatcaatacatgggcgagggcaattgcctggtttcaaatccaaccataagtctcgatgtatagcatttcagtgtgttcaccatttctgcagcactcaaaatgtgtaccggaaagaccttttaacccatcagggactaggggtgtatagaagataaattcttggtcaaaactaacgttaacggatacagaaaatgcattacccttga

SEQ ID NO: 18897 - DNA, 379 bp, Oryza sativa
  Clone ID: uC-osflcyp037f03a1
gacaacaagattaggcattgcatccgcaacgcaaaaggtattcctagtatacaacaaggtgaggccctcagaatttacatgaccatgaggttcccacatgcctggaagggggcaacaaagcaactatcatatatagctggatgcggaagcaagattaaataactttggatcacatgtgcagctacactaaacaaacagccgcgaaaaggttaagcacttaagcttgccgagaggatgatgattcacccagtggaacacaagtaaacgaggaagcccaagctcgagcattgcttgcgcctttcctaagggcccttgtcttattgctcagtctaaagcttgctacaaagccttttcacatcaagtacattcagcgctcgtt

SEQ ID NO: 18898 - DNA, 364 bp, Oryza sativa
  Clone ID: uC-osflcyp037f04a1
attcgcggcaataaaacattgcattgaattctgaacgataaacaccaggaaccggcgtttatttgaggcaagcactgcccaaaatctcgcaaaagtactgaaaccttagacatagtacacattcatggcaaacatggatgccaaatgacaactacagaaaattatcaaattcgaatgcagctgacggcttctcctgctgaagatgcatattttcccctccattacttggatgtgctctcttcatcgacagccaatgggacggcgctggccaggctgcggtattttagagcatagaacatctcaatgtaacggcgagtctcgcgctctttaaggttgcttacgtactttcagaatccatatacac

SEQ ID NO: 18899 - DNA, 489 bp, Oryza sativa
  Clone ID: uC-osflcyp037f06a1
aacatccaaatttaaaccgaacagaaaatagagttttaaacgactgacatagtgcacaaagcgagcagatattaacggtcaatgcaacaactgaaatgaccgtcgacaaaacttaaacgagtactaaaagagctagatatctcaaatgcagatatggaaagcaccacttgaacgaggctcatttcttcttggcggcagccttggtcaccttggcaccggttgggtccttcttctccacgttcttgatgacgccaacagccaccgtttgcctcatgtcccgcacggcaaaacgaccaagaggagggtactcagagaaggtctccacaaccatgggcttggtgggaatcatcttaaccataccagcatcaccgttcttgaggaacttgggctccttctccagctccttaccagatcgtctgtcgatcttggtcaccagctcagcaaacttgacggcaatgtgggaggtgtggcagtccagcactggggcgt

SEQ ID NO: 18900 - DNA, 314 bp, Oryza sativa
  Clone ID: uC-osflcyp037f07a1
aaaagggtaacttaaaaattaggtaaaacgggtatgacccaacaaaggttcgggccgggggtccagcccaattaaaacgggctcgagggtccactaacagcacaaaaaaagttttcacgggggtaatgccaacccaggataacaggccaggagcaattccatcaatcaagggttcctggccccccctgggggggggcaccaggggggggggagactccttctgaatgttggagccggggagggtacggccatttttcaattgtttgccggagaaaaacaggccctgttggtttgggggaaaaccttccttggcc

SEQ ID NO: 18901 - DNA, 527 bp, Oryza sativa
  Clone ID: uC-osflcyp037f08a1
gttattgagacgtaggactgcaacgattcgcctcacttgcatttgcaactcaaaaaattgacaaagattttgtgcgtcttattggtgaaaaacatgagcaggaaccaacatatgcatcgaatatggtcctgctcgctgttgggcggctggcagcagcagcagcagatagtaagaaaacaaacacaacaacgtttctgcaactaaaagattaattctacagtgtcttcaggagtggaagactacagctcagaacttcgtatcttctcactgacagtagaaccaaaagctggaccgcccttccggtagcacacaagaaactcaaccgggtaacccttcaatttgtgaggcacgattccgaggtccgaaaaggtgagagcattatcagacactagggtgtctacagaaaatgcattaatctgatctttgttgaaaattgatggggttggcaacggaaagggcactttgtttagcagcatttcccttggagatgcgatagcccttgcaataagaagaggaacatcgatgta

SEQ ID NO: 18902 - DNA, 538 bp, Oryza sativa
  Clone ID: uC-osflcyp037f09a1
gattaaaatcggattcggtgtaaagttaagggacctcagatgaacttattcctcataactaactatgaattccaagttctatgattcatgatccaaatgggcttcaaatttacaatggaaccaaccaagcatcaaaatacactgtaatgcctgcaaaaactgacagccgaatgacaccagggataaatttatacacaactactccatgagacggaagaagcttttagctgccaggcaagattaagcgccttctttctttgcaacccatgggcttctagaggaagccataatcataatcaatttcagcagcaattggaggcgatgtatggaccctcttggagtacagataagtcattttcaggtaaggacaacaagctatcagctcaaagcttgctgttttagcgtgatgttgagtatgccgataggggtttttggctggtaatgctcatcagtatcaacttcttcgatctcctgaacaatatcttgtccattgataacttgcccaaatacaacaagcttgtcattcaagtcaggaatt

SEQ ID NO: 18903 - DNA, 458 bp, Oryza sativa
  Clone ID: uC-osflcyp037f10a1
gtatatacatgaatgatggattaatatggcaatgaccttatcttgttccaatatcaatttgcagttccgtcgaactggcatctaggagcttaggagcaaacctagctgaattttacatttacattcagaagcaaatttggcagttctgtaaccaactgaacccgtttttttagattttatgtacacgagaaatctattataaaagcagatatacttagtgcgcagggttcgccgccgagctgcgcaatcgtcttcgtcagttaccagctgatcatttgatgatgcaaccacgctggctctggacggtctgatacggttctgaaattgctcaagcgctgctcttcttgccgttgccaaacaagaaagacaagtttggctttgccagggtacgcttcagagcctttactgccagtggactgtccttagccatgaggcaggttccctgctgaacattgccg

SEQ ID NO: 18904 - DNA, 446 bp, Oryza sativa
  Clone ID: uC-osflcyp037f11a1
ggacaacatgcaattcataaaacgtataggattacacgtacgcacagatcgtgtacatactgaagaaaattaagatagaacatgcacacagggagcgtgcaacataaaaggatactagctgatacagagagagagtggagcgctgcatgtctgccgcagctgttattttaattactttgttcatatatgctgtagcaagtacgtgcttaattactagctgatcaactccgattgagctagcatgttaagctcgatcgatcgatccaagcaggattgatttaactgaccttgttgcagtcggtggagaggctgatggggaagccaacgttgacgccgcactttgccgggacgccggcgacggtgccgaggttgagcgaattgatgctgccggcgaggctcttgaggcagcggcaggcctgctggcggtcggcggtggtgcgggcggc

SEQ ID NO: 18905 - DNA, 351 bp, Oryza sativa
  Clone ID: uC-osflcyp037f12a1
accattagttttatctttttagacaccaactaacctgtgctcattggtacacagggccgcgaaaaaaaaacacggccccaccgggggggggacaccacgaccaaaataaacgaccctcgcgccatcccaccaaacaaaaacgctgaccagggaaccaaaccacagtaaaagggccaccgccgaggacaaagagcccaccaaaaaggggccccagcagaaggccagaggccacaccctggacccccaagggagaaaaaaaacggccaccctgaaagcccctaccaccaacggacccacacggccaggaacaaaaggaccccccccggggggggaaccacggggggggggggc

SEQ ID NO: 18906 - DNA, 480 bp, Oryza sativa
  Clone ID: uC-osflcyp037g02a1
cttcaaaagtttaaaccatttctgggtcccaaaatattacagaagaacatagcacgaactcaacacgagcaatacaaaacttttacaaatcgatcttcttgctggcccccctatgcacaaatcttcagaaatcgctgacgccctctctcagcagttgatgccgcactgcctgacgtcagggcccctggccttgatggtgaagggatcaatcctgacccagagcaaggaaaagatggaggcgagcagcacggaccagatgacaacaatggtgggcgtccggttctgcctccccatgagccccttgaggaaggggtagaggtggacgatgacccagaaggcgaagaagagcttcccgaagagcgggccccacgcctcggagccgttgttgatggcgttggagacgccggcgacgacgccgatgatgttgaggatgagcagcgtggtgggcgggatgaggagggtggtccacttgaaggcgta

SEQ ID NO: 18907 - DNA, 336 bp, Oryza sativa
  Clone ID: uC-osflcyp037g03a1
gttgttaatcgggacccatgggggtaaaaaaaatgcttcatgtttccattatgcacacttttttgctttgctagaaaaggaccgggggccagataaaacctttagcagatgattattgggggggaaaacattttttagaagcaactgattatacatttgggcttactgactaaacaagtttttactttttttcacacaacagggtaattgggtaaacctcattgcagttttttttttttcaaaaagcaacaggacaagttcagttcaacaatttcctagcttcagttttaagttgacgccttaagacacaagggtctttgcctcgctcaagggtct

SEQ ID NO: 18908 - DNA, 447 bp, Oryza sativa
  Clone ID: uC-osflcyp037g04a1
gcgatctagaacgccgttctttttttttttttttttttttttttttcaccaaacaaaatttggtgcattccgcttagttcaacgtgagaacaaatgacatgaaagcataagcacatactgattcccaaatcattagggacggcataaatgacagtgtgacaaagattacaagtgaaatctgttacagtcaaagaggaacaaactagcagaacctccggacatttcacccacctcactactacgcacaaactaaagatagaaaggcaaaataaccaaacaaaatgcgtaatatctcccacaaaacagaggactcagcggcaggtagggaaagtattaggttggtttcctcatgttgcggccagccctgatcacttcatccacaagcaataactgtgacgcgatgatgggtccggaattgatgatctggcgtttcacggagtaattgtc

SEQ ID NO: 18909 - DNA, 306 bp, Oryza sativa
  Clone ID: uC-osflcyp037g05a1
ggggagaaagccaggggggattattttaaaaaccccggcccccctggggggggggggcccggggctcctggcgggggaccccctggtggttgggggccccccccagctggctgggggtccctccaactttggccggccccccccccccctggcaacgacgaccacggttttatttaggggtcaaagcaaaaggggggggccgcccacaaaaaagcgggggactaatgcaagcaaaataaggcccccaccaaaggtttgatcggccgtagcagcatccctaccaaaaaaccttatgccgccgggcga

SEQ ID NO: 18910 - DNA, 484 bp, Oryza sativa
  Clone ID: uC-osflcyp037g06a1
ttttttttttatttaaccccttttttttttttttttcttttggggggttttattttatttttttagggggctattttttttggcaacccgctcgggtttcacaaacactaatcccggaaaaacccccccccccggggggggggaacaccccggaggccccggggggggggccaaacaatcccacaggggcccccccccccccacccccaaaaccgggcaaaaggccaaaacgggacccccaaaaggggcggtagaaaacccccccgggggggggccccccccaggggccaccccggggccggccccggccccgggaaaaaacccgaaaaaaaacctcggggggggcgcccgggaaaacaaaaaaacccctggggggaaaacccaaggaaccgggggcgagcgggccccctggacaccccgggggcccccccccccccggggggccaggggggggcccggaccccaaaaaaacgggggggggggg

SEQ ID NO: 18911 - DNA, 402 bp, Oryza sativa
  Clone ID: uC-osflcyp037g08a1
acaaaacaagcttttcacacggaagaaaaaattgtcacgcccaggggcttttggcgcgccctttaggcccaaacattgcaaatattgttaatagattgttaaggctcccgaataaaacacaattccaatagcccgtttgaacatgaacccaagggttatgggggggctttttttacccaacttaatttgggggctgctcaatttagcccatatttttgaattttcatccctcaaattaaattggatcaaaagggaatccagagttagggttgccctccttggagcccccgtttggggggtgcttaagatcaattccagggttttggcatccgggacaatgaccggcgtcattaggttgggggggacagcaaaaatagggttttttttcatcccaactttaac

SEQ ID NO: 18912 - DNA, 364 bp, Oryza sativa
  Clone ID: uC-osflcyp037g10a1
aactagaatcagttaccattaaggaagattaagggaagaataaccttacaaatgtcacagaataaaacaggctacaacatatttaacaatgcaaccgggcatataagaaccctccctattttttatgccaaggaatccatccaattttgcctggcaacattaaaattcccaagaaaaggaggttcccggctgatgcgtctaattgtgacaaggggaattcatcttccgaggattcggggcaagcaacacaggagcgcgacccttcaaccaaagccgaggggatacaattgcctccacactcttatctttaaagttaaggagtccaatatcaagacggaaaccccacagggttctgagggccaag

SEQ ID NO: 18913 - DNA, 493 bp, Oryza sativa
  Clone ID: uC-osflcyp037g11a1
aactagaatcagttacaattaattaagattaaggaaagaataaccttacaaatgtcacagaataaaacaggctacaacatatttaacaatgcaccagggcatataagaacattccctattttttagtacaatgtatcaatactatcttgcctggcaacattaaaattcccaagaaaaggaggttcccggatgttgtgtctaattgtgacaaggggaattcatcttccgaggattcggtacaagcaacacaggagcgcgacacttcaaccaaagccgaggggatacaatttcctccacactcttatctttcaagttaaggagtccaatatcaagacggaaaccccacagggttctgagtgccaagcactcagaatcatctgtaaaatatatatggtttgccttcaacagtgggtatttctttgcacaaagacaataagtttggttattccccataaacaatacatggtcacccaggtcacttatttccactagc

SEQ ID NO: 18914 - DNA, 409 bp, Oryza sativa
  Clone ID: uC-osflcyp037g12a1
ttctttatatttttctcttttatcctttttttttttttttgggtttatattttttactttccttcttttttttccttcatgggccaacccacaaggggaaataaatccaaaattattacgcccccaaaaacatttggaacctctaaactccccaaacaaatccgggttttaaaggtcccccaccaaaaacttcaatcccgaatgaaaaaaaagacctttggcaccccataaaaagaaggcccaaacccccctaattttaattcccacccccccaacagatttgaacggcctgactttaagggcccaaaaacaaaatgggattaatatttttggggaaaaccccctctttaaaggttttttatttctcaacaaaaccccaatttaaaaaggttggggggggccctcggtt

SEQ ID NO: 18915 - DNA, 361 bp, Oryza sativa
  Clone ID: uC-osflcyp037h01a1
acacacgaacagcaagggaacattacattaacacggattagagacaggggaattacaatgtaattgtatctagccatgcccagggccaaagaggccgcacccgttagaaataagacgcaaaacgaatccgactaacaaaatacgagtcaccaaacacactgacaatattctgagtatttttgacagatccaccaataagacgaatacagcaccatcatgtcacagagagaaacatattgttccacaaaataccccctactcagattgttcttataagcaaaagattaaacccactactaacactacgacgcatgcttaatttgtcaaaggagtcgccgaggggaaattaagcccttttacc

SEQ ID NO: 18916 - DNA, 377 bp, Oryza sativa
  Clone ID: uC-osflcyp037h02a1
attcactgactatggattgaatgaatctgagcaaggtatacagggatcagatcagtttgcttgtcccatctaaacaacactacttggcttaatgcttacacatcaaagcagcttttccctgaggggcattgggcctccccagactccataatttgggtggctaaacacttcacttcgtaaatgtttcgatggcaacccaagcaggcttccagtaatggagaggggtcagggaagcacttggggttggaggtcctgccatgctgtgtagtctttgcaaaccatggtgttgtcaggcctttgatgctcctacttacttttgaagcaaccctgcatgctggagcttcatatgtacaggtgagggcatgcggatcggcgct

SEQ ID NO: 18917 - DNA, 422 bp, Oryza sativa
  unsure (1)..(422): unsure at all n locations
  Clone ID: uC-osflcyp037h03a1
ggaaagagaaaccgacaataattatcttttttatttcggggaaaccacaaaaaggggagagattttggtaaattttttgccccacaaaccaaaaacccaatccagacattctacgttttttttaaccctgaaccacgaggcacccgaccacatttatagcagcacaaagcattatcacatcgagccgcatgccgcaaaaagttaaaanctaacaccgaaattcccaaatagcacaaaaaaggaaaaagggggtaaacaacaaaagggcacagcggtttcttttataagcaggcacacgccgccttctcatgtgaccccaagatcgggggcacaaacttaaagcaaataattttgactttaggaggtgatgagaaatttaggccgagatctaaaaggagggggggggggagatgttttttttt

SEQ ID NO: 18918 - DNA, 412 bp, Oryza sativa
  Clone ID: uC-osflcyp037h06a1
aaaaaaggtaaactcttgataataatattattaagacattatagctgatgtcttttgatcacactgcgatcaaattatgcatcataggcagtacaactcccgcgttgggaaaaagtagaggagatatatttctgggtattacttaatacagcattcacatatatcgaaccatccggttcgtacgtagtagaactccacgcgttcacatcgatgatcggggacgatatcctcaggtagtacttatgcaaaagcgttggcgtaaactgacgaactgaacggacggacggtcggatttagggctcccataagtccaagttgccggagacgaactcttaatggccgccgaccagcttgagggtgccgttggcgaacccctccttgacaaacgggttggttttgagggtctccaggg

SEQ ID NO: 18919 - DNA, 297 bp, Oryza sativa
  Clone ID: uC-osflcyp037h08a1
cttcgtttttttatcatcctccgggccgcatgaatccggggggggtatacagggaacagaccctctctgtacctgtccttaaaaccaaaaacgggtgacaggtgttctcaatctccttctccccaaaaaccaaggccatcaagcccttccgtttattttaaagccgaggggggctacacacctccacctattaacccctacgggtgtatcaaccggcggcgtaccagaaagagaaaggccccacgcaaatgcctgtggtccacaaggcggcataggtgaaaaccaaaggcgcaccgt

SEQ ID NO: 18920 - DNA, 535 bp, Oryza sativa
  Clone ID: uC-osflcyp037h09a1
caagtgctcaacaactggagcattcccaatcatagcgtctctgcacatttccattattcataaacacagagtgcttgctgaaaatggcataataacacattaacacacgaggaaatcaactcaggcagaaggattaatgcatagaaggatcaagagatgaagcctctgctcttgaggctttccactgaatccctgatgatcttctccatgggactgaactgcaaacccagcgcgatcagcttcttcgacgcagcctctgctctcaccagcccaggctgcgtttccttgggtaattttggcactttgtactcggggtagagctcggcgactttggaagcgaaatcgctccagtgagcaatggactgcacgcagaggtgcctcccggatgcagatgggttctcgtacagcagaatatgggcaagagcaacgtcttccacatggactggccccatgtaaaaatccgcatactcctctgtgcaaccttcgagtaggcgaacaagcatggccctgctagcattgatcgtcggtgggatta

SEQ ID NO: 18921 - DNA, 407 bp, Oryza sativa
  Clone ID: uC-osflcyp037h10a1
aactagaatcagttacaattaatgaagattaaggaaagaataaccttacaaaagtcacagaaaaaaacaggctacaacaggtttaacaatgcaacagggcattataagaaccacttcctattttttattacaaatgtatcaatactatcttgcctggcaacattaaaattcccaagaaaaggaggttcccggatgttgcgtctaattgggacaaggggaattcatcttccgaggattcggtacaagcaacacaggagcgcgacacttcaaccaaagccgaggggatacaatttcctccacacttctatcttttaagttaaggagtccaatatcaaagacggaaccccacagggtttttgagtgtccaagcccttcagaatcatttgaaaaattatattggtttgcct

SEQ ID NO: 18922 - DNA, 520 bp, Oryza sativa
  Clone ID: uC-osflcyp037h11a1
atcaaacgcgcatattataagtgacgaagcggtctcacataaaacagggcacacaggttacaacaacgagggttgtaagcccattaagccccaaacatcagatcaccacaagccaaatgtcttgaagacacacgcacacggcaacaggataactccacactggcagatcatgggatagcagcagttatcaatcaggccttgacacacagaacatcaagcccccagacgacgacgactcctctagtactcgtcaccatcatcgccatcctcattctcgtcggactcagcgccaacctcctcgtagtccttctccaacgcggtgagatcctcacgggccttagagaactcaccctcctccatgccctcacccacgtaccagtggacgaaggcgcgcttggagtacatgaggtcgaacttgtggtcgatgcgggagaacaccttcacgacgctggtggagttggagatcatgcacacggccctctgcaccttggcgaggtcgccgctggggacgaccctgggc

SEQ ID NO: 18923 - DNA, 318 bp, Oryza sativa
  Clone ID: uC-osflcyp039a02a2
acaaatattggatcgatttatctagcctttaggatcatacaaggacagcaagttgaaatttctatcaactattctttttggttctggaaaaaatctacaaaacttagtagtggaaaaacaaactataattgggctaggggaaccgccaatcccaatttcagacttaacggttggcacaagttctaccttcgcaacccccttgctgacaggatgagttggatgggaagaaccatccatatagatggtcttttgaacacttcctgggacagagctttttatgttcgctgaaaaattatcaccaacagtttcttttacagt

SEQ ID NO: 18924 - DNA, 463 bp, Oryza sativa
  Clone ID: uC-osflcyp039a03a2
aaagaaaccttaatatatcattagcttaaggactagcaaaactgacatttgtttgctaattaacaagtcaagagatagtgacacgtcaatgaagtagacaaaatagaactaagattaacattcataagattccaatcctactcgcctgctcggtaaggcaatagccgcaaaaggtaagcaaacactactagttcattacatcgctaaggctaatttattatctcatcgtcatgtcatatatattttggcagaaggacaaccagcacatgtattagatgggcacaaaatgaagctaacagaagaacctaatcgagcaattcagacattgcgttcttcctgttgaatggatcggtagcagcaagcaaagacgccacagccctattggggaaaatgtcatcagccttcatcctctccttgaatccataaggtggggtctttgcattcagatatgccttaagaagca

SEQ ID NO: 18925 - DNA, 91 bp, Oryza sativa
  Clone ID: uC-osflcyp039a04a2
ttttgttttttatattttattatttttttttttttttattttattttttttttttttttttttttttattttaattttttataattattat

SEQ ID NO: 18926 - DNA, 395 bp, Oryza sativa
  Clone ID: uC-osflcyp039a08a2
aaatatatatagccggagcttccatatattgcattcacatatgcctcacccaacaacatatagccggagcagataccactcttacatcaagtcagagagagatcaggtgaaacaaaaacaaatgcagagaacggacggcaaaatcaaaggacgatgaagaaactgggaacacacgaaacaaggtgggagacatcatcgaatcagagatggacaattaaacaaggctatatatgacgatgacggtttaggtggaacgagactcctcgcaggccgggggctggcacgcgatgaagctgacgagctgcacctgcctgacgttgtcgaagccgatgatacggacggatgcatcagggtacgccttattggacttctcgagctccttgagcacctgggtg

SEQ ID NO: 18927 - DNA, 442 bp, Oryza sativa
  Clone ID: uC-osflcyp039a11a2
acaaactcaatttttttttcactaacgtgcactctcaacattcatcatgcatacaccaaattgaaaaggggacgtgactcttaaaaagatggtaagggagcgtgcaccaacaccattctttgaccagagagtgtcggtagaacttgggcaatacccctcgtgattcatactttcgtgtagttaacttttgcagaaggattgaattcaaatgcgccgtgaaccttagctagacctcttgatgtttattctgggtaccatcaattggagtaaattacatttgcttgcgccaaattgcccatttaaaacaaccttcagataattacacacaaattggattgtaacccttacctagtttgattcaagatttataccgtcccggtattattggctttttcctttgctttaaaagctttttttggcaggatttttgcacaatttttaa

SEQ ID NO: 18928 - DNA, 176 bp, Oryza sativa
  Clone ID: uC-osflcyp039a12a2
tgtgtttgggaaacgaaaaaaattattattgcaaaaacatcatctttttcttcatcatcttagtgaacacaacaccaactcgatcatcatttcgtcgcactaaacccattcttccccaacccaaagacaatcgaaccttgctggccacaaaattcatctcaaccacatattaaccc

SEQ ID NO: 18929 - DNA, 101 bp, Oryza sativa
  Clone ID: uC-osflcyp039b02a2
tttttgtttttttttttttttttttacacatcagacaatccaggcaatttttttctgctgaaaaatctgattactttgaaacgccgaaaaactttttcttt

SEQ ID NO: 18930 - DNA, 357 bp, Oryza sativa
  Clone ID: uC-osflcyp039b03a2
aaacccaaatcatcagggggctcaaaacaaatgaattgggcccagttcaaaacataaagatttatgacctttagcagttctgttagaagctggctggtcccattcaggtaacattgacaaaaattgcaggggctcccatgaaaaaaatgcttttgcagcggaggaagaaaccagaaatttttgggcaggggaaaccccaggggcagaagggccatcatcctcattattggaaaggcttccgcttaaaggctcaaaacattttaaggaaagtaagaaaccggggtcccttagtggacaccatcaaggcccagtttgcgtgactttaggacggaccaccttatgcgacggtagtatgcg

SEQ ID NO: 18931 - DNA, 426 bp, Oryza sativa
  Clone ID: uC-osflcyp039b04a2
agcttaaacattctacaaaatgggcgtattgctagatcatcactctgttacagggaagaacaaatttgttcattttccacaaatactgcagtattgcagaagccgcaagctaatataacagtttaatatgtccatgaaaatgacaaaaatatcacgagagttcctgtaaacaattcattctgcgacttaagctcagtgctgggcttcaaactcctgcttgctgatgaagattgctactggttcaccaggagaaggcggggtcttgtccaacattgaaacatgagcaccagccttagcacgggttgcttcatcagaagctgacaagacctttacatggtcaaggcctacctgccttttgatcaactccaaattctcctcgagaacattcatttcaccaaatggaagctttagatttaaagcatgggg

SEQ ID NO: 18932 - DNA, 406 bp, Oryza sativa
  Clone ID: uC-osflcyp039b06a2
gatagaacttattactgttgtttcaaccatagttttccagtgacatggatgaaaatggatttctaacattacaatgctgaggcacatcaaatacactaggtttacaacatgcaagagcagtatatggtccttttggttcagggatgtaaatctaatctaccatatccaaactgttgcttcaatcaatcaaagtcagtataagcttcctgagcgacgtgggttcgattctggcctgatgggttcaccggtgtagggatcaaacttgtattggttcccctgtgaatggatcaaaccttacttgttggcgagcagtatagttttcagcagattgacctggagctgaattctgggactattgtttgggttgtaccttgaagcagataaggatcctccttccttgaagaaa

SEQ ID NO: 18933 - DNA, 260 bp, Oryza sativa
  Clone ID: uC-osflcyp039b07a2
aaaaggaaaaaggggataaaaaatttgaaaaaaaaaaggggatttaaaaaaaaaattttgggggggaaaaaaaaaaccccccccggggggtcaaaaaaaacccggggcaaaaaaaagggggggccccaaaaacaaggggtaaaaaaaagggccttttatggggagaggaggggttttgaccagggaaaaaaataccttccggggggttttcccccccaaaaatgggaggggggggaaaaattatccgcacaaaagggggg

SEQ ID NO: 18934 - DNA, 460 bp, Oryza sativa
  Clone ID: uC-osflcyp039b08a2
gaacggcacaatatttatggatcgcctttccctttctttctggatcacgagcacacacatgcacgcattgattgaatcatcacggccatggtgaagattgttaattaggtaatcaggtcttaggtactaactatgtttaatttcatatccattacaggtagtgtaagccatggacaagcttggtgatctgtcattctgtccatggcaaggctgggctcgctgtcacatggcggtggatcacttggtgaggacgttgaagtagacggtgtagaactcgtcctggaggctctgcaatggctccaggaggaagttcctgtcggtgcccgtcgccgagaagctcagcgggtggtagagacggagaggtgccgcctgggtgaagcttgcggcgcggcggaacgccgtgtcgtcgtcgtctttccccccggcggcggcggtgggtttccggcagctgacctgagcc

SEQ ID NO: 18935 - DNA, 443 bp, Oryza sativa
  Clone ID: uC-osflcyp039b09a2
aataacaagttaaatttgccattttgataaaccaatacgattaaatgtggcccgtacagaagcgtatcggtatttggtaacatcaatcaaccttttttgctttcacgtttcgacatgatataaaacttctgtaaggagcgaaattgttacaaagaagcatcaataggaaaaaaaaaagaacagatggaaactaggtatccaaaagttagaccagcttcattgaagctatctgggtagcaacctccatagcttcctttagttgagaggcctcagttccctggccctgggcaattccattcttgccaccacctccctttcctttgaggggcgcaatcgatggtgtcaaccaatccaacacctttaagctgttagcagcgctgggaggcacaccagcataaatgactgccttattcggggcttcatccgggctggatagcatgatt

SEQ ID NO: 18936 - DNA, 440 bp, Oryza sativa
  Clone ID: uC-osflcyp039b10a2
aattaaagctgagttcacatgtacttgtactcacatcccaacccacatatacagaagtagaacacactgataaattcagttattgactaccaaagagaagggggtaaataagcacgtggataaatcccactgcaaggtacaatagacttaaaaatgccactgaaagtctcattggaagtcgatggcattttcataactaccatcagaccaccaattacagtggcattttactgatttacctagataaatactgacgtggtcagatcggcgaacaagtaaaatggtacaacatgaattaggcttggaaaaaaccctttcattatgaaataaaacaacacccaaatgcttgattgcttgaaagataattcaccaggggttctggtcctcaggaactggaggagactcctttatgacactccatggcttggctggctgatgct

SEQ ID NO: 18937 - DNA, 356 bp, Oryza sativa
  Clone ID: uC-osflcyp039b11a2
gatcataaggcaaagctgcgagcgccagatcatcttattactacagcttcttggcgatatgctacagtagcttcttcctcccttgcaaaaagaaacccaaaccttatttacaacgcaacacacacaccggacacagagcgctcgatcgatcgaagcagacgagacgacgatggcgaactactactaggtaagcgacaacacctaggctatacagggatacagcgcgcggcggcgacgggcggcgagacggcggcaatgatcaggcgctggccttgttggccttcttggagatggcggagcggatggatttgggcggctgcattggcttcgcgggggcgggcttccttgcccttttg

SEQ ID NO: 18938 - DNA, 77 bp, Oryza sativa
  Clone ID: uC-osflcyp039b12a2
ttggggtttttttttttttgatggaacttaattactggttgtttaaaccatagtttttccagttacattggaatgaa

SEQ ID NO: 18939 - DNA, 314 bp, Oryza sativa
  Clone ID: uC-osflcyp039c02a2
ggaatgaagtgccatccaagaagaaaggcagcaaaatgctggccaggaaggcaacgggggataaactgggaaggattttgggggtggctgcacaaaacaggattacgtaacaataccctttgcccaagacaagtcaatactacaacatctgtggcgagtaccgaggtccaaaagtcaggccccggaagcctttcgattaaaaaccaaactgaaacacgcacgattttttaacaccccacgaaaaacaatttgatacctagctcctttggggggggaacctaaagagctttatttttccaaaacatccacaccat

SEQ ID NO: 18940 - DNA, 388 bp, Oryza sativa
  Clone ID: uC-osflcyp039c03a2
gcatataacccaaagaacattgtatataaataaccataaagactgtaaaactactggttcaaaatagcattacatatagcaaaggtacatccaaatcattcggtataaaccgcaagatggaacaacggcccatatgtcttcttaacttacgctcaaatcaaaagtttatatataatctcaagaccagctccaaacttaaagcgaccagacaggtagccaaacacggtaacaaggtattctagttcttggggccaatatccttcagagcgcagatctgctcctcacccatggcagacatcacggtaacaatcagatccttcccctcggcgaatccatccttgatctgagtaagcagagcctcattactagggagccttaggcatcctta

SEQ ID NO: 18941 - DNA, 458 bp, Oryza sativa
  Clone ID: uC-osflcyp039c04a2
ctagcagtataaaatagctctgggtgaggagttcaacttaaaagtcggtagggtatttgtcgggtttaaaccacagggagaaatcaattcctttcttcttaagatcttctgtggcagggccaatccgatccaaaagctgatcatgtacaacaccattggaaacagggacagaacgatcaaagacggtaaactccccaccatccatgcgtgacaccatcccaccagcttcttcaactatcagaacaccagcagccatatcccaaggcttaagtcggtattcccaataggcttttgtaatgcctagggcaacttgggacatgtcagcagcagcagaacctagtcttcgtactcccctgctaatgtctgtgtattccttgaacaaatttatgttggtcacccatgcatcatcatgttcataaccaaaaccagtttccagaagtgattgttccaccttgtct

SEQ ID NO: 18942 - DNA, 371 bp, Oryza sativa
  Clone ID: uC-osflcyp039c05a2
tttttttttaaaaggcatttgaggaatctgaagccaaattatttttttgtgcatcctaccctaactactactactaataaacaaagaaaaagggaagctcaatgagagagatttaactcttatatccctagataagctgctatattcgcgtatgcatatacatagtgataaaactgtcagatgtctctattcaatacatgactaaactgtggtataaaaaaacttttatttacgcagataaaaccaggctcccatcctttcggaggatactactacgtgtctacctggctagcacctatgtccctggtacaacaaccgtcggtcatactgaaccttttgatgagccagttttccttaaggaggtaacaggc

SEQ ID NO: 18943 - DNA, 371 bp, Oryza sativa
  Clone ID: uC-osflcyp039c06a2
tttttttttaaaaggcatttgatgaatctgaagccaaattatttttttgttcatcctagcctaactactactactaataaacaaagaaaaagggaagctcaatagtgagatttaactctcatctccctagataagctgttatatttgtttatgtatatacatagtaataaaactgtaagatgttgtctatttaataaatgactaaactgtggtataaaaaaacttttatttacacagataaaaccaggttcccatccttggggcggatactactacctgtctacctggctagcacctctgtccctgttacaacaaccgccggtcatactgaacctttgcatgagccaggtttccttatggaggtaacaggc

SEQ ID NO: 18944 - DNA, 350 bp, Oryza sativa
  Clone ID: uC-osflcyp039c07a2
atgacacggaaggatcacatatagagtttaattttattacaagccacgacagaattaacaaattgagctaagcaacaccagctttattcaaggcacttatactgcttaccacctcctaacataggatggtgaggagtgctgctgataaacgctccacccggagtagatggacaccaagacgatcttatttgcgagctgtatagctttctggaacatatatctcccctccagcttcaccatgttgctccccactgactgttttccttgcagctgaaaactcagcactcatagcattcattccttgtatcaccgcttcctccactgtcccgtaaccatgttcatcagcatat

SEQ ID NO: 18945 - DNA, 390 bp, Oryza sativa
  Clone ID: uC-osflcyp039c08a2
ctattaacaatgttttattaaaacaatcatgtctcaacaaagcgtcagtctaatctcacagtgttgtgcacaataggttgaatagcttgcgctcttgttcgttactgtgcggcactgttcacttgcaagaaagccaacctattgaaaatacactaaaagttgaagaatgaaactgagttactacaattattcccgcaattcatgtgtaacacctacatagatgctgagttactacaattattcccgcaattcccacgaatcagagtcctcccaccccagaagttcagtcagagccagcatccaccggagcagagaagtagggcaagatggggtggccgtactgcattccatcctcagttgccaggttctccagcttgccggtgttgaggt

SEQ ID NO: 18946 - DNA, 436 bp, Oryza sativa
  Clone ID: uC-osflcyp039c10a2
aaccaaaacataggaggtttcatttcttcttctcaaagtagtgtagcatctttccttctttcaccattacataagcttaagcaataacagataacaaatcctcctcctcctctaggtaaaatattcaaacacaatacccttataagtacttattattaggaaagtagcgtgcatgggcataaatggcagcggggggcaggttaagaatcacaatgctgagcagcgaggaaacaaaacaccataatgggacagagcaaaagcctccgaaagggagcttttaggcagaaggcttctcccacttgaggggcttcaccacctcccaggggaagtctgggtcgtcccttccgaagtgaccgtaagccgccgtcttgaggtagcgtccgttgccgccttttttgaggccaaggttgatgatgatcatgccaggcctgaagtc

SEQ ID NO: 18947 - DNA, 456 bp, Oryza sativa
  Clone ID: uC-osflcyp039c11a2
gggatatcaacaagaatttcacaaccgacattctttatgttgcaatttacagcgattatgatttcataacaaccttgcatatatattacacaaggtaaaaaaatgtaaaggttcatccgcaagcacaagtcttatgtcccgcgatctggatgcaaatgcttcagcgaacttcctgaagcacacagacctaccaaagatcatgaagcatcgctggatctcaggtggctccgaacaaacggcgtttctctctggacctgtcttcacagtgtatccaattcttcaacgaacatggagtgggctcattgagagccagatcctgacgcacaagtcgtggaagaagtttcatttacaacagcagcatggttgggggataccgtcctttgattatttgcgtctgaaggggagcaagcactagctgcaggaacagcagatggtcccgtttcgtcctttgtttta

SEQ ID NO: 18948 - DNA, 138 bp, Oryza sativa
  Clone ID: uC-osflcyp039c12a2
atcttaaacattctacaaaatgggagttttgtaagatcattcctctgttacagggaagaacaaattttgttcattttacacaaatactgtagttatttgcatgaagcacgcaagccttatattaacagttttaatatg

SEQ ID NO: 18949 - DNA, 371 bp, Oryza sativa
  Clone ID: uC-osflcyp039d03a2
gatagaaggatctgtattagtgtgtgtacgcacggtccccaattcaatacatatagaattgttttttgaacgaaagtacgtatagaattcatccataggagtaggcatgcatatgctgatatgccaggtttacagatagatcacttgacaattaccgtgcatatgccatctatacaatagttaatttgcagcaatgagacgtcgccctggctgtatttactctgtaaattctttgatctcaaattaatcatatgtataatttaggtatgacgtgtgatcagttgttcttgtcgtcgaccgccgactacgacccgttggcgccggggggacacggcggttttgggaatggtataggccaccagggctgtggc

SEQ ID NO: 18950 - DNA, 365 bp, Oryza sativa
  Clone ID: uC-osflcyp039d07a2
aacaaacaaaacttattgttatagacttgtatagcaaaacaagagttcacagggtagtagtagtacagcagtagtagtagtacacaacataggctcttataacaggctcaggtctgcacaacaacttttgatagcttacaagcttcatcaactttgccgcagattggtttcactcacttgttacttacttagtagaacagttcactatcactgttttctgcttgctaatccttcttggtaggttgtacctccagattgggcaactttaagaactcaaacgaaacgcacagttattcgcaagtgtaagggcagagccattttatttgcagcagagaacatcatgctgcttgtaaggacctccagga

SEQ ID NO: 18951 - DNA, 258 bp, Oryza sativa
  Clone ID: uC-osflcyp039d08a2
ggggaggaaaaaaaaagcatttttgaaaataaaaagaagttcagggataaacggcacaaggggggtaaaaaacaaaggccgcaaataaaatgtgaaaaaaggacagacggggagtctatgggggataaaaaaaaatatttagaaggggctttaaaaaaagaaggctttttataggacggggggacggggcgggatttaaacctttgggaaaaaaaaaagttaccctgttattagagaccctggggggggggttttaaa

SEQ ID NO: 18952 - DNA, 408 bp, Oryza sativa
  Clone ID: uC-osflcyp039d09a2
aacacacaagatacacagcattgctttgcatatcactgcttgtctttgaaaacggcacgagtattggagcgtacactaacgagaaaattcccagcatacaggaatgcggtttattcagtttcataacagtgggtatcgaaatcagatatgctcataacagataaccaaatttcagcctaagcgctttgagctccgtgagatttccagagtttggtccattcctccattgcatcagcagctttagcgaagattgcattctgcggtcccagtttctccttgacaatgctggttagttccttaacacaggcttcaacagtaactgaagtactcgatagcttcagagattcgaagaagggaagaacgacgtccatgactttcaccccttcccattcttcaagctctcgagag

SEQ ID NO: 18953 - DNA, 450 bp, Oryza sativa
  Clone ID: uC-osflcyp039d10a2
agcacaacaatttcatcattatctttctccagccatcacaaagcaaattaatatcgttccaaacatttaaggagctcatgaatccaataatccggaggtttttttaaaaggactcatctcaacatccataacaagcaaacgatagttgtttccgacaccaacattagaccataacgagtcaactgacaaccatagactagaccaaaaataccgcggactgcatagataaaacatcagtgtcgagcagaaggaaccgctcagcacttgacctccttcagcccatgagagaagtaaaggaaggttgggtcggtggctccgtccttgtagtaggcaaacaccaagccgccatcatcatgcatgctctcaccaacaaagaactgaaggtccttgagctttccaagcaagtacttggtggcaccctcaatgttcttcttgaattcctcttgcttt

SEQ ID NO: 18954 - DNA, 380 bp, Oryza sativa
  Clone ID: uC-osflcyp039d11a2
aaagctgcaagccaatgcatgttttgattaacggcaagaacatgcccattatcccaggaaggggaggaaaaatttacggggctttaaagaccaaagaaaaggaaaattctggctgatctactgaacaaaactcgggggccccgggtccttcccttcctgaacccacccggggccccgcgccggggccgacactacggggggcggcctccggggggatgagcagtttgaacctgccgtccttcttgcacgggtggaaaaactcctgggacgggagccgtatttcccgaaaaacgagccggccggcctcccggggcccccggagggttaaacacgggcgcccgcccttgccgataaaccgaattgggggggggaaacccccc

SEQ ID NO: 18955 - DNA, 421 bp, Oryza sativa
  Clone ID: uC-osflcyp039d12a2
gtagcagcaaaaaattcatgagtagcagtctagctagcaaaagagagaaactgtacagacaatgaactgcgctactgaaaaatagacagcaacatataaataaatcaagcggtcaaaccataatagaagcaaacaaatggcctgtatgaaaatctgacggcctcacaatttcatatccctaaactataccggcaagattatgtcctgaatgaattaatgtttcaaatggcaaaacgaaggagacacttagtaacacatgaatacagatgaggtctatgaatgcaataacatcctgtgtcctactgcatagtatcaaccacctagggtatctacatgtttgtcaagtcctttcgatctacgctgatgaacaacaagcagacttttttaatgaagagacatcatctttgccaccaacattgat

SEQ ID NO: 18956 - DNA, 53 bp, Oryza sativa
  Clone ID: uC-osflcyp039e02a2
gacactattaagagacacgccgacgcatgcaccgcgtacagtaaagctttgga

SEQ ID NO: 18957 - DNA, 255 bp, Oryza sativa
  Clone ID: uC-osflcyp039e03a2
tttttgttacgaccaagatccaaattcatattagatagatagtacacataaaacagaatcttaattacaatgctgataacaaaagacatttctctcctccagagaggttactattaacatttttccaatgattttaaacattaatcacactaacattctattctctccctgtgctctcaccacattattgggtggctcccgttacccactaacgccttgttccagaatgacctttcatgctgcagctttaaaacg

SEQ ID NO: 18958 - DNA, 336 bp, Oryza sativa
  Clone ID: uC-osflcyp039e05a2
gagcaaaatagcaacgttataatatttcagtaaaccaatatcaacgcaaactgggaattgtcagtatgaggcatcagatgatcacaaagcaaaagaaaaggataccaggatacgatacgagaacctagagagaccgcagcatggacctaccagaacttttcaaaaacaggcttcatatggataagattcatcttaagttctgaactacgactacaccatactggcagatcttacagaacatggaaggcgacttggatcacataaacaagtttggcctttgaagctttgaagggtgtctttagcttcctggtagggggcctgaccttcctgtacacc

SEQ ID NO: 18959 - DNA, 288 bp, Oryza sativa
  Clone ID: uC-osflcyp039e06a2
gagcaaaatagcaacgttataatatttcagtaaaccaatatcaacgcaaactgggaattgtcagtatgaggcatcagatgatcacaaagcaaaagaaaaggataccaggatacgatacgagaacctagagagaccgcaacatggacctaccagaacttttcaaaaacaggcttcatatggataagattcatcttaagttctgaactacgactacaccatactggcagatcttacagaacatggaaggggcgacttggatcacataaccagtttggccttgaagctttg

SEQ ID NO: 18960 - DNA, 378 bp, Oryza sativa
  Clone ID: uC-osflcyp039e08a2
gatgccaagagcattccccaactatcaacaatgttcagtctacaaggacaggaatacatataagctgttcattgtactatcatctccagcatcatctaagatcagttacactgataggatattacgatcacataacgccaatttcttttacactctagtagttgtagctattactgctacgaaaattcttcagcgtcttatgtaacgccaaagcacaattcactcaacgggtttgcccttttagagattagtccagctgatgaggcgtgcagagattcagacaatgatggcatgtaacagccatggccttcctgtaggagtttagctgttgctggggttcaagattttaccaagattcaactgcaagctgttcctcat

SEQ ID NO: 18961 - DNA, 394 bp, Oryza sativa
  Clone ID: uC-osflcyp039e10a2
ggggcaaaaaacatttccaatttacaggaattcagtaaacaacagatcacaaatcttacaaaacagggcgaaacacatgaaaaaaatagtctagtttttggggatgttcttgcccaccatcttggcaggagccattccgaggaggttcccgggcttccctggaacggggcccttgatcatgacaactttcagggcgttgtcgatcttgaccatcttgagcttcctgatcttgggcttggttcctcccaatcctcccgggcatttttttccccttggacaccccacccggggttgttccggcaccccatgatccccaagttttgggggttttggggcccggggttataaaccccgcttgaagttgtgccttttgaaccccctggacccccttgcc

SEQ ID NO: 18962 - DNA, 360 bp, Oryza sativa
  Clone ID: uC-osflcyp039e11a2
ttttgtttttttagcacaccaaatgttaaattagatatccatcaccgttgctttgccgcacccacaccatcatcgatcagattaaacaaaacaaaaaaaaaaaaaagaagccgagaaaaagaaacggaaacaaaccatgcagcagcagttcaatcgatcagtcttatcaaagaagctcttctagaagaaaaaaaatcactcctaatgacggcaacggggaggacgagtccaagaatgttccagtaggctatgtccattccatcagggggttttgttttgtttgttagaccagcgcgatgctgtttttgccgtcggggggcttgcggatcccaccaaggtaggcccgcgacggccctttgc

SEQ ID NO: 18963 - DNA, 328 bp, Oryza sativa
  Clone ID: uC-osflcyp039e12a2
cttgaagaaataacgaaattttcattgtccaaacagaacttgctctaattcgatcatcacgtacgtttgcgtataaggggggcagatttttggatcacaattctatcgtcgtatcgagaaacccatgtataaacctattagtgatgtcatggctcatcacaacggggggccgtaaaatacaaggttaacatacaaagggaaaccaaaatttgtttatgcaatctagaagaatcactctacttagggatgtcctagcatcattaagggccacaaaatgcaacgttaacttaagggaccggttcttttttttcgggattactttgggccc

SEQ ID NO: 18964 - DNA, 71 bp, Oryza sativa
  Clone ID: uC-osflcyp039f02a2
atttttggttttttttttttttccttttttttttttctcatggtttgttaagttcttttagaaaaatatca

SEQ ID NO: 18965 - DNA, 316 bp, Oryza sativa
  Clone ID: uC-osflcyp039f03a2
cggtgcctcgtcctcgctctcatcaagcttgagtccctccttggtggcagagacgagcttcttgccctcaaactccttgagctggccaacagcatactcggcgatggcatcaaccatgtagaggacctcgtaacccttcttcttcagcttctccaagaagggggagttctccacggccttttttgctctcgccggtgatgtagtatatgttcggtctggccttccttcattcctcgtcacgtaattccttgaggctggtcagctcatcgccgctcttggtggagtggtaccttaggagctcggcaatcttgattct

SEQ ID NO: 18966 - DNA, 327 bp, Oryza sativa
  Clone ID: uC-osflcyp039f07a2
aagtcacaaggttgtaagtaacattagatgaatgaagatgtacatttttcatgtttttggacagatatgcttagattctgccttttacggatacatccatgctattttgcaagccatgtaactgatttataattaatgcagcctctccgggggttccatgacgatcatcgcattactcgttatcatcatcagccaggtcgaactgcttgagcagcgcgccgcaaatgggcagtgggatgtccttgaagtagccgagtgggttggctaagcgcaggttgtcacagatgccgacattcctggtgagcaaaacacgggcacgatcccttt

SEQ ID NO: 18967 - DNA, 167 bp, Oryza sativa
  Clone ID: uC-osflcyp039f08a2
acgcaagggcttgttgatacaatataaacatggagggtaccttgccggttccatatgtacaaaaataaaaacaccgaaaccccatatggccattatgccgatcctagcctcatcttggctaggacattttccaagagcattatttggtcaaacgggtataatctttt

SEQ ID NO: 18968 - DNA, 389 bp, Oryza sativa
  Clone ID: uC-osflcyp039f09a2
tttttttttttttttttttttttttttttttttttttttttttttttttttttttttttttttttttttttttttttttttttttttttttttaaaaaaaaaggggaaaaattcctttatttttgctccccccaaggaaaaaattctttttttaacaggggggggggggttaaaaggggtgggtataaaaaggcttacggttttttgggataagggggggggacccattttaataaaaaaaaagtttgaaaaagggaaaaaaattttttttcccgtcaaacccaaaagggacccttaatatcaataaaataattttatacaaagagggggcccacaaattacctccttggggagtggaccaaaaaccccaagaggcccccctggttttt

SEQ ID NO: 18969 - DNA, 122 bp, Oryza sativa
  Clone ID: uC-osflcyp039f10a2
tttttttttttttttttttttttttttttttttttttttttttttttttttttttttttttttttttttttttttttttttttttttttttttattaaaattatataatataataattttat

SEQ ID NO: 18970 - DNA, 389 bp, Oryza sativa
  Clone ID: uC-osflcyp039f11a2
aacaagaactcaatgatcctatgcttcatggatctgcattataaaggacacatgctttcgaagttccgagtacttttgtgcagcacaataaatgtcactgcggttccttattaggggtaaaaggagaaaaagaagacaaaaaaacatcgctcatcagaagatgtcacccctgcttgtaatcacgtcctggctacagaacgggcatatagaaaccagaatccaaaaatttaacttgtacagaacttaacaatgaagagatcttatgaagccgactccttggcgatcttctcagctttagcaatgacttcctcaatgcctcccaccatgtagaatgactgctcgggaaggtcatcatatttcccatccaaaacaccctggaaactgttgac

SEQ ID NO: 18971 - DNA, 181 bp, Oryza sativa
  Clone ID: uC-osflcyp039f12a2
tttgttttttagcacatttcaatttcagttgcatttctaatagcatagagcaggaccaaagcttgcaaccgatgagttttatcagaaacaagaggcacatttcatagagtaagggcgcatcaaagattcaagagctagcgtattcacatggagtgcacaccacccaatactcctccccctt

SEQ ID NO: 18972 - DNA, 74 bp, Oryza sativa
  Clone ID: uC-osflcyp039g03a2
tttgttttttttttttatattttactttttttttcaattattcatttttttttttttaaccgaacagaaacact

SEQ ID NO: 18973 - DNA, 376 bp, Oryza sativa
  Clone ID: uC-osflcyp039g07a2
atcgacacaagtaactttctgatgagcaatattttctggtctgtacgtagctgtaaataaagccacctcctaataacttaaaacacaattggtggcagtggcactttgtattctgaaaaaacacaactggcagtatttctgtctctacaatcccctgctttcttagcagttgatgccacatgtttgggtatctgggccggtgacacgggtggtgaatggatcgatgcgaacccacagcaatgagaagatcgaagccagaaggattgcccaaacaacaacgatggtcggagtgcggttttgccgacccataagacccttgaggaaggggtacaagtggacaatcacccagaaggcaaagaagagcttgccaaagagc

SEQ ID NO: 18974 - DNA, 385 bp, Oryza sativa
  Clone ID: uC-osflcyp039g10a2
ataatataattattaaaataaataaaaaaaaaaaaaataaaaaaaataaaaaaaaaaaaaagaaaaaaaaaaaaaaataaaaaaaaaaaaaaaaaaaaaaaaaaaagaaaaaagaaaaaaaaaaaaaaaaaaaaaaaaaaaaaaaaaaaaaaaaaaaaaaaaagaactataaaaaacaagaaaaaggctaaaaaaaaaaaaatagaaaaaaacagaaaaaaaaaaaaaaaattttaaataaacaaaaaataacaaatatataaaaaaaaaaaaaaataaaaaaatgaaatgaaaaaaataaaaaaaaataaaaaaataaaagataaaaacaaaaaaaaaaaaaaaaaaaaaatataaaaaaaaaaaagaaaattgggggggaaaa

SEQ ID NO: 18975 - DNA, 340 bp, Oryza sativa
  Clone ID: uC-osflcyp039g11a2
gggcccccttaaaacccggtttttccccaaaaaaatggggcatactcgtttaaatttggggggagggaccacaggcctagaatttattatttcggggggccgggggaaaaacaaaacttatgtttatgggggggaaccctttatttccccggcctgggggtttttttaatttaaccgaccccccttaaaaaagttttaaacccacaagggggtttttaaacactgccaacgtttctgtttccccaccaatttttttaaagaaaccataaggggggttttggccggatccggtagccccccccttggttgggaattttttgaaaagcccccaaaaggcccc

SEQ ID NO: 18976 - DNA, 158 bp, Oryza sativa
  Clone ID: uC-osflcyp039h08a2
tgtgggtaattgaacggaacaatatgaacctggtgcagtagtgaatatgtctgacacagcaaaacgtatgatttttacataaggcagcttctatcaagattattctctagataaaatgaaagcaatccttgcaattaaaaaaaaaggtttgagtttgg

SEQ ID NO: 18977 - DNA, 333 bp, Oryza sativa
  Clone ID: uC-osflcyp039h09a2
tttgttttttcaaactcttgggcaacagaacgatcaattagaccaacacatttcccacatgcaccaaacaacatgacaatctaaaacttaaaaagaaaatgaacagtacaacatgcaacaaaaagaatggattgctgttaatttcctgcaggatcctcagaagcagtacgcctccttagcttggagcgagttacacggatacggcttctacattggtctcttctctactgtctcacctggaacaggatcaccctttttgtgggccctttatcggattatcagccttggtaaatggccattttggcagttttttggtttcagggagtggagcac

SEQ ID NO: 18978 - DNA, 423 bp, Oryza sativa
  Clone ID: uC-osflcyp040a05b1
gacttctttacgatgcgcgcggcagttatacatttggatgcttaaatcaaattgtgggggtgggatcagagttcaagctctggagttcgccatcgaattgaacatgcccactaacaccctttctacatgtccgggctgcctgtacatccacggcaccggtggtcagtggagatgatccgagcaaagcaaacctgaagcctctgcgctggacatcctctactacctagctctcgcccaagatgccggctgccacgccatccgatcattggctacctaccaggactgaaaccagagttatacttgagaacgacacaaccttatcgaccagctgatcgagcccgtctaagccactggatatgaacttgtcccgcctaaaggtttatcgaccagctcatccatcatgaagaactgcccgaacatcat

SEQ ID NO: 18979 - DNA, 377 bp, Oryza sativa
  Clone ID: uC-osflcyp040b04b1
cacatactttgcacacaggattgagggagaagaagatagggattgatttaaagagggggagggtgggaggagtagcaaagcaacttagctagctttgccagccatggcgaggagctctccttgccttgccgtcgctgtgctcctccttggagtggtggtggcggcgattggagcctttgctgatgaaggggcggcgagcggttggggactagggcatggcgcccgtttcctcagcaggcgaggccgtgctgcgtatgagaagtcgtcggagccagaggcaaagcctgcgtcgcagcaggagccgaagtctgattcttactcgcaggccaagcctgggccaaaagatgagcccaagccggagccagaggcaatgtctg

SEQ ID NO: 18980 - DNA, 453 bp, Oryza sativa
  Clone ID: uC-osflcyp040c05b1
gttttagttaaagtttggtgagggggcaagcaaccggctggttcgtttcagcaacgggtgggtcggccggaagacgtgggagttcgaccccaacggcggctcgccggaggagcacgccgtggtcgagaggctccgccgcgacttcacccgcaaccgcttcacacagagggagtgcagcgacctcctgatgaggatgcagcttgcaaaagagaaccaagtttacagtaaacatgaagtaagcaatcttaaagacagttcagaagtcacagaagaagttctattaacgtctttaagacgtgttcttgatcaatattcctctttgcaagcaccagatgggtattggcctggcggttacagcgggattttgttcattctgccgctcatgatatttgccttacatgtgactaagtcactaaacgatgtcttatcatctgagcatatacgtgagatatg

SEQ ID NO: 18981 - DNA, 382 bp, Oryza sativa
  Clone ID: uC-osflcyp040c09b1
tttctatccttccaaatgagggacctctccgagtgtgcattgattaaaatcccgggggggttctaaattactcctttctgagcaacgaactttgcaggctatgagctccccaagaaagcaatgatccaaactgagagtgactccacagactctgtacatgagaagagaaccacagtgggttccagaggatgacagatccaaattcacctgggtactctatatggtgtaaagaaaggacaagccatgcaacagaaatctttatgcccttgttgcaaagaattacaaccattttttggcattgccttttggatacatgtaccaaatgttaagagcttttatatccttcacatcctccccaacagaaggaaatttgtccaattcc

SEQ ID NO: 18982 - DNA, 501 bp, Oryza sativa
  Clone ID: uC-osflcyp040d02b1
tcgcccaccgtcggttctactcattccacattggaaacaagcgtgggagtttataacaagcaacgaggttgtcaaatatccatctagaacagatattttaactgttctattgctggctttacatcctagcacatgggtgggcattaaagacgagaggctgaaagctgaattccagagtcttatttcaacagacattcttcatgatgatcttaaacgagagatattgcatctaagacggcaactccattatgtgaggtcctgtaaagaggaggaatatggagatcctgtgccacaatcccattaacaatgatgcaaatcgcgcagttggttaccctggagatgcaaaaaaaaggggttagaggaggaactacatactccgtattacctttgtttcgagtgaggacttctcatttttgagacacctgacctgagacggatccgtgtagacatgttcatgttcatcacctggggtcgtttctctgttagtgacaactgacaact

SEQ ID NO: 18983 - DNA, 483 bp, Oryza sativa
  Clone ID: uC-osflcyp040d06b1
ggaatattgaacggtggaacgcgtacttacccacagggtgggtgcattaaatggcaccaggggatggcgagcgcctcgccaccggtactcacgctggccctgctcgcgtcgtgcggtgcccttctcgccacctccatgctcccggcgcgtgcgacggcgggcagctgcttggacgtcggcgacatggtgatgatggacaggttccgcgcttggcagggagctcacaaccgatcgtacccgagcgcagaagaggcgctgcagcggttcgatgtgtaccgccgcaacgcggagttcatcgacgccgtcaacctgcgcggcgacctcacttaccagctcgccgagaacgagttcgcagacctcaccgaggaggagttcctggccacgtacaccgggtactacgccggcgatggccccgtggacgactccgttatcacgacgggtgccggagacgtcgacgccagcttctcctaccgcgtggacgtt

SEQ ID NO: 18984 - DNA, 492 bp, Oryza sativa
  Clone ID: uC-osflcyp040d09b1
tactcaccacccgcccgcgcgcctacgcctacggcggattaagcagggcgagcgagcggcctccctccctcgctgctgccgcgcgagcgcgccgacgctgctcgatcttggttttcgcctgtccgggggcgggcgagatgatgaagctgcgttggtggcgggtggacgcgtcggaggtcgcggccgtaacggcgatgggcgtgtgggaggccgtcctcgccggcggcggcaggaggttcctcaagaggaaggacagcgacgccggcgagactggtcgtgcgttggaggagttgcggagttcattgtacaatgaaatgcatagctcagaaggggccaagcgacagcagcagcggttctgtggaccaagtgttgcactgacatttaattttgctgttgctgttggtatcatcatggcaaacaaaatggtgatggggagtgttgggtttaagttcccaattgcactatcgctaattcattacgcgggtgcatttg

SEQ ID NO: 18985 - DNA, 456 bp, Oryza sativa
  unsure (1)..(456): unsure at all n locations
  Clone ID: uC-osflcyp040d12b1
tctcttcgcctagggttcgcgtcccggcgccagccggattcttttgacaacaccgggggcgtttataccacancctcagccagggatggcccctccggcgccgcccccgcaggcggggaccgccagagtcggcggctcgccgcctcacaggggcgccatccctcccccggtgccgcaacagcagtacaggccgcccccgcatcagcatcaggcgccgccacctccggagatgtggggccaggctcccccgccgccgcagcccgcgtacggtcagccgccggctggccaggcggggtactacggggcgccgccgcaggcggccccgggcgtccccgcggggcccaacgaggtcaggacgctctggatcggggatctacattactggatggatgagaactacatctccgcctgctctgcgccccaccgcgagctacaatctgggaagctaattcctga

SEQ ID NO: 18986 - DNA, 353 bp, Oryza sativa
  Clone ID: uC-osflcyp040e02b1
cccacccactccggctttccaagaagctgcttccgacacaatgcacagtggatgattatcaattaaaatgcgggcccagtcaacttctcccaccaaggctgcggataaacaacacggtgctctacctccatatctactgcacccctatcagacacaacgttccaaaggtctcagcaccacaattcaccaaaccacgatggacggctgacaaaagccacgatcctatgccaaaggtcagacctgtggctaaagaagaaatgttcaaagttttacgaactggcaagagaaaaaccaaacactggaagaaaatggtcactaacgccacctttgttggacctgggtttacaaggaaa

SEQ ID NO: 18987 - DNA, 362 bp, Oryza sativa
  Clone ID: uC-osflcyp040e05b1
catttatcgaccgcctcgccggagaggagagagaagggaagagcgctagatggaggcggcggcggcggccggcgtgcagctgggcacctcgaagccgcagatcgcgacccaggcggagatgtcggaggcgcgcctcccactgccctaccgcgaccagtgcgcccacctcctcatccccctcaacaagtgccgcgtcgccgagtactacctcccctggaagtgcgagcccgagcgccacgcctacgagaagtgccagtacgagctcgtcatggagcggatgatccagatgcagaagatccgcgaggcgcaggaggccaagtccaagggcgccgccaccattggcgtccccctcatccctttca

SEQ ID NO: 18988 - DNA, 394 bp, Oryza sativa
  unsure (1)..(394): unsure at all n locations
  Clone ID: uC-osflcyp040e12b1
tgcctaatcccaccacaccatcnaanaggagggggaggtttaataaaaggaggggggggtaacagaaatngcgacttctgcggggttcctggcgcggcgggcggcgcaaaacgagagggtgcggctgctctaccgcctcgccctgaaggacaccctcaactgggccgtgcaccggcgcctcttctaccaggacgcgccggatctcaaggagaagttccaggcgaacagagatgtggacaacccggatgtgatcgataggcttatctatgatgcggaagcgcagtacaggaatttccagcgtcccgatccctacattgtcccatgggctcctggtggcagtaaattcacaagaaaccctcctccacctaaagggatcgagattatctacaactat

SEQ ID NO: 18989 - DNA, 335 bp, Oryza sativa
  unsure (1)..(335): unsure at all n locations
  Clone ID: uC-osflcyp040f03b1
gcttcatttcagtttcatctgctcaaatanaggagggtggatttgaaactaccactggggcagatattttgaagtctaaggggaagagtgctgatggatcttggctctggtgcactactgatgactctgtctatgatgctgtcaaatctatgacgcaacacaatgttggagctctggtggttggtaaacctggacaggataaatcaattgctggtattggtactgagagagattacctcaggaaaatcatagtgcagggactatcttccaagtcaactaaagttggagacatcatgactgaagagaaccagctgatcactgtgaagcctgatacc

SEQ ID NO: 18990 - DNA, 494 bp, Oryza sativa
  unsure (1)..(494): unsure at all n locations
  Clone ID: uC-osflcyp040f06b1
gatttcacaaatctactgggagagtctgcgaagaattgcggccgagttaagttcctttggctttactttattcttattatcgtagcagctatgacttctttcaaggtccaccaagacaagtcgtcattcacggggaaatctatactgtatctgaataggcaccaaactgaggaatggaagggttggatgcaggtgctgtttttgatgtaccactacttcaatgctaaagagatatacaatgcaattcgtgtgttcattgctgcatatgtctggatgactggatttggtaacttctcctattattatgtgcggaaggatttcagccttgcacgatttgctcagatgatgtggcgcctcaattttttcgtggcattctgttgtattgtgctaaataatgactacaccctctattatatttgccctatgcacacactntttacccttatggtttatggtgctcttggaatactaaataagtataacgagattggatc

SEQ ID NO: 18991 - DNA, 412 bp, Oryza sativa
  unsure (1)..(412): unsure at all n locations
  Clone ID: uC-osflcyp040f12b1
ttattagccaggaacacaaactangancttctggtgggttcttggataggtaatgggggtattaaactnatnaacggggacaacactggaccaattaatttgggaaacccaggtgaattcaccatgctgggacttggtgagaatgtgaaggagttgatcaacccagagggtaccggcacaatgactgggaacactcctgatgatcctcgtcagagggagccagacattacaaagggaaaggaaggtttggggtgggagcccaagatcgttctgcgtgatgggttggtgctcatggaagatgatttccgggagcgcctccaagtgcccaagaagaaccagggctaagctgctggatcgcatttggccaaagatgtcactggagcatacttaatagttggggttcaccattatt

SEQ ID NO: 18992 - DNA, 472 bp, Oryza sativa
  unsure (1)..(472): unsure at all n locations
  Clone ID: uC-osflcyp040g04b1
ggattcatatccgaagatagcacaagttcttctgggggcggattaaactaatgtggcggtggttaaactaaantgcacagggcgtgataccttctcttctgctgctaacatcgagaaagatgacacagaatctcttagtgaggcagtgactgcagtccgtgtaagaattgagtatggccatctaacagaagcatttatgtaccacaggagctactgctctaaggtaaaagagcaaaggtctgcagatatgtcacatgttgaagatgctaacagttacaaaagctcttggatgtaccatgttgaggtcatgatgaccgagttttgtaatatctgcatcgagaggaactttgttgatagaatgattgatctgccttgggattctgaggaagggaaacatcttcataagtcgctccttgactgggctcgtgaaatgcccatggagccatgtgggagtctacttggtggtttctac

SEQ ID NO: 18993 - DNA, 478 bp, Oryza sativa
  Clone ID: uC-osflcyp040g08b1
tagtgcttgcggaagcgggggtttggtgcgggcgcgcgcgtgtgaggggggagagaaggccaggaggaggcgacgccgtcgcccgagggaggcaaaaatccgatcctcctcctgccctgctcgctcgctcgctcgcctgcgctgcgcgcacttggccccgtcccgtccgttcccgctcgccaggcatagaaagatggtgctctgggtcttcggctatggctccctgatctggaaccccggattcgacttcgatgagaagatcctgggcttcgtcaagggctacaaacgcaccttcaatcttgcttgcattgaccatcggggcacgccggagcatcctgcgaggacctgcacacttgagtccgacgaggaagccatatgctgggggattgcatactgtgtcaaaggggggcttaaaaaggagcaagaagcaatgaagtacttggaaagaagagagtgtgagtatgaccagaagatctct

SEQ ID NO: 18994 - DNA, 497 bp, Oryza sativa
  Clone ID: uC-osflcyp040g09b1
ttcgtttgccctgtggaaaatggacatagacatgctaaccgccgtggtcctccacgtggtctgaaggagatggaaatttctgcaagcacatctgatggaaagccttcaaagagagcctctgccaactatggtgctcatgagaggcaagtgtgggttcaaaaatcaagctcggcgacgtgatcttgtccaatgatgatactcatcaaaacaaatattgcaagttgtggagttctggattttgcagcttgatcctgtgaagtactgttaacaaaatgcccccgatcatatgcttccatgaagtgcaatctcagatttgtcaatcgaaatctcagctttagctgaaaagggagcttatatgatttgattcacagcaatagtgaattaacataacccactttaggtagctcttgattgctttgggtgagacttgatttgggcccaaggttgctattctggagcaatggaaggatttaagttggcatcattaccctcgtgac

SEQ ID NO: 18995 - DNA, 346 bp, Oryza sativa
  unsure (1)..(346): unsure at all n locations
  Clone ID: uC-osflcyp040g12b1
ccctagcactccccaccctcttcctcggcgggctttatataaaagtcggcggtggctacaacaccncctccggtgacaacgacgacatggctaacctcctgaggcgcgcgtcgctgcccctcgccttcaccgccgacgcggcaacagccgccccctgccccgagagctataagcaagggatctgtggctctactttccactgccggtatttctcgtctaaagccaactagaacacaaagtccattggaactgactctcgtgaacagaatctgtcaaagaaagacttggttctacaccaggctcttggtcaaatcacatctgcctttgggaagggcgcactaatgtg

SEQ ID NO: 18996 - DNA, 460 bp, Oryza sativa
  unsure (1)..(460): unsure at all n locations
  Clone ID: uC-osflcyp040h02b1
gcttattacctcttgaccccccaaccacaccngggccggctttgtggaagaggaaggggaggaaatcaaggatgtttttcagccgcttcgatccgtggccggtgttcttccggagggagtggaagcgctgctggcccttcctcaccggcttcgccgtcaccggcgccatcatcaccaagatgaccgccggcttcaccgaggaggacctcaagaactccaagttcgtccaggcgcacaagaagcactgatctgatccgtgcctccatggtgaaggaacagctggtattgcctaagtcttcagtttggcctatttttctgttccaaatgaacctacctgttttttgtttatccatttgggtggacaaccgctccagttgtatctaataagaggcgtttgaatctttggaccaaaaaatttgagcttctggtataaacctgtaatactcttcaagtgcccacc

SEQ ID NO: 18997 - DNA, 486 bp, Oryza sativa
  unsure (1)..(486): unsure at all n locations
  Clone ID: uC-osflcyp040h04b1
acttgttttgcttcctcccctctctaanccaangaagcggatttataagaaacgggggggcgcgcgcaccccgggcgcagccctccgctcgtcggcgtcgctcaagtctaccttcctagggcaatcctccacccgcctcgcccgcgcaccgactacgaggcgtaatgttcgggcggaggccaagggagagtggctccccggcctcccttctcccacctacctcaacggcagcttgccaggcgataacgggttctacccgttgggtctggcggaggacccggagaacctgcggtggttcgtgcaggcggagctggtgaacgggcggtgggcgatgctgggggtggccgggatgctgctgcctgaggtgctgacgaaaatcgggttgatcgacgcgccccantggtacgaccccggcaaggccacctacttcgcgtcctcctcgactctgttcgtcatcgagttcatcctgttccactacgtggagat

SEQ ID NO: 18998 - DNA, 265 bp, Oryza sativa
  unsure (1)..(265): unsure at all n locations
  Clone ID: uC-osflcyp040h06b1
ctctagtttctccctcctcgctcgccacaatctctntcgccngtttgattactcctggcggcgcgcaactaccnctctgctcctcctcntcgccgccgccgccgccgccgccgacgccgccgccgctgtgtgtactactactactgcgaagagccaggcggggaggaccgatcccccctatgatgatgaggagggactggtggggccctcaaccccccccctaccaccgagtttccgacctcctacctgccctcaaaacgacttc

SEQ ID NO: 18999 - DNA, 470 bp, Oryza sativa
  Clone ID: uC-osflcyp040h12b1
attgaagtgatggcaacacaattttgggtggatttgattaaaatgagggggtgtgtactaaaacctttgacagtttaaaagtgtctaacttggattttggaccttgagctggatatggattaccttatgcatgttctagtgtctttttttttttctggcatggccatattgttgtctaacaccatgtttgggtagtctcacatctttgcccttgttgcaattttttttttcttaatattttcatgaatcctgtttaggggcttgtttctatcattgcgctgatgctatttagttggctttctgctctcctaatccaagtaaatggccttcttattatgtttattttcaatgagtacagcgtgaatcctgtttaggggcttgtttctatcattgcactgatgctatttagttttctttctgctctcctaatccaagtaaacaggcttcttattgggtttattttcaatgag

SEQ ID NO: 19000 - DNA, 469 bp, Oryza sativa
  Clone ID: uC-osflcyp041a04b1
gctttcctttgcaaccaacgcccgtccccctcccgtgcccaccttctcctccctcgtgggctctcctcgttcggaccgacggcgacggccgcctaaattatccatacctcccctccgccgtggccaccagccacctccacgaatccaattccaacatctcctcctcctactccgccgccgccggggggatccgcgctgcgccgtggtaagcccatctctctcccggccttcccggctcgacgttcgttgtggggggcgtgttttgcgcccgaggattggtgggttggcggggggatggggattggggcgacggacgagctgctgggcacgttcgtgccgatcgccgtgtactggctctactcggggctgtacctcgcgctggacggcgtggagcggctggacgtgtaccggctgcactccagggaggagggaggccgccagaacgtcgtctccagaggcaccgtcgtca

SEQ ID NO: 19001 - DNA, 531 bp, Oryza sativa
  Clone ID: uC-osflcyp041b04b1
taacgtcacccgcgccgccatccccgagcaccaccaggcccacttttaaaagcgagcggggcggagaacacgaggcgaggcgaagcaaacatggcggcggctgcggtgtacggcgccggcggcgcgatgaagggcgggaagctcggcatggaggaggcgcgggagctgcagctcaaccgcatccgcatcaccctctcctccaagaacgtcaagaacctcgagaaggtttgcgctgatctggtgaagggcgccaaggacaagcagctgcgcgtcaagggccccgtcaggatccccaccaaggtgctccacatcaccacccgcaagtcgccgtgcggtgaaggaacaaacacatgggatcgtttcgagttccgcatccacaagcgggtgatcgatctcatcagctccccagatgttgtgaagcagatcaccctcatcaccatcgagcctggtgtcgaggtccaggtgacgatcgctgatgtgtaatgctgccaaactagcactaccttagacctacctgtcttggttctctgc

SEQ ID NO: 19002 - DNA, 512 bp, Oryza sativa
  Clone ID: uC-osflcyp041b08b1
catctttcggcgcctccctctctctcgctcaccgggggcttcttctagcgatctatccagaacaaggggctcgctaagatcggcatgtcggactctgaggagcaccatttctagtcgcaggccgactctggggcgtccaagacctatccccagcaggccgcaaccatccgcaagaacgggtatattgttatcaataaccgcccctgcaaggtggtggaggtttctacctcgaagactggtcagcacggacatgccaagtgacactttgctgccatagatatattcaatggtaaaaagcttgaggatattgatccttcgtcccacaactgcgatgttccacatgtgaaccgcacagagtaccagctgactgacatatcagaggatggattcccgagccttattactgagcgagggaacactaacgatgatcttagactgccaactgatgacagtgtcctgagccagatcaagactgtatttgtggaacgcaaggatctcattgcgactgtcat

SEQ ID NO: 19003 - DNA, 517 bp, Oryza sativa
  Clone ID: uC-osflcyp041b09b1
gccgttcccagctcgtgctcccctcgccgccgccggggccgccttcaagcctcctgggggatcttcgctgcccttccgccaacatggggaagacacgtggtatgggagctgggcgcaagctcaagacccaccgcaggaaccagagatgggcagacaaggcctacaagaagagccacttgggtaatgagtggaagaaaccctttgctgggtcatctcatgccaagggcatcgttctggagaagattggtattgaggccaagcagcccaactctgccatccgtaagtgtgctcgtgtgcagcttgtgaagaatgggaagaagattgctgcctttgtgcccaatgacggatgcctgaacttcattgaggaaaatgatgaggtgttgattgctggatttggtcgtaagggccatgctgtgggagatattcctggtgtccgattcaaggtcgtcaaggtctctggtgagtctcttcttgctctcttcaaggagaagaaggagacgcccaggtctcagattac

SEQ ID NO: 19004 - DNA, 486 bp, Oryza sativa
  Clone ID: uC-osflcyp041c06b1
gccgttcacgccccgtctacctcgacgacttcgcctggtacattttcgaccgacaagctgagggtccccttcgacgagttcctccaccactccaagctgtgcggattctccgacgactgccttgagttccagcgcaagatcctctagcggtctggcctcagcgaggagacctacgtccccgaggccatgcaccttatcccgccggaaccaaccatggcgaatgcccgcgccgaggcggaatctgtcatgttcggggcgctcgacaagctgttcaagatcaccggcgtcaagcccaaggacgtcggcgtgctcgtcgacaactgcagtctgtacaacccgacgccgaccctcttcgtcatgatcgggaaccagtaccaagctgagggggaccattaagagcttcaccctcggcggaatggggagcaacgccggctgcatcgacgttgaccttgcgcgcgacatgctgcaggtgcaccgcagcaccta

SEQ ID NO: 19005 - DNA, 451 bp, Oryza sativa
  Clone ID: uC-osflcyp041c09b1
ccactttatacctcgacgatatcacgcaccgccgctggatctctttggcgccgtacatcgtcacatgaatccgatcaaacaccttcgtcgccagcgccttctccagccgatgatccgggtacgagcacctcgtcgtcgccgtccagatcacgccggcgccgtagccgtggaggcggcgagcgagttcgtcgtagtgatcggcgccgccctggtcgatgaagaagtcaacgccgtcaacggcggcctcgtggccaaacggacgcgacacgccggcgcggcggccggcgaggaaagcgttccagaggttgtcggcgacatcggcggcggattgggaggtggggagcgagtatccgccgccgtagccgccgatggcgaggaggatcgagacgtttcttgatttctggcagaggatgatgtcggcgccgacggcggtgacgtcatggcccgagat

SEQ ID NO: 19006 - DNA, 371 bp, Oryza sativa
  Clone ID: uC-osflcyp041c12b1
cgggttaactccacttgctgttgttgattctcctgggcctccttatatcatctccggagatactaatccagctcgatcgggtgggaaagagatcacagaaggtacttgggtagctcactccatcaatcgatcgatcggtacagtttagcaacagttaagcttcacctttttgtattagctagtggcagtcgctactacgtccacgtccttttgtgttacggattggttcgcgagcgagataactggtgagtagtagtagctcttccactgacctggacctgtacattcggcgcataatttgccgggaagcttagcgagttgttctaagtcctagtaagttggggggaggccatgggggtgcacaccaagtc

SEQ ID NO: 19007 - DNA, 146 bp, Oryza sativa
  unsure (1)..(146): unsure at all n locations
  Clone ID: uC-osflcyp041d02b1
caacccgaaaaccccgcttccacccccaccacccccattttaacccacaccaccacccaacaaccacacaagtgggccctttaaaaaanacaaatccggcttcccacaccaaaccaaaccacaccccaccaccccacacaccaacc

SEQ ID NO: 19008 - DNA, 372 bp, Oryza sativa
  Clone ID: uC-osflcyp041d03b1
gccgttagaaggaggccgacaagctgcagaccgccggcggctgttccaagttcaccggcggcttcttcttcggcggcatctccggcgtcctctgggcctacttcctcctctacgtgctcgacctcccgtacttcttcaagtagatcttttgtttgtaagtgcatgaccgggtgatgcatgtgtagatcgatcgatgatggaacatgtgtgtgttcatgtggcggctgatttgagtgccttctacttgtataaatgaaatgcatctgcacaagggcacaaacaggctgcctgcatggataaaaaaaaaaaaataaaatgtaaattaaagaaaatgaataatgtccccagcctactaaaacagaactctatgac

SEQ ID NO: 19009 - DNA, 524 bp, Oryza sativa
  Clone ID: uC-osflcyp041d04b1
cacactccggactctccccttctctctgtctcgctgggtcgttcgctcgctttatccgggccgaataaaggcgagaagccgcagcggcggacgaagaagagggcagatagaaatggcggcggagacgttcctcttcacctccgagtccgtgaacgagggtcacccggacaagctgtgcgaccaggtgtcggacgcggtgctcgacgcgtgcctcgcccaggaccccgacagcaaggtggcgtgcgagacgtgcaccaagaccaacatggtgatggtgttcggcgagatcaccaccaaggccaccgtcgactacgagaagatcgtccgcgacacctgccgcggcatcggcttcgtgtccgacgacgtcggcctcgacgccgaccgctgcaaggtgctcgtcaacatcgagcagcagtcgcccgacatcgcgcagggggtgcacggccacttcaccaagcgccccgaggagatcggcgccggcgaccagtgccacatgttcggctaccccaccgacgagacccccg

SEQ ID NO: 19010 - DNA, 408 bp, Oryza sativa
  Clone ID: uC-osflcyp041d09b1
gctctacgctgccaccgaatcaagcttgaggaatgggtgactttagagggacatgcgggtcaagcaaatggcgaggaagctgcccgtggccccgaaggataggttgttcggcaagaggtggatcgacatgagcaccaatcagaggaagctgcatctgtcgcggaggatctggacgcacaccgtgatggatcacgtaagggagagcgccgacctccacccgaagctggtcgagcacctggagaaggggcaggccatacacggagatgttcggcctgatgcttcagtttcaagccactgcaatctttcatatgggtagacgtgtactcccgagactgaattcttgcccagccatggcgatcaactgatgatgatctctcaatggtagattgatgcgtactgtaggagacg

SEQ ID NO: 19011 - DNA, 444 bp, Oryza sativa
  Clone ID: uC-osflcyp041d10b1
ctatggtaagctgaacgcctggaggtcccgacccggatttcccggtccgccccccccgcccggctcgtcggacgctcccctcctctctgtctccctgggtgccttttaaaactatatgcgggtccaacaaaggccagaagccgcatttgcggacgaagaagagggcccatagcactggcggcgcagacattcctgttcacctccgagcccgtgaactagggtcacccatacaagccgtgcgaccagctgtcggacgcggtgctcgacgcgtgccttgtccaggaccccgacagccaggtggcgtgcgagacgtgcaccaagaccaacatggtgatggcgctccgctagagcaccacccaggcccccggctactacgagaagatcgttcgcgacacctgccgcggcatcggcttcctgccgacgacgccggtctcgacccccacc

SEQ ID NO: 19012 - DNA, 476 bp, Oryza sativa
  Clone ID: uC-osflcyp041e05b1
gcgatgttcacgatccggtggtcgggcctcccggaccgggacggtctcgactacgtcggcatctactcgccgccgacctcctccgaccgcgacttcctcggctacctcttcctcaacggctcggccacctggcgcacgggcaccggcgagctcaccctcccgcgcctccccaacctgcgcgcgccctaccagttccgcctcttccgctggcccgcgagggagtactcctaccaccacatcgaccacgacgggaacccgctcccccacggccgccaccgcgtcgccgcctccggtgaggtcgccttcgactccccctcccgccccgaccaggtgcacctctcgttcgccgacggggtcgacgagatgcgggtcatgttcgtctgcggcgacggcgggaggaggctggtgaggtacggcccggccaatgaagagggggagggctgacggaggtggccccggaggtgaggaccgcacag

SEQ ID NO: 19013 - DNA, 289 bp, Oryza sativa
  Clone ID: uC-osflcyp041e07b1
tgtttttgctggtggtattgccgagatggctggtaggagccttttgaatccgtgagagagctgatgcccttgatgctgctggcaacacaactgctgctatcgtgaagggttatgccattggatcagctgctctggtgtcccttgcactttatggtgccttcgtcagcacagctggagtgaaggttgttgatgacctgtctacacaggtctacatcggcctgatcgttggagccatgctcacgtactggttctatgccatgaccatgaagagcgttgtaagtgccgtcct

SEQ ID NO: 19014 - DNA, 472 bp, Oryza sativa
  Clone ID: uC-osflcyp041f04b1
gcctcttctcacattttccccaaataataatagaggagggggatttacacatttgcgggcgcatcatccatggcctctctccgcaccattccggtgatcttcggcatcctcttctatgtccttgccagcactgccactgccaccgacgcaccggactacgtcgtccaaggccgtgtctactgtgacacgtgccgcgccgggttcgagaccaatgtcaccgagtatatcaagggtgccaaggtcaggctggagtgcaagcactttggcaccgacaaggccgagcgtgcgattgacggtgtgactgatgagaccgggacatacaagattgagctcacggacagccatgaggaggacatctgcgaggttgacctcgtccacagcccccttgcaaactgctctgaaatcgaggccgaaagggatcgtgcccgtgttttgctcaccaggaatgtcggcatctgagacaacctgcgct

SEQ ID NO: 19015 - DNA, 464 bp, Oryza sativa
  Clone ID: uC-osflcyp041f08b1
cttgtaggagggtggaccacacctccccccattggggggttttttcaaggaccgggggcgtgattccaccagggtggagagggaagagatggcagctcactatgacgagtaccgcttatccccagggcaaggagccccagaccagccagaagacgtagcgccatgacgaggtcgcgacgttcgagacagatcgttgcctgcaacaccgttatctgacatgcccctcaccacagtcccatgttctcggaagcacagagcggatgaacccatgaaggccgttctattggacataagaatttaacggcaatgcccttaaaagataaccgatctgcagaaagaatgatgatgagaatctcattatctgagcctgaagaagactggtggacataggtcgacatcccagcatatcgaagaaataatgtcctgggaggaaataaggatctatcagcctcaagcatactaag

SEQ ID NO: 19016 - DNA, 500 bp, Oryza sativa
  unsure (1)..(500): unsure at all n locations
  Clone ID: uC-osflcyp041g06b1
gattataaaatgtgacaatgccaatgtagcaggtaaggtctttttgaaagtaatttgtggtatagtaaatttcacaaaaccacatctctacccatactaatactacattcagtggttcaacaacagtggccgcattaaggtaacacaattggtgagattaaattttgcaattggttattactgtgattttgttgattgcgatgtcgtacctatgcatgcttgctccttgctccttgctgttgggtagactttcacaatatgataaaaacacgttgcatcatggtagaacaaaatcaatactcctttgtgcataatagaaaaaaaattgtgttgcatcctatgactcttgaagctgtttttgagaatgatgttgctagagctaagaaagagaaaaatgttgagcatgctaaaagtgaaaatcagattgtagcacaagaacttgtacaacataacangaaagattctaaatctgaacatggtaaggacaatgtgattaaatc

SEQ ID NO: 19017 - DNA, 275 bp, Oryza sativa
  unsure (1)..(275): unsure at all n locations
  Clone ID: uC-osflcyp041g07b1
ggtctccgccgccgaaacccaaaatcttctcttngggggcctatgtaatgccatgtgggtttctcacacacaggcccagtggtgtgcgttaaggcctccgtctgacacccggacacgctctgagactgcccattctcgcagagggtgctgctgactctccaggagaataacgtgccctacgagatgattatgattgacctccataacaagccctactggcttctgaagataaccccaaggaccaacgaacctgggtttaacggtggtgatggcaa

SEQ ID NO: 19018 - DNA, 325 bp, Oryza sativa
  Clone ID: uC-osflcyp041h09b1
gggatatgttaaagacagggttgtcggtgctatgaaggatgatctgaagagcaagctggagctacatatggccatgtagtgttatagtggattagtactgatatcctaaataaaacgggccttcaggctctgaaaggattagtgcctctgtctgtggtggttttcatatgcttctagtatcaagcattgttcttaccgttgtctagttcatggataatgccttgcttgatccaagtttgtgctttgaatattccaacaaaataatataacctgtgttttgcccaaaaaaaaaaacaagaaaagtaaaagcagaaaaaggataaac

SEQ ID NO: 19019 - DNA, 424 bp, Oryza sativa
  Clone ID: uC-osflcyp042a01b1
aagcgaacccgcggaccgcccgaatcccggtcaccaccccgattttaccagagaagagcaaggcggggcttcaagaaggagggatccaaagcgaacaccagaaaggcctaagtctaccccgcaaaaaatacagctcaggcgaaagggaaggcgaagcatgcggcgctaaccgacacgaccccgcaggaccacgggccaagacaacccggaagcacaacaaacacgaacccgtcctcggcgggaaaatcgagaacggcaccagctttctcaagagacacacctaactgagaccgcgggtcccaacggatatagaacaagacaaactgcaacaccaacatgcacaccactagaaatggcgccgaacaatccatatacactgcctgctgggaccatccactccgcagaagggaaaaaccagaaaacc

SEQ ID NO: 19020 - DNA, 381 bp, Oryza sativa
  Clone ID: uC-osflcyp042a02b1
cttgagctcaatcagcaacaacaggggggactttttttagcttaggggggtgcttcaccctcccaagaagaagaagatgacttgctgcggcggcacctgcggctgacgcagcggctgtcagtgcagcggcagctgcggctgatgcaagatgtcccctgatgtggaggccacagccaccaccaagaccttggccctctctgctccatccaacaaggcgagctctggaggaatggacatggcggcgcagagcggagagaacggccgatgcggctgcaacacctgcaagtgtgccaccagctgcagtggcttggcccgctgctcctgcaaccagaatctatcgtcgtcgtcgcccggctgcatgaggatttatcgaatggatgc

SEQ ID NO: 19021 - DNA, 433 bp, Oryza sativa
  Clone ID: uC-osflcyp042a06b1
aatcttcatagctcaagcaaagggagagagcagcagcggcaagaggagcacgcggggagctagctagctccgccgtcgccgacgagctccggcggctcgccgttatccgatcgctgatcgagccgtgtgcgggtgagaaagaaaaagaaaaaaaaaagatcgcgcctttttggcggcttcttggggtgtgaatccacggtttccccggggtaggatcttgatggggctcgaggaaggcggcgcgatgagggcgctgatgcggcggaagcaggtggactccgaccgggtccgcgccgccggcggccaccagctcgccaaggagctctccgttacgcagctcgtcgcgattggtgttggttcaacaattggagctggagtatatgttcttgtgggaacagttgctcgggagcatgctgggccggcattgacactt

SEQ ID NO: 19022 - DNA, 520 bp, Oryza sativa
  Clone ID: uC-osflcyp042a08b1
ttttgtacgagctctgcgcatcccttccattgggttactttccttggctgcgctgcatagggggtttggtggtgcggttgatttccggcaataaattctctagggggaggtatcggtcatggctgccgctgctgcaaggaggggctcatcgctgctctctcgctgcctgctgtccaggccctccgccgccgcctcgcctgctgtcccctctgcgctccgcagggcagatgggacacaagaattgttgctgggaatccttcagaggttcagcactgcagcagtagcagaggagcccatatcacccccagtccaagtgaactacactcagctcctcattgatggcaaattcgttgattcagcatctggcaaaactttcccaactctggaccctcgtaccggggagctgattgcccatgtggctgaaggcgatgcggaggacattaactgtgcggttcatgcggcccgcacggctttcgatgaagggccatggccaaagatgactgcctatgagagatccccg

SEQ ID NO: 19023 - DNA, 566 bp, Oryza sativa
  Clone ID: uC-osflcyp042a09b1
tgtgactacacccgcttcgcttcctcccctctgtaagccggggaagctaagccatggcgtccgtcaccgcccgcaccccggtcgcagccctccgctcgtcggcgtcgctcaagtctaccttcctagggcaatcctccacccgcctcgcccgcgcaccgactacgaggcgtaatgttcgggcggaggccaagggagagtggctccccggcctcccttctcccacctacctcaacggcagcttgccaggcgataacgggttcgacccgttgggtctggcggaggacccggagaacctgcggtggttcgtgcaggcggagctggtgaacgggcggtgggcgatgctgggggtggccgggatgctgctgcctgaggtgctgacgaagatcgggttgatcgacgcgccgcagtggtacgacgccggcaaggccacctacttcgcgtcgtcgtcgacgctgttcgtcatcgagttcatcctgttccactacgtggagatccggcggtggcaggacatcaagaaccctggctgcgtcaaccaggaccccatcttcaagagctacagcctcccg

SEQ ID NO: 19024 - DNA, 475 bp, Oryza sativa
  Clone ID: uC-osflcyp042b02b1
ccctaataataatctgatccctgacacgggagcgtttgctgatgatgaggtgttggatcgatcgatcgccatcgatcgattgactgattggatgattgatcgacatgcactatcagcagcggatgaagcaggctgcggcggcggcgcagcaacagcagatgatgcaccaggcgctgctcatgcaacatcagcaggctgcagctgaggcggcatgcggctcatcaacatcaagcgcccttgttcccccctcaccacccgcacccggaccttctcgcggcgcctcagatagagcccattgttagtggcaacctgcctcctggatatgattcaagtacatgccggagtgtgtatgctggcaatatccatcttcaagtgacggattcactgctacatgaggtcttccaaagtcttggtccagcctaatgatgcaagttcatcaggaaggaaaagtcatccctttgttttgttgactatt

SEQ ID NO: 19025 - DNA, 524 bp, Oryza sativa
  Clone ID: uC-osflcyp042b04b1
tgttaacttctccggacgtcagctctttcagtggccgtaggtcagcaaccgcagaagaattgatgtctacagacacaagggagcaagaaattacatggctggcaaggtcttgtagtagcagtggaagtgatcctaacaagaaaaaatcagaggtaagagggggaggcaaagcgtctgttcaagtcagagacttcacatggcacatcatctcccaagttttagtaactaacaatatggcagaatagtggattgactttgcaaactgaggagtcagcatttgaaaaacttgtttcgaaaccacacgcagcatcaatcgcccaaagtgaacctgggggagaagatcatggctttgcagcagattatgtcacctttcgggaagacagatacagcgtctgtcctgttggaaaccataacctacatcaaatttcttcatggtacagatgccttcaatgtttttatctggatagatgctggtgctgagtccactgctttccttgatggtggatcaattgaggaaagctcct

SEQ ID NO: 19026 - DNA, 244 bp, Oryza sativa
  Clone ID: uC-osflcyp042b08b1
ggcgaagaaggcggcgaggccgacgggggggactatctgacaggccaggtgggtgttccccggcgcggtggacgccggatctacctggacgggttcgttcgtcggcatactactggcatttgaacccagtccggccctcgggacagccggtcggagtaccctgccagttcgaggcaggacatcgctaggactcagaactctggcacaagaaacacacgccggtcgagaatcattcggccacccg

SEQ ID NO: 19027 - DNA, 282 bp, Oryza sativa
  Clone ID: uC-osflcyp042b10b1
ttttcttctatcttcttttccctgtacctagatgagtccatggttttcagtactttgtacatcggagtcctgcagcaaagctttaaacatcttgtttgatattagctgccaacctgggcgtctcctaggttgatgtatgatagagtctctgttcgtgttgctcttgtgaaattctcaataagagcaccacattttcaacagtgctcattctgaataaaaaaaaaaaaaaaaaaaaaaaaaaaagggcaaacaatataaaaaaatccaagataaaaaactcga

SEQ ID NO: 19028 - DNA, 562 bp, Oryza sativa
  Clone ID: uC-osflcyp042c07b1
ttttcaactggccccaacatggtggttgatatggggaagggttgtacagtatctgagtgaaatcaaggattccgttgtggctggtttccagtgggcatcaaaggagggtgctctggctgaggagaacatgcgtggtatctgctttgaggtgtgcgatgttgttctccatgctgatgctattcacagaggtggtggccaggtcattcccacggccaggagggtcatctatgcttctcagctcacagcaaagcccaggcttcttgagcccgtctacctggtggagatccaggcccctgagaatgcccttggtggtatctatggtgttctgaaccagaagagaggacatgtgttcgaggagatgcagaggcctggtacccctctgtacaacatcaaggcttacctccctgtcatcgagtcctttgggttctcaagccagcttagggctgcgacatctggccaggccttcccccagtgtgtgttcgaccattgtgacatgatgacctctgatcctcttgaagctggctcgcaggcttcaaccctggtgcatgatatccgcaagagg

SEQ ID NO: 19029 - DNA, 322 bp, Oryza sativa
  Clone ID: uC-osflcyp042c09b1
tttctaccccaccggccaaaccacgcgcgaagggaggctgtcgacaccacagcgcataccaacactggtggacacaagaaccgtacgcgcgggcgggcaccgcagatgccgacccgggaccgagcacgttagccgacggaaccacagataactgccggcggcctgagaccgtgaaggaccggagctaggaggagctggagagccgtggccgctagctcagttagctcgtcacgccgcaccaagctcggcgacccggccgagccggagccggagcctgagccggaggcggcgagggagagggagagggaggcggccggcgaca

SEQ ID NO: 19030 - DNA, 476 bp, Oryza sativa
  Clone ID: uC-osflcyp042c12b1
tttgttacccaaccagagagcttgcggaagcgggggggtggtttttgacgcgcgcgtgtgatgggggagagaaggccaggaggaggcgacgccgtcgcccgagggaggcaaaaatccgatcctcctcctgccctgctcgctcgctcgctcgcctgcgctgcgcgcacttggccccgtcccgtccgttcccgctcgccaggcatagaaagatggtgctctgggtcttcggctatggctccctgatctggaaccccggattcgacttcgatgagaagatcctgggcttcgtcaagggctacaaacgcaccttcaatcttgcttgcattgaccatcggggcacgccggagcatcctgcgaggacctgcacacttgtgtccgacgaggaagccatatgctgggggattgcatactgtgtcaaaggggggcttaaaaaggagcaagaagcaatgatgtacttggaaagaagagagtgtgag

SEQ ID NO: 19031 - DNA, 338 bp, Oryza sativa
  unsure (1)..(338): unsure at all n locations
  Clone ID: uC-osflcyp042d05b1
gtctcaggtcccaattagatgcaatatttcatcttagtgcaatactggtagctatacagtatatgcaccannaacgcngattggaaactacaactggcttcctaatgtatgataggctccaattctcctaaagggacggagcaacagacacgtgaacatagagaagatcaaccccacacttagggagatctcccaacctagtgcatcatggtgacaccagatgcaactcaagcgagtggaccaaaaactcgctcttctatggcccaatggggtacgatattggggccttcctggggaacttgattttggcatattttcacaagatggacatgctgatc

SEQ ID NO: 19032 - DNA, 562 bp, Oryza sativa
  unsure (1)..(562): unsure at all n locations
  Clone ID: uC-osflcyp042d06b1
cgctcacctctcctcctcctcgcgatttccacccgcgccgccgtctgcgccgatctgtgcattcccgcgaccaccgccgcccgccgcccgccgcatctggccaccacctatgccccccgtcaggtccgcccccgggaggcgggcgccggaattccggcgctcgtcgcggcggcggctgccggagtggatctggtggctcgtcgggatcttcctcgtcctcggcctcatgctcttcgtcctgcaccacaaccagagggagcatttccgcccgcccgtagtcgataagggttcagaatttgaggaaacccatcatgagaaagtaaatttcacagaagagcttttaagcagtacatcatttgcacgccaattgacagatcaaatgactctagcaaaggcttatgttggccttgcaaaagagcatggcaaccttcagcttgcatgggagcttagttcacagataaggaattgtcaaagattgctatctgaagaagctgctagtgggaaggccatcactaaagaagaagcccatncaataataactcgggcttgacgggtaatatac

SEQ ID NO: 19033 - DNA, 492 bp, Oryza sativa
  unsure (1)..(492): unsure at all n locations
  Clone ID: uC-osflcyp042d11b1
gtgcaggctcacagaacaagttgtattctcagggccatacagggtcgccaaatacaatcgctgcacatcacccttccttgataatgatgctgcagcggttcgagaggatgctgagcttaagttggagattgctgaattaaaatcaatgtttattgagagagcacaagcttttcttcatggagatctccacactagttccatcatggtgacaccagattctactcaagtgattgatccagaatttgctttctatggcccaatgggttacgatattggggccttcctggggaacttgattttggcatatttttcacaagatggacatgctgatcaagcaaatgatcgtaaggcttacaagaaatggatcttgaagacaattgaagattcatggaattttttccacangaagtttgtcgaattatggaataaacacaaagatgggaatggggaagcatacctgcccnctatatacaacagctcagagcttttgag

SEQ ID NO: 19034 - DNA, 530 bp, Oryza sativa
  unsure (1)..(530): unsure at all n locations
  Clone ID: uC-osflcyp042e04b1
ctcattctcttactctttcctcctctcctctctgtgtctcaccgacggcagcggcgggctcggcaccggcggcggcggcctcgaccgccgatcgccgacgccccgcgccgcctcctcgctcatcaggatgggctcggcggtgtgtgccggtgccggcgtgctcggtgcgccagacccgcgacgtcgccttcgaggccgaggacgcgctcgacgacttcctccggcggcagtccactttggtcgcggtcgcggcgacgtccccaacctccatgacgtcgtcgcctcggctactccggagcccactgcccctggccggatttggaagccagctacacaacgacgggcgccggcctgccgttcttcgccctcggcctccaccggcttcccttacgacgtcgccgncttgagctcctactcacgccctccccgccggcccttcccgatctgctctacccaagccaccacgacgaccagantcaggaagtctctccatcgctctggtcctgacagtggctggagganccccgccg

SEQ ID NO: 19035 - DNA, 462 bp, Oryza sativa
  Clone ID: uC-osflcyp042f02b1
gtcttgtgtaggccactggcgtcgactcgtacatgaatgggcacgaccactgcctggaacacattagcagcagagacaggcctatccaatacttgacaaggggaggtggttcaaaagcatggctaggagtcttgcaggcaaattctgataagctccagttcttttacgatggacaggggttcatgtccctccagataaaccaggaccaagctgacttcatattttatgatgtttctgggaacatcttgtacaagtggagcatgagcaaagcagactacctgcagccctccacctatatcactgaagcatgaggcagatgcaaaaccacaaaacggagaataagcttggctaacatatttgcatcaaatttgaatgcattattgaggcacgcaggcatgaggaccgaacggatataggaagttttaacatgcatgtgatgactactaaagaactgagacaggc

SEQ ID NO: 19036 - DNA, 366 bp, Oryza sativa
  Clone ID: uC-osflcyp042f03b1
gtttgtttgtccctgtctcccctctccttcctgggggggcttttttatactctctgcggctttatcacaagagagagagcgccagactctccccaggtgaggattcagccatgaagggggccaaatccaagggcgccgccaagcccgacgccaagttggctgtgaagagtaagggcgcggagaagcccgccgccaagggcaggaaggggaaggccggcaaggaccccaacaagcccaagagggctccctccgctttcttcgtttttatggaggagctccgtaaggagttcaaggagaagaaccccaaaaataaatctgtcgctgctgaggaaaagcaaccggtgatagggggaaaatcctgaccga

SEQ ID NO: 19037 - DNA, 484 bp, Oryza sativa
  Clone ID: uC-osflcyp042f05b1
gttcttggcccggtacagccgtgacaaggtcgagagggcgcttctcccgctgctcgcccacgtcgccgggacaggagacgcgtgcaacctgcaggacgtgttcctgaggctgacgtttgacacgacgaccacgctggtgttcggcgtcgaccccggatccgtcgcgatcgacttgccggaggtgcccttcgcgcgcgccatggacgacgccatgaccatgcttctcctccggcacatcgtcccgctgtcgtggtggaggttagcgaggaggctggggatcgggtacgagcggaagatgccggtggcgtggcgaaccatggaccggttcgtcgccgacacgatcgtcaagcggcgggcggagaaggccagaaccgggatcgacgactcggcggacctgctctcctcctacatcaacgacgacgaagaggacgccggcacggtggacgccttccttcgcgacacgaccattaacctcatgctttgc

SEQ ID NO: 19038 - DNA, 517 bp, Oryza sativa
  Clone ID: uC-osflcyp042f06b1
ggcgtgagagatagctgctgcagggggcggccatggggaggggcaagatcgagatcaagcggatcgagaacgcgaccaacaggcaggtgacctactcgaagcgccgcacggggatcatgaagaaggccagggagctcaccgtgctctgcgacgcccaggtcgccatcatcatgttctcctccaccggcaagtaccacgagttctgcagcccttccaccgacatcaaggggatctttgaccgctaccagcaagccatcggcaccagcctttggatcgagcagtatgagaatatgcagcgcacgctgagccatctcaaggacatcaaccgcaacctgcgcaccgagatcaggcaaaggatgggagaagatctggacgggctggagttcgacgagctgcgcggtcttgagcaaaatgtcgatgccgccctcagggaggttcgccacaggaagtatcatgtgatcagcacacagactgaaacctacaagaaaaggtgaagcactcctacgaggcgtacaag

SEQ ID NO: 19039 - DNA, 580 bp, Oryza sativa
  unsure (1)..(580): unsure at all n locations
  Clone ID: uC-osflcyp042f08b1
tttttggaatctggaacattgggtccaaaatgcgatacacttatggtaattcctgaccttactgaaaactatggagcatcccgagaccctcctgagaaacaggcaccaatgtgcacagtccactctttcccacacaatattgaccactgtctgacatgggctcgttcagagtttgagggtttgctagagaaaactccaaatgaagtgaactcttttatttccaatccagctcaatatgctgctgctatgagaaaggcaggtgatgctcaagcaagggaattgctcgagcgtgtttgtgaatgccttgacaaggagcgatgtgatggatttgaagattgcattgcctgngctagactgaaatttgaagactacttcgctaatcgtgtgaagcagctaacattcacatttcctgaagatgcgggcactagcacgggtgcttttttctggtctgcccccaaacggttttctcgcccactgcaattctctactgtgaattcatctcacattcacttcatactggctgcttncatattgagagcagngtcattcgggatcttcatacccgactgggcaaagacac

SEQ ID NO: 19040 - DNA, 565 bp, Oryza sativa
  unsure (1)..(565): unsure at all n locations
  Clone ID: uC-osflcyp042g04b1
gttttcttctcctccccctctttaccttttcctggtgggttctgttccgtggttcgtctagggtttagtgggttgagacggcggcgccccagcagccaccgcctctggctggaaccctgtgggcgaggtccatggccaccttcacccgcacgaagcctcatgtgaatgttggcaccattgggcacgtcgatcatggcaaaaccacactcactgctgcgattaccaaggtgttagctgaggcagggaaggctaaagctgttgcttttgacgagatcgacaaggccccggaggagaaagcaagaggaatcaccattgcaacggctcatgtggagtacgagactgctaaaaggcattatgctcatgtggactgcccagggcatgctgattatgtcaagaatatgatcactggagctgctcaaatggatggtggtattcttgtcgtatcagctcctgatggccccatgccacaaacgaaagagcatattcttctggcccgacaggttggtgtgccatcacttgtatgtttcttaaacaaagctgatgctngtgatgaccccgagctact

SEQ ID NO: 19041 - DNA, 555 bp, Oryza sativa
  unsure (1)..(555): unsure at all n locations
  Clone ID: uC-osflcyp042g12b1
atagcagcagcagcagcaatggccgcgcgggccgttttatacaccgccttggcctccaagccgcgcctggcgcgcgcgccgtcgtccccggccgcgcggttctccgtgtcgtgctccgcgtcgggcaacaacggcggcgccggcgagatggcgcactcgctggcggcgtcggccaagacgttctccgcggcgctggcgctgtcctcggtgctgctctcctcggcggcgacgtcgccgccccccgccgccgccgacatcgccgggctgacgccgtgcaaggagtccaaggcgttcgcgaagcgggagaagcagtccatcaagaagctccagtcgtcgctcaagaagtacgcgccggactccgcgccggcgctcgccatcaacgccaccatcgagaagacgaagcgccgcttcgagaactactgcaagttcggcctgctctgcggcgccgacggcctcccgcacctcatcgtcagcggcgaccagcggcactggggcgagttcatcaccccgggcttgctcttcctctacatncgcggctggatcggctgggtccgc

SEQ ID NO: 19042 - DNA, 327 bp, Oryza sativa
  Clone ID: uC-osflcyp042h01b1
ggaaaacttacaagcagcccatggtctgagcttgatggccttcaacctgagacaaagataatagacgaccaattggtgaagattaaccagaagggcttccttaccattaacagccaacctgctgttaatggagagagatctgattcaacaagtgttggatggggtggtcctggaggctatgtttaccagaaggcctatcttgagttcttctgttcaaaagagaagctggatcagctaattgagaagagcaaggcattcccttttcttacatacattgccgtgaacaaagacggagagtgattctcaaacatttccacaaacgctttg

SEQ ID NO: 19043 - DNA, 430 bp, Oryza sativa
  Clone ID: uC-osflcyp042h03b1
tctgtttcgtggagatcttctccatcctttgttggtggatcatttactactaccacgtgcaaaccaagaaagcaagtgcttcggagccgaccgaatggcccgtgctgggtcatctcttcggcatgttcgccaacatccaccgcttccacgactgggccaccgacatcctcgccggcgggtggcacaacttcgaggctcgcgcggggctcaccggcatacggttcttcatcacctgcgacccgtccaacgtgcgccacatcttcacgtccaacttcgcaaactaccccaagggtgacgagtacgccgagatcttcgacgtccttggcaacggcatcttcaacgccgacggcgagtcgtggcgcagccagagggcgaaggcccagatgctcatggccggcgcacggttccgcgccttcgccgcgcggagcag

SEQ ID NO: 19044 - DNA, 354 bp, Oryza sativa
  unsure (1)..(354): unsure at all n locations
  Clone ID: uC-osflcyp040c02b1
cgcttctcttcttcggcgggcccaaccacccnnaaggggtcttttgatcatagcgggtggctaaaaccccggcgtgtgcctcaccatcgtccggttaatcccgccggggtacacggcgcctgcgatctcgcctccacaacctccgatgcccaccgcccactcccgcgccatcaacttcatcccctaggtccccaagagctagctccagatggactaggagtacctcaactagttcctggcgcgcaacctcgggaacaacgccatcctctacatccagcaggtggtggccaacaacaatgagactgtccccgccatccccagccatctggacaactcccactagctgtacatcgt

SEQ ID NO: 19045 - DNA, 494 bp, Oryza sativa
  unsure (1)..(494): unsure at all n locations
  Clone ID: uC-osflcyp042h08b1
tggtgaggtcagcgctgagatgcttgtcaaccttggtattccctgggttattcttggacactctgaaaggaggagtttgttgggtgaatcaaatgagtttgttggagacaaagtggcatatgcgctctctcagggcttgaaggtcattgcatgtgttggtgagactctcgagcagcgggaatctggatcgaccatggatgttgttgctgcacaaacaaaagcaatttctgaaaggatcaaggattggactaatgtggttgttgcctatgaacctgtgtgggccattggaactggtaaagttgctacaccagatcaagcacaagaagtgcatgatggcctgaggaagtggctcgctgctaatgtcagtgcagaggttgctgaatcaacaaggatcatctatggaggttccgtaacttgtgcgaactgcannggagctgcagcanagcctgatgttgatggttttctcgtcgggggtgcttcattgaagcctgaat

SEQ ID NO: 19046 - DNA, 499 bp, Oryza sativa
  Clone ID: uC-osflcyp042h11b1
ccctgttcttcctcgtctccggccttcctccaccggggggtcttttttaccaccgagggggtctatacacgcggcggcggcgtggaggcgtcacctcctcgacggcaacatctcccccaccaccgcggcggcgatctccgcctccagatccgcctcccagccggcgctcgcaccccaaggattgcgtggagcggatggcgcgaggtacatgtccgcgagggcgccggctggtcaaggggacggggcatctcctccgcaagggaaccggagggcggtcgcctgcgagtggaatcatagctactgctgttttggagctactggatttcttggccgctaccttgtccaacaacttgcaaagatggggtctcaagtgcttgcaccattcagaggttctgaggattgtcaccgacacctgaagctgatgggtgacctgggtcagattgttcctatgaaacactatccaagagatgaggattcaattaaggctgtcatggtcaaa

SEQ ID NO: 19047 - DNA, 564 bp, Oryza sativa
  Clone ID: uC-osflcyp043a05b1
gattattccagcaacgtcctttgcaaagactccgggggagttgatattacctgtggtggaagcaatgccaagtgaacttcatgtcacagttccatatcttctcagttttgtcatgggtatacctctttttagcttgcgatcctcttaaaatggctatggtcagcgttgagaacaacctttctcctccaaaaactctgcagaagttgtcagatagtctcacttccatgctgcctttgctttcagaattggcagatatcataccaagggatactcttttctggaaactcaagctgctgaagtcaggagcagcctacgctaactctcgtcttcatgctgtacaagctgaagttctacttcttgctagtggcaatgataatcttctgccaagtggagaagaggcagatagactcttcaaatcactgaaaaactgcagagttcggtacttcaaagacaatggccatacactacttgttgaggacggtgttaatcttttatcagtcataaaaggagtaaatatgtaccgccgtggcagacaacggatcctgtgacggatacattcccccg

SEQ ID NO: 19048 - DNA, 511 bp, Oryza sativa
  Clone ID: uC-osflcyp043a06b1
gctagttagatggcgtgccacgccgccgctctgggggggcatctttaaacgccgccggggtccgcaacgctcccctccaccgcgtgcacgtcctcctcgcgccgccgtgcctattcgtggggctgccctgggcggttgatacggttactcctgcgggggcactgcccctcgaccgcctaggcgcgcgccgagagggtggtctccccgcgctgctactcctacggagcctacgccgacgactgagagtcggcctcaaaggcgctccggagggtcctggagtcccccggcgcccaccatgcgcccgcgtgctacgacgcgctcagcgcccgcctcgtggggcgcgcggagttcaaggtctgcttcacgagcggtttctcaatatctgctgcgcgacatggattgcctgatgtgggtctcatctgctatggggaaatgatagatcaagggtgtctgatcaactaagcggacctcatcccagagatttgcgatgcttgaaatggttattgaaact

SEQ ID NO: 19049 - DNA, 551 bp, Oryza sativa
  Clone ID: uC-osflcyp043a09b1
cgcagaggccaagggagaaaaggaaggagggctttataaaaagagagggggaaaaaaggacgcgccaccgcggtgggagaggcgtacggcgcaccggccggccgtcggatctgcgccggcgacgcgcgcccccgccggatccccgctgccggaggtggacgaggcggcgctccggccatttccccgcccgcgagcgcccagatccgtcccgccggatatttgctgctcaattatgcgataaagtgcttccagttgacgcggagttggtggagacgccttgctctataatctattctccattgctcagcagtgatcagttggaagattctgcctttcttcctcttgctgcctgtttgtttgcttccttggtggagtagacgagaggaggagggcaagaagataaaggtagcttctttcagccactctatgtccagggacttggattgtcctgttcagacacagatggccgttgaatactggatcgagcttagcagtgaattcctgcagcagcaaactgatggagatcatgtgttgaaagagcttgccaactg

SEQ ID NO: 19050 - DNA, 562 bp, Oryza sativa
  Clone ID: uC-osflcyp043a12b1
atttgatgaggtgatagaccaggtggttgtcagggggggggtaagcatgatgggtggggatgatgtcctgagcagtgatagtgatgaagaagaggaagatggagaggaaaattctggagcttcccaaaagaagaaaggatggttctcctcgatgttcaagagcattgcaggtaacaatgtgcttgagaagtctgacatccaacctgcactcaaagcgcttaaagataggctgatgactaagaatgtggctgaagaaattgcagagaaactttgtgaatcagtggcagctagccttgagggcaaaaagctgggatccttcacaaggatatcctctactgttcagacagctatggaggaggctcttcttcgcatcttaaccccaaggcgatctattgacatattaagggatgtacatgctgccaaagagcgtgggaagccatatgttattgtttttgttggagtgaatggagttggcaaatctaccaatcttgcaaaggttgcttattggtttcttcagcataccctcagtgtaagccttgcagcatgtgacacctttagatct

SEQ ID NO: 19051 - DNA, 439 bp, Oryza sativa
  unsure (1)..(439): unsure at all n locations
  Clone ID: uC-osflcyp043b02b1
gttctttcttaagccgaccaagatcgtggcgctgggcattttttaaagccgncggcgggttgaaacacccctagcatctcgctcaagagcctggccaaaaagggcatgttctgagttctacttacttctgcttcctggccgcacccgtagcatcagccgtaatggcacgcccgttcttctcgtcgctggcttcgacggactcggcgctagcggagcagctgatcaaggacgtcttcgctgctcgatggcagtagccgacgacaaccacaggctggcgttgctgatgccatatcgcgccggccattgcgtgggttctttacaacatccttcatccggcgctgaaccagcttaaaccagatgcagtatgagcatgtgctcgtccgcgcaattaccagccagttactgtgagccacatttcatttgctgacgatggaagtgt

SEQ ID NO: 19052 - DNA, 545 bp, Oryza sativa
  Clone ID: uC-osflcyp043b03b1
cgtacttgttcgggaagcccaagacgaacacggggttcatctcctacagcggcgaggggttcaagctgctgatcccgtccaagtggaaccccagcaaggagcgcgagttccccggacaggtcctccgctacgaggacaacttcgacgccaacagcaacgtctccgtcataatcaaccccaccaccaagaagaccatcaccgagttcggctcccccgaggagtttctcgcccaggtcgacttcttgcttggcaagcaggcctactccggcaagacagattccgagggtgggtttgagtcggacgcggtggcgacggcgaacatcctggagagctcggcgccggtggtgggagggaagcagtactacagcgtaacggtgctgacgaggacggtggacggcgacgagggcggcaagcaccagctgatcacggccaccgtcaacgacggcaagctgtacatctgcaaggcgcaggccggcgacaagaggtggtttaagggcgccaggaagttcgtcgagagcgcatccgcttcttagcgtccatgatcg

SEQ ID NO: 19053 - DNA, 487 bp, Oryza sativa
  Clone ID: uC-osflcyp043b04b1
gctttttatggtctggacatgtgtgatttgcgcatgggtattttttgaaccacgtatggtcaaagatctattaatttgtaatttgtttgctatatgtagtcttacacttatttatgccctgttttcacacttgttttctcacatccctagagttgtattagatgaaaagagatttgtaccgcaacaagcggttgaagaatcaaaggtatgaaacatccaaaagccctgtaataattattcctttcatatatctagtaatgtatgacttcagttgcgtttgcttcagcagtatatttgatgacctaggaatacaagcatgcaaataatatttatcttctctccggtattttgatcttatgtgctatctcttgattttgcaattagtttcagttctcttgcatgccaagctagtgtgcagtgtaccagcgatgccttatttgagttctgcttaatgaacaaatacttttgttaacggagattaatagat

SEQ ID NO: 19054 - DNA, 564 bp, Oryza sativa
  Clone ID: uC-osflcyp043b07b1
tattaaaataaataaaagaagacgaaagaggagatggttttgcggagtccgctcgtcgtcgacccgcgagttcggccgccgccaccgccgccaccgccgccgccgatccccatccatcccgcgagcaagcaagggcgcaggcatcctggcctcactcgtgtgccactgcccaaactagcagatcttgataggtggctttgcaatctttggccccctgaacctgtccttctccatggctggggccaccaccacctcctctcccctgcggaggatggagtctgtctgccgccacctcctcccagcatcactgcctatcctttaccagaatccgttaggtgccatcaggctggagtcatctccagtgattattggggggatggtgctggacatccatgccaagccatccatgcagccgcatcctggaacgactgtgcctgggatggttaagtacgtcagtgggggagtagcaagaaatattgccgagtgcatttgtaagcttgagactcgaccattcatgattagtgttgttggaaatgatttgcaggggatttcttttgaatactg

SEQ ID NO: 19055 - DNA, 541 bp, Oryza sativa
  unsure (1)..(541): unsure at all n locations
  Clone ID: uC-osflcyp043b08b1
gttaaatagcaccaagaaacaacaacgcctgtagtctagtagagcctagagagagaaagcgcgaggagatggagcggccggcgccggtgaggaagtcccacacctcgacggccgacctcctcgcctggccgcagcagcagcaccagcccgacggccacgccgcctccaccccctcccccgctcgccgcccccaccagccatcggaggcgctgaggaaggtggtgttcggtggccaggtcacggaggaggaggccgagagcctcaacaagaggaagccatgctccgcgcccaagtggaaggagatgaccgggagcggcatcttcgcggccggcgccgacggggaggcggaggagcccggccgcgccgccccgcgcaattaccagccagttactgtgagccacatttcatttgctgaggatggaagtgttcctcccaaaaagccaacttcagtggctgaggtagcaaagcagcgtgagcttagcggtactctngcaagtgaagcagacagtaagatgaagaagcagatttcaaatgcaaaatc

SEQ ID NO: 19056 - DNA, 468 bp, Oryza sativa
  Clone ID: uC-osflcyp043b12b1
ttattaaaattgaggaaaaaaaagatcacttgttgcctttattagaaacaaccgggggtttatgctagcggagcatccattggagaggccccaaagcaagaatctttttcattgatcactgctgtttgttatataaaagatcgatctttaggttgttatttgccaagatggagaagggaggtgcttcggtttccatggatgcggcggcgagcatggacatgtgggactgggaggtcctgcctgaccagctgagctcatcctcccatggcggccgcggacatggccgcagagttcttggtgctcaagaaaccgaggaatcgaatcttgacgccgtcgacgacgacatggccgttgacgacgagtgcaaggacatcggcgtcaacgtggccgtgccggccgagaccaagacgagccatgaagagaccatggcggtcaaggtaacaaatgaggaggaggaggaggcgtacc

SEQ ID NO: 19057 - DNA, 468 bp, Oryza sativa
  Clone ID: uC-osflcyp043c01b1
cttgttagaggtggaacagctggcacaggaggggggggcttttattaaggccatatggttttaaccaccagacacgatacatggatcagttcgtgaaacatgacagggcgaggatatagaacactcgtttggagaggaacacttgcgctatagaactctgcatcgctttactgcagctactctcgagcatggaatgcatcctccaatttcccccaaaccagaatggcgtgctctaatggatgagatggctgttgtggcaacaaaggaacatcgagaaatcgtcttcaaggagccacggtttgatgaatacttacgatcggaaacacctgagacagaatatggcaggatgaacattggtagccgaccatcaaagagaaagcctactggtggcattgaatcgatcggtgcaattccttggatttttgttaggacacaaactaggtttcatctttctgtatggcttgaatt

SEQ ID NO: 19058 - DNA, 361 bp, Oryza sativa
  Clone ID: uC-osflcyp043c03b1
gaacctcgcatccatccatggccaccaccgccctctgatccgatcgatactgatcagccagtagctatgctgggttcggaccagctcgagcaccgcccggcgccgtcggctccccgcgccgagccggacgatgtcgccgacgacgtggaggtggaggcgttccgggacatccacccggagccgtcgcctccgcatctaccgccgccgccgctcaggcagccgtcgtgggacgccgcgagccaccgctcgctgtcgtcctccggcgcgggcggcggcggtgacgtctagctgttcgtcaccatgagccgcgagttcaccggcatggtggcgcgcgggttgtaaaccgcgcccagtccctacg

SEQ ID NO: 19059 - DNA, 534 bp, Oryza sativa
  Clone ID: uC-osflcyp043c08b1
ttttcatcacccccttacactaaactttgcaaagtgagacctcctttcgtctcatggaaatgcctcatcttgctgcttttcttcctgccccaatggagctcggcgccggtgcagccactgctgctgctgctacgacctcctggctagcatctgagaatccaagagaggaaacgttggagggaaatgagcctcacagataggagaagagctggcgagcatcttgtattcgagctctcaccacgatctctccttctgctctagctacatttggagcatgatgggggctaacggccggtgtgagcgtgtggggaattgaggcgtcatggtccgagatatataaatatctctaggtatcttaattaattagcttattattattagttctagattactctcgatgttttcttttggttctgtttttttttctggtgtattgagaggctgtaagtgacgcattcttggtatggagcttgtttgtgatgttcagacatcttaacgccttcttgagtaacatagtgtgacgagttggagaga

SEQ ID NO: 19060 - DNA, 146 bp, Oryza sativa
  Clone ID: uC-osflcyp043c09b1
tttggctctacgtcttcagcacggccgtcgcgggggacatttcgcaggcggcggcggcctcggggtgcctgctgctgcgccgcccggcggcgccggggctcgtcaacgtcgccgcggccggggaggaggaggagcggaggggctcc

SEQ ID NO: 19061 - DNA, 596 bp, Oryza sativa
  Clone ID: uC-osflcyp043c10b1
ccccgggggaccggccgaattcccggtcgcccacgcgcctcttcgcgtccgcccacgcgtccgcccacgggggggctttttcgaccgcctccggttacattaaccccaaataataatagaggaaggggaaaaacacatttgcagccacatcatccatggcctctctccgcaccattccggtgatcttcggcatcctcttctatgtccttgccagcactgccactgccaccgacgcaccggactacgtcgtccaaggccgtgtctactgtgacacgtgccgcgccgggttcgagaccaatgtcaccgagtatatcaagggtgccaaggtcaggctggagtgcaagcactttggcaccgacaaggtcgagcgtgcgattgacggtgtgactgatgagaccgggacatacaagattgagctcatggacagccatgatgaggacatctgcgaggttgtcctcgtccacagcccccttgcaaactgctctgaaatcgaggccgaaagggatcgtgcccgtgttttgctcaccaggaatgctggcaattgggacaacctgcgcttagccaacccactcgggttccttaaggacattccactg

SEQ ID NO: 19062 - DNA, 448 bp, Oryza sativa
  Clone ID: uC-osflcyp043d02b1
tactcgtcgccgccgccgacgccgccgacgcggggggctttttaaagaggaggggttgttcacaccggctgatctcgtcggcgaggcgagcggtctgatccggtgcggtgcgttccgggtggacatggcatcggaggacttggtggggaagagcaggggggacaccgcggtcaccaccatcgtcaacctggctgaggaggccaagctcgcgcgggagggggtcaaggggcctggttaccaggtgctctccatctgcaagtctctcttcgccggtggcgtcgtcggtggagtatcacgtactgctgttgctccgttcgaactaatgaagattctgcttcaggtccaaaacccttacagtattaagtacaactgtacaattcatgtgtttaagtacatatggagaacaaagggtctccgtggactttttatgggcaatggtaccaattgt

SEQ ID NO: 19063 - DNA, 283 bp, Oryza sativa
  Clone ID: uC-osflcyp043d04b1
tttttacattcgcattcatcagctgctacgtagtcgcagcttttgaataagggacggtgttagaccatggcctacaaggttgacctggtggtggaggttaacaccttcgatcccaatctgttctctgcgctgttccattcgtctgacctttttcccaagatctttcctatgctttacatgatcacctagaccgccgagggcgactgcatgtccgcctatcccgtccgtctcctcatgtccaccttaggggtgcccatgaggacctcccttatcgttaaatttg

SEQ ID NO: 19064 - DNA, 445 bp, Oryza sativa
  unsure (1)..(445): unsure at all n locations
  Clone ID: uC-osflcyp043d05b1
tnctcntctgagccctggcacgacagggacatggtggtgttttatctagccctggctgcgataacaaccagccaatctcagcagcctctgatcgatcaaccagtaaaccaaaagttttttaaacatagtggtggcagttttactgctggtcgacaatgggaggaattacagcgacacgtgtcagcacgtgagggccacgtggtacgggcagacctactgatccgggtccagtacggataggatctcctgcggcatcaatatcatcaaccggtcgtcatgcaacggcttgatcttgtgcggtagcgacccaatcttaagggacggtaggggaagcaatctgcgacttggaactgaagtgggagtagctaggcaaataacagaggaaggcagataacggcgttcatcaaggacatgagctacgagcaccattgggtttaccacttga

SEQ ID NO: 19065 - DNA, 550 bp, Oryza sativa
  Clone ID: uC-osflcyp043d11b1
tttttaaaaggaaaaaaaaacaaaacacaccaggccaaattaaagcgacaatgggatcgctcaccaccaacatcgtcctcgccgtcgccgtggtggcagcgctggtcggcggcgggtcgtgcggcccgcccaaggtgccacccggcccgaacatcacgaccaactacaacgccccgtggctccccgccagggccacctggtacggccagccctacggctccggctccaccgacaatggtggcgcgtgcgggatcaagaacgtcaacctgcctccctacaacggcatgatctcctgcggcaacgtcccaatcttcaaggacggcaggggatgcggctcatgctacgaggtgaagtgtgagcagccggcggcgtgctcgaagcagccggtgacggtgttcatcacggacatgaactacgagcccatctcggcgtaccacttcgacttctccggcaaggcgttcggcgccatggcttgcccggggaaggagaccgagcttcgcaggccggcatcatcgacatgcagttcaggaggttgcgctgcagtaccccg

SEQ ID NO: 19066 - DNA, 574 bp, Oryza sativa
  unsure (1)..(574): unsure at all n locations
  Clone ID: uC-osflcyp043d12b1
tttttccactgaatcgccaaaaaaattcccctggcggcactccatctctataaaaagcctcccccaaatctcgcctcgtttagccagcacaactcacacaactctctctctctctctctctctctctctcgtcgcctgcaagcttccgcctcccggatcgcggccaccaccggaggaggagggagcagccatggcgaacatcgacatggggaagatcctggcggggctggagaacgacgacgcgcgggtgcccaagaccaagctggtctgcacgctcggcccggcctcccgctccgtccccatgctcgagaagctgctccgcgccgggatgaacgtcgcgcgcttcaacttctcccacggcacccacgagtaccaccaggagaccctcgacaacctccgccaggccatgcacaacaccggcgtcctctgcgccgtcatgctcgataccaagggtcctgagattcgtactggatttttgaaggatggcangccaatcaagctaacaaagggtcaagaactcactgttaccaccgattatgagaacaagggtgatgagaacatgattaccatgagt

SEQ ID NO: 19067 - DNA, 408 bp, Oryza sativa
  Clone ID: uC-osflcyp043e01b1
aaatgattctgcccctcgcgatggacgacaagtgcgggtttttttcaaagtttgcggtttttcaacaccaaaccatggtgaataatatagtgcccctggctaagctcatccgcgtgatgaggacaacaattcctattgaatgatgccttcaacactctggtggtccatcatcgcaagaacacatggttggaaaagaagttatgtttactcgtttattaaacccctatgattctcttgttggaaagggatccctgatgtgatcaaactggatgactttattgagtggcactaatttgtgtcctgattgatgtgaagtatgggtgaataacgtgctgaaacgggcttctgcattcacttggccgtatgggaacatgaacttcattttcgatgctgttggaacgttttttt

SEQ ID NO: 19068 - DNA, 490 bp, Oryza sativa
  Clone ID: uC-osflcyp043e03b1
cttcttctacgggaactaccggcaccaggcgggggggtttttatgcgtaccagggtctgttcaacggaggagcgaaggaggagaacattgtggcgtttatgtattgatgacattgcccataacattctcaatccaaggcctgggaccatcatcaaccatcctaaaggtggagatgtttatgctggtgttccaaaggactacactggtcaccaggtcaccactgagaacttatttgctgttctcttgggcaataaaacctgagttactggagggagtgggaaggttatagacagcaaaccagaggatcacatcttcatctattactcagatcatgggggtcctggagtttttggtttgcctaacctggcctatctttatgctggtgattttatataagcgttacaaaagatacatgccttcaacagctactagaaaatggttttttatgtccaaccatgtgaacgtggcagtatctttcaggggcttaatg

SEQ ID NO: 19069 - DNA, 583 bp, Oryza sativa
  unsure (1)..(583): unsure at all n locations
  Clone ID: uC-osflcyp043e06b1
ctttttgctgccggcctcaagtctcctcttccacgggtccatttgatggtgcggtgctgttggccgacgaggccgagaaggaattttggactttgatgagggagctgctgattgtgagtcaagaacagttgtgaagagtgagaagaaagctagagaagatcaaatggcagctgaatcctccctggttccacaaacctcctctgaatcgattgcgcagaagatgggcttcttcagggtccctgaccttcttgtcaaactgagcagcaaatgtttgattgagctggatgcagtccgcagcccaacatcgcccctagacctcatattcttcccaggcctcggtgccaaatcgccgaggtcgtcttttcttggcgacagggttgggcttggactggtggattcacttactgatgatagctccactcccttgtgcagcaggaaggttcttcttggatctgagatgaggattactgataatgtaacttccaagaacagctttactgcttctgtcgaagctggngtgggtgatcagaatgatgagaagttgtgtgatgacctgaagggtggtttcatgctttggatgaca

SEQ ID NO: 19070 - DNA, 588 bp, Oryza sativa
  unsure (1)..(588): unsure at all n locations
  Clone ID: uC-osflcyp043e11b1
tttttagtttcagtgaccttgttagaggccaacgcgggttttttaacagcactaatggatttccgccttggtgatgggaagaaatatctccatactggggattttagagcatcaaaatcaatgcagttgtatccacttctccaaagaggccagataaatttgctttacctggacacaacttattgtaatccaaaatacaagttccctcccaaggaagatgttattgattttgctgtgaggacagctaaaagatatctacagaaggaaccaaaaacactcattgttgttggagcatatagcattgggaaagaaaatgtatatctagcgatttcgaaagctttacaggttcctatctacactgatgcatcaagaaggcgcattcttcacgcatttggctggtcggatttatccaaaatgatatgttcagacagtcaaagttcatcacttcatgttctgcccctttcttctttacgacatgagaactngcagaagtatttggagactcttaaacaaaagattctagctgtgcttgcttttcaccaacagggtggactttcttgaggaactggaatcagcttgcctaataaa

SEQ ID NO: 19071 - DNA, 429 bp, Oryza sativa
  Clone ID: uC-osflcyp043f02b1
gtttctttccgttccagcggccgtgcctgaacaggaacacctacttattctgggacgcctttcaccccacggagagggtcaacatcttgctcggcaaggcagcctactccggcggcgccgacctcgtccaccccatgaacatccagcagctcgccgcctggcagccgtagcagctgtcgccgccggcggtcgtgacatatatcctctctcttactctcttcgtcccgaaatataaagaattttggatgaataagacatatctcagtactacgaatttagatatgaagtctgattagattcgtagtatgtgttacatccatccaaaatcttttctattatgtgaccggatgaagtacttagggtatgaatctattcgttttgcatgcagtgttactatgatgttgtagctaggtagggggtgagctaatg

SEQ ID NO: 19072 - DNA, 410 bp, Oryza sativa
  Clone ID: uC-osflcyp043f03b1
cgatacgtccgccgcgagatcctcgagctcgggctccctttcgacggctacaagtgcctccaccacctccgcgagctccgcccctccgccgccgccgccgcctcatccttcgcgcccaaccagactgccccgcctctccccctcgacgtgaaggcgtatgatgccagtagggtgcggattgcttctggcaatgttgaggatgagatggacgaggggaggacgatgtgtaaggtggccgcgaagacagcgcctgtgaggcggattgagagggcggttgatcctgacatcgcgaggttgctcgacgagaccgatgtctcccatggcgggtcggaggatgagggactggaggaggattttgtcatcatggcaaaccgggctgagggggatgaggaggaagatgatgatgatga

SEQ ID NO: 19073 - DNA, 499 bp, Oryza sativa
  Clone ID: uC-osflcyp043f04b1
taatcataggcaaggacgaacggtgagacgtaggggggattttttaaaaggttgggtcttttgacagctacgaagatgtaacaccaaacagtgagacgagtctgcagaaggcggaagcaaaccagcccgtcagtgttgcaattgaagccggtggcagagcattccagctctactcatcgggtatcttcacgggtaaatgtggaacagcactagaccacggcgtcgctgctgttgggtacggcacagagaatggcaaggactactggatcgtgaggaactcgtggggcaagagctggggtgagtccggctacgtgcgtatggagcgcaacatcaaggcgagcagtggcaagtgcggcattgccgttgagccatcctaccctctgaagaagggcgagaaccccacgaaacccggtcctactccggcgtacccaaccccgacttccaccgtttgcgacaactaatacaattgccccggttgcaccacctggtgctggattta

SEQ ID NO: 19074 - DNA, 528 bp, Oryza sativa
  unsure (1)..(528): unsure at all n locations
  Clone ID: uC-osflcyp043f08b1
atggtgggaggaggacaagtcacagcaagggggggggcctttataanaagcatccgccttataagcgccaagtcgaggcactgaaacctgggaaggaacttacgaaaatggatgccccaactcataccctcctcggagcaacctgctgtgtaatgctatcgaagcattctacagtacagttggtgtcgcagcatcctataaatgggaagaaacctaaggagcacaaggctatacttactaccgatcacatggctcccttatatgctataaattccatggaaggtatccaggatatcaagggaagcaaaacattattcactaacttggatgctgtcaaagaaagctacgaggcactgcttatcgcaagtacatcggcaccgaagtacagatactacaatacattaatagtaagaaacattgttcctgataagatccaagggatgggtgctaattaacactaacctggtaccctctcctgccccgaatgtacgaatggagcaaaaaacaagaaactatgaagtaccgacc

SEQ ID NO: 19075 - DNA, 378 bp, Oryza sativa
  unsure (1)..(378): unsure at all n locations
  Clone ID: uC-osflcyp043f10b1
tctgtatggaagctggcacgaggcatggcccacgggggggttttaagtcgtcgtcctcatgctcaaggcaggttgtagtagaacgcagggagcgtcgagaagggaaatgggagaggaagcattcttgagcaggttgtggtcaaattggctgccagtacgaacgaactgtatcgattatctcctggttgccctgtactgtacttttctctattatgtatgtgtacgcagagcggctaatgaaaatggctgtttcgatcggtggcttcggtgttctttttcatcgctcgttttcttcacggatatttgtcgaactgataaacggtgtcttttttttatataaaacagagtttttgcttcaaaanaaaggtaattttaaaa

SEQ ID NO: 19076 - DNA, 370 bp, Oryza sativa
  Clone ID: uC-osflcyp043g01b1
cgccccggaagaaccggggcgacccacgacgccggcttgtgtcacagcggagccgggcacgcgcccagagggccgttattagaaaaccgggggccggtaccacacccacccgacgccgggaagagcgccgacctggccctcaccagggaggagggggaaagagaaagacagagaaaagacgaccccacacaggacgacaagggtacgacaaggccagcggaaaatgcaggggaagcagctaccccgggacctaccacgagaagaagagccaggccaactgaggccacgccccccagagacggcaccatggcccaagaggaaggacgaagccaaccgggaaccaggaggagcatgaggaagagtccggcgg

SEQ ID NO: 19077 - DNA, 176 bp, Oryza sativa
  Clone ID: uC-osflcyp043g02b1
gttggtgccaccatgcaaagccccgccaacaagggggggttttattaaacaaagcgcctttaaaaccccaaaccaccggacacctgaatcccctaatcactacacatcggccgacaaggaacaaaccaggtgcccaatcatgaccacctaatcatcacaaacagttccaacaaaga

SEQ ID NO: 19078 - DNA, 381 bp, Oryza sativa
  Clone ID: uC-osflcyp043g03b1
ggatatgaacccaggacaccctactggccacgggcgtggtttatgaaacatatctgcgcttcacaaactcatgcttacgacacaactgatatctgttagcagatgagccgcaccaaccaaactcctcacctgacgaggctccatcactaagcggtcgaaggatctggaggacaagagcccaaggatgggcacggcaccacatctggtctactgacatactgagataaacggaaaatggggggagtgaggccagcgccgagggtctcccgcaaagactactcctcctagcaagacagcagacgagatctacagggatgcataacacggactcagtccaaacgtttctgcgcaaagctctatgcgttgaatggtgaacccttc

SEQ ID NO: 19079 - DNA, 319 bp, Oryza sativa
  Clone ID: uC-osflcyp043g04b1
atttatttctgaaaacatgggactcaaaaagtgcaggactttatataaagccggcgttggtgaactcctaccagattctccatcagctactgccagtaggactggtgggggataggtgtggataagtggatagaattatctccatcctgacaaataatgcaataaaccttgctgatgattactgtgactaattgctgacaaatcaaactatcttatctcatttcattggaaagttctacagtactaaaggtataactatttgttctatattagagccttaatacaccttgggagaaaacccaatgaaatcttttcttcc

SEQ ID NO: 19080 - DNA, 533 bp, Oryza sativa
  Clone ID: uC-osflcyp043g11b1
tgtgattgcccacaagcaagctatccccttgggggggtactttggaggtgttggccgttctgctcaagctaagtcacgccattcaaacggtcagggacgctggcctgccaagtctgctagattcattctggatcttcttaagaatgcagagagcaatgctgaggtgaaaggtctggatgttgatactctttatgtgtcccacattcaagttaaccaggcccagaagcagaggcgccgtacctaccgtgctcatggacgcatcaacccttacatgtcctccccgtgccacattgagcttatcctgtcagagaaggaagaaccagtgaagaaagagcctgagtctcagatcgcagccaggaaggcctagagaaggaagctttgccccccttctgcctgtttgttagatcagattattatatagcctgtggcttttggctgagtgaaaattttggctggttgtacgcttgtttggcctatcggaaattcggaatactactagctcatacttgtcaaaccgttatctctgtgactga

SEQ ID NO: 19081 - DNA, 423 bp, Oryza sativa
  Clone ID: uC-osflcyp043g12b1
cctgggagacggcgatcatcaccgacatgaactggtggcggttgtttacgttccacttggacctcaacggcacggcgttcggcaggctcgccaagcctggcctcaacgacaagctgcgccactccggcatcatcgacatcgagttcaccagggtgccatgcgagttcccggggctcaagatcgggttccacgtggaggagtactcgaaccctgtgtacttcgcggtgctggtggagtacgaggacggcgacggcgacgtggtgcaggtggacctgatggagtcgaagacggcgcacgggccgccgacggggaggtggacgccgatgagggagtcgcggggctccatctggaggctggacaccaaccacaggctccaggcccccttttccaacccaatccgcaacgagttcggcaagacgctcg

SEQ ID NO: 19082 - DNA, 497 bp, Oryza sativa
  Clone ID: uC-osflcyp043h02b1
gttgataccaccggtgtcttcactgacaaggaggggggtgttttttacttgaagggtggttccaacaaggttgtcatctctgccccgagcaaagatgctccgatgtttgtctgcggtgtcaacgaggacaagtacacttcagatattgatattgtctcaaatgctagctgcaccacaaactgccttgctcctcttgccaaggtcattcatgacaactttggtattatcgagggtgtgctgacaactgttcatgccatcactgccacccaaaagaccgttgatggaccgaccatcaaggactggaggactgtcagggcggtcagttttaacatcattcccagcagcactggtgctgccaaagctgttggcacggttcttcctgatttgaatggcaagcttacgggaatgttctttcgtgttcccactgtcgatgtctcagatgttgatctcacagttagattcgagaaggctgcctcatatgatgcttataagagtgc

SEQ ID NO: 19083 - DNA, 470 bp, Oryza sativa
  unsure (1)..(470): unsure at all n locations
  Clone ID: uC-osflcyp043h03b1
ccaccccggcataaccgcctcgacccacgccgccgatttgtttacatagaactcctcccgncaagctgccgtcgtttatttaaaacaagccgcgctttaaacaccatcccgaaggacgagggtgaccgacaagcggctcttccatcaacaagtttgaaggatatgacaactagtagcacagagaatacaccactttcccctgacaagaaagctgaagctgtcttactatcagcagagaagcagctcaagtcagatcgcaaaaagagtctaatggcttgagaacaaagagaagaagttcaaagatttactcgcaacctgggaacctccgtcaatggaaacggatgatattgatctcctgggaccagatattggctgcaagatagtacgatgaaaccctaatgcttgcattgccaactgcagaaaaaactgtcgacccacttactcactaatgaccacagccagttctcatt

SEQ ID NO: 19084 - DNA, 299 bp, Oryza sativa
  Clone ID: uC-osflcyp043h07b1
cccccacatgggactcacgggggggggggggtttttgaatctaagcggggtgccactaaagtggtgagaagggacacagagagagagagagagagagagagatagagagagagagagagcgctgacctgtaagaaaggctcacccatcgaggacgccaaaacacgtcaagaacgaccgacccgtgatccaggctccatccatggagcgttgctctcctgtgagaggcgcatgcgattctgaagaggatgaataggacaggaaggacgaggaagagcaacatactcataggcctggcgac

SEQ ID NO: 19085 - DNA, 451 bp, Oryza sativa
  Clone ID: uC-osflcyp043h08b1
tttgtgcatatagatgctactcgatcttttacgaggggcttttttacagagatcgggccttaagaacagcccccaattctgaaggtgcctgtggctatgcctaccatcaatcgtcagcagattgacacctcgcagcccaaagaagagccttgctcctctggcaggaatgctgaagctgcttcagtatcagtagagaagcagtccaagtcagatcgcaaaaagagccgcaaggctgagaagaaagagaagaagttcaaagatttatttgttacctgggatcctccgtctatggaaatggatgatatggatctcggggaccacgattggctgcttgatagtacgaggaaacctgatgctggcattggcaactgcagagaaattgttgatccacttacttcttaatcagcagagcagttctcattgcagcctagggcgattcatttaccagacc

SEQ ID NO: 19086 - DNA, 510 bp, Oryza sativa
  Clone ID: uC-osflcyp044a09b1
tttctctcttcctcttcgcacacctccaccggggggggcttatcttaccgtgcgggcggcgtcatggcggcggccggcgacctcaccgacgaggagcgccgcgcgctccggggcagcaagttcgcgccgcttccagcgcctactgccccttcccgcccccagcccaggatggctcatcctgcaggaccactaactacaaacaaggctgctgctttagcaaaattccttgagagaaagcttcagcagcctgatgggctggaatctctgaacccagaccttgtcaaattggctgtgagaaatgcaaaagaaacaataaaggctagcaagggtgaaccgtcaacttcaggaagaatagtacggcacgtttcatcattcggagattcttctgaggattctgatgattcaaaagatggagaagaaaccaagggggtcaaaagaaaaaggaagaataagaaggataagagttctcaaaacggaggagaacagagcaaggaaaagaagataaataaa

SEQ ID NO: 19087 - DNA, 515 bp, Oryza sativa
  Clone ID: uC-osflcyp044b03b1
ctctttttttaatcaaggtttagattcggagaaattttatttgtttttgaatggagtgcggtggtgcgctgcagctgccgccggggttcaggttccacccgacggacgacgagctggtgatgtactacctgtgccgcaaatgcggcggcctccccctcgccgccccggtgatcgccgaggtggacctctacaagttcaacccatgggatctccccgagagggcgatgggaggggagaaggagtggtacttcttctcgccgcgggaccggaagtacccgaacgggcagcggccgaacagggcggcggggacggggtactggaaggcgacgggggcggacaagcctgtggggtcgccgcgggcggtggcgatcaagaaggcgctcgtcttctacgccgggaagccgcccaagggcgtcaagaccaactggatcatgcacgagtaccgcctcgccgacgtcgaccgctccgtcgccgcccgcaagctctccaagtcctcccacaacgccctcaggttg

SEQ ID NO: 19088 - DNA, 509 bp, Oryza sativa
  Clone ID: uC-osflcyp044b04b1
tttgtttcatgggtcagactgtgggagtcatcggagggggtttttaaaactaaggttgggccagaatgacacaggtgttcatgctttatcaaatgtatgtcatgttgacgtggagcggataagtcaaagaaagcctggtgaaatgttgccacctcatgagcctggagttgtaaaacgtgcagtgaaccattttctacagaagaatgaaggtgacataatggtgactgatgtccgttgtgttgcaccagacttccatgctagatacaaagccctatagcgcacgtaccactatcgtttgctttctggatctgagccactatcagttttttgagaaaacctctgcttggcacatacccgaggatttaaatgtacaggcaatgaagaaagcgtgcagcatacttgttgggcatcatgatttcagttcatttcgagcaactggatgtcaggcaaactctcccatgagaactttggatgagcttagtgttacagaagtatttccttccatgttt

SEQ ID NO: 19089 - DNA, 427 bp, Oryza sativa
  Clone ID: uC-osflcyp044b05b1
ccatttatgtcgttcgagaatttttgacagaaattgatggtattaccaatgtgaagcatcccaaccttgttgaattaattggctgttgtgttgaaggaaacaatcgaattttggtatacgagtatttagaaaacagcatccttgaccgtgcattgttgggttctaatagcgaacctgcaaattttacttgtagcataagatctgctatatgcataggaatcgccaaaggacttgcatacctgcatgaagagattgcgtcaccgattgtgcacagagatatcaatgctagcaatatactgtttgacaagctttacaaccccaagatcggggacttcggtttagccaagctattccctgataatatcacccacatcagtacccgtgttgctggaacgacaggctaccttgcaccagtatatgcatggca

SEQ ID NO: 19090 - DNA, 460 bp, Oryza sativa
  Clone ID: uC-osflcyp044b12b1
tcggtattctctctattggcgcaggttttcttccgaggggcccaagtacttcttcgtggggtcggaggtgctccccaccaccggtcggaaagatgggcaaccaagacggccaccgccacgggttcgtcgcgagcgacccgctgtcggggggcaaggcagcactggagatgacggggagccacctggacgaggtgaagcgcatggtggcgcagtcacgggaggccgtggtgaagatcgaggggtccagcctacgcgtctgccatgtggccgccgcctccagggccaaggacgcctccggcgtggtggtcgagctggacgaggaggccccgccccgcgtcaggccagcagcgagtggatcctcaactgcatcgcccacggcggcgacatctacggcgtcaccaccggctttggaggaacctaccaccgccgcatcaaggacggccaggccctccagttgagc

SEQ ID NO: 19091 - DNA, 234 bp, Oryza sativa
  Clone ID: uC-osflcyp044c01b1
tctatatctaggtgctgcattgccgcccacaacatgggggttctataaacgagcatgggaatttcaacacatgtttcgatcaaaaaaaaaacaaaaaaaacaaaaaaaaaaaaccccaaacacaacaggagcaaactccaaacggctgctgaccaaccacagatgcaaaacccggctctgagaaaaagaaaaacccgcctcaaataaaaaaaactagggctggaggctacaaca

SEQ ID NO: 19092 - DNA, 509 bp, Oryza sativa
  Clone ID: uC-osflcyp044c02b1
aacatacttttctcactcccactaccatggatccttggggttcctttccgtcgagctcgttcgacacgaagacgacgacgacgaacgcgggagctccggtgtggaacgacaacgaggcgctgacagtggggcccagggggccgatcctcctcgaggactaccacctgatcgagaaggtggcgcacttcgcccgggagcgcatcccggagcgcgtggtccacgcccgcggcgcctccgccaagggcttcttcgagtgcacccacgacgtcaccgacatcacctgcgccgacttcctccggtccccgggcgcccagacccccgtcatcgtccgcttctccaccgtcatccacgagcgcggcagcccggagacgatccgcgacccgcgcgggttcgccgtcaagttctacacccgcgagggcaactgggacctcctcggcaacaacttccccgtcttcttcatccgcgacggcatcaagttccccgacgtcatccacgccttcaagcccaac

SEQ ID NO: 19093 - DNA, 300 bp, Oryza sativa
  unsure (1)..(300): unsure at all n locations
  Clone ID: uC-osflcyp044c09b1
cttcctacgtgactcgcgtgttccgccagaacggggggctttttacacaccccggggggcactacaaggcacnacatggccatcaacgtcttccacctcacccacctggcccgccacccacccgatcccaaaacaaccgacgaggccgacacctaagacccccacccacagactcccgttggaccaggagcggttgccgggcctttgctacacagaaggcgactccgacggctcgccgatgcatcggaaggccctgccccctggggagccccgtcaacccgaacccctgcagccgtggcc

SEQ ID NO: 19094 - DNA, 424 bp, Oryza sativa
  Clone ID: uC-osflcyp044c10b1
gtagtattcgccgctgagccgcgttctccattgaagcgaagctcccccaggccttgtggttctccccctgctcctagagctctcgctggtgcggggagcgaagtggagaggagaggccgagagggacgagagatcgagagggagagggagcaccgaagcagtgggcggtagcatgcggacttggctgcgcactatctataatgttcttttgctacttccacatgaggttatgactagaccactgtatgcactaccaggcaagagtaatggaatagagaagagacccttacaaacttttcgaccatataacatggctcaccgcggctcacatggggaaattgctgatgaaacagctgctgctgacctgagggctattgaagaaggtgcggattatatagaaacggacatccgtgctagcaaagat

SEQ ID NO: 19095 - DNA, 518 bp, Oryza sativa
  Clone ID: uC-osflcyp044c11b1
gggttgctcaccaacccaagaacaagaagtgatcggggatggctcccaagaaggtgctcctgctctgcggagactacatggaggactacgaggccatggttccgttccaagcgctgcaagcgtacggggtgtccgtggatgctgcctgccccggcaagaaggccggcgactcgtgccgcaccgccgtccatcaggggattggccaccagacatatgctgagtcaaggggccacaatttcgcacttaatgcttcgtttgatgaggttaatatcaatgaatatgatggcttggtaattcctggaggccgtgcaccagagtatctcgccatggatgaaaaggttcttgatttagtaaggaaattctctgatgcgaagaaacctattgcatcagtttgccatggacagttgattttggcagcagctggagtagtccagaaccgtaaatgcaccgcatatcctgctgttaaaccagttttggttgctgctggtgctaagtgggaagaagctgatactatggac

SEQ ID NO: 19096 - DNA, 407 bp, Oryza sativa
  Clone ID: uC-osflcyp044d08b1
gtcttatatcccacattcaatttcgttggccgggtggttggtcctagaggaaattgtttgaagcgagtggaagcaaccaccgactgccgtgtgcttataagaggttggggaagcattaaagatccagctcgggaggacatgatgcgagggaaaccaggttatgaacatttgaatgaacccctgcacatattggttgaggcagaactgcctgttgaaattattgatacccgtctgatccaagcccgtgatatccttgaagatctgctgaagcctggggacgagtctcaggacttcttcaagaagcaggagctccgggaactcgccatgctcaatggcaccctccgtgaagaatggatgcatagatctggctcagcttggcctttccacaacaaggcttggaatgaaaa

SEQ ID NO: 19097 - DNA, 503 bp, Oryza sativa
  Clone ID: uC-osflcyp044e01b1
aacggttcaacaaatgatgtctatcctggctgaggggggcatagtcctggcttggtagcacaatttgtacagcaaaacgaaaacagcagaagaagaatagttgctagtaacaaaaagaggaggctaccaggcatgatggatcccggactatgaagtgcttcatgggatggacaaatagtaaaatatcaacctatgatcaatgaagcagccaaagcgatgctaaggaagatcctaaagctagattcttcacatagatttgaatgcatgggcaattcagataatttccttcttgagaattatatgccaaatggtcaaggtgttgacagctcttcatcaactcggaattctggtgttacccttgcagaggtgccagctaactcaggtttgccatatgtagctacaagctctggactttcagctatttgttcaacttcgactcctcagattcagtgcccagttgttttggacaacggcatacccaaagaagttccaaacatgagtgc

SEQ ID NO: 19098 - DNA, 512 bp, Oryza sativa
  Clone ID: uC-osflcyp044e11b1
tgaggctggtggagtaactgcaaaagagcaaggacatccacccaatccggcaaagcatcttaagcaaacagttagtgatatcagacatgatgtccagtcccagatcaagcaaactaaacagaccaagatgcaagtccagaaaatcaagaagagactcgaaaaactccacattggtggtctaaacaatgccatcaactccaatactgtggttgcagtgcttattgccaccgtcgcctttgctgccattttcaccgttcctggcaattttgtggaagatatcactcaggcacctccaggcatgtccttggggcaggcatatgtagcaagcaacccggccttcctagtatttttggtctttgatgccttggctctcttcatctcacttgctgtcgtcgtcgtccagacctcgctaattgttgttgagcagaaagccaagagaaggatggtctttgtgatgaacaagctgatgtggctggcatgcctctatatctacgtggccttcatagcactaa

SEQ ID NO: 19099 - DNA, 511 bp, Oryza sativa
  Clone ID: uC-osflcyp044f02b1
ggtgttctgtgccggcctacttcaacgactcgcagaggcaggccaccaaggacgccggtgtcattgccggcctcaacgtgatgcgcatcatcaacgagcccaccgccgcggccatcgcctacggtcttgacaagaaggccaccagctccggcgagaagaacgtgctcatcttcgatcttggcggtggcacgttcgatgtgtcgctgctcaccattgaggagggcattttcgaggtgaaggccactgctggtgacactcaccttggtggtgaggacttcgacaaccgcatggtgaaccatttcgtcctggagttcaagcgcaagaacaagaaggacatcagcggcaacccgcgtgctctgcgccggctgcgcacggcctgcgagcgcgccaagcgcacgctgtcgtcgaccgcacagaccaccattgagatcgactccctggacgagggcatcgacttctactcgaccatcaccagggctcgcttcgaggagctcaacatggacctgttcgc

SEQ ID NO: 19100 - DNA, 508 bp, Oryza sativa
  Clone ID: uC-osflcyp044f06b1
atgattacatttttcagactgtatgtcctggtgagagggcatttaaatacaactttggtgctgaattgattggtgaggagagtacatatgtatcagctgatgaatttgagccactgcccatcaagattagtgcaaaaaagatgggaaatgtctcacgtttcatgaaccatagttgttccccgaatgttttctggcagccagttcagcatgaccatggagatgacagccacccacatatcatgttctttgcactgaagcacattcctcccatgacagaactgacttttgactatggtgttgctggatctgagtcttcaggttctcgtagaactaagaactgcttttgtggatcatcaaactgccggggagtattctaattgatggatgtatcttcattgtgttggatcaacacacaaacctatttgccagaacttcctgcctgtacccccagattcgagctctggtattattccctgagaatgacgatgggtttcaacatgaactgtga

SEQ ID NO: 19101 - DNA, 521 bp, Oryza sativa
  Clone ID: uC-osflcyp044f08b1
gtctcatagcatttctgcttcaaggaaacgaaaccaggggttttgaatctttggcacgtacgtttgttatctctggagctgtagttgctgctgatgtattgctcaagactatatatgtttttgggtttggtgtctctttgttcattgatgttgaccaaggaactggtgggaagtggggcctatggtttctacacaaattggtgcttactggtgtctatggcctgattgtgttcatgtatcactcaaggtggagagacaggttacctgcaaaaccagcatattataactatgtctgtgcgatgttactactgaatggcatatcactgtttggatgtttccttgttgcaactggagctggatttggtttatggttgtacaatctcaccagtgtatgttatcattctctgtaccttccacttttctatgtgactttcctagcagactgtttccaggaggaagatatgctcctagagaacgtttactactcagagatgaaagacgctgggttctttgatgctgac

SEQ ID NO: 19102 - DNA, 500 bp, Oryza sativa
  unsure (1)..(500): unsure at all n locations
  Clone ID: uC-osflcyp044f10b1
gctttgcccaactcgttctcttggagcacctaactcgagctgagctcccttcccgcggaattcgggtccctccctgatggcggagccggagcagcagcagcagcaggcgaatcccgacgaggtggtgctcgggcaggagaccggcggcgcgagggtggcgatcctcaaccggccgcgccagctgaacgtcatctccgatagagtggtgtatctcctcgcccagttcttggagagctgggagaaagatgaggatgccaagctggtcatcttcaagggggctggacgtgcattttccgctggtggggatctaaagatgttctatgaaggaaaatcagatgactcctgtctcgaggttgtttacaggatgtattggctntgctaccatatccacacgtataagaaaaccgcggtggctcttgttaatggacttgtcatgggtggtggtgcagccatggttgctccactgaagtttgcagttgtcacagagaatacagtcttcg

SEQ ID NO: 19103 - DNA, 482 bp, Oryza sativa
  Clone ID: uC-osflcyp044f11b1
tttccactgatctagctgtctggtaagcttgggcgggctctaagatcactgtccctactgctgtccatgaatggcaacacttaactgataagtgctatacacgatgccttgagtgactatgatgactcagatactgacccccaaggagactcacaagcttgtgtgctggacgctgctctggaggagtcaaatagcggatccaagtagtcagacatgcaaatgcacaatgagagatgatctcagctttactgaattgagcaagctctctattccactcatgctgcactgtagtggttaggcatcactgacactacatgacattctgcaggggactgatcaccgtgtagtgcctccgcacagcctctgaagacgagcagctgtggtttacaacactgcacagggcacacacttgtcactgtaggccattgcatgcactcacgaatttggcacaagcgccaaaggcagactctgttcaccctgat

SEQ ID NO: 19104 - DNA, 494 bp, Oryza sativa
  Clone ID: uC-osflcyp044g03b1
gaggtactacttctctagcttggtggacttcatgataagggacaaatgctacttttctcagcgagggcaattgaagcggcctgatcatgcagacctaagatacaaatgcagaacttatgcccgacttctgcagcacttgaagagtctggacaagagctgtttaggccccttaaggaaagcatactgtcattctcttaatttattgcttcgtcgagaggcacgtgaattcgccaatgaacttcgagcaagcacgaaagcacctaaaaatccagctgtttggcttgaaggttctaatagtggcggtcagaatggcagtagtgctgacacttcaacagtatctgatgcatattcaaagatgctaacaatatttatcccacttcttgtggatgagagttccttttttgcacattttatgtgctttgaagtacctgcccttgttccagctggtgctccgaatgctaaaagtagatcagggggaaatgacccagatgatg

SEQ ID NO: 19105 - DNA, 503 bp, Oryza sativa
  Clone ID: uC-osflcyp044h03b1
ggccttgtctacaccgacctcacctccggcgtgcggggcgacttgaaccgcttcgggggcaacctcccggcgttccaccaggtgctggtgttcgtctgcgtcaagtcggtgccggtgccgtacgtgttccccgccgagcgctacctcatcggccgcgtcggcccgccgggccaccgctcctaccggtgcatcgtgcgctacggctaccgcgacgtgcaccaggacgtggactcgttcgagacggagctcgtcgagagcctcgccaccttcatcaagctcgacgcctcgtaccggtgcagcgacgcgagcggcggcggcggcgatcacgaaccggaggaggagcggggggcgcggctcgccgtgatcgggagcagccacgccagctacgacatccaggacagcgtccagcactcgtcggcggcgtccgtggagactacgacgactcgccgacgaagcggcggcggcgactacgacgggagccccggcggcggcggcgggcgggc

SEQ ID NO: 19106 - DNA, 500 bp, Oryza sativa
  Clone ID: uC-osflcyp044h04b1
cacctccaccgaccgcgtccggtccatctccactggggggacactgatactccttgggcgtgcccgcgccgccgcctcccctccgccgagacacccaactgtataccagcagcagccatcctcgcgcgcgcgcgcggcgtcggcgatggcgggcggctcaacctcctcctcctcgtcgtggggccccagcccggctctggtgaccgcggtggtggcgctgctggggctcggcctcgccgcctacatcgtcggcccgcagctctactggcacgccagcgaggcgctcggccgctccagggggcgtgtcccgcgtgcgactgcgactgcgacgcccgcccgctgctcgcgctccccgaagactgttccaaacaattcaaggatgttaagagccgtgcgtctggtgaagaaacagagaagagtttcacggagctactcatagaagaactgaagcagagagaagaagaggcaacacaagctcagcagcaagcagatgtaaaatt

SEQ ID NO: 19107 - DNA, 513 bp, Oryza sativa
  Clone ID: uC-osflcyp044h06b1
atcgtttcgcatcgcacacacggcggaagcaacgccacgagcctgtcgtacgtacggcagggatggccatcgccaccgagtcgcagcaggcgcaggtgcaagccgccgccaccgacgccgtcgcggcggcggcggtcgggcgcaaggtggtggacgaggtgtccggctggctgcgcgtgttcgacgacggcaccgtcgaccgcacgtggacgggtccccccgaggcgctcccgctgatgcagccggtgcccgcctacgccgagccgcgcgacggccacacgctgcacgacctccccggcgagcccaacctccgtgtgtacctccccgaggtcgccctcgccgggcggcgcctccccgtcgtcgtgcagctccacggcggcggcttctgcatctcccacccgtcctggctcatgtaccaccacttctacgcgcgcctcgcgtgcgcgctcccggccgtggtggtcgccgtcgagctgcccttggcgcccgagcgccgcctgccggcgcacatcg

SEQ ID NO: 19108 - DNA, 460 bp, Oryza sativa
  Clone ID: uC-osflcyp044h11b1
cccgtcctgttgttataacccttaaaccttcctctctagggaggggctttttgaaacaagcaggggggatggacaactcgctagtttctaactagggtcttctctcctcttcctaaccttcccactgattaacaccttagagctagttcataaccttcatcaccagtagcaatggcaggaggtttcttgtccatggctaacccggccgtcaccctctccggtggtgcaggaaacatcatctccttcctggtgttccttgcaccagtggccacgttcttgcaggtgtacaagaagaagtcgaccggagggtacacctcggtgccgtacgtggtggcgctcttcacctcggtgctgtggatcttctacgcgctggtgaagaccaactcgaggccggtgctgaccatcaacgccttctgctgcggcgtcaaagcctcctacatcgtcctctacctcgtctacg

SEQ ID NO: 19109 - DNA, 503 bp, Oryza sativa
  Clone ID: uC-osflcyp045a04b1
atcattgcaacaaaactttccaccttgatcctttcaccagcatcacttgctaaaagacacagttccagatagcgagtttgaggttacagatccaagaaataaccttctatttggggtgaatattgatggtcaactgggtttaccacttaatgcagacctgcttgcgaatgacattggaaccgataaatacatggatcagttgccaggaaatggcatttctaacttcatttcatcaaaggattctcaacacgagttatcatctttaatgatttcacattcatttggagttgctgatatggcattcaattctatagattctgcaatcaatgataccccattcttaaatagaaattcccggtctgcagcaagtcctggacatcaacggatgagaacctacaccaaggtacacaagcgtggtgcagtgggaagatcaattgacatcaatcgatattctggatatgatgagctgaaacatgacgttgctcggatgttcggattgaggg

SEQ ID NO: 19110 - DNA, 553 bp, Oryza sativa
  Clone ID: uC-osflcyp045b02b1
tgtttggttagggagcttcagtacgtagaaagaattttttcttcaagtgatgatgcatggggaaagagagtcagggactttgtaaaacagatgataattaaactggaaaacagggcctatcatcctgaagtagtgaaatatatcatggcgttcttttctgatgacaattctaacgctggtagtggtacatcagtaccactgaagggcattccatgcaacattgctgaaagaatagatgggattcctagttcaagtcgaaaggcaccatcatggctaccatcggtgaccctggagggagttccatttttagaaaaacaaggagtaatttcaaccaccgggagcccattaacgcttagaaaatttggcggaactgacttccagacagttgataataagcctactgttgatgaactggatgccctaatcaggttaaagcaggcttgagcaaatatgtaccagcaacgtgcctatgatgcacgcaaagaagctgagacttttaaacacgtcaccattgttaaacatgcacaaatagaggaacattatgctacttaaa

SEQ ID NO: 19111 - DNA, 546 bp, Oryza sativa
  Clone ID: uC-osflcyp045b04b1
ttccactcgcgctccgcctctctctctctctccatcgatccaagccccccccgccgcgcgcagatccccctcgccgactcgccaccgggtgggccatggcggaccagctcaccgacgaccagatcgccgagttcaaggaggccttcagcctcttcgacaaggacggcgacggctgcatcaccaccaaggagcttggaactgtgatgcgctcattagggcagaaccccactgaggctgagcttcaggacatgatcaacgaggtggatgctgatggaaatggaacgattgactttcctgagtttctcaacctgatggcacgcaagatgaaggacactgattctgaggaggagctcaaggaagccttccgtgtatttgacaaggaccagaatggcttcatctcggcagctgaactccgtcatgtcatgaccaaccttggtgagaagcttacagacgaggaggtggacgagatgatccgtgaggctgatgtcgatggtgatggccagatcaattacgaagaattcgtgaaggtgatgatggccaagtgag

SEQ ID NO: 19112 - DNA, 457 bp, Oryza sativa
  Clone ID: uC-osflcyp045c01b1
ttgtacccacgcaagaagggtgccactgactccgattccgaagtcgatttcgaccgcaagagggtctccaagggcggcaggggcagcggtgcaccacgcgggaggccacgcgggaggcctaggaaaaacaatgctgggaggcctgcacacctcaaggacgaggacgaggtgatccaagaaacagtggagtatcaatatcccccagccgctgacatgtttctacagcttacatccggtgctgctgatccattcaacttcaagggctatgactctgtgcctgtcattcttagcttcttctcaaaatacaaggactcagaagtgccggccacatacgacgacaaggagctgctgcagacattgggtggcaagaaaggtagaaaaaatacggccagaagcttgtacccagcttgcaaagaagaaagtgacttagaggtggcggatggccataggggtcgga

SEQ ID NO: 19113 - DNA, 257 bp, Oryza sativa
  Clone ID: uC-osflcyp045c03b1
ttttactggcgagacggcagggccggggcggagcgactgcggaaagcttatgtaagtcacaacatagacgaaggacgcaagccttctttccttgactctgtgacatgctcgaccatgcacgccatgcatacactcgtgttgcgccttgccgtgctgacagccatctttattattggtcaagaacaagaccgtggagctggagcgcccaagcacccgcataccctaggcgcatgcggacacgctatactggcgcggcg

SEQ ID NO: 19114 - DNA, 485 bp, Oryza sativa
  unsure (1)..(485): unsure at all n locations
  Clone ID: uC-osflcyp045c06b1
tatgatctcaatgcttgaacagaaaaatgaagacctttgcagggaactgtatgaccttcgcaaccatggttacactgatccttgtgaacctgaactgcaaaaaattggaactggttacactaaaggtgaagggctcaaaagaagcttgcaaagtacagaaccatttgatgtccccatgactgactcagtaagaggcagccctaaagatattgatgatgaagtggccaaagaatgggaacacacaatgctgcaggatagcatgggcaaagagttgaatgaattaaacagacaactggagcaaaaggagtctgagatgaaaatgtactggatctgacactgttgcacttaaacaacacttcggaaagaaactnttggagcttgaagaagagaaaagagctgtacagcaagaaagggacagattgttagcttgaagtgaaagtctaaatgctgatggacaacacacaagttgcgagatgcccagctgc

SEQ ID NO: 19115 - DNA, 529 bp, Oryza sativa
  Clone ID: uC-osflcyp045d03b1
ttattggcaaccatacatatgttccagtctctcagaagggatattggcagtttgagatgggcgatgtcctgattggaggaaagaccacaggattttgtgctagcggttgttcagctatagcagactctggaacatcattgcttgctggccccacagccataatcactgaaatcaatgagaagatcggtgctactggggtagtcagccaagaatgcaagacagttgtttctcaatatggacaacagatcctagatctgttgcttgctgagacacagccatcaaaaatctgctctcaggttggtctgtgtacttttgatgggaagcatggtgttagtgctggaattaagagtgtagtagatgatgaagctggggaatcgaatggtctccaaagcggtcccatgtgcaatgcctgtgagatggctgttgtatggatgcagaaccaacttgcacagaacaagactcaggatctcatcttgaactacattaatcagctctgtgacaagctcccaagtccaatgggagaatcatc

SEQ ID NO: 19116 - DNA, 164 bp, Oryza sativa
  Clone ID: uC-osflcyp045d05b1
gtaataaaggaacgagcgctcaacacgcggggggttttttaaaagaaagtgcgtttggaccgacagcaacaagggaagagctgacgtgtgcagactcgtatattggtgcgcgtaaaccaagaggcatttcaccaaggagggacatcacttgaaacaacagtgtc

SEQ ID NO: 19117 - DNA, 544 bp, Oryza sativa
  Clone ID: uC-osflcyp045d06b1
ttttaagttactggagaaagtgcaaaatgaattgcttgcacaatatgcaactcccctgttggagaaggagcattctgggtgttttgcattgcttcgtgatgacaaggaggaagacctttctaggatgtacaggctcttctccaaaattaaccgcggtctagaacctattgctaacatgtttaaaacgcatgttacaaatgagggcacagccttggtcaagcaagcagaagattctgctagtaataagaagcccgagaaaaaggacatggttggtatgcaggaacaggtttttgtctggaaaatcattgagctccatgacaagtatgtagcttatgtcacagaatgtttccagggtcacaccctctttcataaggcccttaaagaagcattcgaggtcttctgtaaaagggtgtctctggcagttcaagtgctgaactgcttgccaccttctgtgacaatattctgaagaaaggttgcagtgaaaagctcagtgatgaagccatcgaagatgctcttgagaagtggtgcgattgcttgcatacat

SEQ ID NO: 19118 - DNA, 424 bp, Oryza sativa
  Clone ID: uC-osflcyp045e03b1
gtccttccgctcgggggggggcgggaaagcatggcggcgccggatgttgagtaccgctgcttcgtcggcggcctcgcctgggccaccgacgaccgctccctcgaagccgccttctccacctacggcgagatcctcgagtccaagatcatcaacgatcgggagacggggaggtcgcgcgggttcgggttcgtgacgttctcgagcgagcaggccatgcgcgacgccatcgaggggatgaacggcaaggaactccaccgccgtgacatcaccgtcaacgaggcccagtcgcgccgctccggaagcggaagccgcggtggctactgccagcgcggcggaggcggaagctacagcggcggccgctaccgtgtgtagtggagcggccagttgctacggtcagacccgtgaaagccgctactgcggtggc

SEQ ID NO: 19119 - DNA, 553 bp, Oryza sativa
  unsure (1)..(553): unsure at all n locations
  Clone ID: uC-osflcyp045e10b1
tccgccgcctcactcaactgctgccgcaccggagccgaggtcgtccccagccgcccccgacggcgaggtccttcctcgccgccgccgcactccacctaccgcagcctgtccccgacggcgaggttgtggttcccccgtccaccggaccgccgcgactgcccccgatggcgagatcctttcctgccgccgccgcactccaccgcagtctggaatcaccggcgccgaggtggttccccttccaccgcacccgtccgggactgccccccacagcgcctaggtggaagtggaatgcctttccgtgctttcattccacgacttcttcaccggcttcctcgccgacgcctaccttctgcccgccatcctgaggtcttccttgattctcatccacaaggttttgatatgccggttgggatcagatataatgctttcgttgatatattctgagatactgaagatgctacggntatacggcttactggaattcagtttggatattttttatctacgtgatctcaacagtctgcttaggggcaacacaagagctaggtgggcg

SEQ ID NO: 19120 - DNA, 554 bp, Oryza sativa
  Clone ID: uC-osflcyp045f10b1
ttcggacgcgtgggctttcatctgcatctattcagttgcagattgagagccaaagacattatcttgattctatcaggagggttgtgctagcgaattcttgttagcaacaaattgacatattgctcggcacatccccaccgagaataccaagatgacgttctctggtacacaggacaagtgcaatgcttgtgacaagaccgtgcatttcattgatctccttaccgcggacagtattccctaccacaagtcttgcttcagatgcagccactgcaaaggcacactttcgatgtgcagctattcgtccatggatggggttctttactgcaagacccattttgagcagctattcaaggaaacaggcaccttcaagaagaacttcccctcaggtacaaaggcaaacagtgaacaggctaagattcccagcaagctgtcctctgtgttctgtggaacccaggacaagtgtactgcctgcaagaagactgtgtatccattggagaagatgaccatggagggtgagtgttaccacaggacctgcttcaagtgcgcacatggcg

SEQ ID NO: 19121 - DNA, 166 bp, Oryza sativa
  Clone ID: uC-osflcyp045f11b1
tcgtaaaaaaaaaaaaaaaaaaaaaaaaaaaaaaaaaaaaaaaaaaaaaaaaaaaaaaaaaaaaaaaaaaaaaaaaaaatacaaaggggggggtcgtttttaggggccccaggtttccgtcccctgcctgccattttataactttttttttgggacaacctagttt

SEQ ID NO: 19122 - DNA, 292 bp, Oryza sativa
  unsure (1)..(292): unsure at all n locations
  Clone ID: uC-osflcyp045g04b1
cccttttagacccgcacccaccgccccccgaaaggggagctttcaaaaaaccctgcccaagaaaccacccaaagnccatacagacacaaaagcgacgaaaccaccgcccgcacagacaaccggcaccgccacaaaaaaggacgcgacgcaccaccacaaaaaatgaaacacgagcaacaaaacggacccaccatgccggacgcacacagagaggagaccagcccacccaagaagcacaagctaacaaagaaaaaaaacctccgaagccagcgcaagaggaaaaacaaccaag

SEQ ID NO: 19123 - DNA, 217 bp, Oryza sativa
  Clone ID: uC-osflcyp045g06b1
ggatttttgacaaaggaacgcaggacaataccacgacacaatcaggaggggagagcaaacaaaaactagcgaaaaacaaacaggcataaagctcggcacatgcacaccgagaataccaagaagacgggcactgggacaaaagaaaagggcaatgctagtgacaagaccgagcattggaaagaacaccttaccgcggacagtagaccataccacaagg

SEQ ID NO: 19124 - DNA, 551 bp, Oryza sativa
  unsure (1)..(551): unsure at all n locations
  Clone ID: uC-osflcyp045g07b1
tcttggagcgtaaacgggagcgctgccaagcctccgccccatcggcggaaggcgtcttctgtggaggatgaagcttgggagctcttgcgggagtccgtggtttactattgtggtagtccggtcgggacgattgctgccaacgacccgaatgatgccaatccgatgaattatgatcaggtgtttattcgggatttcataccatctggcatcgcgtttctattgaagggagagtacgaaattgtgcgcaatttcattttgcacacccttcagcttcagagctgggagaagacaatggactgccatagtccaggacagggcttaatgcctgctagcttcaaggtgcgaacaattccactcgatggagatgaagatgcaactgaggaggtcttggatcctgattttggggaggcagcaataggccgtgtggcacctgttgattcaggtctatggtggatcatattacttagggcatatggaaagtgttcaggagatctgacagttcaggagagaatngatgttcagactggnnataaatgatataaagcttgttt

SEQ ID NO: 19125 - DNA, 448 bp, Oryza sativa
  Clone ID: uC-osflcyp045g08b1
ggatgaatgggactggcatggaggtctcctaattgtgatcattttcttctagctagctttattaatcaattagccatggcggaggagaagcaccaccaccacctgttccaccacaagaaggacgacgagtctgccatcgtagtagactcctacggcgagggcgtctacacgtcggagacggtgaccaccgaggtggtcgccggcggccaggacatgctctagagtgccaagaaggagtagaagctgcacaagcacaggcagcacctcggcgaggccagcgccctcgccgccggcgccttcgccctgtatgagaagcacgaggcgaagaaggacccggataacgcgcgcaggcacaagatcactgaggagatcgcggccacggcggcggtcggcgcccgcggttacgctcttcacgagcaccacgagaagaagaatgaccacaagagcg

SEQ ID NO: 19126 - DNA, 204 bp, Oryza sativa
  Clone ID: uC-osflcyp046a01b1
gtatatctatccacagggaaggcatgggagagatctgatgttattgggtgcgggatcatgcctcttgagcttgcgactggacagacagccataaagttgtcacgcttggaggaagaggacaatgttctattgctcgatcatgtacagaagctacacacagaggggaatcttggaccgattgtgtacactaacctgaaccatgca

SEQ ID NO: 19127 - DNA, 321 bp, Oryza sativa
  Clone ID: uC-osflcyp046a02b1
acgtgttctttccgggggatggcgagcggccacggggcagcttaaaccgagttgatgcgcgacggcaccacccacctgtccgccttcatacgctggctgggccaggactacatgtttgcgaaggaatctgttgcgtttctagctagagtactgctcaagtgttgcagacagtcatacggctcgtacatgggaataatacatcggctggcttagccttgcctcagtgatgagctgtcttggttcaagaaggaagctgaaaaatggagtggtaatctagctgaagtttctcctgtgaaatccaatacacaatactggaaggtt

SEQ ID NO: 19128 - DNA, 360 bp, Oryza sativa
  Clone ID: uC-osflcyp046a04b1
gatacgctgcgaggccgcgtcgtccgccattgtgttgttcttattgttgcacagggtcggccggccgtgcgtagtgcgtggcatgtccgtgttccccctagcagctgattgatttgatttggtttttttctttgcttgattacttccttcgatcttgccctggttggttggtggtggtggtgggttttgctatctctgcgtgcgtgttccggccgtgtcggcggcggctagcgtgaggaggcgcggcggcggaggcggcggtgagcgaacggcgggttgccacgtgcccacgccttgcgcgcgaagctcgaggcggtgggctgggtgatggtgcggttccttcggtgccatagcctttac

SEQ ID NO: 19129 - DNA, 452 bp, Oryza sativa
  Clone ID: uC-osflcyp046a06b1
cgacccacgcatccgggagagtgatttgagagagcgcatataaatacaatgagcggggggtgcattgacactgtctttgtggtggtgctgatagccatcaacgtcctctgcttatccgcacaaggtgcaactgcagcgccagagggggaacttcataaactcaaccttgagctgccaccgccgttgccgcctgggaaggaaccctcaacggaggcgtaccggttcacccaacaagtctgcgattttggaactagcaccttcacggaacagatgatcggtgcccgctgctacgatgtactcatcccgtatggcgagtcattcaagggcaaccaagtgaaggccactcatgtggccaccatcatcttagtcaccaagatccaagccctcactagtgaggcgtacgcgataagagacatgggcatcatggacgaaaacattaataactgcgggtc

SEQ ID NO: 19130 - DNA, 334 bp, Oryza sativa
  Clone ID: uC-osflcyp046a10b1
ccacgcctcttgccaccccatggggtggttttaattaaaaatcaggggttggtcacacaccccacaaccttcttgatgaccaaggatccaaatgatggtacagagaaggcacttcttactgaactgcaggcactccaggagcatctgaaagctcatgggccctttatcaacgggcagaacatttaatctgctgaccttagcctggcaccaaagctctaccatctccaggttgctctggagcatttcaaaggctggaagatccccgaagacctaaccaatgttcatgcttacacagaggctctgtttagccccgaatctttcattaagactaatg

SEQ ID NO: 19131 - DNA, 291 bp, Oryza sativa
  Clone ID: uC-osflcyp046a12b1
ggagagtgatttgagagagcgcatataaatacaatgagcggggggttcatttacactgtctttgtggtggtgctgatagccatcaacgtcctctgcttatccgcacaaggtgcaactgcagcgccagagtgggaacttcataaactcaaccttgagctgccagcgacctagccgcctgggaaagaactctcagctactacgcaccgttctcccgatgaggctggcacttcacctccaagggatctggtgcagcagaagcagcagcccggtgactgccagaccacaacccgg

SEQ ID NO: 19132 - DNA, 57 bp, Oryza sativa
  Clone ID: uC-osflcyp046b01b1
ctccctccctcccaaatcacatccaggggggggcttaaaaaaaaacggggggggggt

SEQ ID NO: 19133 - DNA, 184 bp, Oryza sativa
  Clone ID: uC-osflcyp046b02b1
acccccggacccacccacccggccgaattttttctagcgcccgacaaaggagaaacaccggggggggctttattaaaatcgcggggggcgacaaaaaccgacaaggtgcaagaggacgccgggcacaaaacaagggaggaggacaacaacaagccccccacaaacagagagcgccaatcaaggg

SEQ ID NO: 19134 - DNA, 558 bp, Oryza sativa
  Clone ID: uC-osflcyp046b06b1
gggccgcccctgaataaccggcttgatccacgcacccgagcccgtgcatctccacagcattagccatcaacgaccaggatggcatctttgctcgccttctggaagcttctgctgccatggcggaccagctctccgaagagcagattggagagttcagggaggccttcagcctcttcgacaaggacggcgacggttctatcaccaccaaggagctaggaaccgtgatgcgaagtctagggcagaacccaacggaggcggagctgcaggacatgatcagcgaggtggacacggacagcaacggcaacatcgaattcaaggagttcctgggcctgatggcgcgcaagctgagggacaaggactccgaggaggagctgaaggaggcattccgcgtcttcgacaaggaccagaacggtttcatctctgccaccgagctccgccacgtgatggccaacatcggggagcggctcaccgactaggaggtctgcgagatgatcagcgaggccgacgtccacggccacgggcagataaactacaaggagttcgtcaagtgcatgatgg

SEQ ID NO: 19135 - DNA, 371 bp, Oryza sativa
  Clone ID: uC-osflcyp046b08b1
cttacagttggacatgacgtgacagaggtgggggatgtacgaatatcgcgggctcgatgacaacagacacggcgcaagaggcgtgactgatcaaaacaactgatgaggaacttacagagtccaacacctacagtgacctccaatcaggctagatcccatgtggctgaagatagcacattccaaggacgacagcccggctggtctcattggcctcattgcttatgaagcatcagtaagagtgccaacacctcgaactgtgtcaaagcatatggcctttgcaataatgctgtcatggaaaaaggtcattcgcgacagcaagcatgctagcctggcaagtgtatggagtacttgtgcagccaactgctcgggtg

SEQ ID NO: 19136 - DNA, 494 bp, Oryza sativa
  Clone ID: uC-osflcyp046b10b1
gcagattgagagccaaagacattgtcttgattctatcaggagggttgtgctagcgaattcttgttagcaacaaattgacatattgctcggcacatccccaccgagaataccaagatgacgttctctggtacacaggacaagtgcaatgcttgtgacaagaccgtgcatttcattgatctccttaccgcggacagtattccctaccacaagtcttgcttcagatgcagccactgcaaaggcacactttcgatgtgcagctattcgtccatggatggggttctttactgcaagaccccatttgagcaagctattcaaggaaacaggcaccttcaagaagaactttccctcaggtacaaaggcaaacagtgaacaggctaagatttccagcaagctgtcctctgtgttctgtggaacccaagacaagtgtactgcctgcaagaagactgtgtatccattggagaagatgaccatggagggtgagttgtaccacagga

SEQ ID NO: 19137 - DNA, 396 bp, Oryza sativa
  Clone ID: uC-osflcyp046c02b1
ctgtacttgtgggctcctagaatgcccacgcgatgggcggagatttttttaattcacggaggcgataaccaaaagaggaggataatggcgtatctttaaatattttgaactcccttatcaatgatagcatctatcttcttgttgagagttcgaacaaaatctcttttctgctataaatatcggcctaaatggcaaccacatcacgactctcgaagacacccccttccttagccatgtcggatcgactgaacttgctgcccttggaatatccatttttatcttcaatctggtatgcaagctgctcaatgtgccattgctcaatgtcaccacatcctttgttgccgaacagcatgtcaattgatgcagctgaaatcctcgcataggaaatgaaatttc

SEQ ID NO: 19138 - DNA, 484 bp, Oryza sativa
  Clone ID: uC-osflcyp046c04b1
acccacgcgtgcgagacgatctttatcacgcgcccacagaaactgcagattaagcgggagatattgtagatagcgcgaggttattaaggccagcagtctgaccgcgcgcggcatgcccttctgctgctgcaaccgaccaaatggctcctgcggttgcctcctccccgtcactcgtgctctccgccgccgacgccaccgccttcaacaagcgcccggccgattccgacgcctcgccgtcgcaccagggagatcgcacggggcagcaggagaagaagcagcagcagctggagtgcccgcgctgtcgatccaccaacaccaagttctgctactacaacaactacagcacgtcgcagccgcgccacttctgccgcgcctgccgccgctactggacgcacgggggcacgctccgcgacgtgccggtgggcggcgcctctcgccgcgcggcggcggcaagcgccgcatggtctccgccgacgccgaccct

SEQ ID NO: 19139 - DNA, 475 bp, Oryza sativa
  unsure (1)..(475): unsure at all n locations
  Clone ID: uC-osflcyp046c05b1
gcagagttttgttttccttcaggaggtattctgcatggataaaggcaatcattgatgcatttctactgggtggaggggtttataccctactggacaggctgtttcctgcaacatcaatggtgatgtagaatgcatatcatagtcgaacaagagctgcagtacgaggatcgccattgttgaacatgcgaattatgtcagagttgaaatgtaaagtaggtaatgataaaatgctaacgaactatcatcagctcttcgtagcttacataggtatatatgatatcttagtctcagcaatctgtatagaacgagataagttttaccccccacacccacccacaaatgttatttagcttccgttgcttttaaagaatacgtggaattttgtngacccaaaaaataaatttaagtggtgaacaaaaaatataaacttaaataccttaacattaggtttaaaaaattatcaaagtcaaattcc

SEQ ID NO: 19140 - DNA, 356 bp, Oryza sativa
  Clone ID: uC-osflcyp046c12b1
acccacccacgcggccgttccttctccccttggcacatcaagggaccaagggcagggttggattcaactctaagggccgtcaacaagctactgccactaaagacccagctgccagactaaagtggctctgctaaccctacaatgcttactaagaagcaaccgcttgcataggacaacttccagtacttcccacccaaaagccctgccctaaaatggttggaaaccctaaagtgcgaccaactacataatttgcatgaactgtgcgccattgccgcagcccggaatccttgcccggacaaggctgtgccgacaacaagatagaactccatgcccccaaactcaccacaccccagtat

SEQ ID NO: 19141 - DNA, 278 bp, Oryza sativa
  Clone ID: uC-osflcyp046d01b1
cccgacccataattccctggtccccccccgcctcccattcttgctctctaacacagcttacctggggggccttatttaaaataaccggggggtacaaacccatcgacctcaccatcgtggaagagctggctagcttccgcccgacagcgcacacctgccctcgaaaccagtccgatctaacccgatgccaataggaatggactgacaacgccctctccagaaccaaaatcctctgcgacgtgacgtggcgcgccaacagggaggccctcgccatcatt

SEQ ID NO: 19142 - DNA, 486 bp, Oryza sativa
  Clone ID: uC-osflcyp046d02b1
tcccacgcgtccgtagggtttgtagtggagaaattgttgtaggaaaggtccgggggggtgatgttcattaggaggcgggtggagggaggaattggtttgatgaaggtttgatttggtagagagatgccaatcaccgcaccatttgtgcatgtaattccttcccagttgcagtgagcagcattagtggagttccatctacctagcgcaggtgagctcccccaatggttcttgagctcaaggaggatttggagttcttcattagattgattcgaggactttgggtaggattcgcgcagcatacaaaattatatcacaaagaacaggaagaagttcacataccgtttgttggtcatctatgctgaatccttttggctgcaaatctcttgccaggaaaggaggaaggcatgggtgttttgggtgtttagctataatctccaatgcaagtggatgctattgtattgacaccagtcaccgtgaattcctttt

SEQ ID NO: 19143 - DNA, 276 bp, Oryza sativa
  unsure (1)..(276): unsure at all n locations
  Clone ID: uC-osflcyp046d04b1
attgttttcatcgccaacgcgcccgtagcccccggangggatctataatgaaaccatgcggggggtcccacaaacccgaccgaccgctggccgcatgcgacgcccaccagggcgccgccacccccgccgccgcaggaaccgccgcgccgggcgtgacactcaactcgggccacccgcagccctccctgggcctcggcaccgagggcggcccccccgcggccgaccacgcggacaccaacccgcaccccggccgcctcccctacacccacctcgaca

SEQ ID NO: 19144 - DNA, 329 bp, Oryza sativa
  Clone ID: uC-osflcyp046d06b1
gcgtcggagcttttttacactaggacaccaccagaaccaccggggtgattcagatgaaggacgcgctggtcaccaacaacaggcagctcgagcagatgcacgtgctgaaggcggactcggcgcgccaccgtgacatgtgcggcttgcacgccgaccagtacgactccttgctagggtccgtcacgccggacaccgagcaggaccagatccggtcgctcaagaagtaaaacgtccacaaggactgccccagcttcaactaccactacaggggctgccagacctacaacgagagactcgagctgcagagccaagagctcaccacacgacgc

SEQ ID NO: 19145 - DNA, 416 bp, Oryza sativa
  Clone ID: uC-osflcyp046d08b1
gacagtgccgtgccaaaactccatggggtgagtttgttggatcttacggggggtgcccacaccacatccttgcttgctagctagctttgaagccagccatcaacaccatcgacacaggcatgaaagggagcggtgcaccgatgccgtctaacatgttctacgtccacgaggcggacttataccaaatccaccacttcctaggggagtgctccctgtgcagcacgaccctctccggtgacatcttgatgtacaggggagacacgccgtactgcatcgaggagtgcatgcaacaacagatctaggtggacaggacgaatcaccagctgaagaagcgagcggcggaacacgcagtgactgaacagaaggagcactggaaccaccaacaccagcactggtaccaccaccagcagccacag

SEQ ID NO: 19146 - DNA, 453 bp, Oryza sativa
  Clone ID: uC-osflcyp046d10b1
cttcgcctccgcgtccgttgctccggtcctgcctccgtctccgcctcctcgccgcggcgcggcggcgacgtccaccgccgcctagggttcgccggggagggcgccgccctcgtcgccgtcgcaggtcgcccgccgccgggtatgccactccgatctgccacccgccagctctccttcgagctcctgggggagggcggcctcgccgcggccgacgacgccgacgacgacctctccccgcgctccttccccgacaccacctccgatgggcagcggcgcccgaggcggcgctccaagcgcaagcgcgggctccggagccccccgatcgaggaggaggagaagggagggaccgccgcgccgcggcggcgtcgtcggggtgtcggatctggtgtccgtgtccgtggtggagcgcgagagcttcgacgcggagaggtcccgggcgagctgcgtgacgta

SEQ ID NO: 19147 - DNA, 484 bp, Oryza sativa
  Clone ID: uC-osflcyp046d12b1
ggaccccccgggccgcgcggactgactgccggaccgacccacgcgtacgcttttttgccctcgccgcaccggtcagacatgtgggaggttggatggaaggccaagctggtcacggcgcccaaggccgagaagaaggagcacgacgagagtgatctcgcgtatctgcagaagaagaaagatgaggaaaaggcactgaaggagcttaaggccaaggcaggacagaagggtgcactgggaggctctggtctgaagaagagcgggaagaaatgaggctgataccaatctgtaatgcctgacaaatgataaaccagctacctgtctgtgttacttcactatgtgcggatgtaacaaaactacctttaagcatgttatgcattaagcaatgttgcacgtggttgcttgatccgaagatgtttcgggctctcttctgctagctatgatacatctggtcccgtatgatgatcatataacataactcatggtg

SEQ ID NO: 19148 - DNA, 515 bp, Oryza sativa
  Clone ID: uC-osflcyp046e02b1
ttcctgcctcgtcccacccctccgccggacttctttcccgtcgggaagcctcctcctcctcatgcgtgcatcttttgactctctttgggggtccccacagctgcttccgtccgcttccgattccaagtttccaactccctccattgctcgcctcgcctcgccgcgcgctacctaaaccccgcggcgaggctttagggtacatgctagaggaggccgcgtggacggcggcgcgcatcatcatcgcgttatggggaacacgtgcggtgtcacgcttaaatccaagcacttcgccagcttccgcggcgcgtcgcagcggcatgatgaggcggggtacgcgcccgtggccaccagcgccgtcgacgacgccgacgtcgatgagccgcccgcgaagaacgccccgcgcggttctgcggaggcggcggacgcacctgacgccgcgtacatgcagcgcggagcgcccgcgcccgccgagctgacggccaacgtgctcggacaccccaccccgagcctgagcg

SEQ ID NO: 19149 - DNA, 348 bp, Oryza sativa
  Clone ID: uC-osflcyp046e03b1
attccctgttccacccacgcctcccaattattaggtagctcaccaataccacgccactgggttgggctcctttgaactcctcctgggggtcataacaaccacccccacaccagaccaatcaatctcctgctccaccttctcctcacaatgatcttgcaagtaggctcgccacttttaccaacaacttgtcatgtgtcacctccacattcatatcccaactatctttcctccctttgctgacgccaatgctacctacacttgaacagattgagcatcaaagaactaccttcatgcacgcatgcaccaacggactgcccgctacagcctacccactgtccagacattgaa

SEQ ID NO: 19150 - DNA, 514 bp, Oryza sativa
  Clone ID: uC-osflcyp046e04b1
ggggaacccccggggccggtccggacataacttgctcgacccacccacgcgttcgattaattactcttcgactgctccccgtactccaggcccagccaagctcaaatccgcgatgggtcccacctgggtcttgctcgatcgcttcgtcaagcccactatcttcgacgaagaagagagcaaaggtaagggagaatcgaccggcgccccagtgaagtaccttccagccagattaaggcaggaagtccccgccggcatgcgggacgtgaagccctacccagaggttgcggatcctcccattgtatctcgcttctccatgctgatttcgcggaaggcgatcagggtagtgaaatccgcccgtgtcgagtgcgccgacaagagccttgtcttgttctacgccggcaccggcttccccggcttctcccacggctgccacctgatctacgacgccatcgacgggtctctcactgcagtgcacacgttcccctttcctgtgtccggagacgtctgggtcggc

SEQ ID NO: 19151 - DNA, 477 bp, Oryza sativa
  Clone ID: uC-osflcyp046e06b1
gcgtaaatttcttgcacctcatcgggaggtacacgggggggttatgtgaacaccggggagcagcaacaagcagctaatcgcgcacgtacgcacaccgcgacccggggcgagatggcgcagtcgatgctggtgtcgggagccaatggcacggtggccgccgcgagcaccagcaggctgcagcccgtgcggccgacgccgttctcgcggctcgtgctgtcgcagccgtcgtcgtcactggggcgcgcggtgtccgtcaagacggtggcgctgttcggcaggtccaagaccaaggccgcgcccgcaagaaaggctgagccgaagccaaagttcaagaccgaggacgggatcttcggcacgtccggtgggatcggtttcaccaaggagaacgagctgttcgtcgggcgtgtcgccatgctcgggtttgccgcgtcgatcctgggtgaggccatcaccgggaagggaattctggcgcagctg

SEQ ID NO: 19152 - DNA, 434 bp, Oryza sativa
  Clone ID: uC-osflcyp046e10b1
gttgatccaaccttggatcagctccgacttcttgacaggtttatattaagagtcgcagaggaaattcaagaaacaagatttaacactgcaatttctgcaatgatggaatttgtgaatgctgcatacaagtgggacacccaaccaaagtcagttattgaatcctttattctgatgctttcgccttttgcaccacacatggctgaggagctatggtttcgccttgggaactcaagatcattggcccacgagcaatttccagagggaaaaagtgagtacttgaaagaatcaaagctcgtgcttccagtgcaaatcaatgggaagaccaggggtacaattcttgtcgacaaagagtgctctgaggatgatgcattccaaatagcagcctccgacgagagactctccaaatatttgactgtgaagggcatcaggaagag

SEQ ID NO: 19153 - DNA, 486 bp, Oryza sativa
  Clone ID: uC-osflcyp046e11b1
atcattttgccttgttccagaacggtattccagggcagggttcgaatggaccagggggtggaagtcatactgctaatggattttcagaagcaaggcctttgaatccttctgggcctagttcagggatgccaccaatgccacctagccagaaccaattctcagcacgtggacggatgggtgttagatcaagatacgtcgacacatttaacaagggtggtgcaagtgccactggaccgtcatataataaaccagccaccccatccatgaatccactgtctggtgccactttctttgtgccaactccagctactgttgcgtcagagcagatccctgacccaacagtcaatgttcatcaggatcaaccatcttccacgatagctctgcgggaatcctcggcttcgccaccaccatcagtacaatcaataccagttcaatcaaatattcagcggtatccaagtatggacaacatcatgaccccatctggca

SEQ ID NO: 19154 - DNA, 487 bp, Oryza sativa
  unsure (1)..(487): unsure at all n locations
  Clone ID: uC-osflcyp046f06b1
ctacggtgctttccatcggtggatatggttggatcaaagcttgacagcatttgaggttccagcggacctcttcgaatctccagacaaaatacatgaaggaggaaccgaagcagaaggcggcagcgcctggtcttgtgtacttccacatcccattgccagagttcagcagcttcacatcatccaatttcacaggagtgaagcaggagggtatcagctcgccatcgatcaactctgggttcttcgccagcatggtggaggctggggatgtgaaggccgccttcatagggcatgatcatgtgaacgacttctgtggaaagctcaatggcattcagctgtgctatgctggtggatttgggtaccatgcgtatgggaaggccgggtggtccaggagagcgagggtggtgtccctgcaacttgagaagtctgaccgcggcnagtggccaagtgtgaagtccatcaagacatgggagaggcttgatgatccaca

SEQ ID NO: 19155 - DNA, 454 bp, Oryza sativa
  unsure (1)..(454): unsure at all n locations
  Clone ID: uC-osflcyp046f07b1
ctttaatcaagaaagacaacaccaacaaactagctggctgaccaatggcctcgttggcctccttccggctcgccgtggcagtggcggcattgttggtcgtcggctcatgcgccactgaggtcaccttcaaggtcggtgagggctctagcggaaaaagtctagagctcgtcaccaacgtcgccatctctgaggtggagatcaaggagaagggcggcaaggactgggtggcgctcaaggagtcgtcgactaacacctggtcgctcaagagtgaggcggcgctcaagggccccttctccgtccgcttccttgtcaagaacggtggctaccgtgtcgtcgacgacgtcatccncgaaagctttacggccggctctgaatacaagagtggtatcaacgtctaattaatagacatgcctactcttgcattgggttgcatgataattattaacctctaaat

SEQ ID NO: 19156 - DNA, 489 bp, Oryza sativa
  Clone ID: uC-osflcyp046f10b1
cttcctcaaatccccaaatctaaccggagaaaacccggtctctttgcgccgccgccggggtgtctcgccggtacgacagccgcacgacgatcttctcgccggaggggcgtctctaccaggtggagtacgcgatggaggcgatcgggaacgccgggtcggccctcggcgtcctggcggccgacggcgtggtcctcgtcggcgagaagaaggtcacctccaagctcctccagacctcgcgctccgccgagaagatgtacaagatcgactcccacctcgcctgcgccgtcgccgggatcatgtccgacgccaacatcctcctcaacacggcgcgcctccacgcccagcgctacgccctctcctaccaggagcccatccccgtcgagcagctcgtccaatccctctgcgacaccaagcaggggtacacccagttccgcggcctccgccccttcggcgtctccttcctcttcgccggctgggacaagcaccatg

SEQ ID NO: 19157 - DNA, 515 bp, Oryza sativa
  Clone ID: uC-osflcyp046h09b1
gtatgttcaaatttttctgcgcctccggttgaaggaagccgtgatccatgtcggacgagactggccgcaccattccaaagttcggcgcatgggacgtcaacaacccggcctctgccgacggtttcacggtgatcttcagcaaagccagggatgagaagaagggccccgtcaacgtggacgccagcaccaggtcaaactctgacatgaaagactccaataacaataaggcaacagagaagatcaacccctaccaccgcaggacaaactccgcatcaaagaagtggttttgctgtgtgtcgcccagccccacccaaccttgaggaagcaaaggaataccaaatataacatgatgctgctactgccgccttgttaatgcatatagtaatgattatacacacccagttgaaaatggcccggtgttattctgtgatggttgctctgttgttgtgaggaggctggtcttgagctcctcaagcctgtctgtcagtgacaacagcgccatgtatgatttgttt

SEQ ID NO: 19158 - DNA, 422 bp, Oryza sativa
  unsure (1)..(422): unsure at all n locations
  Clone ID: uC-osflcyp047a06b1
ggtttttgtcggtggtacaacgagagcgaggccatcggtggtgctaggggagtgggggaacgcgaaggcgacgtggtacgggcagacgtacggctgctgcgcggcagacaactgctggngcgtgcgggttcaagaaggtgaaccactacccgttcatggggatgacgtcgtgcgggaaccagccgctgtacaagggcggcaagggctgcggctcctgctaccgcgtcaggtgcaatcgaaaccccgcctggtgcggcaacgcccagaccgtcgccatcaccgacatgaactacttccccctctcccagtaccacttcgaccttagcggcatcgtcttcggccgcctcgccaagcccggccgcgccgacgaccttcgtcgcgcggtgatcatcgacgtgcagttcgcgcgcgtgcccggcgag

SEQ ID NO: 19159 - DNA, 525 bp, Oryza sativa
  Clone ID: uC-osflcyp047a08b1
gtcgccctttttttttttttttattttttttttgcgaacgtaaatggaaacggatttgcagtggtctattccttccatcccaaaacaaaacaacatgggatggaatgtaatcggcgaggcgatcggcgcggacctgctgggcaacccggagctggtggcaacggacccgacggtggcgttcaagacggcgctgtggctgtggatgaccgcgcggtcgccgagccagccgtcgccgcacgccgtcgtcacggggcagtggactccgactcccgcggacagcgcggccggccgcgcgccaggctacgggctcaccacgaacatcctcaccggcgggctccagtgcgccggcggcaacggcggcgccgaccggttcgcgttctacaagcgctactgcgacgtgctcggcgtcggctacgggcccaacctggactgcttcggccaggcgccgttcgacggcggcatcatgtcggcgtctgcggcgaagtagacgtgtgcgccgccgtgccggccccgatcgatctaata

SEQ ID NO: 19160 - DNA, 523 bp, Oryza sativa
  Clone ID: uC-osflcyp047b01b1
ggctctgagcgagagggccagccacgcacgcacgcacgccaccgcgctccattggccaccccctcgccatcgccacgattaaactactctcttgctactccccctccatccatccacacactccaccatttcctcttcttcttcctccatatcacacggttttcgtccatcgatcatcagagctcgatcgggcgccatggatggggaggaggacagcgagtggatgatgatggacgttggagggaagggcgggaaggccggcggcggcggcggcgcggcggacaggaagaagcggttcagcgaggagcagatcaagtcgctggagtccatgttcgcgacgcagaccaagctggagccgaggcagaagctgcagctcgcagggagctcggcctgcagcctcgccaggtcgccatctggttccagaacaagcgcgcgcggtggaagtccaagcagctcgagcgcgagtactccggcctccgcgacgactacgacgccctcctctgcagctacgagtccctcaaga

SEQ ID NO: 19161 - DNA, 148 bp, Oryza sativa
  Clone ID: uC-osflcyp047b02b1
ttattcttgggtgttttttttattctttggccgcttttctctcattatctttttattttttttttttttaaaaccccaggccaaccccgcaaaaggaacaaggatatagcaccaaaaacccataatgggccaaagccctatcgcaccc

SEQ ID NO: 19162 - DNA, 486 bp, Oryza sativa
  unsure (1)..(486): unsure at all n locations
  Clone ID: uC-osflcyp047b04b1
gttgactcgctggaaggctaccgccgacgaacgttcatcgacgtggcgccctctcgcggcggcggcgcggcgtcgtggttcaagaagcactacccgagagggaagcgcgttgtcgacatggtgcgcctcgacgccgccgacgcgacggagccggcggcgagctcatcggcggcggggatcgccgagtggctggaagggaacgtgagggaggaggactacgtggtggtgaaggccggcgtggaggccgtggaggagatcctccgcaggcgcgccgccgtccgccgcgtcgacgagctcttcctcgactgcgacgccggcgccggcgccgacgcggcgcgccgcccctactgggagtgcctggcgctgtaccgcccggctgcgtgacaacgcggcgccgggcctaatggtgggagctcatgaatgctccaccaccttnagagagaaagaatatagagagagagagagagagagagagagagagtgaaa

SEQ ID NO: 19163 - DNA, 386 bp, Oryza sativa
  unsure (1)..(386): unsure at all n locations
  Clone ID: uC-osflcyp047c02b1
gtttcatgcatgcaaggtcacgcgcctcggtcatgtgagaaagcgcggttcctacaaggaaaggaaaggcgtttgttctgtgtaaaaagaccagaaaagagcacgtacatcgtgtggtgtagcagagcagatcgtagttcattggtaaagatggaatttggcagccaatgacgcttaaggtgaagagaatcctagtgcagtttgcgatacagttacatacacatgttctttatccatgggtaattgagtagtaggagcagaaatagctttttcataggtttataagatatggattttaggagatgaaatatgccacgcgcggcaaggcgccatgatcgcccaaagcatgcgttcatcanaaaaaaaacagaataataaaagcaaaa

SEQ ID NO: 19164 - DNA, 484 bp, Oryza sativa
  unsure (1)..(484): unsure at all n locations
  Clone ID: uC-osflcyp047c03b1
gcggttttgcgcgaaggcagaggcggcggcgtctcacggcgtaaatgtcggataagaagctcggcgccgtcacctgcaaggattaggtgatgacctgctagtacaccattaagcttgacaagcatatcagggatgcacctttaagaagaaggcgccaaatgccatcaaggaaatcaggaagttatcacataaagccatgggatcaattgatatacgcatcgaattgaagcttaacagggacatctggaccaatgatatccggagtagtccaaggctagtccgtgttagaatctctcttaagataaacgatgatgaggatgacaatgaggtacttnactttctggtcacagttgctgagatccctgcagagggtcttaaggattttggaaccaaggttgttgaggatgatgagtaaacttttcattgatatctgtcaggtagcgcttagcgcatatttccatgattccagtcactttgctgagag

SEQ ID NO: 19165 - DNA, 483 bp, Oryza sativa
  Clone ID: uC-osflcyp047c05b1
atttgtatggcagcctccttcgtcatcgtcatcgtgatctccttcttcatttctcttgcttttatgtgctatgtccactacacgagccggcagaggaggaaactccatggctacggccatgagaaagccgtcaggctgccgccgggctccatgggttggccttacatcggcgagacccttcagctctactcccaagaccccaacgtcttcttcgcctccaaacagaagaggtacggcgagatcttcaagacgcacattctgggttgcccgtgcgtgatgctggcgagcccggaggcggcgcggttcgtgctggtgacgcaggcgcacctgttcaagccgacgtacccgcggagcaaggagcggatgatcggcccgtcggcgctcttcttccaccagggcgactaccacctccgccttcgcaggctcgtccagggccctctcggccccgacgccctgcgcgcgctcgtgccggacgtcgaggcc

SEQ ID NO: 19166 - DNA, 306 bp, Oryza sativa
  Clone ID: uC-osflcyp047c09b1
gggtcgacaccacgcgtgttgtttgagggaaaggagaatcgaagcgctctcacgggctcaatgtcaaataggcgcctcggcgcactaaactcggatgctgagctgatgacctgcgagtactcctctcacgcgtgacagagcagactagggatgcacctttaagtagaacgcggcaaatgccatcaaggaaatcaggcaggcatcacatacagcaatgggatcgatggatatacgcaacgaatcgaggcttagcagggagattagcacgaaccaattccggtagaatccacggctagtcaagtgcag

SEQ ID NO: 19167 - DNA, 514 bp, Oryza sativa
  unsure (1)..(514): unsure at all n locations
  Clone ID: uC-osflcyp047c12b1
ttattgaagccccttctgctgactttgccaatcgccagccttccaaaggggttcttgagacatggtgcaatgccgatgcagtgtgttttgatgttgatagcacggtctgcttggatgagggtattgatgaactcgctgatttctgtggggctgggaaggctgttgctgagtggactgcaaaggcaatgacaggaactgttccatttgaggaggcactagctgccaggctatcgttaattaagccatctctgtcccaagttgatgactgtttagtgaagaggcctccaaggatttctcctggaattgctgacttgattaagaagctcaaagcaaataatactgaatgtattccttgtgtcaggaggttttcgacaaatgatcaagcctgtggcatctgagcttggcattcctcctgaaacatcattgcaaaccaactttttttgaacatctggaganatgctggattgatccactgacccacttacgaaggntggtaagcactacagtcaacaaa

SEQ ID NO: 19168 - DNA, 425 bp, Oryza sativa
  Clone ID: uC-osflcyp047d05b1
gttcgcgccgctactcccccctcgccgagagagctctagggtttccgctgcccaattctttttttaattcggggggagagatttgaagaggcggcaccatgttgggctaccaggaactgcttaccggtgacgagctcctgtcggattcgttcccctacagagagatcgacaacggccatcctctgcgaagtcgatggcacgtgggtcgatcaaggagctattgatgtggacattggtgccaacccatctgctgagggtggtgctgatgatgagagatgttcgatgaccaatctggcaggtggtcgacactgaggacacctcactacttcaggagcagccttcttttgacatgaagcagtttgtgaccttcatgaagcgctacatctagaacctctcactcgagctgtatgcggaaaagtctgagg

SEQ ID NO: 19169 - DNA, 503 bp, Oryza sativa
  Clone ID: uC-osflcyp047d06b1
attttatgattctccatcactaactatagctcactactacacatgttgtagattgagttccttgctgcactgcatgtaccagctagcttaaaggtaggttgttccaatatagagcaagcccggcatgcagtcacagatgatgtatgcaggtgagaggtcggcggctgcgagagagatggccatggagatgatggcaccggaccagaggcagatgggcagcagctgctctctcttgggcaggttcatatctagagtcttcaagtgcagagggcggcaaggacgcatgcggggcgagaggatggactactacggcgccacggcctaccctgccgcgcagacgtgctacgtcagcccagccgcgcccgcacgcgccgtggccttcgccaccgtcaacgccatgcgcccggagccgatgcaagcccatgccgtggcagccatgcccatgcccggcgcgactaacggcgccgtgtcacctcggtccggccgcggcaagcgcaagaaga

SEQ ID NO: 19170 - DNA, 369 bp, Oryza sativa
  Clone ID: uC-osflcyp047d07b1
tatgctagagagatttgccaaaagaaaaaagggccatttctaggcgcgggaatggaggctaccaggacggcgcctacagctacggatacggctacagtaagccggatgggaactaccacagccagagctccgagagcggtaccaccgtagtgacgaagatggacgagatgagcgtacacgagaacgccgagcagaagatgatgtcgtcgttccaggaggagaaggtgtacgagcatcagggcggccgcgccagcaacgtgcatgtgtgcactaaaggtgcggctgttgcaggcgccgtgcagaatcacacctacacgaagaatgaggaggaggtgtacgaggagagcaaccattggcgcacactgctga

SEQ ID NO: 19171 - DNA, 418 bp, Oryza sativa
  Clone ID: uC-osflcyp047d09b1
ttttgcgacccccgctccctcctcctcttcctgtgccacaacggcgcacggcagcgactcccccgcccactcctgtcctcccactggcggcgcacagcagcgactcctccactgccttctcttctaccggtgagacaaatctagcgccctctccccccccccccatacaccgttggcgtcacttgggagaagacgtggtggcggtggccgtgggaacctctcccctcgctctctcacctcctaactcggttaccccgagccctcgcagtggcgacgacctccctgagcgcccctaccctcctcggcaagcttctccaagccttatcaacatcaaccggtatttgcctattccccgccccccccccccccaaaaaagtggggtccacatgcaatatctgcgcgttaaaaggtcttttcc

SEQ ID NO: 19172 - DNA, 523 bp, Oryza sativa
  Clone ID: uC-osflcyp047e04b1
tttttggaaacaaggcacctccaatttctgatgagccaacatctcttactttgagcagggggagagactctgatgctggttatcgtggcagtaacctctcaagactgcctggttggggtcgtgcagcaaggaggcaattagcagcgattcttgacgagttctggggacatctctttgattatcatggtaagctaacgcaagaagctaatgcaggaaggttcaactttctgctaggaccatacccgaaagcagttagaagtgataaccaagccatcgaagcttctaggagccccttgatgagagatgcaatacgaggatcagctaccatacagaaatcatgggactcacgtgctaaggaagtctctagtccaggctttaattttgggcttcagatgggtcgcattggatcatcaaactggtctgagagcatgcgtttatctaatgctgacattccaaggccaactagcaccttgtttgaacaaaatactcagttttattcaaatataatgcccatcttaccctg

SEQ ID NO: 19173 - DNA, 438 bp, Oryza sativa
  Clone ID: uC-osflcyp047e05b1
ataccaagtactcgtcttctcactcgagtgatatttgcaacaaataatgggctcaacccactctttccatagctagctagcttgttgcgagcaagataaggttgcctgttcaattaccagagagcacccatgggtgtattgaccagtctatgtgatatgtgcattctgacagagaccaaggaagccttcatgctaacgaagaagcggccactgcagacggtgaacatcaaggtgaagatggactgccaggggtgcgagaggaggctgaagaacgcggtgaagtcgatgcgaggggtgactagcgtggcggtgaacccaaagcatagccggtgcacggtgaccggaaatcaggaggcgagcaaggtgctgtagctcttgaagagcaccgggaaggcggcggaaatgtggccctacgtcccgtacaccaagaccacttac

SEQ ID NO: 19174 - DNA, 524 bp, Oryza sativa
  Clone ID: uC-osflcyp047e10b1
gttattcatatcaaacagataacatcagtagtgcgcagctagatcgatcgtcacagcaacacaatcaccacgacgacgatggcggcggcggcggtggagaagaagagcgggagcgagatgacggtggtgcgggggctggacgtggcgaggtacatgggccggtggtacgagatcgcgtcgctgcccaacttcttccagccccgggacggccgggacacgcgggcgacgtacgcgctgcggcccgacggcgcgacggtggacgtgctgaacgagacgtggaccagcagcgggaagcgcgactacatcaagggcaccgcctacaaggccgacccggccagcgacgaggccaagctcaaggtcaagttctacctgccccccttcctccccgtcatccccgtcgtcggcgactactgggtgctctacgtcgacgacgactaccagtacgcgctcgtcggcgagccgcggcgcagggacctgtggatcctgtgctcgcagacgagcatggacgacgaggtgtacgggcg

SEQ ID NO: 19175 - DNA, 527 bp, Oryza sativa
  Clone ID: uC-osflcyp047e11b1
ttttggacgcggagggcggcggcggcagcagcagcaaaccgtcgctttggcagaagaggaatccgggatggccggcggcggcggcggcgggaatcgcctggacctccccgtggtggacctcgcgtcctccgacccccgagccgccgccgagtccatccgaaaggcgtgcgtggagtccggattcttctacgtggtcaaccatggggtggaggagggattgctgaagaggttgttcgcggagagctcgaagttcttcgagctgccgatggaggagaagatagcgctgcggaggaacagcaaccaccggggatacaccccgccctacgccgagaagctcgatccctcgtccaaattcgaaggagacctcaaggaaagtttctatattgggcctattggagatgaaggtttgcagaatgatgctaaccagtggccctctgaagagcgcttaccaagtcggagggagacaattaagatgtaccatgcaagtgcactgtctactggcaaaaggatactctctctaatcgctc

SEQ ID NO: 19176 - DNA, 466 bp, Oryza sativa
  Clone ID: uC-osflcyp047f10b1
ttgttggattcacctatgaagctgaggcaatcaggagttggctctgcaatggccatgacacgtctccaatgaccaacttgctacttgaacatgaggagctcattccgaatcgcgcacttgcgttctgctattcaggagtggctccagcagcacagcatgtcgctgtagccaactgccctccatgtgtgaagcaagtgagcaagtggtaccaattggcaactgtatagtatttgggtaaattcggacatccccccttctgatgcaatttcggtatgccttctttattcaggtatgtatttcgtagtagcatgtaatgtaaaggcagagttgggtaaaacctgttaacttggatagcaaggacaaaagctctatgtcggtatgcctatcactcctaagggcatcctatgcgttcttctgcctttgaacttaatcttattcaagtttgattatgttcataccaaaataa

SEQ ID NO: 19177 - DNA, 429 bp, Oryza sativa
  Clone ID: uC-osflcyp047g08b1
ctctccgcccaaaaatttccccaccggggatccctttcatggcaggacttcctttttgaatggcctgcgacgccaagcccgactccccggccgccggcgtgaacccccccgccttccacggtggacgcgaaggccgagaacgtgggggagggggaggagcctcagacgggtgggcggaagcgcgggcggaggaagaagggggaggccgagaaggaaaaggagaagcccgcccacgtcacctccaccaatgagaggccctccaaggagaggaagaccgtcgagcgctactccgagctcctcccccgtgacacccccgacaagacgtcccccgccattctccagggctctggatcgaagctgaaggacattcccaacagtcaaaccaaactatcaaaaggaaaggcagacgacaacctgccaagccttcat

SEQ ID NO: 19178 - DNA, 433 bp, Oryza sativa
  unsure (1)..(433): unsure at all n locations
  Clone ID: uC-osflcyp047g09b1
ttttaaatcaagcaagcaagaagagacgcgacgagggaaattatgaaaacagggggctttccgccggcgtcgacccgttcctccccccctctatgtcctctcctctcctcttcgactttcatcctttcttccatccattcagtccagcatccttcgcattgctcctcgtgcttcgatgacgccgatgatctccaggaaaagaagaagacgcgatctgggttgcttttcatgctgcggagcctatgatatccgcaagaacaagaagcgcgacgattcttacatcccgatccctgatccaggtggtaactatggacatagcatgcccggccaaancccccttcgcgttctccccccaccacaaaatctgccaattgcagtaccggcaatttcccttgatgaaataaagggaataaccaagaacttcagcagtgat

SEQ ID NO: 19179 - DNA, 530 bp, Oryza sativa
  Clone ID: uC-osflcyp047g10b1
tattgcccaccacctcctcctccacgccgatccgtctctcctcgtcaccgccgtgcagagatcgaaacctatcaaccatggcgaactcagcgtcggggatggccgtgggcgacgagtgcaagctcaagttccaggagctcaagtcgaagaggagcttccgcttcatcacgttcaagatcgacgagcggacgcagcaggtggtcgtggacaggctgggccagccgggcgacacctacgacgacttcaccgcctccatgcccgccagcgagtgccgctacgccgtcttcgacttcgacttcgtcaccgacgagaactgccagaagagcaagatcttcttcatctcctggtcgccggacacgtcgaaggtgaggagcaagatgctgtacgcgagctccaaggaccggttcaagagggagctggacgggatccaggtggagctgcaggcgaccgatcccagcgagatgagcatggacatcgtcaaagcgagagccctctgaattaaccaagatgttcccaagcctcccttaatc

SEQ ID NO: 19180 - DNA, 62 bp, Oryza sativa
  Clone ID: uC-osflcyp047g11b1
aataatttaagcgcagacccccgtgcaggtacacggacccggaatctcccggcgtcgacacc

SEQ ID NO: 19181 - DNA, 517 bp, Oryza sativa
  unsure (1)..(517): unsure at all n locations
  Clone ID: uC-osflcyp047g12b1
ttatcttatgtgcttgatggagtgccacgaatgagggagagaccgattggtgacttggttgtcgggttgaaacaacttggtgcggatgtcgactgtttccttggcactgaatgcccacctgttcgtgtcaagggaattggaggacttcctggtggcaaggttaagctctctggttccatcagcagtcagtacttgagtgccttgctgatggctgctcctttggcccttggggatgtggagatcgaaatcattgacaaactaatctccattccttacgttgaaatgacattgagattgatggagcgttttggtgtgaaggcagagcattctgatagttgggacagattctatattaagggagggcagaagtacaaatctcctggaaatgcctatgttgaaggtgatgcctcaagcgcgagctatttcttggctggtgctgcaatcactggaggcactgtgacagttcaaggttgtggtacgaccagtttgcanggtgatgtcaaaattgctgaggtac

SEQ ID NO: 19182 - DNA, 390 bp, Oryza sativa
  Clone ID: uC-osflcyp047h01b1
ctttgctccatctgccgccgccgccgcctccgcgcggtggatctctctctctctccggccaagctacctttgacggaggaaagttacagcgcgggccgaggagggagggcgacaacctgtacacagggcagagtccacaccggaaggtcatagagccatagagctagcaagagctgagtggggtgcgagagtaaaaaaatatctgtgcattcgattgcatcacggacatacgggaaaggatatgaggttcctggggtggtacctcaagatcgcggtaggcggcgccgccataggtgccagcatggagctctttatgatccacaccggcttttatgagaaggtaacttgtgttggaattagaaaaaagagcttgtgagaacagcccaaaag

SEQ ID NO: 19183 - DNA, 527 bp, Oryza sativa
  Clone ID: uC-osflcyp047h05b1
cctattccgggtcgatcgagagctcacgatgggggccattgtgaccgtcattagcgcgccgccgccccccgtcctcgtccccgtcggcgccggcgagggatccttcttttgtcttccggccctttcttccgtaagcccaacaagctgctttgagatcaagaagtggaacgccgtcgcgctttgggcatgggatatcgtcgtcgacaactgcgccatctgccgcaaccacattatggatctatgcatcgagtgccaggcgaaccaggccagcgccaccagtgaggagtgcactgtcgttaggggtgtctgtaatcatgcttttcacttccattgcatcagcaggtggctcaagactcgccaagtgtgcccgttagataacagtgaatgggaattttagaaatatgggcactagacaccacctgctgtctgcgcttgtttggtgccacggctgcgctacaaacacaagctcgtttatttgtccaacaggttcattgttagcttcttttgatgccttacatctttcgctg

SEQ ID NO: 19184 - DNA, 382 bp, Oryza sativa
  Clone ID: uC-osflcyp047h07b1
cctgcgggtgccggtccggtcttcccgggtcgcccgccgcgtccgatttgatgggataagcaagggtagatctggggggtttttttggaattatggcggggtgttttccccgtcttgttgtttgtatcggtgccagggtttcctccgctggctggcggcgcttctcggggggggggggcgtttttggggttcccttctttccccccggttcctcgctcttgcttcttttttttttggggccccttaatttttccggccggcccggtttttcccccgttgggcttggacatccctgggttttccccattttgtttgctggcatatccccttttttttggctgggggggctaatggggggggggccccatcggtgcttttttcc

SEQ ID NO: 19185 - DNA, 465 bp, Oryza sativa
  Clone ID: uC-osflcyp047h10b1
tttttccgagatttccccgaagccacggggtaggggcagaaaaggaagagggagctcagtgcaattgaaggaaggaaatgcagaaacacctaaaagtggtggaggcgatcttcccaaaaaaaggggtcgtccgaaaggttccagcaatggtacacccaaaagtaacatctcggcaacttcaagcaaatcaaaggggaaagctgcaaggaaggatgacaatgagacacctaaggttggcagtgaccttaagaaggaagctgaagaaggatccgaagacaaagccactaagtcaactgagaagacaaaggatgatttgtctgaggatggtagcaacaagagtgccagtaaaccaaaggaggctagcagcggaggcaaggatttgaagggtgagagcaaaccaagtgaaggaagagccaagccaggtcgaaagccaaaggttgccgctgctgcggtggctggtgagga

SEQ ID NO: 19186 - DNA, 468 bp, Oryza sativa
  Clone ID: uC-osflcyp048a04b1
gcaagctctgtttggaacgactgtatttagcatgggctggatgggtctgtttttggactgcgatcatgttgtttcttctggcaatgttcaatgcttctaatgttattagcaggtttacaagggttgcaggagaacttttcgggatgttgatcactgttctgttcctgcaacaagctattaaaggaattatagaagaattcaaggcacctggaggtgtcgaccatagttcacctatatatcgattccagtggttgtatgtcaacggcctacttggtgtaatcttttcaattgggctgttatacactgcattaaggtcaagaagggcaaggtcatgggtgtatggtcaagggtggctcagaggcttcatttctgattatggtgtcccacttatggtgattgtttggacagcattatcgtacgcattaccaaaggatgttccttcaggagttcctaggaggctgttcagtc

SEQ ID NO: 19187 - DNA, 391 bp, Oryza sativa
  Clone ID: uC-osflcyp048a12b1
gttagttgtatccgaggaggcaagggaactgaatatcaagatgctcccagacaacattgacctgcagtgaccattgacatccgttggtgagtttgagctgcccattcgtatgcctggggatacaccacgcgcagactgcaagcctcatggggctctgacggttacgatcagatgaggatgagaacaatggcagggggtagctctgtgaccctttcaaggagtgtaatgatactgaaacgtggcgaattaccgagcaggagacttgagataaggtatgttgcacaatacgattccattctgataatggaatactgcataatcgtgagtggatacgcaaaccggctgacagacattccaggcctctatccgggaggatgaggaagcacacatc

SEQ ID NO: 19188 - DNA, 216 bp, Oryza sativa
  Clone ID: uC-osflcyp048b02b1
cacttcttgtttttcactgctgctgctgctgctcagctggtgggaatctattggcgcttgctgtccttcttcccccgaaatgtttgcgatcgattgattgatggcatcgacaagccggagcggtgggagcgccctcataacttttagagctaatacgagcaacaaaccccgactttctagagggtcgcctttattcgatttaaggctgccgctgtc

SEQ ID NO: 19189 - DNA, 599 bp, Oryza sativa
  Clone ID: uC-osflcyp048b04b1
gttggttccctatcatctgctaggttacctgaagcggggagtcggtttaattatgttgattgaccagattcccagaccaagagtagtctgatcgggaagcgttttgtaaagatactggattcaatctctggtccccctgcttttgcagcatcagagttcccagctagccttcgcaaatgcttggctcctatttctggagctcatcacaacactatccgtgtctctgctgaagtaatcagcataggaagtttaactcctgattctcaagataagtggtcccttgagaaggatgaaggcatggagctgctcttctcggcaggttttgagcctgatacccgtgtacactgtggctgcaacacaataaccgcagtactgcgtggtggcttctgcctcttcttcttttcagcaataatgctcttggtgagctacgaggtgggcatgtgcatctatggcaagtaggcctgctggtattggagacgttaagaacatgacgttaggtaatcctatctgtatttgaggcaaactagggacctcctgctgctggcttaatgtattgcactgcttgacattacatgacctccatgtgttgaacaagggct

SEQ ID NO: 19190 - DNA, 559 bp, Oryza sativa
  Clone ID: uC-osflcyp048b05b1
cagtgtcttgtaaatgtatctcaagaaaattttagctgaaaaccctggtcttccatgcttctgttttggccactcaactggtggaggcatcattttgaaggctatgcttgatccagaggtagattcttgtgttgagggcatcttcctgacatcaccagctgttcgtgttcagcctgcccatccaatcataaaggtcatggcccctgtgtttgccctcatagccccaagataccagttcacggcttcacacaggaacgggccaccggtatcacgtgacccggaagccctgaaggctaaatattcagaccagcttgtgttcaccggttccatccgagttagaacagggtacgagatcctacgcctgacgtcgtatttgcaacagcacttgcacagaatcactgtcccgatgctggtgatgcatggtgccgatgatatggtgaccgatccccatggatcacagaaactgtacgaagaagcttcatcctcggacaagtccctcaatctgtacaacggtctgcttcatgatctgctcatcgagcccgagaaggagaagatcatg

SEQ ID NO: 19191 - DNA, 457 bp, Oryza sativa
  Clone ID: uC-osflcyp048b07b1
tttaatctgtccacccatttttccctccctctccactttgtatggatccggcggaggcatgcagtttctcatgcggcggagcggcggcgatagcggttcggggcgacaagcgactgcgggcgtggcgtcggcgggcgggaggtgcggcggctccacctcctccaccgctgaacgggggcgggcgcggtggtggtgggtgactggaggctcggcgaggcggcggcggatctggtcgcagcgaggcggattctgcacagctgaaggcggtgcgatggcggatccgacttcccctacctcccacgcgggtcttgctcgggtgaaggcatgcacactgtggcttggcggctcaagatccccatggtgcttcatcggtgtcggctgaccttagtaccgcctatatattcctttgttcgtggggcgctttcggagtcttcgtcatggtcatgtctctcttctc

SEQ ID NO: 19192 - DNA, 119 bp, Oryza sativa
  Clone ID: uC-osflcyp048b08b1
ttttgttttccccgacgacgtgcggcgcggcgaggtggaggctcttatacgggaggccatggatggggagaaggggagggagatttcattggttcatatgcatcacattttactttttt

SEQ ID NO: 19193 - DNA, 294 bp, Oryza sativa
  Clone ID: uC-osflcyp048b12b1
atctcgtggggaccaagggatgtatagatggagagcccactgcccaccacgggctcgagatgatccctcacatcacgagtttactgcgagttcaacgtgcgtgagcctttggcctctctagtctcaaactggaaaattcgtgattatatgccggtttactatagtacttatctgagaactttatatttactctcggtgttgaccatgacgagaaagtgatgaggaatgacatagtccatgtcacacacctttggcgagagatacgcgtttctggctataacgaacgcatgctga

SEQ ID NO: 19194 - DNA, 567 bp, Oryza sativa
  Clone ID: uC-osflcyp048c06b1
agcactgctactggacatactctactactactagccagtaagctagctaactaactacgtggctatggcccccaccgtgatggcctcctcggccacctccgtggctccattccaagggctcaagtccaccgccggcctccccgtcagccgccgctccaccaactcgggcttcggcaacgtcagcaatggcggaaggatcaagtgcatgcaggtgtggccaattgagggcatcaagaagttcgagaccctatcgtacctgccaccactcaccgtggaggatcttttgaagcagatcgagtacctgcttcgatccaagtgggtgccttgtctcgagttcagcaaggttgggttcgtctaccgtgagaaccacaggtctcccggatactacgatggcaggtattggaccatgtggaagctgcccatgttcggctgcaccgatgccacccaggtgctcaaggagctcgaggaggccaagaaggcctaccccgatgcctttgtccgtatcatcggtttcgacacgtcaggcaggtgcaagtgattagcttcatcgcctacaagccccaggtt

SEQ ID NO: 19195 - DNA, 478 bp, Oryza sativa
  Clone ID: uC-osflcyp048c11b1
gatgatcaatcaactctgctgtctagctaggcggagagatgagattatactactttgtatcgatagacataaacaaaagaaaactacaaatcatatctttgacatgatctggcttgtctatgaggatcataggtaccactcgttgtcaagtgtcatgtaatttaagctaatttatgtctagctagtatacatacactgatcccactgtcgtttgcaaactgaccatggcatgctcaattttgcgggcagcggagaaaatcaacctcaaaatcacatgtgcagacatcagctcgtggtactacctcagatcaggttatttctgatgggtgcaaaccctcacctttaatgagtttagccctagtcagagatctctggtcactgatgattccactcatctttgacggtgacagcctatcagaggtgatagtcacatgtgacgggccagtattttccggccatcagaggtgagggtctccgc

SEQ ID NO: 19196 - DNA, 528 bp, Oryza sativa
  Clone ID: uC-osflcyp048c12b1
gtcgactgcgcaccctgtcattcaacagggggggattcgattgataccatacgagcacgaactgtgcttgccccccccgagcccagtgagagaaaaatgtgaagcagtcctgggcctccccattcagcagtactgattcatcccagtgccaacaacaatgaggaagagaagttcatcgaacgaggaacaggagaggagccagagcttgctcagcatggggtcctacgacaaggccatcgagtcatacaggaaggccatgacaaccgctgcatccgttgcagcgtctgcgatgctggtccgaagggtctggaacgagctggttccatacgaggtgcgggatgtgctggtttccggcctcggctacctgcgatgacaaagttcatctcagcacacaatcatcatggaggagactgagggctggtcccacaagcacgtctacaacgcggtgcgggcttaccttgaacacgcatcagcaacaacatgcagcgcctgcgagttagcagcatggaggaatctttcgcgaagatg

SEQ ID NO: 19197 - DNA, 133 bp, Oryza sativa
  Clone ID: uC-osflcyp048d01b1
acgcttcctttttttttacacagtaccacaccctatctgctggggggtggggcctctttaagaattgcgggcctttggcgaacgctgtactcgttcagtccatgatgctcgacccccggctcacacttccctc

SEQ ID NO: 19198 - DNA, 388 bp, Oryza sativa
  Clone ID: uC-osflcyp048d06b1
agagccatagctctctctctctctctctctctctagatatctctctctttttctctctagatctctcttttttcttgtatctctataggctgctagagcggcgacggcgagaagaggaaggagcaacaaggagtagatcatcagtatagagagcagcagcaatttgggaaggtccattattacagctctgctgtttcatctctttgaggagacgaagctagcaagcagggattgctgctcctgaatttcaaggagacgataacaatagcaaatgatgatgccatctgggctccagctcggcgtgatcgggcctcttgcgctgtcggctgcactcatcagccgccattgatatctgcaacaaagctctcatcagaacccttggcttccc

SEQ ID NO: 19199 - DNA, 363 bp, Oryza sativa
  Clone ID: uC-osflcyp048d09b1
ttttccttgagcaagaagctcatctcctcctcctgtcgcatggcagccatggccaccaccgcgtccagcctcctcaagacctccttcgctggcgcgcgcctccccgccgccgcccgcaaccccaccgtctccgtcgcgccgcgcaccggcggcgccatctgcaactccatctcgtcgtcgtcgtccactcccccctacgacctcaacgccatcaggttcagccccatcaaggagcccatcgtgtcccgcgagatgacccggcggtacatgaccgacatgatcacctacgccgacaccgacgttgtcgtcgttggcgtcggcttcttggtgctcccctgcacgttcgaggatctcaaggacccc

SEQ ID NO: 19200 - DNA, 126 bp, Oryza sativa
  Clone ID: uC-osflcyp048d12b1
ttaatggctagagtgagagagatggtggagatccgggggatcgacctgcggctgtccggcggcggaatctgctcgctagacactagctaagatgatcaactatagcgcacagttgtgacgctccct

SEQ ID NO: 19201 - DNA, 507 bp, Oryza sativa
  Clone ID: uC-osflcyp048e04b1
cggaaagaggagaaggacaaaaagaatttttagagagaggaggaaaaaaaatatccgcaatcccatgattccttcacccacccgcacgcgtctactccgactccgatccgagctccagatctgcggcgccggcgaccaacctctccgggggcgggggcggcggcggagatccacgatgccttcgtcggagcagggggcctcgcccctgcgccgtctgctgcgagtagacgccctcgttctaccctgcggttgctcccaccgccttaagccttggtctctccatgcccaccttctctcatactgctaacgccatccaatgtctctgctccccgtctctttctactgctccccgttgccctgccatttcttccccttttcttctcgtagctatagggtgatacacttctctgattattggtgctgttcttcccgtgctgatttggatttaattacaagtatttgcgttggatcggctggacgcgctcactcggcttggtttggtctgga

SEQ ID NO: 19202 - DNA, 271 bp, Oryza sativa
  Clone ID: uC-osflcyp048e05b1
cccttcagagattcataaaccggactaagccggcagtaaccaaggatcagcaacaaaaccttacaagatgggaagtcctattttcggcatcacttctgaagaacaataaagcagctcatgaagctctcatgtctgccatgtcgcagaaggccagtgtcttgggctgcatcgaagccatagagaatgcctctcgattgcaatggaacgttgaatgtcctaacacggctgaaattgatgaaaatgagaaaaatataaaagtcacgatatgacg

SEQ ID NO: 19203 - DNA, 150 bp, Oryza sativa
  Clone ID: uC-osflcyp048e09b1
cataggtaggtgagacgccgacgctgccgtaccggaccggaatggccgagcccagcgccacccgtgcgtttttattggagcgcgcgattaacaccaccctagggtctggtttgtctttccagcgacgcaggtattatacacaaaggatgg

SEQ ID NO: 19204 - DNA, 428 bp, Oryza sativa
  Clone ID: uC-osflcyp048e10b1
gtcacatctagagtgaataagacagatggctttcgtccgtgccctagttcctgctggcgattgcgtgctcggcggggcacgcgaaggactaccccacggcggaggacacgaatgcggaagggccggtcgctccccacgaaaaggcttactttgttctcattgattatttccattacgatgacgaatagcaagtgcaacctgtacgtgttatcgcccaggacaacttttagacctacatggcatgcatctccttctttgagcctgactacattcacgacgaggaaaacaaatgtgctgtgccattatcatctgaagaaagtcgaagctgtgagaactatacttactctgagcgaccacagcatgttttttgtcattcacgacaattgtcgtgatgagccttttcctgaagaaccaatttcttcctttac

SEQ ID NO: 19205 - DNA, 278 bp, Oryza sativa
  Clone ID: uC-osflcyp048e12b1
cttcttttccgactgcgacgccttgccgagcttgggcacatccggctacgccttcacccgcatgcgctaggtcttcgcgttcctggctcagacgtcgcacgagaccacggtcgggtgggcgtcggctccctatggaccttacttgtggggctactgcttcaaggaggagaacatctgcatcgttgggtgcgtctgctgtgtgcagagcttgtatctgtatgtgcgcttctgcaatggatctcttcgttttacattacggccatattatccgctgtttc

SEQ ID NO: 19206 - DNA, 68 bp, Oryza sativa
  Clone ID: uC-osflcyp048f02b1
aaaaataatattaaagaataaaagtatttacaataatataaaaaagaaagataataaaaataatagaa

SEQ ID NO: 19207 - DNA, 236 bp, Oryza sativa
  Clone ID: uC-osflcyp048f04b1
gagaactagttcgcgacctgcgattaacatgacagttcgttgtgctaagtttatgtaccgacgcaggtatgctacacaaaggagaccacgcgcaggcagcttgctggagctcggacacaccatatctggcttgtggagcaccagtatcgccataggtatagagaacggctaatacaccccggtacttacataccgtgtgtcgcgggacatcccttatgggagtcagaggacttcca

SEQ ID NO: 19208 - DNA, 458 bp, Oryza sativa
  Clone ID: uC-osflcyp048f07b1
cttaatttaataaaaaaactcgatctcttttcttctcttgtcttctcttgttgcggccaagggggagaggaaggtccaggccgaccagatggtcggcggcattgggcacaagtcgcagctggcctgggagaggaacatggcgaagaacaaggtcgccctggtgagccagctcgaggccaacatgaaggccacgaccatccagtgcaagatatgcatgcagactttcatctgcaccacctcctggaccaagtgcaaagagcctgctgctgcgatgcttcccaatagcgacctcaccgcgtgcttgcctcacctccagaaatcctggcggtggcacttttctgctcaatccgatgagaaaaagagtagcttccatattccactatgttaatctttgatgaatgactggttgccctatgtatgggtctaaacttcggccagctgccgcttgctctttggtt

SEQ ID NO: 19209 - DNA, 263 bp, Oryza sativa
  Clone ID: uC-osflcyp048f08b1
gttcctttattcgaaggttgaaggggcttattgcttgggtgtgtttcagaatggaaaagatccgacaacactattagggggaattgtggtgcgtattatttttgcattcatatgtccggttcattaagatgatgactctgggtaatcactaattcgtttagttatgtgtctgctttttctctttatttactttttatctttctcttttcatttattccattctgttctttatttcttgtctttttctttattttcatatcttc

SEQ ID NO: 19210 - DNA, 355 bp, Oryza sativa
  Clone ID: uC-osflcyp048f09b1
tgttgttttcggaaagaagagaaggaaataaagggggtagagagagaggaggaaaaaacttttccccaatcccatcatgcctttacccacccatactcgtcttctcctacttcgatccgagctccagatctgctgagccggttgccaacctttccagcggttggggctgtggcggacatccacgacgcctctcccggagcagggggcctcgcccctgcgcctgcctcattagcgttaacgccctcgatactgccgctacgtctagttcccacctgcttatgcctttgttctctccatcccacacctgcctttattctcctaacgtcatccaatcttctcttcttcccgtctaatt

SEQ ID NO: 19211 - DNA, 220 bp, Oryza sativa
  Clone ID: uC-osflcyp048g01b1
attcatttcctctccaacgaggcgacgctcaagacatgggttggggtctcttttttaaaggagttggcaggtggatccccggaccttatctggggcagagatgtgggctcgcgagagcttcaagccaattggcgccgccatgtgctgaaccagttttccctgtgctgagcctgtcccaggatggggttgtgtttaccatcctgaatgtaattctgcaggc

SEQ ID NO: 19212 - DNA, 146 bp, Oryza sativa
  Clone ID: uC-osflcyp048g06b1
gcaattttgtttttgcttgatgacagtgttggcaaggagatagatttgcagatcgaaagaggtggtacacctttaacagtaaagttggaggttgaggatttgcactctataactccaaatcatttcttggaagttagtggtgctgt

SEQ ID NO: 19213 - DNA, 161 bp, Oryza sativa
  Clone ID: uC-osflcyp048h01b1
gttcattttcgtttccaagagtcagctgctcagagagggtgacagttttaatccaaatagccgttcgatgacggtcgggtcttccaccacgtggaatagatctgggatgcctggaaacccaagtactccccgagcttttcttggacactatcatctagagg

SEQ ID NO: 19214 - DNA, 311 bp, Oryza sativa
  Clone ID: uC-osflcyp048h06b1
gtgattttgactcacatttttcaccttccacattgggagatcgagaatccaataggatgatttattcataataatgcgttcttgaggggtgcatatctagagatgcaagtgaggactggagttccttagttttgagatgcatgaatattttctcgagaagtacagtaattttgcttttgcatttgtattttcttcatcattgagttctcccaggagctttttctacttgagatttagctcttgttctgaaactttgggatcaacagagcattttaagtggaattgttctcgtgattttgatgccagcctat

SEQ ID NO: 19215 - DNA, 308 bp, Oryza sativa
  Clone ID: uC-osflcyp048h07b1
gttcggtttcatcaaaacatggaagggggggtgaccaaggggggggttaatctacaaagaacgatgatgatcgcacaactgaaacagatctgcaatagacctgttgttgtggaggtctgggatgcaagggcttcggatccatcattacttgtctatctgaagctctacaggaacactgtacctgctccaaggcattggcgtcaaaagcgctaaatcttgcagggctagcgaggtattgagaaacaacccttttaactccctgactatatcgctgcaactggtatagataaatatagaccggcatttat

SEQ ID NO: 19216 - DNA, 360 bp, Oryza sativa
  Clone ID: uC-osflcyp049a02a1
ggcccaaagggggccttgttaaaaacaaccctccaaaaatcaagctataccagggcgaaatgaaccggggttttcaagccaaacccaaacggttgtaacaaaaaccccccccgggggccaaattttttcttggtgattaggggggaaacccctttttttatacatgggccggggtacaccccctaggggggggcctttgccccccaaaaaaaaactggggccaactttaatttttacagggggcccctcaggaggggggggttttaacccaaaacccctttccacccctaagggtcaaagaaaggagaactttttgggtggacccccgggagggaccccgggtgcccaaaaaactttccc

SEQ ID NO: 19217 - DNA, 416 bp, Oryza sativa
  Clone ID: uC-osflcyp049a04a1
ccaacaaaaatcagccagagttccctcccgggcattttttaaaccaaatgcaacacacattaatcggaacagcttaatacaaggcatgtgcgcttttttgtacataacaaattaaagattttttttttaaacatggaccccatgtgtcaacccaaaacagtttaagttgggagcccaaattggccaacagggtatgtgcactcatggctatacttacctatttatcgcacttcataaagaactcacctacaaatgcgaatcaaacccgatgttttttggcggcatgttcccaagcacaatgaacagtttgcaagcctgttggcccccttggtaggagatacccattttgtgttcgcccccacaaaggatccccctagaagatggttttgttcaagactttggctttcaatttcctg

SEQ ID NO: 19218 - DNA, 388 bp, Oryza sativa
  Clone ID: uC-osflcyp049a05a1
aacagctctttcactagattctcctcctgctggatggatggatggatgtaaaacactctaacaacaactcactaagttcgcagttacgacaccaacacggcaacacatttactgagctgatggcactcgattatcaagaattcagagaagaagaaaagtgaaaaggattggtagtgtgagtgatcagcggatcatcatcatcatgcttctatggacagcttcttcttgtgcctgctgagcttcagccgtggcgtggtgtcacccttcaccacggccatcttcttctcgctcgccgtcgccgttgtcgtcgctgtcgttggaatagcctccttggtgctgcaaatctgctggttcatgttgagggagattctgcccttgccggtgctcc

SEQ ID NO: 19219 - DNA, 433 bp, Oryza sativa
  Clone ID: uC-osflcyp049a06a1
ggcttatgaaccttatatcattaatcaattcagtccccataggaatcgaaaaaaaattcaaacgggatacaatatactacagtacttgtcagatccatacacccctctctagtcctgatctaccgactcaaggccattgcgcttcagtgaccgtgcttaattatacgccgcgataactagggtaactgctaatcacgaaatcttcatacttccatggtaatcaactcaaggtcaggctcggcgaaatcaactcaaggccgttaatgcgacgagaaccatcttccaactcgaccggccttgcagcatcggctaccgggtgaccacatggcgatcaatcgatcgagctctcaattctcaaatcgcagacgtgacgtcgtggcgatgatcatcagcgcgagtgcatgtgtccaaggctttccagcgcgagccaatc

SEQ ID NO: 19220 - DNA, 280 bp, Oryza sativa
  Clone ID: uC-osflcyp049a07a1
gggacaagcaagaagttttttttttcatccatttttcaaactactacaagagggcgggaggaaccccttactaggagggattgggacaatttacagcaacaggagtctggagatcgaggcaagaacaagacaggccgcagcaaagcttccctttttatttccactgaatttttacacatttggaatccatggaaaccgagccttccctcccgttgtcggggggtcaccggagcccgataaaaaaaatggccatggggggctcataatccggatcgctcgc

SEQ ID NO: 19221 - DNA, 474 bp, Oryza sativa
  Clone ID: uC-osflcyp049a08a1
aggaatatcagcaaaggttctgcttttttttttcacccttgtaaaggtaaaggccagtaggccattataccctaaaaaaaagaagataacactaaatatgtaaataataacatgccttattctaggacagtataattagcatatcacattgtcccctattccttaattatagtcaaactgcacatctatatctcaagtttccaccattgtaattcttttgtaactgtccttacctcttgcaagctagctactgcaccatgtgagattcttttgtaagctgttgtttctgtcctcttctaaagtataaaatgaacaccatgtgtttatgtgcctcctaattattttttttttcaaaaaagatgtgcctcctaattatgaccagtgagattttcttctgccttccttctctatctacaacaaaaatattgttgctttttgttgtctcctcctgtgtgtgtatacttatgttactct

SEQ ID NO: 19222 - DNA, 469 bp, Oryza sativa
  Clone ID: uC-osflcyp049a10a1
gtattggttgatctctattaaattcagagtagttctgtcacaaattaacaaccacatttgtatgaggcctacagttgtgtattcttttcaccaaatgcagcacacatcattccctaataccattctatcacacatctgtgctttcttgtacatcataccgtgtcgcttctttctttttacattgaacaacagtggccactaattacagcttctccttgctaataaaactcgctgagactgtagttcagttcattcctcggaatcggaatccattgggcatgatccgtcatccacggtggcgagtggatcaaacatgtgcgagtttggatccatgcaccctgacacaatgtccagcttgcagcgatctcccccctcttcgtagtagctgcccatctcgcagcttgtgatgacaacgttttcgtctgggaagatggctctgtcgcatgccccttctttgttcagttcgtct

SEQ ID NO: 19223 - DNA, 500 bp, Oryza sativa
  Clone ID: uC-osflcyp049a11a1
caacacgcttgcaaatgatatcagataaggggagtcaacaagacaaaactgtatctgccaaagcacacctccccaactccacccaattacgccattatttctgggcacaagcatacggcttacgattcctgcccttcaccagtctcaaaccataaaccccacaacaaatcctgctaagtgacggcatataagatgatgaaaacaaagcaggatactccagagtcgtcatggcgaacttcaagttgacacttctcatgccacagccgctagtcgtgctgggcagcctagtaccggtagtgcgcgggcttgtagggaccctcaactggaacgctgatgtagtcagcctgcgacttggagagcttggtcagcctggcaccaagcttgcccaagtggagggcggccaccttcttgtcgaggtgcttgggaagaacgtacaccttcttctcgtacttgccagtgctcttctccttcacagctcaagctgagcaatgacctggtta

SEQ ID NO: 19224 - DNA, 493 bp, Oryza sativa
  Clone ID: uC-osflcyp049b01a1
gccggtgatgtgcgaattgttcttctcgatcttcacctgggcgtagggatggggcatgaagtggtggtgcccggcgccacggccgagcggcggcggcggaggcttgccgtcgacgagcacgccgaactgctccgagacggcggcggcggaggaggaggagtgcgcggtgagcacggacggcggcggcgacggcgaggggttgccgtggtcgtcgtcggggaggttgacggtggtgatgtcgtggatgctggagcggcgcttgtccttgccgccggagttgagccggatgaagtacttctgcgcgtggctggccacctgcgtcggcgtccggctcgtcacgaagttgcggtagatgttcctccagtcacctctgccgtactttttcagccccatcaagaacaacttgtgctcctcctctgtccacgggacgcccttcttgcgctcctggtcagggccgcgcgcgcgcttgccgccgaccatgtagcaagagcgc

SEQ ID NO: 19225 - DNA, 116 bp, Oryza sativa
  Clone ID: uC-osflcyp049b02a1
gttagacgcaaaattgcaaattttactgctgaaagaatcactatcagtatcatatacaaaggagctctttagctggagcagcacaattgccaggtttccctactagctagtaagaa

SEQ ID NO: 19226 - DNA, 394 bp, Oryza sativa
  Clone ID: uC-osflcyp049b03a1
aagcgcccccaaaggggctttttttattcaatcttgaggaaagagggccccaagccatcttttttagggagggggccttttacaaacttaaacacacgggtaacaggcttcccctcaaaagtcaaaagggggctaggttttgggggtccaatggaacccgcaggcttgtccccacccaattttcctccaccccaaactataatctttgaaagggttttggcagttgctcaaaaaccatgaatctggaggggttcctttttaacaaggccggcctgaacaaaaaaatttgatccgttcttcctttgaccaccctgaatttaaatgacctggccaagctttgggtcctggacaacagtcccattggagcaaaacttttttttgagatctttgagga

SEQ ID NO: 19227 - DNA, 450 bp, Oryza sativa
  Clone ID: uC-osflcyp049b04a1
gattgataaacatgttactcatattataagaacaaatcatatctgcaattttttcaatttcggtactaaatagtttgcacggttaacacctttatttaccggcaacagcccttctccctaagatcctaactgcactctaatttacaggataaagaactcaaagaacaaaaaagttaaatcatatcgaaacaaactccggataaagaactcaaagaacaaaaaagttaaatcatatcgaaacaaactccacgcccattttatgactttgcatgagcagattgtgacttccactgctgtatcgcagctcgcaacgaatggtttgggattacggacaaatttggtagaattcgccgtgtgaccggggatactttgtgtttcttgagccaagctttgattgcttgctgctcaatacgtgtgcccatcagcagcaacataaggatcattcattac

SEQ ID NO: 19228 - DNA, 341 bp, Oryza sativa
  Clone ID: uC-osflcyp049b06a1
gcaaactgcagtttcagttgtattgataagtatagtagcagctgtaggcttgtaagcatagtagcagcattgatcaggaatcttggggtatacaaatctctttgtcacacttttgagtaaagcagctatcactgatcagtgcccaaaagagagagaggaagatctcgccggacattgcgcttttgggtggctctccttgtatttggggggtgtgagtaattacaggtgtaatgtaagtatgtagcatatgctgtgaaagaagcgaaaaattcagggcaggatcaaggatcatcatcatctaggggagaaaatggtggccaagccctgatccaccgttagtt

SEQ ID NO: 19229 - DNA, 366 bp, Oryza sativa
  Clone ID: uC-osflcyp049b08a1
ccccaaaaaaaaaaaaaccggggggaatttattcctaaacaaacccaaaaccattggagggaaaggaattgccgaaggcccaaggaaacccccctttaaaagcaactgggggcccgggaaaacaaattcatgacaaaataaaccaccccaaaaggaacagcccaacaatataaggggcctagggccaaaactaaaaaaggctctgggggggaaccccattaaaaaaaagaaggggagccctttctttctttcccccccaaaaaggaagcccccaccatttaaaggggacagctcctgggccttgccccaaaaaatcccttccatcccggatgctttaaagcccctagagaaatcgggggaaaaaga

SEQ ID NO: 19230 - DNA, 319 bp, Oryza sativa
  Clone ID: uC-osflcyp049b09a1
ccaaaccccaaaagggggggggggggcccccttaaaaaaaaaaagtcccccaatttttggccccccccccccaaaaaaggaaaaaaaattttccccccccctttacacataaaaaatttttaggtcaaattaaaaggccccaaaccccaaaaaatggggagggggagaccatccacttccatttttttttttgaaccaaaaataaaattcccccaaaataagcccctaagaaacccttgttaagccccttttgggaagcaagaccaaaaggccggccccggcaaaaatgggaaggtttatccccaacgggactttgcct

SEQ ID NO: 19231 - DNA, 316 bp, Oryza sativa
  Clone ID: uC-osflcyp049b10a1
cctcttgggacatcaaccacagcttttatacataaccaggaggattaaacgtacgccacaacacaaagtaaaagagctaagtagaatatcatcatccacgaaaatgtcgttacatgcatacatctaaaacaccatttttttgctgccgccataagcgccccacttttacttattcagttcaagacttcaggcgaagggtacctctcaccttcaggcgcggggacctcacctactgggtcttcgccgactcgctcttcgacggctgggcctccggcgatgactcgccgaaaaccttggcgatgcgctcggtggggat

SEQ ID NO: 19232 - DNA, 262 bp, Oryza sativa
  Clone ID: uC-osflcyp049b11a1
gggagggaagaaaacactttattccaaccaagcccccccctgatggccaggcccccccccctgaaaaaatgcccccggaaccccactttttccaagccccctaaaccagggaagccccacctgccccatgccggacccccccatggttcaaaccccctgtttcccgccccccccttgccccattccaaaaggcccgacccccgggggcccccccccaagcctgggaagaccccaactcccagcttccctttgtccccgggcc

SEQ ID NO: 19233 - DNA, 473 bp, Oryza sativa
  Clone ID: uC-osflcyp049c03a1
accaaaatggcaaaaaagagaaacattctttttttatactccgtcaggttacataagtagaaaattagaacagaacctgatgcaccaaaacagagttgggcgcaatttggatgttggcaataagccaacaaactgttccatgttcactagatattgataggtacagcctcccaaaatagacaggatttattcaatttaccacaagataatcaagcctttattttactacaaaaaggaaaacaataatacattcactcatgggcttgctttcgagcagagcagaaagagaaatgaatggggcataataagtcatgtgcttataattatcgcagccgattgtgccatcatcaaacctggcattttgtacaaccatccgtggagtggcaggagcaggtcaaaagatgaacacaacgctgtcgtggaccctgttcttctgattctgcgcaacacactctgatatccacatcaagttc

SEQ ID NO: 19234 - DNA, 432 bp, Oryza sativa
  Clone ID: uC-osflcyp049c04a1
ggggaaattgaacactttaaattcatatttttattttcattattatttattttttttggaaaagaccccaacaaaaaaatttcggggggggaaaaaaaaaaaaccccaaaggaataggccccaaaaaaaagggggggggggaaaaaaggggggggaaaaaagtcaaaaaaaatccccccctggaaccaaaagggggggaaaaaaaaggggggggggttcccaaaaaaaaaccgaaaaacaaggggccccggaaaaacccacaaaaaaaagggaggccgggggcttttctggttggaaaattgtcaaaaaaaaaaaagggggaaaaaaaaaccccctttaaaaaaaaaatggccgccaagggggagggcccgggggatctaaaaaaaagccggggggggaaaaaaagacaggggaagtccccccccccgaaaa

SEQ ID NO: 19235 - DNA, 467 bp, Oryza sativa
  Clone ID: uC-osflcyp049c05a1
tttttttttttttttttcctcctttttttttttttattcaaaaccatgctttgcatatagctccacagcaatattttggagtacacatgtatgccttattttgccactagcccattacaaaaaaataaccacagaaaattaattaatagaaaattaattaatgggtcgctcgaacatggagcgatctcttttaagacataattatttagaggttcataattccaatatgacccaacacaagagtatgcatgcctgttacttaaaattggatgccactcttatattcaaagccggcagtaaagctttcagggatgacatcatcgacgacacggtagccaccgatcttgacaaggaagcgaacggagaaggggcccttgagtggtgcatcacttttgagtagccaggtgttagagcccgacttcttgagccccacccagtccttggcgcctttttcttgacctccacct

SEQ ID NO: 19236 - DNA, 366 bp, Oryza sativa
  Clone ID: uC-osflcyp049c06a1
cggagcaaacactttgatctgacatttcggggcgaagagaaaagcttccagagaagcatacaggaaccactactgccttaaggcaagggttgtcccccttgatttgcatttgcccagacataaaagcagctaagaactgcctaagattatatcgagttggagcattttgtcgcagtccaagacaatggcatcataatcaccaccttcagttaaatcttcatcctcgggtataaacctctcataggtgtgcatatccccatccatgtaatctttatccaagctctcaccaccatgggaccaaaggctgcttgggaaaatctacttatacctgatggggcttctggcctgaaactcatccccacgaag

SEQ ID NO: 19237 - DNA, 519 bp, Oryza sativa
  Clone ID: uC-osflcyp049c10a1
gaacacacacatcaaacccgtaaaagttcgtgttaactgctaatccaacatttggtctgcggggagtttgtcaagcgctctcaaattatacaacaatttacagatgcattgcctttagatagcggtctgtagtttcagagatcagttaaggcctcaccaaaaaatgtgaatgatacccgacgatcagttacctcaccaagctggtttcatggaagaacgccgtatttgtgacaaaaactgggttccctcacatcttcacctggtctgcgagttcacaggcacacaccatttggtctacctgtctgcccagcagttgcttgatggtaagaagacgcgtcccccagctgtggctgaaccccgttgcagattatctaccatctatatcagacttggtgtggatgatagtactaggcatgaaacagggctgctgataatcaccaaaagatcaggaagatgtcgcctgggaagcaagaaatgctgaatatttccttctctctaccatgtatcgtttcagctctt

SEQ ID NO: 19238 - DNA, 496 bp, Oryza sativa
  Clone ID: uC-osflcyp049c11a1
acataaacatgcaaaatcccctttcttccagttactgatgttcggtaagagctccatatgagaattacaagcaccccagctatccatactttacacggttacaccttgtttacagtttgtttgtaccatgtccaggcaggaagccatatcaattctatatatttcttttctttctttcgcaaacaaatgaaaacacgtttagctacagtacaaaggggcgttggcaggcttgtagaggaacgtcttgacggtgtgagagtttcctgaaggcttgctgtatgtgaacttgaccccagagtgtgtatcacccctcttagtgcaatgctggtgaaagctgctgatgggccttgccaagcatgactcccaacggtcactctctggcatcgtctccgcaacaatgtagacacccttggagtttgtgaaggcctggtagttgataacttaccagatctcgtgatgcaaaggacggcaacctcggcaccttcgaggacgtggt

SEQ ID NO: 19239 - DNA, 402 bp, Oryza sativa
  Clone ID: uC-osflcyp049c12a1
cattaacacggattagagacaggtgaattacaatgtaattgtatctagccatgcacagtgccaaagaggcagcaccgctagaataagacgcaaacgaatccgactaacaaaatacgagtcaccaaacacactgacaatattctgagtatttttgacagatccaccaataagacgaatacagcaccatcatgtcacagagagaaacatattgttccacaaaatacaccctactcagattgttcttataagcaaaagattaaacccactactaacactacgacgcatgcttcatttgtcaaaggagtcgccgaggggaatttaagccctctcaccacgaatcctcctagccagctgaatgtccttaggcatgatggtcacacgcttggcatgaatagcgcacag

SEQ ID NO: 19240 - DNA, 459 bp, Oryza sativa
  Clone ID: uC-osflcyp049d01a1
agcgaacctagcataacttgtctgggcccaagccacatgttcatgactggatatctcacaagtttctttgacttcaaatccacccttttaggtgtgttgctattgcacgaatcagctgcagctaccttcatggaaacttcagagctagtctgttttctggcgttgactcgttcaagtcctgatactatattgttctcgcttataggaagttctttcaccgttttgtcatcttgcttgatggatttttgcaagccacacaccttctcactggaaattggatccctgctactaggtacaacaccatttgaaacaatagcatccttagttgggaaagtttgtgcagcaagccctgcccctgtgtcctttccatgggaagctggcatagaaaatggattttgatgctgggatgtttgtttatttcgctcagacaatatcgcattgccattgcccagggaagag

SEQ ID NO: 19241 - DNA, 423 bp, Oryza sativa
  Clone ID: uC-osflcyp049d02a1
aaaggggcagaagggttttaattaattattagcaagccatattggcactgagccacatactagagtcccaaatcatagaggaaggatgggagcagcaactgagcaaagctccatcctgcttaaatacattcgagagggtttttttagggttttaaccagccaagggcaagcacttcagttaaagcctaaacagagttccagcatgatcagatcatgcgcattacttccactttttgaacttgccaccaccgaacatgccgtgcccatgcttgccatgcttgaacttgccatgggggccgggcttgccatgcttgaacttgccgccgtggggaccgccgtagccatggccgtaaccaccaaagccttcatggcctccatagcccatgggtccaccatggccatgagaagagatcttgggggccc

SEQ ID NO: 19242 - DNA, 423 bp, Oryza sativa
  Clone ID: uC-osflcyp049d03a1
aaaaatgcatatatttgtggataaatttcaaatgctagaagtgtaaatcattataggatttgctaaagaacgatatttattatgaacaatttcgtgagcacggtagtatcacatgacactgagaatatgtagtatatcttcgcggacagtgagaaaaacggtcgccctccacgttttcttcttccttcaatttctccaatataacgtacagcttggcacatatctgtacaaaccgcggtactggtaaacaaaaacaacgtacacagcatactactttaggatcctcatgctggtacagccacaggtttttggctggtcttgattcccttgatagcttctgcatagtctggagccccgaaaacggctgaaccagcaacaatggcgttggccccagcttcaatgaccttgtaggcgtttttggga

SEQ ID NO: 19243 - DNA, 475 bp, Oryza sativa
  Clone ID: uC-osflcyp049d04a1
agatcatacccaaaataaataatttatagaaaatgtgtcccacatgtagaaccatacagagatacatcattcacttgatgtaaaaattgttagctttcaacaataatactattgtttatatgcttgttctctctcattctttacatattttttctgcacagaaatatttacatgcgattcaatctgacaaatgctctatttgcctaaactttatttcaaataacttgctcaaaaatcacttcagaaatgtgttggtcaagcatatgtggtgagcaattggcagcatagtaacagctttttacaatgctcaagaaggtctgcttggttttgttgttaattcttttatcatcaactcttggaagaagatattgagcaagttcttgcatacccaactcaatttccttgtcaatttgatttattgctggctcatttttcttgggatcctgtgaaagtaacatcttggcatgaagagaat

SEQ ID NO: 19244 - DNA, 433 bp, Oryza sativa
  Clone ID: uC-osflcyp049d06a1
cctagataaaatcgaccgatttcatgcaattcaagattcttctgcatgatatgatagactagaataatgctaccccatttgtttgcaaccagctcgattaggcgacaaatccctggaccatatgtcccatacatcgaaacaaggaggtgtatatatcctactctactactacaatgagctatgaattcgcgaggggcgttctgctattttatttgggcgaaacgggtgcctctggaaacgtttcattgactcgtctatcactcatcagtacaagtctctgccgcatctgtcacaggattgtttttctgccgaggattctgtcttcttgatctgcttctgcagctgtggcaggtcatgctcaagcacatcgctgaacgccttctatgcttctgcaagctcctcaagactgattgacagctgatgcgctaatctg

SEQ ID NO: 19245 - DNA, 261 bp, Oryza sativa
  Clone ID: uC-osflcyp049d09a1
ttttatttttttaaccgcacatatttgtggtttattttgaattgcttttagtgtaaatcacgggcccataagctgaaaaccgccatacaaaaagctcaatttctcgagcaaggttctcacacaagtcacttagaggatgcatctggtccactgggccagccagaaaaaccgtctaccctcaaaaccaccatctggaacaatttatccgagaggggaaacagcttggcacatatttaaacaaaccccggtactgcggaaccc

SEQ ID NO: 19246 - DNA, 168 bp, Oryza sativa
  Clone ID: uC-osflcyp049d10a1
gggtggtctttgttgaattataccgtgacacactcttcaggtgacgaaaaaaccagtagccctgaacaattatcctattgactatatgcacgttccctttcatgtcttacataacctgtctgcacaccaacatttacccgcggagagaaccgacacatgcatatatct

SEQ ID NO: 19247 - DNA, 413 bp, Oryza sativa
  Clone ID: uC-osflcyp049d11a1
ggagaagtattccacaggttgagtttttatatcttaacaaacatactgtttgagacaccagaatccaacagattaaattctggagctctgtctccctattaaccatttgcagggaagttttattctaccagtcgtcacaaaagttgatacaagctcgaaagtcgagatcaaacaaaaaaaaaccaaccgatccgtaaattcgctacataagtaactattgttgccatgaaagtaaaagaaacacaccagctgttgacatttgcactttgagatcggcaatatcaacattatgaccttcttaaaccaagccccatttatcaacctggggatcttcttcaaggctgatcaattcaattgcctgctcaattcccagtttccctttgaatattgggagagggattcccagggaatgg

SEQ ID NO: 19248 - DNA, 415 bp, Oryza sativa
  Clone ID: uC-osflcyp049d12a1
aaattgaacactattaatacatagtttaagttacatcatgatttattatgactggcaaagacccaaaaaaaaaaaaaactctcacacaatgcaaacaattgtagagtttaaatgcagtctatacctgactagaaaggattatgtagtagctgcaaaaggtcgacgagcgtgacaaactgtaaccattttcgacgcatacacgacgtttattttgtttcacaaacgacgtaaaaaattaacagattcgggccaccatgacttaatcaaagaaagctgattactatgctggttggacacttgctaaccgcagggcaaacttaaggcttcagcgaccacatcagttaaatttaggccaacttagacgtaaatggttttcttgcgtttttctctcccttgaaaaaaagcatgagaagct

SEQ ID NO: 19249 - DNA, 112 bp, Oryza sativa
  Clone ID: uC-osflcyp049e02a1
atacctttttgtctaaaaccttttttttttttttttttttttgggggttttttttttttcttttttccgttgtttcactcctaaacaccagaacacccccaaaaaaccaaaa

SEQ ID NO: 19250 - DNA, 379 bp, Oryza sativa
  Clone ID: uC-osflcyp049e05a1
gaagggataatttaaatacttaatagtaatagactctttgatggagtattacaacatgcagcagtggcattaatacgccagtacattaattaagttacacatatgcaggctccattttggtttcttttaatttatcgaattacagaatttctgtagccttgcaaatgatcacttggatatcatgtactagtaattaacaataggatgcatacaaaagatggcccaacgacaacagaagatgcgtgcatctgacattggctggccttatttgttggtagtactccaattaattaacaagagatgatgcattcttgtgccttagtttcttcacatgcttggcttcacgttgaagcctatttgaatttttacccccaacgac

SEQ ID NO: 19251 - DNA, 508 bp, Oryza sativa
  Clone ID: uC-osflcyp049e06a1
atctttttctgacaagccccactatgattttcttgacaaagggaggtacctgataacattgagaaaagaaaaagaaaaacataacataccacctataacttaccatacttttaacctaacaaaattactctccgaatgctaaatgcgcgttggagttcttatgggcggaactgaaatctcaagggcacgagcagattgattttgctcggggaaaaaacccaagaaatctccttccaagcacccatcactcacagagcccatcacaccaacatgaataactttagcaagctcttaattcacacgcagaaatccacctgccggaacatatcaccacggtcgaagtcgtagccgctgggtatccttgggaaatcctcgcagaagtcattaccgatgttgacgaggtcgaggtcatcttcttcagcgaagccttcaagcagcatgtcctcagtgaagaggacgtcttggtcgccattcattgaagccggcacattagagatatccagagcat

SEQ ID NO: 19252 - DNA, 299 bp, Oryza sativa
  Clone ID: uC-osflcyp049e10a1
ctcttcaccctttttttttttttttttttttggggtttttttttatacaatccacctttatttccccacttatttatctttttaaagcagcaaaaaggggcacccccaaccccaaagtccatcccacaaaaccgggaaacccaaccccccacattaacaaaaaaccccccggggaaaaaacaggccttttggccaccccaacaaacaggcaaccccaaaaacaactggtaactcaaaaaccccccccagggaaaaaaccccccaaccaaaccaagggggaacccccccccaaaaagacc

SEQ ID NO: 19253 - DNA, 494 bp, Oryza sativa
  Clone ID: uC-osflcyp049e11a1
acttgacttgcccactatgattttcttgacaaacttaggtaccagataacattgagaaaagaaaaagaaaaacataacataccacctataacttaccatacttttaacctaacaaaattactctccgaatgctaaatgtgcgttggagttcttatgggcggaactgaaatctcaagggcacgagcagattgattttgctcggggaaaaaacccaagaaatctcctcccaagcacccacactcacaggcccatcacaccaacatgaataactttagcaagctcttaattcacacgcagaaatccacctgccggaacatatcaccacggccgaagtcgtagccgctgggtatctctgggaaatcctcgcagaagtcatcaccgatgtcgtcgaggtcgaggtcatcttcttagcgaagtctccagcagcatgtcctcaggaagagtacgtcttgttcgcattcatgaagccggacatggagatatcagagcatcag

SEQ ID NO: 19254 - DNA, 394 bp, Oryza sativa
  Clone ID: uC-osflcyp049e12a1
ggggagaaagaggcccaccagggtttgaggccaaaacctttaacgcaaaaacccgttccagggcaatgtttaagtcaaggctcaaaccctgaccatctaacagggtatcacaatctcaaaactcggtggtctaaacaaccaaatttattggatttttgcccaagggcagccggggatttattggttcaaacgtcggccccgtgaacaaggaaatgatttaccccaattgcataactagaggtcatagcatttcaaacccaacatgaagcttccgcaacaaccgccccaagtctgttcaagggaaaaatttcaaaccaatccccaccaagggccttgataaatgcaatgcccttcattttaccatcttctgggtttttaacaaaacctaccccaa

SEQ ID NO: 19255 - DNA, 341 bp, Oryza sativa
  Clone ID: uC-osflcyp049f03a1
accagctcattgatcattctcctggtggctatcacgcactggaacatcaaacaccctgcgagccttgattacgatcgacgtcagtgccgacaccttggaggagagcttgtcgatcaatcttgaggccctgtttactgactttgtgagcaccataagccttgcacaggtagctgtacatgacaagggccttggccatgagctaagcatctgatgagcacattagcaggctatatctactcctgtattcagattaaggcctttcagttctgggtagtctgctgctgaagaggagcctgagcctgctgctgcattgatggtcctggctgttgcgatgagctagc

SEQ ID NO: 19256 - DNA, 378 bp, Oryza sativa
  Clone ID: uC-osflcyp049f04a1
gggtgggggtctatatgttttatcaccggttttttattatattggaacttcagaatttcagacgggaatagacagggtaccaggggggggaaagctgtcatgccaaaggggccgcctctgagtgggcggaaccacgccgccggggggggcgaagaaaaacacggcgacgggggggccgatggcctccgcggacgcgacgggggacaagaacatggagaagaacaagaccaacgccagccgggttggggggggcgaggatggaaaggaacgcgggggagcaccccaggccccgaggcggggagggagaaggacacccgcggcgaaaaaacatgggggccgccggcgacccgggggagggccgcaaggacggcgggggtt

SEQ ID NO: 19257 - DNA, 422 bp, Oryza sativa
  Clone ID: uC-osflcyp049f06a1
ggctggaaatggatatattccccaagcgtgacaacaacttttgagtgccagtgtgtgtgtgtgttcccctcccctccctgcttaattacatcatctctaacgtaaatgattcgtgatcttcaacgggaggaaaatgacgctctcttcgacctccagagcggttttcctcccgagacaaaaagcacaaatccaaagctccccaaaaggctgtacaaaatggcaaaaagaagaaaaaaaaagggtgatcgaatgatcccacattggaatccgacctcgaggcgacggtgtatatgagcgtttgaccgtgctagctccggagcgcgaccgcggccttatgcacgagcgagccggtggcctgcgcgactccgtgcgcggtgctttcggagggctcccggggcgagccggacttggacatgcggcgg

SEQ ID NO: 19258 - DNA, 317 bp, Oryza sativa
  Clone ID: uC-osflcyp049f07a1
atacgaccagaaattatttttttccgggataaattgatacatctcgccttgatattttacttgtttatgtaaacactgatcaaacagagaaaatcctttgaggacatgggcatatacacttcttgttcttgaatatatgacacacaaaaatacgttcttctatttgcgagagttcataaaatcttggcaatttatatggtgagatcaaagcataaaccatctatgtagtaaaagtgaacatattattctggtccaatccggcaaggggattgaaatgcacattctactttaagggtccttctttcttgccatcgccc

SEQ ID NO: 19259 - DNA, 386 bp, Oryza sativa
  Clone ID: uC-osflcyp049f08a1
gatcagaatagaatgtatactttgccaagtcgtcccgattgcttgccttcctaattgacacaacccgcagtaccgcacacaagctgcaacctcaactagacactttatttatcaactaaataggcttaaacttagactgaaacttactatgtcctttcatcgattccaccgtgcaatgcagcagctgaaacatccaagacatacacataaatattaactgacacgagtagctatgggaatctgtcgttgcaaaaccatacagatttctccatgccatccacgctaacttgtacaaaccatctgacttgtaatcgaaagaatgcggccgatgcacgctgtccatgcccaaatcaacagcaagctgaattgggcattgcccctctgat

SEQ ID NO: 19260 - DNA, 484 bp, Oryza sativa
  Clone ID: uC-osflcyp049f09a1
agataacgcagacttgaaattatataatagcaacagtgttgatacaccttatcaagcaagtgaccacaggtgccaagagttcggctctgcaaccaaatgcacgttgctttgcggcagtacacattgccgcatcaaaagcctttcggctatcctcttctcctgctgcctatcacgcaatggaacatcagatacagagagagcatctataccagcccaagttgctgaaagcctgaaactgaaagcaacttcattcagtcttcaggccttgttcgctgcgtcaataaataccatcacttgtttccagctagctgtacatcacaggtgcattggcattatttagcatctgatgagcacattagcaggctatatctactcctctattaagattaaggcctttcagttctgggtagtctgctgctgaggaggagcttgagcctgctgctgcattgatggtcttgcttgtgcgatgagctagcttgcgact

SEQ ID NO: 19261 - DNA, 486 bp, Oryza sativa
  Clone ID: uC-osflcyp049f10a1
gccatctcaagctcttgaattgatttatgttttacaaagctgaccgtctcagattatgctcccggaggccggaattacatttataacatacacaataagggtagcaggtatataaagcattgcagtaggtagagtgaggacagaaataaatatctccacttgacgtcgaataagcgtagagcaatcaagtgttgaggttctggaacagctcaggcagatgggcgttcgtgagcttggtccggcgtgtgatctcacgctgtttcttcttaggcttagccttgggctgcaccccattgatctgtgctgcagcccgccgtttagctgtgttggtcatgggcttgatgccattcttctggagctccttctcgatatccaccatgtcccgcggtaactccatcttccggaagagctgcttcaggtcatcgtcgaccttgatctttgcctttgggtcgttaggatacacaatgtcctcctgggaatccatgt

SEQ ID NO: 19262 - DNA, 431 bp, Oryza sativa
  Clone ID: uC-osflcyp049f11a1
aagcccactttcatttccggcagcatactatgtacagaactgtttaagaaatacgaggatatgtacaattcacaactagctctaacaccaaaattcttaatcctatgaaaaccacccactgtaaaaaaggaaaagaaaaaggtcaacaagcccggttaacatgttaattaagtttctgttcctctatcggagtaaacaaaaagctatccctaacatttattggaaaatctcagcaatatcctttttgtcgccaaacttcttggcaattatgggtcggacatcatccgcagaagcaagggtctccaggaacggaatcagctgaggtaatgtctcatcagagtcgtcgctaaaccaactctctatgggtataccattattcacttgcaactggaaaacctgcggagtgttgtcaattatgacaactttagcaa

SEQ ID NO: 19263 - DNA, 434 bp, Oryza sativa
  unsure (1)..(434): unsure at all n locations
  Clone ID: uC-osflcyp049f12a1
ggggcaaacatttttttattaaattcgaattgttgaccatactctttagagaaaggccacctggaaaccaaaaggaccctatnctttggagaaaaatatgaccgttttgttgggggcaaaccggggaaaaaggatcaccggtcccaggggacttataaaactaacttgggaagaagggaaaccccaccctatcggaagtatcacatttgattcatggcagcttgaaaactatgcagaaaggggccgaacttcaaacccaggggacttatcagggctttgaaaccccttggccaacttccatcctagaaaaagggccaactggaacttttgagccaacttgctttgaaaaaacattcaggacgctcttgttgtttgggctggcatagacaacctattttggctccaaaagcacaacttatttaaaaaaccttctt

SEQ ID NO: 19264 - DNA, 281 bp, Oryza sativa
  Clone ID: uC-osflcyp049g03a1
cttctcaaagtagtgtagcatctttgcttctttcaccattacataagcttaagcaataacagataacaaatcctcctcctcctctaggtaaaatattcaaacacaatacccttataagtacttattattaggaaagtagcgtgcatgggcataaatggcagcggggggcaggttaagaatcacaatgctgagcagcgaggaaacaaaacaccataatgggacagagcaaaagcctccgaaagggagcttttaggcagaaggccttctcccacttgaggggc

SEQ ID NO: 19265 - DNA, 209 bp, Oryza sativa
  Clone ID: uC-osflcyp049g04a1
caagagcttcaaacaaccgctagttccagacacattgaagtgattgctcgacacatacgaaaccgagttcacaaagcagcataagagtatacatgcgataacaacaggaaacaaatgaagttacgctcgtactagattctacatatcgtttattctagcagtgttctactggtaattcctcccttgtccgtccctctcggacgcgtggg

SEQ ID NO: 19266 - DNA, 384 bp, Oryza sativa
  Clone ID: uC-osflcyp049g05a1
tttattctttttttttaccaacggataagctgtagcacttatggtaccagctcatgtacatggattcacaagagacatccaactacagaaaagaaatatatgtatgctctgcatcctgccacttctgttatgagggggctatctacatgtacatatcccctcctgcgactttaacctatggaagcttaattatctatctgatgagaaataagaatccatgtatgtagtgaaacaagtctggacgtcaatttagtagacttcaccggggaaatctcccaagcgctcactctggtgtaggtccacacaagaactcactgatcattattattggctatcgccttttaacagttattattcggtccgcggtttcttcaaaacgtttgc

SEQ ID NO: 19267 - DNA, 488 bp, Oryza sativa
  Clone ID: uC-osflcyp049g06a1
cagcatcaacaaccgtactggatgcaatgcatccatttcgacgatctgtcgatttttattgaaaaccaagtttgttttcaggcatgtttagaacatgtgatgtagcggaatacaagtggcatctgaccaagaacacactctaagcagccaatttcctcataaatacaccctttggagcaagaccaatatcatcgatgacaatacagttttattcagcctgcttccaatcttgaattgttatttctttttccctagttcaagacagcatgagcttcaagaagggaagcaacaaaatgcatctggacctcctcatcgatcgtcaagaacaggggcacatgtacaaacagagatttgatgccgtgttgctctgcgaaccgaagagaatgataatacacatagttgcatacaaaccgaccagcatcgtctgatggcattacatcgtagcctgtcttccggagtgactcggtcaactcatttaccggaagcgt

SEQ ID NO: 19268 - DNA, 137 bp, Oryza sativa
  Clone ID: uC-osflcyp049g08a1
ggggggccccaaaaaaattgggtcttgggaaggggggctccaaatactttttggggccaaaaaaaaccgaaggggttccccccgggttttattaataatttataactacaatggtgaaaagtacagtcccccgccac

SEQ ID NO: 19269 - DNA, 250 bp, Oryza sativa
  Clone ID: uC-osflcyp049g10a1
cgggccccaaaaccccgagggggaaaaaaaacccctggggcagggggtttagggggcccagacccccagaaatttaagggagagaactccccagggggcccaaataaaaaacgccctcacaggggggggcaaaactgggaaacccacccccgaaggggggggccccccctttttaaaaaaaaaacgttggtctaaaaacccgaaaccatcataaacataaggggtgggtgataacaaaggggaccggggg

SEQ ID NO: 19270 - DNA, 483 bp, Oryza sativa
  Clone ID: uC-osflcyp049g11a1
gttcgtgccgtcacggtgttctgcaccacggactggatgtcgagccgcgtcagccgcccgccccgcgacgcgcacgcgtcgcacttctcccgcccgagcctcaccaccccggacacgttcgccgaggtctggtcggtgtacagccgcacggtgcgccaccacgccgccacggacggcgacgggatgccgccatcgccggagcccgagcccggcggcgagagcgaccggaggaacgcgcggatggtgcgcttctgctcggcgggccaccggccgtaccagatcgggtggaccgtgatgtcggcggcgaggacggggcccatgtggtactgcagcttgacgaaatccgacgacccctcgaacttcttggacgccccgatcccctcaacctcgccgctccattccgtggcggccacggccgccacgcgacggcggcgagcggcgcgagcacgaggaggacgacgcatcagaggctgaaccggtgca

SEQ ID NO: 19271 - DNA, 508 bp, Oryza sativa
  Clone ID: uC-osflcyp049g12a1
gaacgagtaaataaaattttcatttaacatttttaaagtgctaatatgtatcatcaccgtttcttcattacattgcaacttcagaatccagacgggaatagacaggatacaattccggaagtgctgtcatgccattggggctgcctctgatttgaccgtcaccacgccgccgccctgcgcgacgtcgtccatggcgacgtcgacgtcgatggtctccgtggactcgacgcggtacgagtacttgcagctgagcacgacgaacgccagcaggttcgcggcggcgaggatggcgaggaacgcgtagtagtagtcgaggcgcgaggcgttgaggttgttggtcacccacggcgtcctccccttgccgccgccggtgacccgctcgacggccgcgaggatggcgctgctcagcaggttcccggcgccgtacgccgtcagcgacatcgccgtcccgaggctcttcatgctctccggcgcctggtcgtaaaagaacttgatctgccccaccacc

SEQ ID NO: 19272 - DNA, 341 bp, Oryza sativa
  Clone ID: uC-osflcyp049h02a1
ggcaaaaaggggagcactagtaatggttcccattcataatgtctgatggggcgtttaggttggcacctccggttaagttgatcaaccaaaccccttgggacagaccttgcaccacgtatcacctttccttttcacaacaaaacaccaaacgagcgcagtttcaaagtttaaccatgcaacgcgcgcacacgcgtacattttccagagtccacaccaaaaccaaaaaaacgagcctagcaatactacccattttaggacccaactttggtcgtgccaactgcccccaagtttaaccgggccttggattcatattttcataagaaggagggaatgccacgggg

SEQ ID NO: 19273 - DNA, 277 bp, Oryza sativa
  Clone ID: uC-osflcyp049h03a1
aagaaaaactggcttatgcaaaactttgcaggtattgattgagcccatatttagaaagaatacaaagtacagtctggtgtcattcacaaaaccattcgggggagtaccatgtggaattgcacctcaattctacaaaaatgttatatttagctggcaaacaggaggcctttcttcttgaactcctctatgttggctacaaccatgctgatgttttggcgaccttggcaatggccttgatctcattaggtgaccacctcctcaagaagggacccatcac

SEQ ID NO: 19274 - DNA, 482 bp, Oryza sativa
  Clone ID: uC-osflcyp049h04a1
gactagggatcacttattcattataggtcggccatgctgctctaccacagcaaaacgtttcagacaccatcaaaccagacttaaggatacacattacaggtaaatagttcacaatgaaacgggacacgaccaaggaccagaccagacaaccatagctccattggggaagacaaataggcagacttgtgaaccctagaacagcagcagctccatggctgaggacttactggccaccacggaggcggagcaccaggtggagtgcggactccttctggatgttgtaatccgcaagggtgcggccatcctcaagctgcttaccagcaaagatcagacgctgctggtccggggggatgccctccttgtcctggatcttcgccttcacgttgtcaatagtgtgggacgactcaacctcaagggtaatggtcttgccagtcagggtcttacgaagatctgcatcccacccctgagcctgagaaccaggt

SEQ ID NO: 19275 - DNA, 327 bp, Oryza sativa
  Clone ID: uC-osflcyp049h06a1
aaagttggtatttttttttttttttttttttatttttttttcttcccccaaaagccggggaaaacctccccccggaaagaataattgccccccccgacacccaaatggggggggtccccagaaaaccccctggggggaacaccaagggttcccggggggggggagcatttcactcccgcgcccaatgggtccacatttttatgcaggacaggtaaggggaaaagggaggaccttcccctcaccaactgatagaaacatctgctgtcggggcgcagggggggggggtaagattctatgtccttctatgcaagggagacgccccccccc

SEQ ID NO: 19276 - DNA, 369 bp, Oryza sativa
  Clone ID: uC-osflcyp049h07a1
gggccagtaaagtaaacatcatcatcatatcaaggggaaggccatcagtcatacaatacacacacacataaaaaagggctgtgctgctgctacacttgtgcctacgcattcatctattctcagacaagggcaatctaaaaaaacagatggatgccgtgccgcctccttttccttggatctggctaactcgcaaagggcaacatctagaacttgaagtctttcttcttcgacttcccgtccttctcctgcttcctcttcctcttgcttgcgttctccgccaccatgtcgctgaaatcttccttctggttccgaagcttctcctcctcccgggcttcctcgtacttggcagccaaaacatcatccataact

SEQ ID NO: 19277 - DNA, 462 bp, Oryza sativa
  Clone ID: uC-osflcyp049h08a1
gttgtagaaaacttctttattcaaatctcagcagctatagcaagtgcccatatttaagaggagtacagagtacagacgcatcacaatcagaaaaccaatagggggagtaccatgtggaaatgtacatcaaaactacaaaaatctcatattttgctggcgaactggaggccttccttcttgaactcctctatgttggcaacgggcggctgagttttcgcgaccttggcaatggccttgttctcatcaggtgacccaccctccaggaaggcacccaacaccttgccgtccttgatccagtaggacccgaacttgggcttggcataagtaggatgactggattgcacaggatggtgtcgccaacgttgtcgccgtttaaatgacattccaggtcgaatgaccgttagtagaagtatggcaaaaagtcatactccacaacggactcgccggacctctttcccttga

SEQ ID NO: 19278 - DNA, 453 bp, Oryza sativa
  Clone ID: uC-osflcyp049h09a1
cgaccataactttttttcttgtattgagcagtgtagcaatgctagtcaataaagctaatttcacctttgaacgggaatggggaagcaatgaagtacagaattacaggagaaggtggcagctgaggagagaatcaggagctgtcacaactcacaaagctatatacaagttcagaagctgaacgagaagagagcatgcttccctcctacaggaagcattatgacttcttggggctgttttacaaatctgggtgattattggaagatcatgcggtagcagctgcagcttcttctgcgacttgggatccctgttgcagagtgcaaatgaggttgccatccccatacacattgtccacgcgacattgttgttggccagaacttggcgcccccaatccactctgcaaggaacgcacgtactccctgaatgacggcttttccatgtgttgccatccaaat

SEQ ID NO: 19279 - DNA, 450 bp, Oryza sativa
  Clone ID: uC-osflcyp049h10a1
tttttttttttttttttttttttttttttttttttttttttttttttttttttttttttttttcccaacccaagcaaaaaatgctttctgtccagggggtcaaaagggaaaacatgtgttttatgctggaacatcccaaataaaacaggggctccaaaatggggggggcgaataacatataacggggggtgggcaactttttaagccccaataggaacatccttactgcccccgggggacccatttttaacctttttaccgccttttttggtggattggcttgatttttttttttttaccgacttttgcaagttcttttttgctaccaatgcataaggctttgcctgggcaatttcacaattttttactgatgagccatttgggtcatttttgggggggcccttttttatgtccggatctacaacagacatccgggggaagggggaaccc

SEQ ID NO: 19280 - DNA, 379 bp, Oryza sativa
  Clone ID: uC-osflcyp049h11a1
ccaaaaggaggggagcatttttccttttttcaccattacataagcttaagcaataacagataacaaatcctcctcctttagggaaaatattcaaacacaatccccttataagtccttattattaggaaaggagcgggcatgggcataaagggcaggggggggcaggttaaaaatcacaatggtgggcaggggggaaacaaaaccccttaaggggacagagcaaaagcctccgaaggggagcttttaggcaaaaggcttctcccacttggggggcttcaccacctcccaggggaagtctgggtcgccccttccaaagggaccgtaagccgccgttttgaggtaacgtccgttgccgccttttttgagggcaagggtgatg

SEQ ID NO: 19281 - DNA, 388 bp, Oryza sativa
  Clone ID: uC-osflcyp049h12a1
gggacaaaatacccattttcgattgatgctagagcacatattgcctcatataattttagtttcttacagtacaagttacaaatatgctccctccagtcaatattacttgccatttccgacaagcaaattgcactgagcgcaggtcaattcagctgtcccaaaagacatgtttttccgtctggggggagttttacattgatgggccaaatggttctacattttgatgcaggacaggtaagttgctatgtaatgatattttcttcatcaactgatagaagcatttgcgctacattctccatgggggggcttttggttctatcttcttctatgcatgaaacaaccaacttgatcattgttcttgcttgcaagtagttgaactggccattca

SEQ ID NO: 19282 - DNA, 436 bp, Oryza sativa
  Clone ID: uC-osflcyp050a02a1
ggaggcaaattatttctttgatggccatatgagtccagaccaggcagggtgccccttcaatctaaaaaatggaaaccaatcctacactagacctttgggtggatctgaaccaaaaactcccagacaaaaatcctaccatttaagggggtttgacccatttaaacaaagcccccctgaaaaaattcccccctgtttaaccggaaagggttccctttgccggctcagaaacaggggcctggggctttggcttctcgacaccaatggcctgtgtggaaaggcccattccagccaccgggggggcattttggggcgcgcatttggcccccttagctgggtcaaaaacccccgcctaaataaagttctaaaccttgtcgtttcatcggaatgaacccggctttccctttggcgttcttgtattttttaaataccattttcc

SEQ ID NO: 19283 - DNA, 223 bp, Oryza sativa
  Clone ID: uC-osflcyp050a03a1
tagtttgccgcacctgtcgctgctcgtccggcagcgccattggaacttccggtgcccgcggcaaggaggaagcgtcgacttcggcggcggactccgagccggataagaagaggtggaggaagaagaggctctggaggaagaagaagaagaaggccaagaaggatcactacggtgacgcccgcgccaccgagcacggcagccgaggcgcgccaagctgcaggcg

SEQ ID NO: 19284 - DNA, 345 bp, Oryza sativa
  Clone ID: uC-osflcyp050a04a1
atcttgacagcaaatagtttggtaactttgaaactccacagtacaatacggtgttctagaggtccagacaaagagcatcaaagcatgaatgaagagaaagacaattggaatcacataaaaagatggcctacagtacactaatttttattacaaccgccacgacagttttgatcgtactgactataaggcgccaaatacaaatcggcattaatcttttgcggatatcccgctctctaaaggcttcttattccttagcaaaatccagttcagagagcttgaggtgggcctcggcgtaatgcgcaaagaaggcgtccttattcggagcatatttttacaccagaggac

SEQ ID NO: 19285 - DNA, 383 bp, Oryza sativa
  unsure (1)..(383): unsure at all n locations
  Clone ID: uC-osflcyp050a06a1
tttgtggccgccgnntatttttttttttttggttaaaaggaaacaaagtattctaatcaaaatgtaatagaaaacagtaaaccattgtctaagcctcaacctggtgtgaaacaggtgaccaacagaaaccaacacaggggcatcatcagggagacagttagcgtgatttgccgttcacgatgtgacaatacaaaaaacaaaatctccacacgcaggaagggaacaagaaacccacaaaaaatccgttgacttgtcttatgtactttcggtgcacttattatttacaaaaagccacgaataaccatctcacaggagtgctttaccgtgccctgttggcactgggaaaagaaacacccttaagcgagtgttcccagcattttcaa

SEQ ID NO: 19286 - DNA, 427 bp, Oryza sativa
  Clone ID: uC-osflcyp050a07a1
tttgtgggtttttttttttttctttttttttctttttttttttttttttttttttttttttttttttttttttttatttttgggggccaaagcaaacaaaggtttgggaaaaaccaaaaggggcccaaactttccaggggggtttccccaaaagggtatttttgggggtttacacaacaaaaccattggtttcacaaaaaaaaacttttggccttaccaggggcctacccgggcggggccacctttaaccggccaaaggggaatattccctcccaaataccaccaaaattctccctttgggaaccccccttttgttttaaaccgggaaaaaaaaaaccccaaaaaattgttttttgggacactttctgggggaaaaggtttttcccgaatcaaagaaacctttccttaaaagaatattccccccccc

SEQ ID NO: 19287 - DNA, 443 bp, Oryza sativa
  Clone ID: uC-osflcyp050a10a1
acgtaataccatccattttttttattgtcgacgaatttatcagatatgctctagatacatatcttgtgtgtatatagccggagctttgttttcacatatcctcacccaacgataattgtagtactcttacaataaaaccggtcggagagggagggaagagattattacatatgtgttaagagcagaggccattgagatggtacataaccaaattgtaaaataaaaatatatagcatattatatattgatatatcatcaacatagcccaaaacaaagctgcatactattattataggcagcaatccaccagcgcgatgcttgatcttagcttagttgccaccagactcctcgcaacctgggggcttgtaggcgatgaagctaatcaactgcacctgcctgacgttgtcgaagcccgtgatacggacaaaggcatcggggtaggc

SEQ ID NO: 19288 - DNA, 437 bp, Oryza sativa
  Clone ID: uC-osflcyp050a11a1
tttttggtttttttttttttttttttttttttttttttttttttttttttttttggaacaagccaaaccaaactggaattaattaatatccggccaaatatccataaaatagtcgctcaagtttggagggggggggatatagggtttgataatcattatttttagcaaggagttctgcgctccgggagactcccccagtttatggttcacacaaacccacaggcagttagtcattgtcgtaaaggaccctccggcgcctttgaaaggtaactttcgtctgtttgctagggggggtattgatttgccccaaaagggagataagccttttttaaaacccctttttagatatttccaccggactgggcagtttttaaaagaacatcctccaccccttttggtttatagggttggaccaaagttttgcgggagagcctttt

SEQ ID NO: 19289 - DNA, 474 bp, Oryza sativa
  unsure (1)..(474): unsure at all n locations
  Clone ID: uC-osflcyp050a12a1
gaaatnntaaaaccccctttttcattaggcataagaaaattacaaataactaaaagagtgacggattaaattctgaaatggcgacgaacacacagtgaaaaatgccgtcgccaaacttcttctcatcggcagtgccgttttgagtcaactacaatattatggaccccaaagcagggcacggctgcagatacgttcaaattttcagatgttgggcggaggtctttcagttctcatcttgcccgagtacccgcgttacgactccaacagcgattgtgcttccacaagaccttaagaatgccctgccaagagctcggcatttggagaattcttcaacacagaccggagcgtctaaggtaacctgcacaactgcattctgctttgacttaagaaatcgaggtgcagttttgcttggtttgccagccttgtcaagcaatgccacgattttcgtaaccctcgcagcctccttcacatgat

SEQ ID NO: 19290 - DNA, 351 bp, Oryza sativa
  Clone ID: uC-osflcyp050b01a1
ggaacccccaaaaaaaacggtccctaataaattaagggggcaatttttggggaaaactaattaaatacctggggggggccaaataatgatatccatgggtggagacattttggtttttttggcaagaaacaatactttgttacagggcggggttgaccccaaaaaagattttgaataaatgggcggaaattttgggggctggtttttttttccccagggggggcctgcccatcctagggatcctcaggaacccggggggccttcccagttgaaagcctggcgccatagcctaaaaagggggggggttgtttgcccgaaacggggccgtaccgggggggggggccaaaaccc

SEQ ID NO: 19291 - DNA, 424 bp, Oryza sativa
  Clone ID: uC-osflcyp050b02a1
ggggcaaaaagatttgagaacttgtattatactcatggaagaggcatctgaatttctcatgtactatacaacctgtcactcctgtgtatgaaatggcagagggtccatccatccacatagaaaaaggaatgggtgcccttgcgccgtaaacagatgctaatcttccatatgtacattacgattttgctttttcttttttcactttacaagttacagatcctctcgatgtatatacatactatgatccctcgcctaatcctcttcaatgtggggcttcctcttcttactgttttgaagaaatgaaataatttggcccgacttagctgcgtttggttttccagttttcttcagccattttacctatgagccccggctacgtttttgggccaaaatcttttttggcctgcaatggaaccggggaatc

SEQ ID NO: 19292 - DNA, 376 bp, Oryza sativa
  Clone ID: uC-osflcyp050b03a1
gttggctgaagccccacaaggcctttattcacatagggaaaaacatatgacaggaaaaggtagcaaaaacgctttcagtccctaatcatgacctgacctatcatttaatttcacaccggagagaacaaaagcctggttatacaacggatttagggattttaacccagacaggggaatccacagttggctgggccgaaattttttcctttggggggcccgaaggatgcaataaaaccaatttggctttttggtaactccctaaatttgggagggcttgggctgttgggggaactcctggcggaggactttcctcatgacctttgctggaggctgttctggggggcgaggggccccccacatctgaagaaaccttgaa

SEQ ID NO: 19293 - DNA, 473 bp, Oryza sativa
  Clone ID: uC-osflcyp050b04a1
ggaagccatttggcgtgttttattgatatgggtggccatcaacccaattacaagaactctttaaattagacgcatgtttagctagaacttgtgccacaacattggcttccctattacagggcttaacagaaacttctacaaaatcacaaatcaaaatattgcatcagtaaaaaatcactaccaaagttgccgaaagcctccatcttgcatcgtttccagttttccaccacttgcaagcaatctgtttgggtaataatattttgacaaccaatctgctgggcaagaacgagtccttacttgagggcgtaggcttctgccatcgttgcatcagcaacatgaggcaagtgcctgcaagaaccagctataaaatttccttgtgcatctcatatgactgctccagctcgtcctatactcgaaacaatgtcaaaagaagcatccacatttaccttgagaatttctttaggcggtttatg

SEQ ID NO: 19294 - DNA, 356 bp, Oryza sativa
  Clone ID: uC-osflcyp050b06a1
cccccaaacatttcctacaattttataagaagggattttttcccaccatggatcgattcccccattataaataactgaagagcagcctgccagatgattaaaattacatgtccatccccccaaaacacaggtaattaatgggtcgtttttgagagaagaagaagaagaagaagaagtttaaatgtcgaaaacctttttgccggggaacttgacctcaagggggttgacttttttgccgatgctggggaagttttggccaaccccctgcctgccggggttgaccttttccgggaagaccccgcccttggggggggggtactgcacccccccattggggaagacccggaaaaactggg

SEQ ID NO: 19295 - DNA, 455 bp, Oryza sativa
  Clone ID: uC-osflcyp050b07a1
gatagaacaataccatccatatgattttatttttcccaaaaaaacaccttttgttctgtacatatataccacatcaacacaaatccaggcgcagattattgttggtgtttatacaaagctaagccaaagaacccttctatctctaggctttggcagcaaagctctcgagatatctctccacgacgtcaaggccgcagagctccttgacgatcggcatcgtcgccggcacgtccatctggaacgtcagcggcgagcctccggcgccggcgaactccttcctggccgccctgatcgcctccctcatcgcgcagtgcaccgacgacgccagcagcagcggcggctcaccggacgctttggaggagaggacgcgcttgtgatcgcgggcgctgttgatgagctcgacgttgaactgcttggggatggtgtccacgggggggatcttgtacgtccacgtg

SEQ ID NO: 19296 - DNA, 532 bp, Oryza sativa
  Clone ID: uC-osflcyp050b08a1
ctgttggtaccaaatgtccttccacaagggaaaactcttacatggtgtcgtacagcaattctacagacacaagaccatagcccataggcagctttattatgttgtagaacaaaagaataagaaacatttgaagtacacagcctgctcggttgaattgatatcacaatttagaaacagtgacattttggggctaggagctgatttatatacctccagcccacggccaaccactttggtgaaccatataaatttcttcttgcaatttcaccttgtgacatgtactgttgcgcatacatcgtaatgaaaatatcatgcccaggactaggcagcaggcaccaagtcatacctccaattctgtgaatgctttggaagatgaagatcggctagtgacgaagtgagatcttctctcgattgggatctccgactttggagtgttgtttgacctggcttccacattccactagaaaactgcatttgacctaagcttccaacagaatagctgtgatagacgccaatgactgcctggaggact

SEQ ID NO: 19297 - DNA, 393 bp, Oryza sativa
  Clone ID: uC-osflcyp050b09a1
ataaaaatattatatgcattaaaagagaactggggtaaacctactcaagagttctataaacatactaggaaccccttcaaaaggaatttgggcatttccacaccaaagaaaccagattcgtcatttggctccaagcccccggggggaaaaagaaaaataagagaagcaattttgaaccctcacagaaaaacactcgataattttgacttggagcccataaagaaataacatgggttgataaaataggcttttagtcccacaaaagggtgatcatcgagttggccaacccggcttttttgaaaggtttattactcttggactccagggttggggatgccctaagaatgggctgtacaaaatggaaaggctttttatccccgtcctccacttggg

SEQ ID NO: 19298 - DNA, 409 bp, Oryza sativa
  Clone ID: uC-osflcyp050b10a1
aaagtaaaccatttcatgtcattcaccattcgtcaggaaacatgaaccatgcagaaacatggagcttatatagtagtacattgagttcacaccgaagattggtgtgcttcagtaatccaaccaaactgcccccaagtctgaacatcaccttgtgttgtacaagaaaatcggacagggtcgatcggtacacagcctctctctcttatccatctctacttacgcttgttcaaatctgtttgatcagccgcgaatctgtactatacatgcacactgatccaccgtaaattgcagtttctaatgcctcaagaaaatgaagcaaagtgttcgatcgcggtcgtggtcatggcagctcaggcttacaaggtgaccttttccatcttgcggtggagggcggtggctcgtactaggc

SEQ ID NO: 19299 - DNA, 454 bp, Oryza sativa
  Clone ID: uC-osflcyp050b11a1
aaaacaaacattgagcatgcatgccccttattcgcataaattattattagtgcaaaatgttacatgaaaagatcttcaatatactgttacacctttcaccggagaagattacgtgtttcctgcatttagttttcggtatagatcttactgccagagtatgctccattggactgaccaccatgatgattttgcaccactgctttgctttgcatttctcttagaaaactgccgctaatggtggcgcacgtttgagaattggtcgaccgagtcaccccgctcaaacacagttgctgcccccatgccagatccaatgcacatggtgacaacaccgaatctgcagtccctgccccggcgcttcatttcattcagaagagttgcgacgcaccgggcacctgttgcacccaagaggatgtcctagggcgaatgcgcctccattcacggttacttttgacct

SEQ ID NO: 19300 - DNA, 359 bp, Oryza sativa
  Clone ID: uC-osflcyp050c02a1
aaaaaaacagggtgttttatccccccaaattaggaattgggtcccgaccagttgaaccaaaaaaaaaaccttaggggaattcccatcccaaatccataagtttttgggggcaccccttttatgaacacaaaccccccgaaaaagggggggcccagggttttttgaaggcccccccccgaaggacccccaattgaaccccacgcttccacagttcacccgaccccgcaaaacttaattaagagggggttcaaagaagggggcccccaaagaaaccacctcttggaaaaggggggggggggggggaaccggcccaaataaccttggggggggcccgggggcgggagaacatgagggggggg

SEQ ID NO: 19301 - DNA, 494 bp, Oryza sativa
  Clone ID: uC-osflcyp050c03a1
cattccgatagatagcaacaagcagttcaaacaccataaccaaagcgaactcaattcatggtaacatcacggacgaagaacacctaacactggatggatggatagagggcttctcgactcgagagagccactggacacgataacgactcgactcgatgataagatgattctgacacggatagctaaggataactggccacgatgggccccaccaatcagttcctccagttcccgccggagtcgccgccgtagccgccgccacggctgccaccgtagccgccgccgccgccgccacggccgccgccgtagccgccgccgccaccgtagccgccctcacggcgcccgtagccgccgccgccaccttctccgtagccgtcgccttcacgaccgccgccgtagccgccaccgccgccgccgtagcccccgccttcgccgccggagcggggggactgggcctcattgacggtgatgttgcggcccgcgagctccttgcg

SEQ ID NO: 19302 - DNA, 225 bp, Oryza sativa
  Clone ID: uC-osflcyp050c04a1
ctggagagatttaatgcagcattattattgccattgtcgtatactacagttaacactcgcataagcaactaaaaattcacgccacttctgatgccactgatggcgacaccatcttgccatggccaccggcgatgccccccggcgacggcggtggcggcggatcaaccacaaccatgtccctcctccgcgcgacgtgccagaccatgtcggcgaggtcgcgcgccg

SEQ ID NO: 19303 - DNA, 489 bp, Oryza sativa
  Clone ID: uC-osflcyp050c05a1
aagtcttaaaggatttacttaaaggggcaagcatctgaagtcgaaaacccacgggccgagtcgctctttcaaaaaaccaaaaaaaaaaacccttcgggtgttctgctaccagtctactactagaaagagctaaagctcatcaacttccagccttggtatgatggtaccgcgctagagcatagtctgaaactctgaatgttgggactatggaggtgcttctggttctaggacccatacagtacaggtaatggagagaacatgatgtatttcgatgccgtggagatcatgcaaccattcagttagaccgagataggaagaattcatagtctggatgacggttgatagacttcttcccgttggccttgggtatcaccatgcttgacataactgatgcaccatgtcttaaagtcttcagcctctgtttcaggacttcagcacgatcagttttggggcccacgtctaatgacattggcttgatctttgggtttt

SEQ ID NO: 19304 - DNA, 332 bp, Oryza sativa
  Clone ID: uC-osflcyp050c06a1
gaaccacttaatatggattgaatgaatctgatcaatatatacagggatcagatcagttcgcttgtcccatctaaacaacactacttggttaaatgcttacacatcaaagcagttttgcctgatgggcattgtgcctccccagactccataattgggggggctaaacacaccaattcttaaatgtttcgatggcaacccaagcaggtttccattattggagagggttcaggaaagcacctgggtttggaggtcctgtcatgctgtgtagactttgcaaaaccatggggttgtcaggtcttccgatgctcccactacttttaaagcaacccctg

SEQ ID NO: 19305 - DNA, 246 bp, Oryza sativa
  Clone ID: uC-osflcyp050c07a1
gtgaggtccgacaaatttgttcctagttgatgcaaaatttaccgagaatttacaggcaccatgacatccacagtacataggacccaaattcttctcccctcccactatctggcctttttagttcttgttgtttcaccacatacaaatgttcattttaacaccaaacagtataaaaaaaaagaaaggaaaaatcaccacccaattcgttttcagctgacccctgccaactgaaagcaaataaacacc

SEQ ID NO: 19306 - DNA, 392 bp, Oryza sativa
  Clone ID: uC-osflcyp050c08a1
gccataataagactgaaatttgatatatattttttttgggggatcgttattacgattccagtgtgtacactctgtacaaaaccaaacgggattatgttcgtgtggtatctgcaactaattagtagaaattactacgcggtaattaatcattccgcgtgatttatctatatttacaattaataataattaaagaatgaaagaacatgagcggtgaggtgtccatcatccatggcggaggagggattgaatttggaatcaagaagcgatcctgccgaagccggcgccggcggccatcatgagcttgaactcctcgaagttgatgaggccgtcgccgttgcggtcgacgcccgtcatcatgcggaggcactgggcgacgaactttctgaacaacc

SEQ ID NO: 19307 - DNA, 324 bp, Oryza sativa
  Clone ID: uC-osflcyp050c10a1
gaaaatggttacaggggggcccaacgaaaccaaaacaaaattccccagattatgttttacttttggaggcccaaaactttggaactgccgggtggtgcccaacccaggggatgggcaaccaccataaggggaagtatgggatctttttgactaaccaggggaagaacattttcaagccccacaaccgggggtttgggaaaataaccctttaaaaaaaatggggccacccaacaaagggggggtttaaccttcaaaagctacaccggcccaagaggttagctctgggctttggggcccccccctgggggataggaacagaaaaac

SEQ ID NO: 19308 - DNA, 331 bp, Oryza sativa
  Clone ID: uC-osflcyp050c11a1
aaaaaaaggggggtattaacatacccaaaaattttagggtccaagccagtgcagtacataacaaacctccattttaaacaaaaaaaaaagataacattgcaaacctatcaacatggcaatgggtatttacacgcaatttaaaaatggtaactcaaaacgtttatttacaacaaaaagcctttccttactatcaaaacattttgaagaattggctaaaccatggcatgagaatgtttttaacaccggatggataaaaaggcctggctccaccaaaagaattcgggtgggaagaaaacctttggaataatttgttggccaggaggcgtgttcg

SEQ ID NO: 19309 - DNA, 443 bp, Oryza sativa
  Clone ID: uC-osflcyp050c12a1
ggcttggcaaatctataacattaaggtgatcatgaacattcattgcaccatactgataaaacgagattgggtatctgacaactaataatctaaacaaagtttgtgcagtaccatgcaatggttgctctgcaactcagtacataaaaaaacaaaaacaaaaaaatggcaaacaaaattcctccattaaatattaggttcatatggttccaaagtagccatagaaaatatccaggtagatcaataggacaaagatgcttgaactagtttcctccttagttggttactctgtacttcttaacagggttaagcagaatctttgcttcactgttgttattgaagtggtcacgaataggctgcaatatttggattattgcttttgctagagctggcttaacatcagcaggatgcaaagcaccagtcttattattcatggatgagttcat

SEQ ID NO: 19310 - DNA, 80 bp, Oryza sativa
  Clone ID: uC-osflcyp050d01a1
gccttaaaaaatcctctaatttaaaggaaaaaaaaacataaacaagagggaaattcaaaaaataaaaaaaaaaagaaaaa

SEQ ID NO: 19311 - DNA, 360 bp, Oryza sativa
  Clone ID: uC-osflcyp050d02a1
ggagcccaacatagggggtcgataccaaatttgaccaagagcaatatagggggttccgactttgcaatttgtcatcgttgccgagcttaccgccaagcgacacagcagctccgactttagaatacaacatcgatacctaacacgctgccataatgatcaaggggccttaacattccacaatggacatcagcccaagctgcctaagcgccacaacctatttatggttagcaacaacccccttagaaagaaactggagggggtaattgttacccagcttcattaccccaacgaaggagtttccgactttaccttggaaaaataaacaaggggcaaaggttgcccccccggaaacaaaaaggg

SEQ ID NO: 19312 - DNA, 144 bp, Oryza sativa
  Clone ID: uC-osflcyp050d03a1
tttttggggttttttttccttctcttttttcctcttcctttttttttctttcttctcatcctttctctcctcctctttccttccttcctttaaaggaaaaacggtcttttttaaaaccagggggggccccaactttgcgccccc

SEQ ID NO: 19313 - DNA, 410 bp, Oryza sativa
  Clone ID: uC-osflcyp050d04a1
ggggagccactgcacacggtgcagtgtcagttgtagcattcacaacataccgagtttttttttaggaggtaaaactttacgagttttacagcatagtaaaacgtagccagcttttactagatacgagtagcattttttaagtcgcaaacaaaagggatacagtcccggcttaaggggtgtaaaatcagcttaactttttttatgttcgcccgaacgggaaacagagcacaatcatttttgggttcaaaaatttacggcaaacctttgtgacgacgttgatttgggaaccaatgaccagtttcctagatgacaaactcttgttactggtgggcgcacctgaactttctgggcaccttcaggcatttaaaatgtctcataatacgccttctgggaagattgggatttttttt

SEQ ID NO: 19314 - DNA, 331 bp, Oryza sativa
  Clone ID: uC-osflcyp050d06a1
cccaccgaaaaaaatgggggggatcaccaccccaggagtcctgttcaacattgctaaatttacgagctactacaactaaattgggatgctgccacagttgttccattttacaacagggggacaggccattcctagagatagcccccagcagggcaagattgtccaaaaaaggtttaaccatggctaattgattacagatcttacaaaccaaagggcttgcatttttgggagcttccagttttccctaggggggctaaaaagggcaatggctggaaaaaaaacccctgggcgggatttccattaagttaaaaccaccctgttttttaaaagc

SEQ ID NO: 19315 - DNA, 371 bp, Oryza sativa
  Clone ID: uC-osflcyp050d07a1
aggacaagaaattatactgcttggcacgctcaaagtaatcccagcctcttggcacattccacgctgctgtccaacgtctcctccaccgtaaacttgtacttgaaccccaaatccccaagcttgtttgtatccgctttcaccctcacatccttcccaatcacccctttaagctttatcgcgatctccgggtacttgacagcgaaacggtcgacatagtcctgcatgttggggtacccagtggcgcagaggaatcggccggcgatggacggttgctgctccatgcagaagatgtgtgccttgcatatgtcgtcctatgtgcgccagtggcacagaacccagcagcgcttgcagggacttgaggccgccctggt

SEQ ID NO: 19316 - DNA, 230 bp, Oryza sativa
  Clone ID: uC-osflcyp050d08a1
aagcccgaaaagttcaaaccgaatgccactggccattttaattcaacagattgcagtcgcaaatgaccctgaccaatgactttttacatgggcgaactattttccaaccttggttaggacataaaggaattgattttttagacccaattacattttccgttggtttggcgggccgggccttacaaatggtaaaaatcggggtaatttaaatatatcactttccttgaaac

SEQ ID NO: 19317 - DNA, 440 bp, Oryza sativa
  Clone ID: uC-osflcyp050d09a1
gaacttggaggcatcaaggcgaggccaaccatacacttgcatttgctacagcgacactagagttttcagtcaaaataatgcactcaactcaacacacagaagagtatccatctaatgctagagacaatgaggctaaactagattgatgaaagatcctcatacacagacttgatcccaggtctttcagagaccggccggatgcatctcaaggcaatgcccagcacatccttcatgcccttgacagaaacttggttctcagaatctgaagccatggctggatcaaagcaatctgatccccgaccttcagccacccgcagacggacccaatcagtcaggtcaacaccacctttagaacccgagacaacatccccagcacacctgccagttaggagctccagcagcacgacaccgaaggcgtacacgttagacttgaacgaggg

SEQ ID NO: 19318 - DNA, 295 bp, Oryza sativa
  Clone ID: uC-osflcyp050d10a1
gtatattcatttgtatgcttctttggtcactgtatgtatgtcctatctgcaaaacctatgcagtttgcggatttacatcggcggagggtccagcgggctgtggtgacaggcctctcttttgtaacctgatgatggaactgagcgacctcactacatgccgtagccggtttacagggagtccttccagtgtagggcgagaaatgtcactggttgtgggttggttggtgtctttttttgcagcttagaattaccagtacttcccacttgcttctgccatctttgtcaatgtgcactt

SEQ ID NO: 19319 - DNA, 452 bp, Oryza sativa
  unsure (1)..(452): unsure at all n locations
  Clone ID: uC-osflcyp050d11a1
ggtgccagtatcacatatggttccttcatattgaaagagacagtattacagatgcggttacacaacaacctgaaaaaaaaaaagaacaagacaaactgatagagcaaactgcagagctctcttgcagtttcagctgactcaaaaaaatgaaaaaaggataaaacgccgaagatatctgaacactaaaactctggctgctacaccgatatcactagcaacttcgcaagtcgatttcaaccctttcatcatcttcccatcttctttttcttccatggagcaaccagtcactactgatcaaagacacatcaggttggcggcggcggcgccgacaacggtcggcaatggaggtagatagcgagagagagacccccctcttatgggcataatttttatcttcttccttaggaagatgnttttttattcttgggggggttggcaacctcccatgtgaa

SEQ ID NO: 19320 - DNA, 312 bp, Oryza sativa
  Clone ID: uC-osflcyp050d12a1
ctccttgcttattttggccattcattcattctcaatcattcatggggataatttaacacatgaaacaatccatacatacatacatacatacatggcatacgtacagaggagctgagctaccagcctaccaacaattacttattattactattattctccccaagcactaatccaatccagagatgaacacaagagccacaagaagaagaagaagaagaagaattctggacaaaaggcctaaagagctagagcagcaagcagacagaaacagaggaacaagtgagacgacttccatggcctttttttgggtca

SEQ ID NO: 19321 - DNA, 353 bp, Oryza sativa
  Clone ID: uC-osflcyp050e02a1
gctaatctggtattttgatggtattaacaaggaataaagtagtagcaggtttaacagccgaacatacttcacttccccaacattggcaggtgacacaagattttactcatttccaacagaaagctgcagggaagggaaactacctctagctacatgctatggatgttcttccgaatacaaagtagtattattaccaccactagaagagctcaaactcaatgtcgtctccattcagcctgaactccaggcacttgccttccttctttttccgtgccgtcgtgaggcttgccccgtcgaaacttttcggagtctcaggcggtgcagtccattggatcaatgcccagttcaggcct

SEQ ID NO: 19322 - DNA, 325 bp, Oryza sativa
  Clone ID: uC-osflcyp050e03a1
gggagagaaaatcaccccatgttacccactaggaagaatatattccagggtaaaacaggataaacctgtgtaacaaagcagtcccctaactgaaaaagccccccatagtttgggctactacaacagtaaaccgggacagaacacatccaacacgaagacgactagggcatgggggttttgaccattgcaatactggcagcacgaattcgaggggccgcacaaaggcgcaccccatttacttaaaaagggtttaaacgatggaattagcattgagttttttgagggcagtgtaagactgaccacagcccacaaaaatgattggagc

SEQ ID NO: 19323 - DNA, 175 bp, Oryza sativa
  Clone ID: uC-osflcyp050e04a1
gggaactaaaagttgcattttatttgaagactgaaactgtacagttggttgcgactgataaatacatcgggggctgatgagtgatgacaagttaagaaggattaaaaagatatttacatttttttttgtgcgcaagaaagcgcatgctatgtacacaaatgacatgagagcttag

SEQ ID NO: 19324 - DNA, 363 bp, Oryza sativa
  Clone ID: uC-osflcyp050e05a1
caggcgttcaaaggcattcaattgatataggggcccccccataaggttgcccaagcaggggggaggggcaaaaccgggaaatttggggcccctcccaacgacaaaaacgccttcctcctggtggcccccctaacagctaaccatgaccctccaaatttttgcatccggcatttaaataaaaggggacgggggaaatggcagccggaaccccggaaacggggggtccccttttgagggccccggccccggaaaaattggggttagccgccttggggggcccattggggacgggggaccccccgggggctaacgggtaaggggggatggaccccttgtcgccaccagaaggggcgggggtagccc

SEQ ID NO: 19325 - DNA, 291 bp, Oryza sativa
  Clone ID: uC-osflcyp050e06a1
agaggagatcaaactgtgtttatagactgaactgaaacttgattatacagtttgccacgactcctaactcaagcccctatgacgtggatacatatgtacaaaagttttgacacctgagaaaatgatctagtttccctacatggatagctagctagtagctatctcatgtcatggagtgttgccaagaaggcgtccaacttgacattgtcacctcgagacaagaacttgatgcagatgggcgccctggcacccatgagtgtcagtatggacagcaagatcgagccgacgccg

SEQ ID NO: 19326 - DNA, 417 bp, Oryza sativa
  Clone ID: uC-osflcyp050e07a1
gtaacaacccaaaccactgccaataaatcaacgaaaatatacacttctgtaagtaatgacaccacacaactgaacaagataaccttgacaagatgaactgcacaatgaagatgaaaaaaaaaaacgtactgcactgggactttcacgaaggcttcaatcttcagattgagcattcgtctcatagatgcaccggcgtttgttgtaccggatgtacctcttgccatcggtgctggtgatccgcacctcggggatctgctgaacgatgctccagtttttggcaccggtcaggcagcttctgagcaatgagaggctgtactgaagcttgaaatgggacagcccattgggcttacggatcaacagctccagccaccgtgggaatgcattcttcaaaagaagaatagtttatcaaaataaaat

SEQ ID NO: 19327 - DNA, 414 bp, Oryza sativa
  Clone ID: uC-osflcyp050e08a1
ccagaatccattttcttattccatcataatatgatgaatacaagctcaacaagatgacagcgattgtttcattacacaaatatataaggatgatacgagttacataagcacaactagacagagaaaattgatttggaaaacaaacaaatcgcaataaactatcggttacacgggcagttttgaaacaccagctctgccacaacttatgcacgttcagatcacacttttgctatggtacataagctcaaacttctatcatcgggatcggggaaacccactatgtcaccaagcaatctggcgacgcattactcttccatatcctgggcacgttccgcacgggaccttgatcgggtctgataaactttccttcctccactattgttgctggcgttcactttatcactcaagaagaac

SEQ ID NO: 19328 - DNA, 412 bp, Oryza sativa
  Clone ID: uC-osflcyp050e10a1
gaacgagttgagaatttcacgccgcttgtattatggtacgtacaaaactacaaacaattgtaccaataattttggtctagtaaactgtaagcacaccatttgtttccccattccgcccttttttgggtacatacatatttgccgcctgactgacaaatataatcgttgctggtaagcacaaaaccacaaatgttatttatacaaagccactaagttactgggggaaaaaataatgtaacagccagcacacagtaaagaaaaaacgtaagggtagtttttttctttgcccagtctattgggggccgtcactgatggacccgctcttttgaagcttcagactgaggtttctgaacctttgttttgagaactgcctagatgccttcccccagtcagggccggcctttataatgac

SEQ ID NO: 19329 - DNA, 78 bp, Oryza sativa
  Clone ID: uC-osflcyp050e11a1
aaatataacgggggggacaaaaaaaaaaaacacaactaacacaccaaacacaacaatcacaaaaaacaacaacacacg

SEQ ID NO: 19330 - DNA, 314 bp, Oryza sativa
  Clone ID: uC-osflcyp050f01a1
ctgatctattcatgcaaaaattttccaaccaaaatgaggccgtgaaatatgcatactgatttcatctcaactgagatgagcagattacaccgccaaatcgccaatacaacccatccagcctctctgaagtttgagctatttacaggtgctccccccggtagcacaaccaagcatgcagctgtctgaccattttttcaggctacagctacctatgagaaaagcttttcaacccaccccccaaattattaacttttctcaatgtgcaaaagtttctttgtgaccatgcggtggacttttcttaagcttgcgccttt

SEQ ID NO: 19331 - DNA, 404 bp, Oryza sativa
  Clone ID: uC-osflcyp050f03a1
ctcatgcacaatatacgatacatgtctgcacagactaactccctaattctattaaaaatagcctgaaaaatacttggggataactactgaactaaacagtacaacgatcgaccatgcatgccgttatcagaggctaacaaagaacagtatcaccatgcataatgcgccgctagcctcatggtcctcctcccatttgtgcttggtcagcagcgccgccgatcggaacgtgaacaccaggaaggacacccctttccctagctcggcgacgtcgcgcaccacgttattgttcgccatgaggcgctggtagtcgccgccggcgccgaccagctggtactggccggtgaacccgtcgtcgttgtatccgcacctgaagtcgtagcgccgcccctccttgttgaacaccg

SEQ ID NO: 19332 - DNA, 171 bp, Oryza sativa
  Clone ID: uC-osflcyp050f06a1
gcacatctcaatttcagtagcatttttcatagcatcgagcagcaccaaagcatgcaaccgatgagttttatcagaaacaagaggcacatttcatagagtaagggcgcatcaaagattcaagagctagcgtattcacatggagtgcacaccacccaatactccccccccctc

SEQ ID NO: 19333 - DNA, 419 bp, Oryza sativa
  Clone ID: uC-osflcyp050f07a1
cttacttccatagtgcttaattacagaggaggatacagagcgaacactctcattacatcctcataccatttcagacatctctctagctagatcgcctatgactccactaacactatcactactagtatttgatatttcagtgatctatcggcgtaggcgcatagttacataggaaaaaaaaaacactgcacgcatcgccagcgaccaccttacacacagacacacggattcaagacacagacacagattcatgagacacaacggatgcgtgaagcctcaggcacgtcagctagctagcttcctttgccatagatattcctttgctcgattggttattttgttttttcagatttttcagacctttttcaccacgctggatcgcgctatagttcatcggtccaacgaactgatgaccaccc

SEQ ID NO: 19334 - DNA, 208 bp, Oryza sativa
  Clone ID: uC-osflcyp050f08a1
tttttttttttttttttttttttttttttttttttttttttttttaatttttttttttttatttaaattaattaattaatataaataaaaaaaaaaaataaaaatagaaaaaaaaaaaataaaaaaaaaaaaaaaataaaaaaaaaaaaaaaaaaaaaaaacaaaaaaaaataaaaaatttaaccaaaaagaacaaataccacaagac

SEQ ID NO: 19335 - DNA, 277 bp, Oryza sativa
  Clone ID: uC-osflcyp050f09a1
gcacgcgacgaagctggacctttttagcggcgcctattttgttttgactgaataaaagggagatgaacgaatatactaaacactcacacgatgacaggacataaaaggtccccaactaactgaaaatcataaaacaaacaagcgcaaaagctaacggccacccatctgttattcatcggagatagaatcgtatgacccggtgtaatatttattacttcaacttttggccacgcatcggaagatgccgtacacaacaacaaaacccggagggaaacac

SEQ ID NO: 19336 - DNA, 458 bp, Oryza sativa
  Clone ID: uC-osflcyp050f10a1
acagaaacatgcaattcggttcagtacctctcaaaatattaacttaaaaatagtacactgtttccccgtatgttacatatgataaagtttaccaaagcgaaatagacatactgaacaaaagcacggaggttaaatataaatagcacagcgatctaactatataaatcatcatcgtcagctgcggcggcagcggatgcgaaggggtcaacggcggcgccggcgccagacgctggctggtcagcgaacctaaactcggtgccgaacccacgagactgctgcagagtctgggcgaaggcctggtacttgcggatgtcggcgtcactcacactccggcgtgcgtacttcatcgactccttgaagtgagccgccttgatctcagcaatattatcaaccttgtcctccttcatggctttagggttggcctttcttcggttttccatcttgatgtccttttcaat

SEQ ID NO: 19337 - DNA, 382 bp, Oryza sativa
  Clone ID: uC-osflcyp050f11a1
gagtgtgaaactagcaaatctgtcataacaaatagcaactcatcatgatgtttcactgcattaatgcagttgttattgtccaaaataaatacagaagccataaactagtgtggtgttcttattcaaaagtaaaaaaaaaaccaaaataaatctcttctcattgacgataaagcgcacagagaggttaatttagctcttctttaagtggtcaaaattggcgggaggtagtcggatttggcgccaaggatccgcgcctgggtgtccgggaagaactccacgccggggagctgcgtgatggtgccgtcgccggcgacgccgacggggtaggcgagcaggtggcccgggaggttgcgcttccgcccgttgccggggtaaaggtccc

SEQ ID NO: 19338 - DNA, 408 bp, Oryza sativa
  Clone ID: uC-osflcyp050f12a1
agtaaaaatacaagttcgtgaatggcgataatacttaaagctaccttcaaatagcgtgtagcattgcgtagcaaaccaagcatataacttaggacaaacattcagttgcagcttcacatcatcgctgcttatcataactgcaataacagcgcagatggagcataaactaagtatatttcgtagttctagcttatatataatatcagaatcaccaactgtgaaccatccacaggatggtcgggggactactgatcagaatctactcctttgaggtgtggatggcagacacggtggagaccatagaatccacgccacatttgttgcggacgttggagcccctgcagaacttgttgtacccatgcttccccagtttttggcccaggagttcttgatgaaccagtaggccct

SEQ ID NO: 19339 - DNA, 382 bp, Oryza sativa
  Clone ID: uC-osflcyp050g02a1
aatcccatcattttaatccactaatcaagttttatttcatttgcaggagatgatccacaacaactggagcatataacgcataagagcacgagctaagttactagtagaagatagcagaagcacaaaccatcgccatgtcatatggctgaaatcgattggcgtgccaaatccccaaatctactcgaacttgtagtgcttgtcgacggcctcggcgacgtcccaggggcagctcatccccttggggaacaccaccaggtcccccgccgggatctccacgaaatcctcgccggggccgttcgggaacacctttacctttccctggagaagggagcccgttttcttggccgagtacgtccacgggaactttgtttttttggacccc

SEQ ID NO: 19340 - DNA, 404 bp, Oryza sativa
  Clone ID: uC-osflcyp050g03a1
acgactgaatcagctacacactgggattaatgtatttatcgatatctataaccgaagatatcactccatcaaaatttaatcagatacttccaaagaatcctataaatctcgcaatatttctgcacaaattgcacacttctttaatttcctgacaaataatcttcctgcctcttagctaaattcctagctatttacacatcatgcatgattcatatgcgtccttaggagatgctgctgcctgctgctagtcgtcgagatcttcaaatgttgaggatgagaagcccagcgacgacgcgaacgtggccgtggtctcaccgccgatgtaccgcttgagccggtccaggtcgtcggcggcgtccatcatgggcgggcgcacgggcgggctcttctgcgtgcagaggatg

SEQ ID NO: 19341 - DNA, 235 bp, Oryza sativa
  Clone ID: uC-osflcyp050g04a1
gggcaaatgtccacggacgctgctcaggcgatttgtcttgtgaacgaatgctcgatgcacatcaaatatgaaataataagacttgctgacacactcgagtaatgaccctttacacattgcattagatatgaagacatgcatgtgttcttagttctcactcacaaaaaagcacccatttgcattctaggccttcacgccaagcataataaagtgcaattatgaagatttaatcttc

SEQ ID NO: 19342 - DNA, 346 bp, Oryza sativa
  Clone ID: uC-osflcyp050g05a1
gcgcaaaaaaagttttattagtcgttcaaatgcattcaattgatttaggggcgaccccataatgttgcccaagcaagggagatgagcaaacccaggaaatttgtggcccctcccaacgacaataacgccttcctcctgttggccaccctaacagttcaccttgaccctccacatttttgcatccggcattttaataaaaggggccgggggcaatggcagccgtaacaccggcaacggtagcgccccttttgagagcaccggccccggaaaaattggggatagcctcattggcgggtccattggcgacgggagaccccccggtggtaaacggtttaggggggatgga

SEQ ID NO: 19343 - DNA, 308 bp, Oryza sativa
  Clone ID: uC-osflcyp050g06a1
accacaacaattggaagggttttcaaattttaatgacccaagcaattcctcagggcgattattaaaaccttttgggggacagccattcagaacagtaaaatcaagaacggaaatacagaacggcctttttaagaccttttggatctgggcttttaaccaaacagaaaggttttgaccaaagcacggtagttcaaggataaaattttcaaagacgtcatttggatggaaacgggtttcttattgggaccacactttcttacgaacgggttttattccggatcgaatcgggggatccggaggaggggggg

SEQ ID NO: 19344 - DNA, 443 bp, Oryza sativa
  Clone ID: uC-osflcyp050g07a1
cagattggaatcagatatatatagctcggggggtaagatggcacgctaacagtgacaaaccttccaaaacgatacatatggtaaacagtaaacacccttggagctacaccgatcaggcacgctagtatctccccgatgatgaactacggttgtagctagtatctccccgattatgccacgctaggtgaggattgctgttgcccgaaggaaagcttgactgcctgagcaactatcaatttgaccacacatggacaaggcctagtcggttgccggtgtatatctcctcacgctcttcatcgtagtacagagctgtgatgtcccccagtgccttggaaggggtactttggaacttagacaccctttgcttgttaaggttccctgcctttattttggccaagcattttccggttaagatctcactgatatttatggagcaagcattt

SEQ ID NO: 19345 - DNA, 426 bp, Oryza sativa
  Clone ID: uC-osflcyp050g08a1
atcatcaaaacaataaattccacagtagacccaaacagagtgtcacccattaccattagtgtagtcgataaattttcttctgaagaagatgagaaaaatacatatattgtaataataaacacgtagaaaacttgagcacaacgcctcctgccatggctgataacatggatagccagatgaaagggagaacatcatctcgtcgaacccaaattgtgaaacgtatgaccctgcgacttgttgagtaggagtgcattgccaaatactggaactgaatctcccttctacggttagcttggcagagaggggtagaccgggcgggtagtccagatgggttagaattagtctttttcgttaaacttatcaccggaataccatcgccgggagccgatttgcggcggatgcaaccgccggcaacggggccagccg

SEQ ID NO: 19346 - DNA, 414 bp, Oryza sativa
  Clone ID: uC-osflcyp050g10a1
aacggatactcggatatatagcttagatatttttgcaagcatacaccaatccagcacagcaacgtatgtgtccagcggctactgcaatctgcatcaccaccagagagataatcatgtcatgtggggaactcgcatctcgtgatcgtcccctcgctcactgcaccacaccagaatacgtgcgtcacggtgcacgcgacacgtactgcaagaactcgtggtcaccgagcaggcgggccatggtgtcgggcgcgaggcaaaactcgacgtcgacgctgccgtccccagcctggctcgggaacgccgacatcttgccgtcgaacttgttggcgcgcccgctccgcacggagatcgccctgccccacccgaagtcgttgccgtcgtacatagggaaccggggcgagctccccatcgtga

SEQ ID NO: 19347 - DNA, 69 bp, Oryza sativa
  Clone ID: uC-osflcyp050g11a1
attatatattttttgttgtgtttggtattatcacattaaaggtttttaaacaatagaaagaaggggaaa

SEQ ID NO: 19348 - DNA, 346 bp, Oryza sativa
  Clone ID: uC-osflcyp050g12a1
acgggctaagggacgccaaatgtataaatagggtgccattgcttgcagccttgcactgccaaccatttgcaggtataataatataaacattcaatatccccaagaaaccaacaaaaaaggacagaactaaacgatccatccccatttggagattctgtccacacttgttcatacttttattttgcatgactatttttttgggttcagacatcatttcaatcgttctcatatcacaggggcacatgatttgagatgcttaatcaggagaatcaatggagatgatcccattagctgtcaccaatcatgcttggttttcggcgtttatccctgccccccccagtttggt

SEQ ID NO: 19349 - DNA, 247 bp, Oryza sativa
  Clone ID: uC-osflcyp050h01a1
acaaaccccatgttttaatcccctaaccaagaattatttgattcgcgggaaatgacccacaccagctggggcataatactcaaaggagcctgcagctagtttctagtataggatagcaaaaccacaaaccattgacgtgaaatatggatgaaaaggattggattgtcaaatccccaaatatactcaaactcgaggggcttggagacagacttggagacgtcccaggggcagagcttccccttgggga

SEQ ID NO: 19350 - DNA, 257 bp, Oryza sativa
  Clone ID: uC-osflcyp050h02a1
caccccatgcaaatgggaattggatttataaaactgacaaaaccgggaaaaactggcccatagatgcaagtttcagggccctgcaacaggttgtctaacccaccaaggtctaattaccaaccgggggggggaggggcccctttttacccgctaagacaacggcccaggaaaagaccgggcgtcccagggggcgggggaaattcccttggggccattggccaagtaagccccggccctggggcctttccccccatttg

SEQ ID NO: 19351 - DNA, 475 bp, Oryza sativa
  Clone ID: uC-osflcyp050h03a1
caagaaaaaacataaggcaaaatcccaccccagccatgagggtttccatttttagcataacagccggaaggtttattccaccatcctcaaaatgcccatccatttgacaaagtggcagggggttaaaaggggcgcaaaaaccccacccaaggataaactgggggtttgggtgaaaactgtaaaaagttccatcgaaccccagagaaaaaatttgtccaaataggacacaggggacgacaacctttttacaaaaaccattacacggtttaacaattttaacggggagcagaaaccggccgcctaaattcctgggggccttttcgttatttcccaattgtaggggtaagatagggagaacaacactggttttactccgtttggggccaggaaaggccctcccccccccccgcctggggggggaaaaaaacctggccaagagaaaaaaaaagggggagccccctgggggtaaaattaa

SEQ ID NO: 19352 - DNA, 490 bp, Oryza sativa
  Clone ID: uC-osflcyp050h06a1
aaaatcacaattcaagatatatttttagcataaaagccataaacgatactaattaatccaacaatagactaataagaagtcactgaaacgtgcatttaactgcagactgcgataacaacttgcattttctcgacggcttcaaaaatacaattcaaccctgatttgatcacttgttcaaaccccgtccaattcaggcaatagcttcaccccgatcttcataaaatttcatcaacccaaactcccatgctatatatagtgcttgtgcttagatttcagatgtcatttcaaatcgatcctgcccacgaagttccggggcataccctggtgccgtgccaaaacattcctgtaaagatagatgaccaatctgcatgtcaatttaaacatcaaagagcatctactatattgcttattggaaagcagtgcaaagacattccgagagcactggcagactcatgtatgcgtgcaagtatgtgcatgataacgcgagccg

SEQ ID NO: 19353 - DNA, 284 bp, Oryza sativa
  Clone ID: uC-osflcyp050h07a1
aaaaaagaacatctttctattggaggaagtacgcactgagaataatcaatttactgaacaataataataataagtgacataatacaaagatcaattaaaacacaccccacgtatgcatctcgtgcggctaaattaattaagctttttaactagctagattcattctacgagttgatgacgtagcacttcttcctgatctctccttcctccccggtgagcacctggacgttgcccattttggtcatggacttgccgaaagttctgaagaactcggcgtctaactt

SEQ ID NO: 19354 - DNA, 329 bp, Oryza sativa
  Clone ID: uC-osflcyp050h08a1
tttgggtgtttttttttttttttttttttttttttttttttttttttttttttttttttttttttttttttttttttttttttttttttttttttttaaacaaaaaaaagggggggtttctatcttctctaaaaaaaggggggaaatttttttttttttacccattacaaaagggtaggcataaaaagataaaaaacccctctcccctttaggggaaaaaatataaacccacccccccaaaaagttctttataaaaaaaaagggccctgtagggaaaaaaatagtctcggggggcctttaaaaaaaaaacaaacttttgaccggggggg

SEQ ID NO: 19355 - DNA, 432 bp, Oryza sativa
  Clone ID: uC-osflcyp050h09a1
ggccgctcctctggacgccctccaccgccgccttccgccgcggcgccctcagcgcgacaacaacgccaacgccggcgcgcgcagcactgccgtcgacgacggggaggaacaggatcgtctgcggcaaggtgacgacgacgaacaattacccctcctcctgtcgcagtcgcaggagcacgatgatgcacgccgccgcgtggctgctgctgcagcagctgagcccagcagcagcgcgcgtggcgcgggcggttgatgacgattcatcggtgcaggtgagcaagggcagcgcggtgcccaactttacgctgagggaccaggacgggagggcggtgtcgctgtccaagttcaaggggtggccggtggtggtgtcttttaccccgccgacgagacccccgggtgcaccaagcaggcccgggccttccgcgactccta

SEQ ID NO: 19356 - DNA, 472 bp, Oryza sativa
  Clone ID: uC-osflcyp050h10a1
gtcaatgagggccaagctctgagggcccaaaatcaggagacgttggctcaaccggaagaaagtcttgctacatcccaaaagggagaaagccttgctacaccccaaaagctacatcaagaggtgagtgactccccccacttttaagttagttcaactctctctaaataaacaatgtgtgactattcccaacaagctctacctcctgccgtactacttctatcttctgccactcctcccatctttcggcaaggccatcaccttcaagcatcctcaccacctccgccattttagggcgttctgtgggggagccttgtgtgcaaagaagagcaacctggattagtgattctacctcaacatcaatgtagttgctctgtagatctggatcaaccaacatctccagccgttttctccttgagtaatccttttacccagtccagtagcatgacgtcatcatcattggctagaccagcaa

SEQ ID NO: 19357 - DNA, 376 bp, Oryza sativa
  Clone ID: uC-osflcyp051a02a1
ctggtatgtttaatggcaatcataccatagtcctaactcggcttgtcctcttccttcgctactcgaataatgctcaacgccgttatatttgtcccgaacaacttatcccttacagccatgtactccggccatgtcacggcctgatccacggccttgctctccggtgaccccgccgccacgagaggtgtcacctttatgtcggccggcggaccgaggaagtagggcatggcgatccggtttcttttcccggttcacgatggcccgggggaacacgctggggaagctccccttggggagcccatggaagagatcgcctactacgacgattgagcgcccccggggtccccggaaccgtcacccaaccttccggccggtg

SEQ ID NO: 19358 - DNA, 348 bp, Oryza sativa
  Clone ID: uC-osflcyp051a03a1
aaaacggaccacagccggccgggagttaattcctgtttgaccaacaagggtccagagatcttcctccccccccagaacactgaagcctttgccatgcaggcagttttttttttttttgaaaggatgatccagatcggttgcaactttgtccccccccccccttgtacaacgcccggcccccaaaacattttcctagggcaaagttggggggattgcaggggccctttaaacctggaggggggcaccaaaaatttttttttaatttggaggaacagaagcccccttgtttttggggttctaatagcacttaaagcctcaaagagctttggaataaaagcacccttgggg

SEQ ID NO: 19359 - DNA, 426 bp, Oryza sativa
  unsure (1)..(426): unsure at all n locations
  Clone ID: uC-osflcyp051a04a1
ggcacttcccgtcctgccaaatactttgggatttttttaaaaaaacaaataggatatatccaagatagacacgctacttttacttaacattgtatttaacatctcagcatcaccatagctgaatgttcttcaactcccagtgcgatacacaccaaaacaaaacacggcaagggacatgtagtaacattacagggctactagagagagagagagagagagagagagagaggagtanaacgaacatattctaccggtagcaccatctttcaccatttctgtatgtgcactggtattcacagccctctgggggttcttgcttttccacattgtcatgaggacgccaatatggcaagggcacaggccacctgtttagcttgacactgccatttccagggattttccagccaggcgcatcagatggatcac

SEQ ID NO: 19360 - DNA, 383 bp, Oryza sativa
  Clone ID: uC-osflcyp051a05a1
atcattacgcttgcaaatgatatcagataagtagagtcaacaagacaaaactgtatctgccaaagcacacctccccaactccacccaattacgccattatttctgggcaaaagcaaacggcttcccattcctccccttcaccagtctcaaaccataaaccccacaacaaatcctcctaagtgacggcatataagatgatgaaaacaaagcaggatactccagagtcgtcatggcgaacttcaagttgacacttctcatgccacagccgctagtcgtgctgggcagcctagtaccggtagtgcgcgggcttgtagggaccctcaactggaacgctgatgtagtcagcctgcgacttggagagcttggtcagcctggcaccaagc

SEQ ID NO: 19361 - DNA, 376 bp, Oryza sativa
  Clone ID: uC-osflcyp051a06a1
gtgccttataccgagaataaagtaaggtttgcagcagtgaaacaaatatcacggcaaaaaaatattggccggatcatatggaaagcctcgagatggtacaggtagaacacaccaaaccactagtaggttggatgtgcgaataattgttcctcaatatgaggctgggttggccctagatgaaatcaggcttctcagggtaagtgcagccagaacgctggatgataacatttgcggcatagcaaccagcctttacagagaccctaatgctcttttgctgaaccaattgtgagaggaagccctcaacaaaggcattaccagcgccgttggtgtcaacaagctttttcctttggcagtaggatcacagggaatgttttca

SEQ ID NO: 19362 - DNA, 378 bp, Oryza sativa
  Clone ID: uC-osflcyp051a07a1
ttatattttttttttttttatccttttttttttttgcttcaatgaaggacagcattaataatattaactcattacactagacatcactgcctcatttcaggacaagaaagggaaatttgagtgccccaggttcttgttaatatcatagggttactcatcttagaagagatcctaagagcatcacgttttgtcaacctattgggctgacatgaatatgttccttctggtacctacttaatggttaaggctcagttcttgatttaaaacggacacaaccacagaagggtatcctctttttcttccgcttttgtccggaatcatttttggcccttccttgcaggactttaatcctctaaaagaacgcgcgaacctttttta

SEQ ID NO: 19363 - DNA, 274 bp, Oryza sativa
  Clone ID: uC-osflcyp051a10a1
ttttattttttttttttctcctttttttttatttttttttttttgtgggtttttttttaaacaaccggggctagagagggcttttaatttttagccacctggtaaccgaaaccaaactggatttacattggacatgaagcttggaaacctaaaaatattaaggggcacacaaagtcctagtaaatgccgggggaaggacaccaacttttccttatcctggggccacacaacatgggatttgaattatgaactggccaagccatgttttgtttgt

SEQ ID NO: 19364 - DNA, 234 bp, Oryza sativa
  Clone ID: uC-osflcyp051a11a1
gttgggtggttttttttttatttttttgtgtttaaacacatataatcaatttagggaacctttttttccacacaaaaaagaaggattcggggagagaaaaatccaaagaaaaaatgtgtttggccaacgccatccattaagaagggccccaatggaagcccttgaaaggggataggggcaaaaaaagggaaggggcggggggtgcaagaaaacggtaatccccggcaccgggtt

SEQ ID NO: 19365 - DNA, 402 bp, Oryza sativa
  Clone ID: uC-osflcyp051a12a1
acatatcccttcttctcatagcagctttccttgtccataagctacaagaggctggacacctctgcctaatattcaaactttaaaaaagcatgccccaacttgccccaccggtcatacaattccagtttccaaagaagcacatggcatgagagccctgcatgcagaaatctctccaaatacaacaagattcaaggggcacatgtccgcgcaatgaaaacaaatgggaacctgtacaaacagcctaagcattgccatgagtccaccaaacagttgctaagggccaaagccccttagaaccaaccaaacctcttattttacggactttagtactccactttagcaggcgtgacccatggagtaagggctctgatgatatgcacaccgcccagactgagacatact

SEQ ID NO: 19366 - DNA, 279 bp, Oryza sativa
  Clone ID: uC-osflcyp051b01a1
aaaattaaccaaactttgatttttaacaacaaaaacaatggccggcgaatggccggggatcgatggccggcgctgctacgggcggatggagtaggggagatgacccccccgcgcgctcgatcgatcgatggatcgatcgatctcacacatgccccttgggtgccacgccggcggccccggtgagagacccggcaacgttggcgggggttccaattccagccccaactccagccccgggggtgccgggggctatggccccaaccccaggggggccctttt

SEQ ID NO: 19367 - DNA, 431 bp, Oryza sativa
  Clone ID: uC-osflcyp051b02a1
tttttcttggtttttttttttttttattattttttttttttttttttgtgtttttttttttttctttttgggggaggccggctcaccctaggggaaaacggattatgcgccggcactgggattcccccctcggccataaaaaaaaagccccccttaaacaataaggcgtcccttttttaaagcccgcgcttttaaacccgcggaaccatgcccccaacaaggggcacccctccggagcctaaaagggcctgatcctgaacttccgaactttccctcttttccgggggggcggccataaacttaaaaaatttctcccttttttttaaaactatctaaaatttagcctttgggggggggcgaaccttggatttaaggtttattccccccgggaaggtcccaaatttttttacaacaaaaaacccggttttttt

SEQ ID NO: 19368 - DNA, 324 bp, Oryza sativa
  Clone ID: uC-osflcyp051b03a1
gcgaggcgtttttttgcgaaacaccgataagtgcggagtcggcgcgtaatctcgagaaagaaccctgcggtttttccttccttgcagaagcagaatcccgctcctgcaccctgggtcccaaatgggggtagttttggcatgcccgccgagaaacttagcccggccggcaacaggctcgagcgaatctgggcccgggcatcattaggtggccggggggtgcactcggcagacccacgagagcgacggggtgcccatcaggcacaggcccctcccgtatagtgccagtgctaaatctcaacgctacccctctttggcccccaggct

SEQ ID NO: 19369 - DNA, 466 bp, Oryza sativa
  unsure (1)..(466): unsure at all n locations
  Clone ID: uC-osflcyp051b04a1
aattcacaacaccatatttcattgatcaggttcagaacctgcacagaaatacacactaccggtacagatctcaccttctctccaatactcgtacatccatccacgcggtccacacgaatacgtacatctatacggtacacgtacgtacatctactgcaccgngtacacacacgcacactctcctgcagagacgcgcatcgtcgtcaacctagctagcttagctgaaggcgatgcgtcgccatggcagcacggcggcggcggcgctcacttgccggggacgaagttggtggcgtaggcccaggcgttgttgttgacggggtcggcgaggtggtcggcgaggttctcgagggggcccttgccggtgacgatggcctggacgaagaagccgaacatggagaacatggcgaggcggccgttcttgatctccttcaccttgagctccgcgaaagcctccgggtcgtcggcg

SEQ ID NO: 19370 - DNA, 284 bp, Oryza sativa
  Clone ID: uC-osflcyp051b06a1
acatatgtattacatctatatataatataatatcgtacgaccaacaatagtcgacatgcatgtatatatagatcatagatgggtacgtgcaaaccaaatgatatatggaattaaaacaggccggccgggatagattagatagatagatctaattaagcaaagcatgcatgtaggagtagctaggaactgaaataatcgccagatatatatctaagccggaactagtaattaattaattaattaatggatgatcgatcgatgctaatggtatagtagtgtaagat

SEQ ID NO: 19371 - DNA, 426 bp, Oryza sativa
  Clone ID: uC-osflcyp051b07a1
ggtggcgttgtccatcgatttttttttgggcaccatcatcgccgtcgccggcggcggcgcaggctggaacgccgggaacgagtccagctccgggaaggggtcgttgtccacgatctccgactccggcgtgcgcgtctcgccccacgagtgggtgtgcgagtgcgactgcgacgtaaccatgtcggacgcctcctccttcacctccttcccctgctgcatcttctcccactcgttcttcttgttgtacagccgacacagcacccaatcatccaacctgagagatcccttcttggcgcccgcggcggcgcggccagcatcggcgagccggtactcatgcatgatccaatcaggcttgacccctcgcggcgccttgccggcgtagaacacgagcgccttcttgatcccaagcgtgcgcccccgcggcgc

SEQ ID NO: 19372 - DNA, 407 bp, Oryza sativa
  Clone ID: uC-osflcyp051b08a1
gcgtggggcgcgaggcagtcttttagcggcgaagaccgccgggtgcggagtcgccgcgtcgcctgtcgacatgaaccctgcggcgtggcctcccttgcagaagcagcagcacgcgccggcacccggagtcgggggtggcggcggcggcggcatgcgcgccgtgttcctcaccccgcccggcgccaagcgcgagcgcaacggcaccggcgtcttcctccctcgcccggccggcgcaccggcggagcccaagagaaagacaggctgctcgactgttcttgtccccgcccgtgtcgtgcaagcgctcaatctcaacctcgacgacctcggcgcccagcctcgctacccccgcggtttccgttctcgatcacgacgctttgattaaacccgagcaacgccatgctggccag

SEQ ID NO: 19373 - DNA, 321 bp, Oryza sativa
  Clone ID: uC-osflcyp051b09a1
cctcccctgaagattaaaatatatacaacataactcttggacaaaaaaaaaaaaaaaattttaacaacgggggggaaaaaaaaggcccccaaaaccccttaaaaaaatgggaaaaaaaaaggaaaaccctcccttgcacccccgaaggggggaaacacaaaaaaaaatacggcgggaagaaaaaaaaaaagggggccccttttaacggggaaaaaaaaaaaccccccggagcgcccccaggggccccccccagagaaagggcaccctatgatgtttaaaaaaggacacaaaagagggggaaaaaaaaaggcaaacggggaa

SEQ ID NO: 19374 - DNA, 461 bp, Oryza sativa
  Clone ID: uC-osflcyp051b10a1
acaaaacacaacacaaacttttctttcaattgaaagctattacttatccatttacacaaggtcaaactcaaatcaccctccttcatactgggtgactaacaagttcatgctatactaagaaacacgccttaggtatatgcgataaatacaacagaacaaacaagagattttgtttgttgatgtgcttttaaccacccaaaagtggttagtttctgatcattgccttctcagtaagaaagctctccatctttagcaatgcctcaatagcaatggcacttggtgtaagtgtcgtcacattactatgtccttgtttcactgcaatatgttcgagtgaaaccctggcatcagcattagcatatgagtccattctttgtccaaaaagtgcagtcagttttgcataagcctttgcataaggatcaccagattcttgatgcaagaggggccgagaagcagttcctact

SEQ ID NO: 19375 - DNA, 401 bp, Oryza sativa
  Clone ID: uC-osflcyp051b11a1
cggcgaaatcaactcaaggccgttaatgcgacgagaaccatcttccaactcgaccggccttgcagcatcggctaccgggtgaccacatggcgatcaatcgatcgagctctcaattctcaaatcgcagacgtgacgtcgtggcgatgatcatcagcgcgagtgcatgtgtccaaggcttcccagcgcgagccaatcctcgcgcctttccacggccgccttcgctttcttcgccggcggctgctcctcctccgccgccgcagcacggacgacgtacgacgaccgcgcggaggcgggggtggccttgcgcttcgccaggaaccgcttcagcgacgccttcctcgcgatcggcatgtccaccagcgcgggcggcgcctctggcgcgccgccgccgccctgcgccg

SEQ ID NO: 19376 - DNA, 303 bp, Oryza sativa
  Clone ID: uC-osflcyp051b12a1
ctatatatgcattacatctatatataatataatatggggcgaccaacaatagtcgacatgcatgtatatatagatcatagatgggtacccgcaaaccaaatgatatatggaattaaaacaggccggccgggatagattagatagatagatctaattaagcaaagcatgcatgtaggagtagctaggaactgaaataatcgccagatatatatctaagccggaactagtaattaattaattaattaatggatgatcgatcgatgctaatggtataggagagtaagaaggatggatggatggata

SEQ ID NO: 19377 - DNA, 271 bp, Oryza sativa
  Clone ID: uC-osflcyp051c02a1
ggagaagtaaaatacttaaaagtaaaagactttttgatggagtattacaacaggcagcaggggcattaataccccaggacattaattaagtgacccaatggggggctccatttgggtttttttaaatgaagtcgataacaaaatttgtgtggccttggagaggaacactgggatatcatgggcttggaattaacaatgggaggcatacaaaagagggcccaacgacaacagaagaggcgggcattggacattggcgggccttatttggggg

SEQ ID NO: 19378 - DNA, 413 bp, Oryza sativa
  Clone ID: uC-osflcyp051c03a1
attaaacaaaaaatgcatgatctattgctcttgcattgaaactaaaagcaaattgtttagggaactacatcccaaaatggaataagcgctgatatataagatttaagattcggatttggtgctctcgtctataattgtcagagagaccccctcacggtatcctcaactcaaatttcgtctttctcagaaaagcaactctttgtatcagtcaaaaatttgcagtattattttccagacaaagcacaaagcagctctcaggctgcgattggtggcgcgcgcggagtttatatgtcgaggagcaatctccgtgggtctttaaccacgtccttgatgcggcgcaggaagtagacagcttctctgccgtcgatcagcctgtggtcatatgtcagcgcaagggacatcattggccttgc

SEQ ID NO: 19379 - DNA, 443 bp, Oryza sativa
  Clone ID: uC-osflcyp051c04a1
acaatgcgattttatatttcaaagttttaaaatatcatacatcaatttgatttctcagtagcagcatgaaagcataatacaactccactaatttataacctcgatacacgccaaacatgaccatttcaacaccatctttaagtgttgggattaattgcaaataagaaatacacaagttatatgggctccaaactgggtacatcccgtcaatcaattggtatgttatgtacaaccaaccgttcaaatcttgccaaactcttttgttgagcagaagtataacttctggcagagcaatgaagatactctaacgaatcaaaacgctctcgcatcacctgagagaagaggctcggtgacggtgatgatggcagcagcggtgacaccattggtcagcacaagccgcctcggcactgaccctgaacccaccattcgctcgctctatgacg

SEQ ID NO: 19380 - DNA, 442 bp, Oryza sativa
  Clone ID: uC-osflcyp051c05a1
ggcgggctaacacgcgcttttattaatacaggcattaacgtcagccatcccaaatttcaccagacggggctcaagttcacaaatcaaatggcgcaacaggacacatttcacaaatcaaacagcgcagcaggaaagtcataacagtccagaacacaggaataaccccatgggagtagcttttatttggggcaatttagggacgagaagcatacctagcagggacatgccacagttgcatttctttgaaacgaaaagcagcggaaagcttttcagagcttcgagatgaggccgttctggatggctttgggcgactcggtttccttgatgtcagcgtcggaggagccgggaggcacgtcgaccgccggcgagcagttgaagaacccatggggcatgagcatgaagccgatgcgttccactggcatgacaggccagtcctccagcc

SEQ ID NO: 19381 - DNA, 420 bp, Oryza sativa
  Clone ID: uC-osflcyp051c06a1
aggttgttgtcagggaaaatgccttaaatgttacaaatgtgtcaaaatacaccaaggggcaaataagttagggttaaactttaaagacatcagcttagcctacaaaacaggaaccagctcaggaaaaagaagggacgacttgcatatagaaaaattacaagtatgaattccatgaatatgacgatggtatatcttctacaatccgcagatctgggatatgcgcaatcttgtgccaatcacgacctttactttttcgacatcgccgcattaatactgggttacaaccaaggatttgaagcctccgcaaggaggaaggaagttctggaagtgactggattaacataacttttgtaaactctaaggattcaagggaggtgaggcttgccatgattgagggcagaaattccagatgggaagcat

SEQ ID NO: 19382 - DNA, 300 bp, Oryza sativa
  Clone ID: uC-osflcyp051c07a1
ggaaaagcactagtaacattcacttgggttcaagaatattttcacaaacatacggaattaatttacagcatacacacttcgttcttttgggatttgtctctttggcgtcctaattaattataatcaacaataccaattttacaacacaatcaataattgggggccaacagtcctaataataatggctaatgcaattttcaatgatgatgaatgaatatttcaataggcccagagggacccgtcgggatgatccatgcgttgctgccgcgacaaccaccagatctcgccggggttcacctc

SEQ ID NO: 19383 - DNA, 387 bp, Oryza sativa
  Clone ID: uC-osflcyp051c08a1
caaaaaaaatattataaccttgaagtatttgaatatgatatagcagacagccagtccgttgctctttatttaaggggtgtgaaaatccaaaaaataaagaaagaagaagaagaagagaagagaagaggagaaaatgaaaggagagaagatcgatcgagggcctgaagtatccatggcatgtatgcaatcgtacacgtagagatgtgatgtgactggatcggagctagacaaggaggggcttgccgcggcccatggtgaagccgcgggtgccgtcgggcatcctggggccgtgggcgtgaggaggcggctggcgtgggctggaggggcacttgtggcgggggctcgccggcagcttgtgacgagggctcgccggctcgaagtgcccca

SEQ ID NO: 19384 - DNA, 407 bp, Oryza sativa
  Clone ID: uC-osflcyp051c10a1
ctatatatagcaagatcacattaaacaattttgttgcgtatcacaacgagggagtactactactgcagatttcctcagcaagaagctggagtagctagtagctaggaccaagacatttggccaacatgcaattcataaaacgtataggattacacgtacgcacagatcgtgtacatactgaagaaaattaagatcgaacatgcacacagggagcgtgcaacataaagtatacagctgatacagagagagagtggagcgctgcatgtctgccgcagctgttattttaattactttgttcatatatgctgtagcaaggacgtgcttaattactagctgatcaactccgattgagctagcatgttaagctcgatcgatcgatccaagcaggattgatttaactgaccttt

SEQ ID NO: 19385 - DNA, 449 bp, Oryza sativa
  Clone ID: uC-osflcyp051c11a1
aataaaccaataattttattttttattatgttacatgtccttatttaactccctgtggaaacgcaaacaaaaaccataagctcgacataccttttggggggaggataaaaatgcgacatggggcattcatccccacacagaaaaagaactggtttcaataaataccccccataccgggatgatgattagagccgggaagaacaaccaattggggccaccgagaaggaaaaaaagtttctgggcagagtatgcaaaaaagtggggtcaaggaaaaaaatgggcgcactgaaagaccaaatggctcccgtaaccatagcccatcttgtgttcagggctgcacacgaacactttaaggggccggacatcgcatttgcccacgctgaccttgacctttccagttttaaagttgcttaatcccaaatgatacccccccaactttttaaaaacag

SEQ ID NO: 19386 - DNA, 295 bp, Oryza sativa
  Clone ID: uC-osflcyp051c12a1
aaaaaaccgggaaaaaagcaggggggcccccccaaattttccaattatggggggaaaaaaaaattagggcctgcctgggcaacaaccttttgttccagataaaaggccacccggagggaaaaacccccttttttttcccaaaaaaaaattggggcccggggggggcaaacaaaaaattttcaatttttaaagggatgggcccctttgggtccctcccaccctttggggaaaaaaattcgcccccggggttttactattttgggggccccccccctcaagggggggggggtctggg

SEQ ID NO: 19387 - DNA, 358 bp, Oryza sativa
  Clone ID: uC-osflcyp051d01a1
agctatatgtatgtgtaataatctctagctctgtttggtacacgtaccccttgaaaaggagcaaaacgtacgagacgaacacacaagaagaagaaagctagctagcgtgaccgggccgatcaaccatggatgcacacacatgcatgcatggtgattgatcgagaccttagctagctcatcttttattccagaatacagatatgatactactaggactggatacagaatgaggattcacacattgacccaggcagaatctactaggtggcaaccggcgcgctgctgtatatatgtgatccgcctctctgatcgatggcttacctcacggtggagcaacttttggaagcgctgatggtgt

SEQ ID NO: 19388 - DNA, 131 bp, Oryza sativa
  Clone ID: uC-osflcyp051d02a1
catccggatgctcacgcctatgctgtcggcgggggcggaggcgaagggggggtgaggctaggggtgccagagaggagaggaacacccacccgatggccgggaccagagggagacccaacctacggaccaag

SEQ ID NO: 19389 - DNA, 317 bp, Oryza sativa
  Clone ID: uC-osflcyp051d03a1
cgacttcgttttctctgctttttttttagcaccggcgacaatacaaaatctacactagattgagagcaagcgccgcccaaccctcaccggggattgctatcgcctgcaggctcacttaaataacacgctggggattcacaacagagaggagagagagaaccttgaacagagcaggccacttggagcgacatacccacccggagcgcgtttgtggccgcccgcgaaaccataaccggcaccatgttgcttctcagccctgcttataacctgtcgagggacacggtggaagcacaacggtgacatgatactggccaatg
